United States Patent Application Publication US 2011/0214205 A1 - sequence listing, part 20

SEQ ID NO: 85546 - protein, 562 aa, Setaria italica
  Transcript Sequence Number=SeqID_19572
  Gene Ontology: Mol. function=kinase activity; Biological process =carbohydrate metabolic process
  Homolog annotation: Hit_ID=B6T9R4; Match level="QueryCoverage=100%, HitCoverage=100%, E-value=0.0, Identity=89%"; Hit description =Xylulose kinase
  Pfam annotation: Domain name=FGGY_C; Domain location=294-536; Score= -41.7; E_value=0.00027; Accession=PF02782.8; Description=FGGY family of carbohydrate kinases, C-terminal domain
  Pfam annotation: Domain name=FGGY_N; Domain location=12-290; Score =25.7; E_value=1.2e-11; Accession=PF00370.13; Description=FGGY family of carbohydrate kinases, N-
  Pfam module annotation: Pfam domain module=FGGY_C::FGGY_N; Domain location=294-536::12-290
MAGRGSLPEGSLFLGFDSSTQSLKATVLNNELAIVASEIVNFDSELPHYKTEGGVYRDSTDDGHIFSPTIMWVEALELLLEKLKPKINFSKVVAVSGSGQQHGSVYWKKGSQAVLSSLDPSKSLSPQLKDAFSTTNSPIWMDSSTTKQCRELENAVGGALELAKLTGSRAYERFTGPQIRKIYQTEPNVYEDTERISLVSSFMASILVGSYASIDETDGAGMNLMDINQRTWSKTVLEATAPGLEAKLGNLAPAYSAAGRIATYFVERFQFDKNCLVIQWSGDNPNSLAGLTLNTPGDLAISLGTSDTVFGITAEAKPSLEGHVFPNPVEPDGYMVMLCYKNGSLTREDVRNRCAEKSWDVFNNYLEKTPPLNGGKLGFYYKDHEILPPLPVGFHRYMVENLDDASSDNLIERELSEFDPPSEVRAIIEGQMLSMRGHAERFGMPNPPKRIIATGGASSNESILRALAQIFGCPVFTVQRPDSASLGAALRAAHGWLCNAGGSFVPISCLYEGNLEKTSLGSKLAVPAGDKEEDRELLKKYTLLMRKRMEIERRLVETIGRA

SEQ ID NO: 85547 - protein, 89 aa, Setaria italica
  Transcript Sequence Number=SeqID_19573
VSKNNYMGTEHTHLQEQFLQAQVSNTITKQSPKLTLLSNPRNKGRTKHFRIGGTPPAANQSLPNHECLSHLSEEGGRIGESVLERKVGI

SEQ ID NO: 85548 - protein, 90 aa, Setaria italica
  Transcript Sequence Number=SeqID_19574
  Gene Ontology: Mol. function=protein tyrosine kinase activity; Cellular component=integral to membrane; Biological process=protein amino acid phosphorylation
  Homolog annotation: Hit_ID=Q84SY9; Match level="QueryCoverage=87%, HitCoverage=18%, E-value=1e-38, Identity=94%"; Hit description =Protein kinase family protein, putative, expressed
SQIASALEYLHFGVKPAVVHRDVTSSNIFVEADMRARLGDFGLSRLLAPPDACSTGTARELVCCTAPQGTPGYLDPDYHRPSFTYEQLRA

SEQ ID NO: 85549 - protein, 350 aa, Setaria italica
  misc_feature (146)..(146): Xaa can be any naturally occurring amino acid
  misc_feature (178)..(178): Xaa can be any naturally occurring amino acid
  Transcript Sequence Number=SeqID_19575
  Gene Ontology: Mol. function=DNA binding; Biological process =regulation of transcription
  Homolog annotation: Hit_ID=B6TAS1; Match level="QueryCoverage=85%, HitCoverage=85%, E-value=1e-74, Identity=54%"; Hit description=DNA binding protein
  Pfam annotation: Domain name=Myb_DNA-binding; Domain location=225 -276; Score=38.4; E_value=2.8e-08; Accession=PF00249.23; Description =Myb-like DNA-binding domain
MGLDVAEIGMGLDLGLDLKLFAARSAGGMAAAAAKGAPAGIEACIRSLEEERRKIEVFRRELPLCVRLLADVIEELKDEAAKRGEDLELEMKADDGDKKKWMSTAQLWVDSDAKSKSEKEKRSEMTSPEPKLLGSPMPIRAVPAVXPPRPPPCFRGDDNAASTVGLPGLSLLPPAAKXSISPAPAVDEHRQNATARFSAPMSPSGPALNLHAQTQQQQQQARKARRCWSPELHRQFVAALHQLGGPQVATPKQIREVMQVDGLTNDEVKSHLQKYRLHNRRSPGVAPVSQSIMLVGGLWVPQEQTSSQSGSPQGPLQFSGSGMAVSAATVGGDGSSSDEDDKSDESYSRK

SEQ ID NO: 85550 - protein, 136 aa, Setaria italica
  misc_feature (7)..(7): Xaa can be any naturally occurring amino acid
  Transcript Sequence Number=SeqID_19576
  Gene Ontology: Mol. function=ATP binding; Biological process=apoptosis
  Homolog annotation: Hit_ID=Q8H5J9; Match level="QueryCoverage=92%, HitCoverage=22%, E-value=1e-30, Identity=51%"; Hit description =Fusarium resistance protein I2C-5-like
CSSKRKXQILEQLEDALDNLSTMIIDMKELVLFLTSYPHLYRQPYSMHLLLGKCMFGRQMEAYLVLNFLLHTQPNGAEELEVLPVVGPSKVGKSTLVAHVCNDERVRDHFSEIMFLSNHDFKYEKLTYLREGCVKK

SEQ ID NO: 85551 - protein, 124 aa, Setaria italica
  Transcript Sequence Number=SeqID_19577
  Gene Ontology: Mol. function=electron carrier activity; Cellular component=integral to membrane; Biological process=oxidation reduction
  Homolog annotation: Hit_ID=Q6ZD82; Match level="QueryCoverage=95%, HitCoverage=33%, E-value=4e-38, Identity=64%"; Hit description =Putative cytochrome P450
HIAANQSRKQTKLLPPSPPGLPVIGNLLQVGNHPHVSLRDLAAKHGGGLMLLRLGTVPNLVVSSPRAARAVMRTHDHVFASRPASTLVDSLVYGSSSVGFAPYGEHWRQARKLVTTHLLTVRKV

SEQ ID NO: 85552 - protein, 331 aa, Setaria italica
  Transcript Sequence Number=SeqID_19578
  Gene Ontology: Mol. function=DNA topoisomerase (ATP-hydrolyzing) activity; Cellular component=mitochondrion; Biological process=DNA topological change
  Homolog annotation: Hit_ID=Q5NBJ3; Match level="QueryCoverage=100%, HitCoverage=45%, E-value=1e-178, Identity=90%"; Hit description=DNA gyrase subunit B, chloroplastic/mitochondrial
  Pfam annotation: Domain name=DNA_gyraseB; Domain location=1-85; Score= 2.6; E_value=2.1e-07; Accession=PF00204.17; Description=DNA gyrase B
  Pfam annotation: Domain name=DNA_gyraseB_C; Domain location=252-318; Score=130.8; E_value=4.3e-36; Accession=PF00986.13; Description=DNA gyrase B subunit, carboxyl terminus
  Pfam annotation: Domain name=Toprim; Domain location=112-217; Score =38.5; E_value=2.7e-08; Accession=PF01751.14; Description=Toprim domain
  Pfam module annotation: Pfam domain module=DNA_gyraseB::DNA_gyraseB _C::Toprim; Domain location=1-85::252-318::112-217
DITLSGEHVREGMTCVISVKVPSPEFEGQTKTRLGNPEVRRIVEQSVQENLTEYLELHPDVLDSILSKSLNALKAALAAKRARELVRTKSVLKSSSLPGKLADCASTNPEESEIFIVEGDSAGGSAKQGRDRRFQAILPLRGKILNIERKDEAALYKNEEIQNLILALGLGVKGEDFKKEALRYHKIVILTDADVDGAHIRTLLLTFFFRYQRALFDEGCIYVGVPPLYKVERGKQAHYCYDDADLKKIVNTFPANASYHIQRFKGLGEMMPAQLWETTMDPERRLLKQLKVEDAAEANVVFSSLMGTRVEYRKQLIQNAASMINIDQLDI

SEQ ID NO: 85553 - protein, 103 aa, Setaria italica
  Transcript Sequence Number=SeqID_19579
  Gene Ontology: Mol. function=serine-type carboxypeptidase activity; Cellular component=extracellular region; Biological process =proteolysis
  Homolog annotation: Hit_ID=Q53PB1; Match level="QueryCoverage=100%, HitCoverage=46%, E-value=7e-26, Identity=57%"; Hit description =Serine carboxypeptidase
MAILLVFLCLFNIASAAERNLVDSLPGYEGALPFRLETGYVNVDEKNGAELFYYFIESEDDPRRDPLLLWLTGGDHCTVFSGLAFEIGPVKFIREPYNGSVPR

SEQ ID NO: 85554 - protein, 115 aa, Setaria italica
  Transcript Sequence Number=SeqID_19580
  Gene Ontology: Mol. function=nucleotide binding; Biological process =defense response
  Homolog annotation: Hit_ID=A7LM74; Match level="QueryCoverage=99%, HitCoverage=38%, E-value=2e-33, Identity=62%"; Hit description =Jasmonate-induced protein
  Pfam annotation: Domain name=Jacalin; Domain location=1-114; Score =93.6; E_value=6.7e-25; Accession=PF01419.9; Description=Jacalin-like lectin domain
VQSGVVIDAIAFSYVDQAGQKRTAGPWGGSGRNSETIQLGPSEFVKGISGTVGLYRSCKVIASLTFVTNVRTCGPYGLGDGTPFTVPVEDNHSVVGFFVRSKTYLDAIGVYVQPQ

SEQ ID NO: 85555 - protein, 108 aa, Setaria italica
  Transcript Sequence Number=SeqID_19581
AVIGLETGTSLPAPCSLQHTADPEQSEQPPEIGPNRAGPPASGAAAAHPYPDTDAGRQRRKERMSPHPGCTSGGGRSRSSRGSADPASGDRRRDQRVEAPVTLQLVGV

SEQ ID NO: 85556 - protein, 96 aa, Setaria italica
  Transcript Sequence Number=SeqID_19582
  Gene Ontology: Mol. function=oxidoreductase activity
  Homolog annotation: Hit_ID=Q10PC8; Match level="QueryCoverage=76%, HitCoverage=11%, E-value=2e-34, Identity=86%"; Hit description =Hydroxyproline-rich glycoprotein family protein, putative, expressed
MANAAAVITTPAPGVAAAAEPAGWLMDERDGFISWLRGEFAAANAIIDLLVVHLRSVADPGEYDHVAAAVQQRRHHWAPVIHMQQFFPVADVAFAL

SEQ ID NO: 85557 - protein, 128 aa, Setaria italica
  misc_feature (16)..(16): Xaa can be any naturally occurring amino acid
  misc_feature (36)..(36): Xaa can be any naturally occurring amino acid
  Transcript Sequence Number=SeqID_19583
  Gene Ontology: Mol. function=ubiquitin-protein ligase activity; Cellular component=ubiquitin ligase complex; Biological process =ubiquitin-dependent protein catabolic process
  Homolog annotation: Hit_ID=B6TRN1; Match level="QueryCoverage=71%, HitCoverage=20%, E-value=6e-20, Identity=64%"; Hit description =Photoperiod responsive protein
PPPAAASSARTSSPAXSLVRQVAASDAGADPSPALXRELAAYLSDDDVDDFEKNALVGAGRAAETVASVLRRRGDEEVGVEGVEAATRVLAAIVASDGIDDANKKRVAAGLAADAAASAASLARVMRG

SEQ ID NO: 85558 - protein, 45 aa, Setaria italica
  Transcript Sequence Number=SeqID_19584
GAPGEGPLNVRRPLVVFKDGFRTRQYCLIECSDICNRIQDGKDGP

SEQ ID NO: 85559 - protein, 198 aa, Setaria italica
  misc_feature (167)..(167): Xaa can be any naturally occurring amino acid
  Transcript Sequence Number=SeqID_19585
  Gene Ontology: Mol. function=drug transporter activity; Cellular component=membrane; Biological process=multidrug transport
  Homolog annotation: Hit_ID=Q9FR32; Match level="QueryCoverage=100%, HitCoverage=44%, E-value=5e-68, Identity=62%"; Hit description =Ripening regulated protein DDTFR18
  Pfam annotation: Domain name=MatE; Domain location=1-115; Score=13.9; E_value=0.00039; Accession=PF01554.10; Description=MatE
LGMASALETLCGQAYGAKKYHMMGVYMQRSWIVLLVCAVLLTPMYFFAEDVLLLTGQPPELSAMAGQVSVWFIPLHFSLAFLFPLQRFLQCQRKNLVNAVAAAAALCIHLFISWLFVSKLQFGLVGVALTLGFSWWAITVMLFVYVTCGGCPETWHGFTVEAFAGLXEFVKLSAASGVMLCLENWYYRILILLTGNLK

SEQ ID NO: 85560 - protein, 194 aa, Setaria italica
  misc_feature (7)..(7): Xaa can be any naturally occurring amino acid
  Transcript Sequence Number=SeqID_19586
  Gene Ontology: Mol. function=hydrolase activity, hydrolyzing O -glycosyl compounds; Biological process=carbohydrate metabolic process
  Homolog annotation: Hit_ID=Q25AK4; Match level="QueryCoverage=100%, HitCoverage=34%, E-value=4e-98, Identity=87%"; Hit description =H0510A06.1 protein
GWPLFFXSEFGFDMSGTHIGDNRYLTCFLSVAAEMDLDWAIWALQGSYYIREGILAYDESYGLLSWDWCTARNPSFIKRINSLQSPFQGPGLPNSREPYNLIFHPQTGLCVLATSSKSLELGPCDRSNAWNYTSAYELVVKSSGQCLQAKSVGENAKLGTDCSKPSSKWQLISNSRMHVSAELTKNGTRVCLDA

SEQ ID NO: 85561 - protein, 291 aa, Setaria italica
  misc_feature (146)..(146): Xaa can be any naturally occurring amino acid
  Transcript Sequence Number=SeqID_19587
  Gene Ontology: Mol. function=endoribonuclease activity; Cellular component=lysosome; Biological process=response to stress
  Homolog annotation: Hit_ID=B6TDK4; Match level="QueryCoverage=82%, HitCoverage=81%, E-value=1e-128, Identity=90%"; Hit description =Ribonuclease 2
  Pfam annotation: Domain name=Ribonuclease_T2; Domain location=57-248; Score=193.3; E_value=6.5e-55; Accession=PF00445.10; Description =Ribonuclease T2 family
METRRHRRGRKRLLLPLSLLCLAVLLPSALLAPSASASSSPEAAAAGGSRKRRWAGFDYYVLALQWPGTICRQTSNCCDTNGCCRSKPLKWFTIHGLWPQYNYGGWPSCCRPARFNINKILMLMPILEKYWPSLYCGSSSTCFGGXRGPFWVHEWETHGTCAYPEIQDEYDYFSTALYLYSKYNVTKALRKAHIRPASSRRYAVGHIVAVIEYAFGAMPSLVCKNGSVQELRLCFHKDYQPRDCTFETDKATNSRSYCPRYVTFPSYKPSVLANATEGIIDQASGELHAYG

SEQ ID NO: 85562 - protein, 103 aa, Setaria italica
  Transcript Sequence Number=SeqID_19588
  Gene Ontology: Mol. function=catalytic activity; Cellular component =peroxisome; Biological process=metabolic process
  Homolog annotation: Hit_ID=Q69RG7; Match level="QueryCoverage=97%, HitCoverage=17%, E-value=7e-18, Identity=47%"; Hit description=4 -coumarate--CoA ligase-like 7
AHFPAASAFHERFPDVELSLALGSTEGGLISNMAGHQECHRIKSTGRLCSGVEAKVVDIDSGELLPINEQGELCIRGPGVMLGYVGATTFTYTFIIHFEHKGW

SEQ ID NO: 85563 - protein, 105 aa, Setaria italica
  Transcript Sequence Number=SeqID_19589
  Gene Ontology: Mol. function=DNA binding; Cellular component=nucleus; Biological process=regulation of transcription
  Homolog annotation: Hit_ID=Q4H2B1; Match level="QueryCoverage=67%, HitCoverage=22%, E-value=5e-21, Identity=66%"; Hit description =StPCL1 protein
  Pfam annotation: Domain name=Myb_DNA-binding; Domain location=15-65; Score=43.5; E_value=8.3e-10; Accession=PF00249.23; Description=Myb -like DNA-binding domain
GSGACRGGRAGKKARMVWTPELHHRFVEAVAHLGDKGAVPKAIVRLMNVEGLTRENVASHLQKYRIYLKRTRNPAAPQPAPHFPTAYGSPFNPQPPSDPSSRSWL

SEQ ID NO: 85564 - protein, 143 aa, Setaria italica
  Transcript Sequence Number=SeqID_19590
  Gene Ontology: Mol. function=DNA binding; Biological process =regulation of transcription
  Homolog annotation: Hit_ID=Q10PU3; Match level="QueryCoverage=97%, HitCoverage=15%, E-value=5e-46, Identity=64%"; Hit description=No apical meristem protein, expressed
  Pfam annotation: Domain name=NAM; Domain location=1-124; Score=-12.7; E_value=3e-06; Accession=PF02365.7; Description=No apical meristem (NAM) protein
DSDLLWHLAAEAGNGLAERHPFINEFIKSVDDGRGFSYTHPTHPRDMPGVRHDGRASYFFHRRFESYNNEGDENNSWKKIGASRSIILDGTLQGCKEVFVLYEDMMSDKSPQETDWRLHQFHIRNTVKDEGEVVVSKILLLTL

SEQ ID NO: 85565 - protein, 161 aa, Setaria italica
  Transcript Sequence Number=SeqID_19591
  Pfam annotation: Domain name=Glyoxalase; Domain location=27-154; Score=25.2; E_value=0.00027; Accession=PF00903.17; Description =GlyoxalaseBleomycin resistance proteinDioxygenase superfamily
MAEVATNGSEVLAAPAAVPAPAVFSGLKVQVTVPAGRAEEAVAFYKAAFAAEEVSRSTHPKRKGDGEAAALLCAELKVGAATLLVCDQAGDDVPAVGKEGAAASGLVLRLETDDVNAAAAQAATAGAALQGEVTEDGCGLGATLVDPFGVAWAFVGGGGWW

SEQ ID NO: 85566 - protein, 93 aa, Setaria italica
  misc_feature (42)..(42): Xaa can be any naturally occurring amino acid
  misc_feature (47)..(47): Xaa can be any naturally occurring amino acid
  Transcript Sequence Number=SeqID_19592
  Subcellular localization annotation: CTP_CleavageSite=74; ConfidenceScore=5.84e-01
RRRGRRGWRPARSRPRLPPPAAPHRRSPPAPRQRSRRRSPGXRTSPXPRRLPCPRRGRRRRPGHRRAGSPRRPSARRRAGPPPPVSLRSFGSS

SEQ ID NO: 85567 - protein, 58 aa, Setaria italica
  Transcript Sequence Number=SeqID_19593
  Subcellular localization annotation: CTP_CleavageSite=38; ConfidenceScore=5.21e-01
HFLSGSIDSSCSNGSSAPAPTPLPAPKNFSLNPCELAYCGTGGTCRNGSGLSYHCECK

SEQ ID NO: 85568 - protein, 222 aa, Setaria italica
  Transcript Sequence Number=SeqID_19594
  Homolog annotation: Hit_ID=B6SSE6; Match level="QueryCoverage=81%, HitCoverage=78%, E-value=7e-61, Identity=67%"; Hit description =Neurogenic locus notch protein-like
  Pfam annotation: Domain name=EGF; Domain location=118-150; Score =12.7; E_value=0.55; Accession=PF00008.19; Description=EGF-like domain
  Pfam annotation: Domain name=EGF; Domain location=43-75; Score=8.6; E_ value=1.2; Accession=PF00008.19; Description=EGF-like domain
  Pfam module annotation: Pfam domain module=EGF::EGF; Domain location =118-150::43-75
MVLAAGVQRAAALVALLAVTAATADDFFSPLAPIFAPVINSICSTVACGKGNCTVAPGTLGYRCECDPGWTQLHVGDELRFLPCVIPNCSIDSSCSNGSSAPAPTPLPAPKNFSLNPCELAYCGTGGTCRNGSGLSYHCECKEGYSNLLNMTTLPCFQNCSIGADCSRIGILPFSNSSNKSPAPPSSESISNNGIAAAPGSISQRILMPLLLIVSLAVSQVI

SEQ ID NO: 85569 - protein, 817 aa, Setaria italica
  misc_feature (495)..(495): Xaa can be any naturally occurring amino acid
  misc_feature (803)..(803): Xaa can be any naturally occurring amino acid
  Transcript Sequence Number=SeqID_19595
  Gene Ontology: Mol. function=protein binding; Cellular component =nucleus; Biological process=RNA metabolic process
  Homolog annotation: Hit_ID=Q9AWB3; Match level="QueryCoverage=100%, HitCoverage=89%, E-value=0.0, Identity=83%"; Hit description=Nuclear cap-binding protein CBP80
  Pfam annotation: Domain name=MIF4G; Domain location=1-175; Score =25.3; E_value=0.00025; Accession=PF02854.11; Description=MIF4G domain
  Pfam annotation: Domain name=MIF4G_like; Domain location=251-414; Score=157.3; E_value=4.6e-44; Accession=PF09088.3; Description=MIF4G like
  Pfam annotation: Domain name=MIF4G_like_2; Domain location=430-718; Score=265.4; E_value=1.4e-76; Accession=PF09090.3; Description=MIF4G like
  Pfam module annotation: Pfam domain module=MIF4G::MIF4G_like::MIF4G _like_2; Domain location=1-175::251-414::430-718
CAEQLPHKIPFFGVLIGLLNLENEDFAKDIVDTTQAKLQDALHTENRDRIRILLRFLSGLMCSKVVVPNSIIETFETLLSSAATILDEDTGNPSWQPRADFYVYCILASLPWGGPELFEQVPDEFERVLVGIQSYISIRRHFDDIAFSVFETDEGHSPNKKDFIEDLWERIQILSRSGWKVKSVPKPHLSFEAQLVAGKSHRLSPISCPPPNLSPTSSEILKGQEKHEADLKYPQRLRRLHIFPTNKAENMQPVDRFVVEECILDVLLFFNGCRKECAFYLVSLPVSFRYEYLMAETIFSQLLLLPNPPFRPIYYTLVIIDLCKALPGAFPSVVVGAVHALFDRISKMDMECRTRLILWFSHHLSNFQFIWPWQEWSYVKDLPKWAPQRVFVQEVLEREIRLSYFEKIKQSIEDAAELEELLPPKAGPNFKFLSDESNEKTDGHKLSKELVGMVRGKKNTRDIILWVEEQIIPTNGAEFALDVVIQTLLDIGSKXSFTHLITVLERYGQIISKLCPNEEMQLLLMDEVSAYWKNSTQMTAIAIDRMMGYRMISNLAIVKWVFSPANVEQFHVSDRPWEILRNAVSKTYNRISDLRKEIQSLKKGLQVAKEASANAIRELEEAKSVLEIVEGQPAPAERPGRLRRLQAYADKAKQEEVSMEESLEAKGALLARALEESKELLKLLFKSFVDVLTERLPTVSADGEIPNLRAGDQNVNFAARDLETATMEIDNENGADKNSEPNGQNTKDGYNVGELEQWCLCTLGYLKSFSRQYATEIWSHIAMLDEEVFIGDIHPLIRKAAFXVCADLPTKGLSFDF

SEQ ID NO: 85570 - protein, 390 aa, Setaria italica
  Transcript Sequence Number=SeqID_19596
  Gene Ontology: Cellular component=integral to membrane
  Homolog annotation: Hit_ID=B6TET5; Match level="QueryCoverage=50%, HitCoverage=73%, E-value=3e-52, Identity=54%"; Hit description =Purine permease
  Pfam annotation: Domain name=DUF6; Domain location=47-177; Score =11.0; E_value=0.018; Accession=PF00892.12; Description=Integral membrane protein DUF6
  Pfam annotation: Domain name=TPT; Domain location=197-342; Score =89.1; E_value=1.5e-23; Accession=PF03151.8; Description=Triose -phosphate Transporter family
  Pfam annotation: Domain name=UAA; Domain location=34-348; Score= -168.4; E_value=0.062; Accession=PF08449.3; Description=UAA transporter family
  Pfam module annotation: Pfam domain module=DUF6::TPT::UAA; Domain location=47-177::197-342::34-348
  Subcellular localization annotation: CTP_CleavageSite=38; ConfidenceScore=5.34e-01
MPTTTTPAPLLDDMPVPSSDATANGAARRRRRRRLLLLCANYAALLGGSVASSLLSRYYFAHGGHNRWVATLVQSVGFPVLLVPVYAGRPAAQPRPFAWFTRRLLAACVVIGVLMGVNNLLFSYSSSYLPVSTSSLLLSTQLAFTLVLAAVIVRHPLTFSNLNAVVLLTLSSVLLALRSSDSGEHPDGGSRARYFVGFAVTLGAAGLFAAYLPVMELVYRRAVSGGFRMAVEVQVIMQAAATALAVAGLAAAGGWREELARWDLSPAAYWVVVAALVVTWQACFMGTAGMVYLTSSLHSGVCMTAVLTANVIGGVVVFRDPFGSEKAVATVLCVWGFSSYLYGEYRTQQKAQEGDGKVAAAASSGDGGGVLKSDAGGGGVGGGRRRRCSS

SEQ ID NO: 85571 - protein, 79 aa, Setaria italica
  Transcript Sequence Number=SeqID_19597
TYNRIIQDYLLNQWLTTKAKHSYYHVGRKAAGNAMQSTESPKANLKDGLKSKSLCYNKIMDELNKNTRLQKYSYSLVGG

SEQ ID NO: 85572 - protein, 75 aa, Setaria italica
  Transcript Sequence Number=SeqID_19598
  Gene Ontology: Mol. function=electron carrier activity
APRKALACRRRIDRILKQIIQENKEAITDHESFVSVLLRLQNEGGMPIELTDETITALMFVSRSRKLLMNTCSCT

SEQ ID NO: 85573 - protein, 267 aa, Setaria italica
  misc_feature (63)..(63): Xaa can be any naturally occurring amino acid
  Transcript Sequence Number=SeqID_19599
  Gene Ontology: Mol. function=electron carrier activity; Biological process=oxidation reduction
  Homolog annotation: Hit_ID=Q6ATT7; Match level="QueryCoverage=98%, HitCoverage=51%, E-value=3e-88, Identity=58%"; Hit description =Cytochrome P450, putative
  Pfam annotation: Domain name=p450; Domain location=1-256; Score= -28.3; E_value=2.8e-10; Accession=PF00067.14; Description=Cytochrome P450
PRKALACRRRIDRILKQIIQENKEAITDHESFVSVLLRLQNEGGMPIELTDETITALMFDMLXGAGSDTSSTTLNWAMTELIRSPAAMAKAQAEVREAFKGKSNVTEDDVAGLSYLKLVFKETLRLHPTSPLLIPRKCRETTRVMGYDIPKGTTVFVNVWAIGRDPMYWDDAEEFKPERFETNNLDFRGTNYEFLPFGAGRRMCPGINLGLANIELALASLLYHFDWKLPQGMEPKDVDVWETVGVVASKKTSLMLHPVTFIPPPVA

SEQ ID NO: 85574 - protein, 62 aa, Setaria italica
  Transcript Sequence Number=SeqID_19600
  Gene Ontology: Mol. function=nucleotide binding; Biological process =defense response
  Homolog annotation: Hit_ID=Q2R8I7; Match level="QueryCoverage=100%, HitCoverage=6%, E-value=2e-11, Identity=58%"; Hit description=NBS -LRR type disease resistance protein, putative, expressed
MAEALLTALSKIGKVLGDEVIKIVIAEASKKVTNLRKLPENIRPIWRELNMMNKVIQDLDTT

SEQ ID NO: 85575 - protein, 279 aa, Setaria italica
  Transcript Sequence Number=SeqID_19601
  Gene Ontology: Cellular component=membrane
  Homolog annotation: Hit_ID=Q109W6; Match level="QueryCoverage=96%, HitCoverage=100%, E-value=1e-128, Identity=81%"; Hit description =Nodulin MtN21 family protein, putative, expressed
  Pfam annotation: Domain name=DUF6; Domain location=110-239; Score =29.2; E_value=1.7e-05; Accession=PF00892.12; Description=Integral membrane protein DUF6
  Subcellular localization annotation: CTP_CleavageSite=28; ConfidenceScore=5.08e-01
PVLDQNFIYMGVNNTSASFSSALTNILPAVTFVNAIILRMERINIKERRSQAKIAGTAITVGGALLMILFKGPIVNFPWTKDVSHAVSDSGAHNGGHWLMGTFMILLSCFCWSAFFILQSYTLRSYPSELSLTTLICALGATESGAVALVMERDTKTWSIGFDMRLFTAIYSGIMCSGVAYYVQGIVIKERGPVFVTAFSPLCMIIVTLLGSIILSEVVTLGRLIGATVIVFGLYALIWGKNKDHVNGNDAENNFEKHRTFELPFSTTDVNKMSSLGNI

SEQ ID NO: 85576 - protein, 178 aa, Setaria italica
  Transcript Sequence Number=SeqID_19602
NTSVRDDGKEAKYRHIRDWENREMGQSLRVRDISPRPSINGISPNGYHGEGLVDYHLKQRYRYSTRERPNERNLDGPSRVRGLEKDRAEILRMLDELRDQVQQSCEVTDGPSGSAPISRAADASSSYGTSDRLSQLRHDAPQLHRNGSHHSPSLNVRSPSVPRVYAALPAQQDRVGYA

SEQ ID NO: 85577 - protein, 447 aa, Setaria italica
  Transcript Sequence Number=SeqID_19603
  Gene Ontology: Mol. function=alkaline phosphatase activity
  Homolog annotation: Hit_ID=B6TCS7; Match level="QueryCoverage=93%, HitCoverage=93%, E-value=0.0, Identity=84%"; Hit description =Alkaline phosphatase D
  Pfam annotation: Domain name=PhoD; Domain location=1-358; Score= -191.6; E_value=0.00014; Accession=PF09423.2; Description=PhoD-like phosphatase
MAATFPLLLLLHLVLAPCARAADAVVSRIAFGSCANQSAPQPIWDAVAGFDPQVFVWLGDNVYGDNKRPFRVFGKERTVGPWKNVPRFYPSTEEELRRRYQLGRAKPGYARLREKAQVIGTWDDHDYGLNDAGKEFSGKVFTQRLMLDFLDEPEDSNRRKQAGVYTSYMFGPEGKRVKVILLDTRYHRDPLLSDGTILGDPQWQWLERELHGPQSEITIIGSSIQVVSNLSATTGPLFYVESWARFPRERERLFRLIDSSKRNGVIFISGDVHFGEIARFDCGAQYPLYDVTSSGLTQSVENSVPAVFQPIMRLLAVLTPTTMRVFSPKCRYKSCTTGQPNFGAIEIDWNAVPPRIKLELRDVEGHSVHSVEFPISELQPSGAHAIKKQEHAFQRHCTLETELPWLTRHRLALLFIGTIAAFIIAVVLLAATCLYSITRCSKKTKKE

SEQ ID NO: 85578 - protein, 152 aa, Setaria italica
  Transcript Sequence Number=SeqID_19604
  Homolog annotation: Hit_ID=B9RGG4; Match level="QueryCoverage=95%, HitCoverage=12%, E-value=3e-38, Identity=53%"; Hit description =Pentatricopeptide repeat-containing protein, putative
  Pfam annotation: Domain name=PPR; Domain location=42-76; Score=9.4; E_ value=0.7; Accession=PF01535.12; Description=PPR repeat
  Pfam annotation: Domain name=PPR; Domain location=6-40; Score=3.7; E _value=3.3; Accession=PF01535.12; Description=PPR repeat
  Pfam annotation: Domain name=PPR; Domain location=77-111; Score=12.7; E_value=0.28; Accession=PF01535.12; Description=PPR repeat
  Pfam module annotation: Pfam domain module=PPR::PPR::PPR; Domain location=42-76::6-40::77-111
GIPSMPAYCALVKGLCKIGEINAAISLVKDCLGNVENGPTEFKYTLTILEACRSKSPEKVISVVEEIIEVGCSMDEIIYSAIMYGFCKYASSTEARQVFTIMRDRNILSEANFIVYEDMLNEHLKKVTADLVISGLKLFDLESKLKWRSRID

SEQ ID NO: 85579 - protein, 51 aa, Setaria italica
  Transcript Sequence Number=SeqID_19605
  Subcellular localization annotation: CTP_CleavageSite=36; ConfidenceScore=5.32e-01
SRGRWRRGGRGRASASASRRHRSSPPHRPPGPGRPRGARGRAARRGQASRC

SEQ ID NO: 85580 - protein, 57 aa, Setaria italica
  misc_feature (1)..(1): Xaa can be any naturally occurring amino acid
  Transcript Sequence Number=SeqID_19606
XGKKQAIEERSTVGDADKISRKERLTSYQNTSLNKHNTFFQGVHSMTLVSSCRSKTT

SEQ ID NO: 85581 - protein, 58 aa, Setaria italica
  Transcript Sequence Number=SeqID_19607
  Gene Ontology: Mol. function=nucleic acid binding; Cellular component= nucleus
  Homolog annotation: Hit_ID=B6SY05; Match level="QueryCoverage=89%, HitCoverage=20%, E-value=9e-17, Identity=81%"; Hit description =Arginine/serine-rich splicing factor RSP41
GLDHTVISLNNQSLFFNVQCEGFAFVYMEDERDAEDAINRLDGVDFGRKGRRIRVEWM

SEQ ID NO: 85582 - protein, 83 aa, Setaria italica
  Transcript Sequence Number=SeqID_19608
  Gene Ontology: Mol. function=nucleic acid binding; Cellular component= nucleus; Biological process=mRNA processing
  Homolog annotation: Hit_ID=B6SU77; Match level="QueryCoverage=97%, HitCoverage=29%, E-value=3e-37, Identity=92%"; Hit description =Arginine/serine-rich splicing factor RSP41
  Pfam annotation: Domain name=RRM_1; Domain location=4-68; Score=69.5; E_value=1.3e-17; Accession=PF00076.14; Description=RNA recognition motif. (a.k.a. RRM, RBD, o
MRPVFCGNLDYDVRISEIERLFGKYGRVERVDLKTGFAFVYMEDERDAEDAINRLDGVDFGRKGRRIRVEWTKEDRSAGTKRR

SEQ ID NO: 85583 - protein, 264 aa, Setaria italica
  Transcript Sequence Number=SeqID_19609
  Gene Ontology: Mol. function=nucleic acid binding; Cellular component= nucleus
  Homolog annotation: Hit_ID=B6SU77; Match level="QueryCoverage=71%, HitCoverage=67%, E-value=5e-69, Identity=73%"; Hit description =Arginine/serine-rich splicing factor RSP41
  Pfam annotation: Domain name=RRM_1; Domain location=71-134; Score =54.2; E_value=5e-13; Accession=PF00076.14; Description=RNA recognition motif. (a.k.a. RRM, RBD, o
FNIYVQCEGFAFVYMEDERDAEDAINRLDGVDFGRKGRRIRVEWTKEDRSAGRKGGSSRRSPTSARPTKTLFVINFDPINTRIRDLERHFDKYGRVANVRIKKNFAFVQFEVQEDATRALEGTNGSHFMDRVISVEYALRDDDEKGERGNGYSPDRRGRERSPARRRSPSPYGRGRERGSPDYGRGRERGSPDYGRGGSKRSPDYGSNGGGRGDERGSPNYDRERREASPRRERREASPRRERREASPGYDRPPSHSPGRDDRD

SEQ ID NO: 85584 - protein, 71 aa, Setaria italica
  Transcript Sequence Number=SeqID_19610
  Gene Ontology: Mol. function=protein serine/threonine kinase activity; Cellular component=plasma membrane; Biological process =protein amino acid phosphorylation
  Homolog annotation: Hit_ID=B2KTA9; Match level="QueryCoverage=67%, HitCoverage=8%, E-value=7e-22, Identity=93%"; Hit description =Calcium-dependent protein kinase
KRTIDHTRTSNARILPPTNAGKVYKDIVGSAYYVAPEVLRRNYGKEIDVWSAGVILYILLCGTPPFWAGEY

SEQ ID NO: 85585 - protein, 104 aa, Setaria italica
  misc_feature (55)..(55): Xaa can be any naturally occurring amino acid
  misc_feature (89)..(89): Xaa can be any naturally occurring amino acid
  misc_feature (102)..(102): Xaa can be any naturally occurring amino acid
  Transcript Sequence Number=SeqID_19611
  Homolog annotation: Hit_ID=B6TIF9; Match level="QueryCoverage=68%, HitCoverage=25%, E-value=4e-11, Identity=54%"; Hit description =Steroid reductase DET2
  Subcellular localization annotation: CTP_CleavageSite=24; ConfidenceScore=5.09e-01
PAPRPPPLHPAFPPPLVALLSSPLAALPAVLYAFHYAHRTLVHPLRLARLRRAPXPVPLLVAACALGFNLLNAYVQARSITLHAGRLAXPFALARCAAGLAXFA

SEQ ID NO: 85586 - protein, 574 aa, Setaria italica
  Transcript Sequence Number=SeqID_19612
  Homolog annotation: Hit_ID=Q9FH12; Match level="QueryCoverage=89%, HitCoverage=79%, E-value=0.0, Identity=67%"; Hit description=Axi 1 (Auxin-independent growth promoter)-like protein
  Pfam annotation: Domain name=DUF246; Domain location=184-528; Score =638.6; E_value=5.8e-189; Accession=PF03138.6; Description=Plant protein family
FRPGVRPSEPSGSGAGPGGGGGLLHHHQGQQHHNLRFRLFKRPGSGGGAVEAGLGLGLGIRERRKLGNMLFLAFCGVCLLLGVGKIWAGGWFVLPGDDKHADLQDLSVSFSRDKGHQVDHHFGFMGGKESDRTLMTVESSIGGREESVAEAFDVWSQPSSTNFRQCIVSNSHKKQDSHTNGYILINANGGLNQMRFGICDMVAVAKILKATLVLPSLDHTSYWADDSEFKDLFNWRHFIESLKEDIDIVETLPTEYSQIEPLAKAPISWSKVSYYRDEILPLLKKHKVIYFTHTDSRLANNGIPSYIQKLRCRVNYRSLKYSHTIEDLGTTLVSRMRQDGGPYLALHLRYEKDMLAFTGCSHSLTSLEDEELRKMRYEVSHWKEKEINATERRSLGGCPLTPRETSLLLKGLGFTRSTRIYLVAGEAFGNGSMKALLDDFPNIYSHSTLATEKELAPFKNHQNMLAGLDYIVALQSDVFIYTYDGNMAKAVQGHRRFENFRKTINPDRMSFVNLVDEFDEGRVPWDIFSSEVKRLHKDRIGAPYFREPGEFPKLEESFFANPLPGCICEKHSEE

SEQ ID NO: 85587 - protein, 86 aa, Setaria italica
  Transcript Sequence Number=SeqID_19613
  Subcellular localization annotation: CTP_CleavageSite=27; ConfidenceScore=5.45e-01
RAGGKRSQAANEASSLCFSQRPRPRRRAAAATSPGGRGASAEGGSRGARGGTEGIPPSPLGPEAGSASGLAPAAGDRGAPGRRGWW

SEQ ID NO: 85588 - protein, 188 aa, Setaria italica
  Transcript Sequence Number=SeqID_19614
  Subcellular localization annotation: CTP_CleavageSite=47; ConfidenceScore=5.02e-01
GLKRPQPYGPLSPTNHHTLGNPGANGHLVYVRRRPDTDQSKGGTSARAESFNSISTKKPVAGGSQPQESSLKHQNNVPHTQSSPQFASPAAVTASPALQSTVLLAQHSFGKQSPGKITVRPTNDVITSLPPSNMVSSTPMLQSSAAADLVTSSVLATSATSTLAPDRADPPRSSNQDWSDRFIQLQAF

SEQ ID NO: 85589 - protein, 438 aa, Setaria italica
  misc_feature (194)..(194): Xaa can be any naturally occurring amino acid
  misc_feature (419)..(419): Xaa can be any naturally occurring amino acid
  misc_feature (428)..(428): Xaa can be any naturally occurring amino acid
  Transcript Sequence Number=SeqID_19615
  Gene Ontology: Mol. function=binding
  Homolog annotation: Hit_ID=B9R8W2; Match level="QueryCoverage=98%, HitCoverage=34%, E-value=1e-129, Identity=54%"; Hit description=O -linked n-acetylglucosamine transferase, ogt, putative
  Pfam annotation: Domain name=TPR_1; Domain location=21-54; Score=8.6; E_value=0.54; Accession=PF00515.20; Description=Tetratricopeptide repeat
  Pfam annotation: Domain name=TPR_1; Domain location=246-279; Score =32.4; E_value=1.8e-06; Accession=PF00515.20; Description =Tetratricopeptide repeat
  Pfam annotation: Domain name=TPR_2; Domain location=21-54; Score =15.9; E_value=0.17; Accession=PF07719.9; Description=Tetratricopeptid e repeat
  Pfam annotation: Domain name=TPR_2; Domain location=246-279; Score =33.7; E_value=7.6e-07; Accession=PF07719.9; Description =Tetratricopeptide repeat
  Pfam annotation: Domain name=TPR_2; Domain location=397-430; Score =1.5; E_value=22; Accession=PF07719.9; Description=Tetratricopeptide repeat
  Pfam annotation: Domain name=TPR_2; Domain location=62-95; Score=5.8; E_value=6.5; Accession=PF07719.9; Description=Tetratricopeptide repeat
  Pfam module annotation: Pfam domain module=TPR_1::TPR_1::TPR_2::TPR _2::TPR_2::TPR_2; Domain location=21-54::246-279::21-54::246-279::397- 430::62-95
LQLDKQVKSYGRAIELDSSRVFVLIESGNIQLMLGYFRKGVEQFRSALEMAPHNHSAYFGLASALLAWARNCVTTGAFGWAASLLKEASEAAKNCASLTGNLSCVWKLHGDVQLALARCFPWEDGKIKRGVDVQMFKDSVQEWRNACLSAANGAKLSYQRALHLTPWEANVHNDTAVCLDLIYSMDGNNRHNPXIFWELSEKMSLGALILEPVNKDFWVTLGSMSHDLALKQHSFIRALHLDMSLSEAWAYLGKIYRQAGDKQLAKEAFDRARSIDPSLALPWAGMSAENYHQSGGGTVNESFESCLRAAQILPLPEFQIGLGTIAARTGNLLSPQVLMGVRQAVRRAPHYPESHNINGLVSEVRSDFQSAIRFYHQARFALGMMYNSKSDNKYALADVSVNLARSLYKAGLATDAVRXCEELRSQGXLSMDGLQIYA

SEQ ID NO: 85590 - protein, 106 aa, Setaria italica
  Transcript Sequence Number=SeqID_19616
  Gene Ontology: Mol. function=protein binding; Cellular component =nucleus; Biological process=ubiquitin-dependent protein catabolic process
  Homolog annotation: Hit_ID=B9SAQ8; Match level="QueryCoverage=88%, HitCoverage=28%, E-value=2e-34, Identity=67%"; Hit description =Phytochrome A-associated F-box protein, putative
FRVFCFSFLFSSGCVHAEERRKYMVFRGVFHNFARSQVRRALRDTRRPTVAVDCAFCGSKEAWDLYSAFCLRSFYGYHDDGEPVVRAYVCENGHVAGAWTKRPLYS

SEQ ID NO: 85591 - protein, 105 aa, Setaria italica
  Transcript Sequence Number=SeqID_19617
NPDTPSSAVYARLHLLERMIRMSSSKDSCLLRQLLRHSRRNARTLKHLINGPSPIPEFIASWDGSFLLPLLFLSLFLLLPVTGPPHPVRRRCPRRPLARSTASRE

SEQ ID NO: 85592 - protein, 292 aa, Setaria italica
  Transcript Sequence Number=SeqID_19618
  Homolog annotation: Hit_ID=Q10KZ9; Match level="QueryCoverage=100%, HitCoverage=86%, E-value=2e-86, Identity=51%"; Hit description =Nodulation protein, putative, expressed
TFDLKAPKKSPLALRMFVFAMTMLCGISICSMCMKQLGSDGWSRIVKIEVVEQEQPCNKSTVPPSEVQFVHYPQPITYSREECKCNPVRFFAIISSQRSGSGWFETLLNSHTNVSSNGEIFSTKERRSNISSIIKTLDKVYDLDWNSSASKNECTAAVGFKWMLNQGLVANHVDVVDYFNRRGVSAIFLFRRNLLRQLVSQLANNHDRYLKQLNGTHKAHVHTKHEAIILAKYKPRLNTSSLIWQLKQADEYTHGALENLKNTRHITIYYEDLILNRTKIFDVLDFLKVPKM

SEQ ID NO: 85593 - protein, 72 aa, Setaria italica
  Transcript Sequence Number=SeqID_19619
  Gene Ontology: Mol. function=Rab GTPase activator activity; Cellular component=intracellular; Biological process=regulation of Rab GTPase activity
  Homolog annotation: Hit_ID=Q9SG14; Match level="QueryCoverage=97%, HitCoverage=12%, E-value=2e-31, Identity=82%"; Hit description =GTPase activating-like protein
THLEPYMIYHAARLVALLEAYALYDPEIGYCQGMSDLLSPIIAVMEEDHEAFWCFVGFMRKARHNFRLDEVW

SEQ ID NO: 85594 - protein, 236 aa, Setaria italica
  misc_feature (6)..(6): Xaa can be any naturally occurring amino acid
  misc_feature (200)..(200): Xaa can be any naturally occurring amino acid
  Transcript Sequence Number=SeqID_19620
  Gene Ontology: Mol. function=Rab GTPase activator activity; Cellular component=intracellular; Biological process=regulation of Rab GTPase activity
  Homolog annotation: Hit_ID=Q67XX9; Match level="QueryCoverage=99%, HitCoverage=41%, E-value=4e-24, Identity=35%"; Hit description =GTPase activator like protein of Rab-like small GTPases
QHWNRXFSSNGKLRDGGRKFLKKVRSGGIEPGIRRMPGSILLGVYDLNSSEEDRNTIKIRKRKEYEKLRRQCHRILNCYKGNGLNVINEFMNEDFSDGAEGPESPYSEGVRKRACVLPKELKSLGCKAEESESSNWASVECMDEDTSELTVVDQCMAESESSDSESSYEEDPDRTPVCSNLEENCDPKPKLVRSASSKSXIFISDKTPEDFATWQRIIRVDAIRANTDWVLFARNQ

SEQ ID NO: 85595 - protein, 452 aa, Setaria italica
  Transcript Sequence Number=SeqID_19621
  Gene Ontology: Mol. function=Rab GTPase activator activity; Cellular component=intracellular; Biological process=regulation of Rab GTPase activity
  Homolog annotation: Hit_ID=Q9FHY9; Match level="QueryCoverage=99%, HitCoverage=86%, E-value=1e-145, Identity=57%"; Hit description =GTPase activator protein of Rab-like small GTPases-like protein
  Pfam annotation: Domain name=TBC; Domain location=185-390; Score= -57.0; E_value=0.0018; Accession=PF00566.10; Description=TBC domain
RKFLKKVRSGGIEPGIRAEVWPFLLGVYDLNSSEEERNTVKIRKRKEYEKLRRQCQQILNGCKGNALKAITEVSNEECSSLEGTAEGSESPCFEDALAVCPASLEELTPEHNEAEQPENIVECMEEDTDELNYAYPCIAESESSDSESSDDDDPGRMSVSGEENCDPDPKFTRSTSFKADFFRSSRTSEDFATWQRIIRLDAIRSNSEWIMFSRNQAEVSKERAMQSAASVGLKDYDHLEPSMIYHAARLVGLLEAYAVYDPEIGYCQGMSDLLSPIIAVMEEDEEAFWCFVGFMRKARHNFRLDEVGIRRQLKIVSEIIKRKDSHLYRHLQKLQAEDCFFVYRMVVVLFRRELTFEQTVCLWEVMWADQAAIRAGIGRSTWGRIRLRAPPTDDLLLYAIAACVLQRRKLIIEKYSSMDEILRECNNMAGQLDVWRLLDDAHDLVVNLHDKI

SEQ ID NO: 85596 - protein, 157 aa, Setaria italica
  misc_feature (43)..(43): Xaa can be any naturally occurring amino acid
  Transcript Sequence Number=SeqID_19622
  Gene Ontology: Mol. function=nucleic acid binding
  Homolog annotation: Hit_ID=B6SW16; Match level="QueryCoverage=87%, HitCoverage=36%, E-value=2e-56, Identity=74%"; Hit description =Nucleic acid binding protein
  Subcellular localization annotation: CTP_CleavageSite=46; ConfidenceScore=5.40e-01
QQPSFGAQFQQQQQQQQQQQKPNPFGFGVQGAAKPFQNKWVRXDPSAPTKQPEAAQPPPAAHTSCTDPESCRQQIAEDFKNETPLWKLTCYAHLRSGPCDIKGDISFEELRAKAYEDGRQGHPLQSIVEGERNLQNAKLMEFTNFLNNPRVSVSQTP

SEQ ID NO: 85597 - protein, 72 aa, Setaria italica
  misc_feature (31)..(31): Xaa can be any naturally occurring amino acid
  Transcript Sequence Number=SeqID_19623
  Gene Ontology: Mol. function=tRNA (guanine-N2-)-methyltransferase activity; Biological process=tRNA processing
  Homolog annotation: Hit_ID=B9SAN0; Match level="QueryCoverage=86%, HitCoverage=14%, E-value=2e-10, Identity=44%"; Hit description=N(2) ,N(2)-dimethylguanosine tRNA methyltransferase, putative
MMRRVTTAAPGYIRLDEIRDGKVNSPPLGTXINSLRKEGFSACRSHIGTNVIKTNCPIASCMDVAREIRNMR

SEQ ID NO: 85598 - protein, 92 aa, Setaria italica
  misc_feature (72)..(72): Xaa can be any naturally occurring amino acid
  misc_feature (82)..(82): Xaa can be any naturally occurring amino acid
  Transcript Sequence Number=SeqID_19624
VHTIYDLVWNFCGLHDGRKLLSETLSLFFSDWYNRCILLQFILPFVLVFALSHFSLDYVPWICLSCCYRKVXLFLSCDNSNXAASIVESIAF

SEQ ID NO: 85599 - protein, 69 aa, Setaria italica
  misc_feature (52)..(52): Xaa can be any naturally occurring amino acid
  misc_feature (61)..(61): Xaa can be any naturally occurring amino acid
  Transcript Sequence Number=SeqID_19625
FQYYLERNLEARERELAREEELEEKAPKVKAKSKMSKAEKEARKKQKVQAFXQSKQKSKSXLKNSKRWK

SEQ ID NO: 85600 - protein, 576 aa, Setaria italica
  Transcript Sequence Number=SeqID_19626
  Gene Ontology: Mol. function=nucleoside-triphosphatase activity
  Homolog annotation: Hit_ID=Q6GYA9; Match level="QueryCoverage=88%, HitCoverage=73%, E-value=0.0, Identity=64%"; Hit description=ABCF -type protein
  Pfam annotation: Domain name=ABC_tran; Domain location=334-500; Score= 184.8; E_value=2.5e-52; Accession=PF00005.19; Description=ABC transporter
  Pfam annotation: Domain name=ABC_tran; Domain location=7-216; Score =155.4; E_value=1.7e-43; Accession=PF00005.19; Description=ABC transporter
  Pfam annotation: Domain name=SMC_N; Domain location=310-503; Score= -105.3; E_value=0.00074; Accession=PF02463.11; Description =RecFRecNSMC N terminal domain
  Pfam module annotation: Pfam domain module=ABC_tran::ABC_tran::SMC_N; Domain location=334-500::7-216::310-503
PWEVQRGEKVGLVGVNGAGKTTQLRIIAGLEEPDGGTVVKAKENMKIAFLSQEFEVSASRTVREEFFSAFEEEMEVKRRLEQVQAALEGATEDMDLMGRLLDELDLLQRRSKDVDLDMVDVKVQKLMPELGFASEDADRLVASFSGGWQMRMSLGKILLQDPDLLLLDEPTNHVDLDTIEWLESYLKTQDVPMVIISHDRAFLDQLCTKIVETEFGVSKTYKGNYSEYILAKAIAVEAQYAAWEKQQKEIEQTKELINRLGAGVNAGRASSEQKKLEKLEKEGLIEKPFQRKQLKIRFPERGRSGRTVLTIKNLQFGFEDKTLFNNANLIVERGEKIAIIGPNGCGKSTLLKLILGMEKPQGGEVLLGDHNVLPNYFEQNQAEALDLEKTVLDTVADAAEDWKLDDIKGLLGRCNFRDDMLDRKVQYLSGGEKARLAFCKFLVTPSTLLILDEPTNHLDIPSKEMLEEAISEYTGTVITVSHDRYFVKQIVNRVIEVKDQTIQDYKGDYNYYLERNLEARERELAREEELEEKAPKVKAKSKMSKAEKEARKKQKVQAFQQSKQKSKSLKNSKRWK

SEQ ID NO: 85601 - protein, 293 aa, Setaria italica
  misc_feature (11)..(11): Xaa can be any naturally occurring amino acid
  Transcript Sequence Number=SeqID_19627
  Gene Ontology: Mol. function=ubiquitin binding; Cellular component =cytoplasm; Biological process=protein transport
  Homolog annotation: Hit_ID=B6T768; Match level="QueryCoverage=93%, HitCoverage=61%, E-value=1e-151, Identity=94%"; Hit description =Vacuolar protein sorting protein 36
  Pfam annotation: Domain name=EAP30; Domain location=29-252; Score =274.0; E_value=3.5e-79; Accession=PF04157.8; Description=EAP30
DPAAAPASGAXVARGPRWRRDVAIRMPVVGVSGILRMEQESWESAGQNLQDAFQDLNALMSKAKEMMQLAEKMRLKLLTNASTEPNSNDEDMGSKQDMQDLLLSVGIVSPVTKETAGALYHQQLSLQLADFVRIPLEKAGGMMALVDVYCLFNRARGTELISPEDLLQACSLWEKVDVPVMLRKFDSGVKVIQTKTHSDEEVFARISSLAQKPDALQKGISPSDAAFTLGIAPALAKEHLLNAENKGLLCRDVSPDGFRFFINLFNEIDAQNIYTQKPHGLYHAWISVAMASQ

SEQ ID NO: 85602 - protein, 66 aa, Setaria italica
  Transcript Sequence Number=SeqID_19628
MATIREESDYDSSRSSLTAPGSRRSWISDIGSSSSVSVRSFGGGWDTPASSCRHKPHKANQAEWEA

SEQ ID NO: 85603 - protein, 184 aa, Setaria italica
  Transcript Sequence Number=SeqID_19629
MSCDAPYMEHFRNWQEKDGHRREMHGCMRWILAHDFRRTRFCYYEVFKYRQEVVYHKIHTMYTPLDCIKGANIDYYKLKENVQSQLDITRAWAWFIWRNLVAYHLEEAGQLQTIKDIVSPYARQIVPSKTGAILLGIFYMIHASFIQLFATLSKRISEGLFELQVLQLLLFRLTPIGGFLLIYA

SEQ ID NO: 85604 - protein, 335 aa, Setaria italica
  misc_feature (21)..(21): Xaa can be any naturally occurring amino acid
  Transcript Sequence Number=SeqID_19630
  Gene Ontology: Mol. function=RNA binding; Cellular component=vacuole
  Homolog annotation: Hit_ID=Q2R2Q0; Match level="QueryCoverage=96%, HitCoverage=36%, E-value=3e-45, Identity=36%"; Hit description =Agenet domain containing protein
  Pfam annotation: Domain name=DUF724; Domain location=129-329; Score =197.8; E_value=2.9e-56; Accession=PF05266.6; Description=Protein of unknown function (DUF724)
LLGGITLNTTELSDQDTIPMXPPGFESMYDGKGVDIHGSLSEEEPTAIIDSISQVNLNADADHAATQVAKSNHLMETGILSVDHPVPKAGRKVDERSILPRLHNASSSQCTMDNSSLRSCSASGSSMPSHLPASHVQFVKNSPMWSLIEEMNVFCEVPQHPHFLPLRQFPPGLREGMALGLMVSFADTVKLITQASIDHSMEWFEDTMNTLSHLERNGFDVQFLQSTLTKLLHIKSDSTNCLGEIQKLNSQIVGVTASSSRIDKLLDEKDRAIAELEQKLGRLRQESQKIAKDKEHQEVEIFGLQSARSRFEEAHNDAKRQFHNVLDELRQKRLT

SEQ ID NO: 85605 - protein, 58 aa, Setaria italica
  Transcript Sequence Number=SeqID_19631
KIPLKWYGESKESQVLRTTLPHMKHASFSPQMKRGMIEKYVMLLTAGPCLDQCLHDVC

SEQ ID NO: 85606 - protein, 125 aa, Setaria italica
  Transcript Sequence Number=SeqID_19632
  Subcellular localization annotation: CTP_CleavageSite=20; ConfidenceScore=5.36e-01
CTHGVVPPPVRLSSSRQHPPQATASQVLRRDHALTNVFMMSVDQHCISTSVLCTCHPTLSVNKAYVVSYGLRVPNSWKCTTPTNYNHESSNCLVHLALDVACEKAHICIEALEAKGLCSEHLPHW

SEQ ID NO: 85607 - protein, 189 aa, Setaria italica
  Transcript Sequence Number=SeqID_19633
  Subcellular localization annotation: CTP_CleavageSite=54; ConfidenceScore=5.03e-01
NAHRKSYQLVKGHVYLTRGSSFLSDKTRKKQDSHTLNKKLSVFPCRSCRGLPAVVQYVLDMCVHHGGMPIVLLLEYAGRSRAEAGTGPCAVAVPTSSCMHALLPALHCTAFLVFPLPLPPDLSGLLHHRTKIKLHLLLSGGAPDWRWLGADAGETTRGAPVAARLHGCSTGDVARGWRECGGGGGKGAG

SEQ ID NO: 85608 - protein, 73 aa, Setaria italica
  Transcript Sequence Number=SeqID_19634
ASITASYLAIEKISCSDSNEHVINKLMKAVLQDVVLPQQYHKKAMSRQLDTYCDIDTNAIRDDFPDRRNTFRG

SEQ ID NO: 85609 - protein, 428 aa, Setaria italica
  Transcript Sequence Number=SeqID_19635
  Gene Ontology: Mol. function=transaldolase activity; Cellular component=cytoplasm; Biological process=carbohydrate metabolic process
  Homolog annotation: Hit_ID=B6TS84; Match level="QueryCoverage=91%, HitCoverage=91%, E-value=0.0, Identity=95%"; Hit description =Transaldolase 2
  Pfam annotation: Domain name=Transaldolase; Domain location=77-416; Score=186.6; E_value=6.9e-53; Accession=PF00923.11; Description =Transaldolase
  Subcellular localization annotation: CTP_CleavageSite=51; ConfidenceScore=5.63e-01
GTVSKLAAPRPAAALNPPDVPPPSRPSGLPPSARRFRVSIAGRARSPIIAMASAEEGNGAPTKRTSLHDLYELQGLSPWYDNLCRPVTDLLPFIASGVRGVTSNPTIFQKAISSSSAYDDQFKQLISAGKDAESAYWELVIKDIQDACKLFEPIYNETDGADGYVSVEVSPRLANDTQGTVEAAKWLHKVVNRPNVYIKIPATAECVPSIREVISNGISVNVTLIFSIARYEAVIDAYLDGLEASGLSDLSRVTSVASFFVSRVDSLIDKMLEKIGTPEALALRGKAAVAQAKLANQLYQKKFSGPRWEALAKKGAKKQRLLWASTGVKNPAYPDTLYVDSLIGPDTVNTMPDQALQAFIDHGTVSRTVDANVSEAEGVYSALEKLGIDWDEVGKQLELEGVDSFKKSFDSLLVSLQEKGNSLKTASV

SEQ ID NO: 85610 - protein, 116 aa, Setaria italica
  misc_feature (115)..(115): Xaa can be any naturally occurring amino acid
  Transcript Sequence Number=SeqID_19636
  Gene Ontology: Mol. function=hydrolase activity, hydrolyzing O -glycosyl compounds; Biological process=carbohydrate metabolic process
  Homolog annotation: Hit_ID=Q5Z791; Match level="QueryCoverage=100%, HitCoverage=30%, E-value=2e-50, Identity=82%"; Hit description =Putative beta-1,3-glucanase
  Pfam annotation: Domain name=Glyco_hydro_17; Domain location=1-116; Score=-161.7; E_value=0.08; Accession=PF00332.10; Description =Glycosyl hydrolases family 17
GNEVFTGDDEQLKASLVPAMRNLHAALAQLGMDTYVRVSTANSLAVLATSYPPSQGVFTQDAAPYMAQLLRFLADTSTPFWINAYPYFAYKDDPTKVSLDYALSNPYHVGAVDPXT

SEQ ID NO: 85611 - protein, 54 aa, Setaria italica
  Transcript Sequence Number=SeqID_19637
  Gene Ontology: Mol. function=cysteine protease inhibitor activity
  Homolog annotation: Hit_ID=Q1ENF4; Match level="QueryCoverage=74%, HitCoverage=29%, E-value=2e-11, Identity=85%"; Hit description =Cystatin Hv-CPI9
AVAAAQQQVVAGVAYYLKVIARDHGGGDRPFDAVVVVKAWLKSKELVSFTPSPK

SEQ ID NO: 85612 - protein, 87 aa, Setaria italica
  Transcript Sequence Number=SeqID_19638
FLESGSSSQDNPSFQTIRDQKTDSSDSPYPTPLVLRGDIQTPGTVYTACMGTSKHGKRARASRQFIYPVLRPIENKLQWMELKAAES

SEQ ID NO: 85613 - protein, 54 aa, Setaria italica
  Transcript Sequence Number=SeqID_19639
MGTADEETPLVVHLQPPPQVVASEYAGDGSVDINKQPALKRSTGKWRACYLILR

SEQ ID NO: 85614 - protein, 65 aa, Setaria italica
  Transcript Sequence Number=SeqID_19640
  Gene Ontology: Mol. function=transporter activity; Cellular component= membrane; Biological process=oligopeptide transport
  Homolog annotation: Hit_ID=A6YJX4; Match level="QueryCoverage=96%, HitCoverage=10%, E-value=9e-18, Identity=65%"; Hit description =Peptide transporter
TAAGSYFSSAVDCIVAVATTRGGEPGWIPDNLNEGHLDYFFWMMAALSFLNLVLFVGYSMRHKRI

SEQ ID NO: 85615 - protein, 109 aa, Setaria italica
  Transcript Sequence Number=SeqID_19641
  Gene Ontology: Mol. function=transporter activity; Cellular component= membrane; Biological process=oligopeptide transport
  Homolog annotation: Hit_ID=Q6Y391; Match level="QueryCoverage=99%, HitCoverage=23%, E-value=5e-29, Identity=59%"; Hit description =Nitrate transporter (Fragment)
AWLGACCLSPLLGAFFADTCWGRYWTIVASVPVYIIAMLILIASASLPVFSASSYHDVHSAAVYLGLYLLAISNGGLKPCISTFGADQFDINDRVELAQKGSFFNWYFS

SEQ ID NO: 85616 - protein, 318 aa, Setaria italica
  misc_feature (295)..(295): Xaa can be any naturally occurring amino acid
  Transcript Sequence Number=SeqID_19642
  Gene Ontology: Mol. function=transporter activity; Cellular component= membrane; Biological process=oligopeptide transport
  Homolog annotation: Hit_ID=Q33BF9; Match level="QueryCoverage=89%, HitCoverage=58%, E-value=1e-109, Identity=65%"; Hit description=POT family protein, expressed
  Pfam annotation: Domain name=PTR2; Domain location=114-318; Score= -66.0; E_value=0.00065; Accession=PF00854.13; Description=POT family
MGTADEETPLVVHLQPPPQVVASEYAGDGSVDINKQPALKRSTGKWRACYLILGVEFCESMAFTAISTNLVTYLTTVLHETKVDAARNVSAWLGACFLSPLLGAFIADTYWGRYWTIVVSVPVYIIAMLVLIASASLPVFSASSYHDVRSAVAYLGLYLLAISNGGLKPCVSTFGADQFDINDRAELSQKGSFFNWYFFLTTTSCLLSGTVIVWLEDNVGWAVGYVVPAVLMLFFFVVFIAGSRIYRFRGMEASPLTSIFQVVVAAVRKWHLQLPDDSSLLYELTSSPSTAEASXKDKHSNRFRYFNFCKVQVNVQSN

SEQ ID NO: 85617 - protein, 391 aa, Setaria italica
  misc_feature (19)..(19): Xaa can be any naturally occurring amino acid
  Transcript Sequence Number=SeqID_19643
  Gene Ontology: Mol. function=transporter activity; Cellular component= membrane; Biological process=oligopeptide transport
  Homolog annotation: Hit_ID=Q6Y391; Match level="QueryCoverage=85%, HitCoverage=73%, E-value=1e-135, Identity=68%"; Hit description =Nitrate transporter (Fragment)
  Pfam annotation: Domain name=PTR2; Domain location=1-327; Score =124.7; E_value=3e-34; Accession=PF00854.13; Description=POT family
TINRAELSQKCSFFNWYFXLTTTSSLLSGTVIVWLEDNVGWAVGYVVPAVLMLFFFVVFIAGSRIYRFRGMEASPLTSIFQVVVAAVRKWHLQLPDDSSLLYERSPSTAEASQKNKHSNRFRFFDKAAIAPSDNESVVHMSSWRLCTVSQVEDLKMLLSMSPTWGLFVIYFSVSALMQPTMVEQGMFMDNHVGSFAIPPASMPTVSVCSFLIWIPIYETILIPLARRFTGKEKGISQSQRLGIGQALSTLTMVLAALLETRRLAIAEANGLKHQDVPVPMSILWQVPIYLAHGATAVFGGIGLTEFFYDEAPVTMRSLCAALGQLATAAGSYFSSLVLSTVAVATTRGGEPGWIPDNLNEGHLDYFFWMMAALSLLNLALFVGYSMRRKGR

SEQ ID NO: 85618 - protein, 84 aa, Setaria italica
  Transcript Sequence Number=SeqID_19644
LSDQDVERVLDLQVSLTSASNWQHPFWSDLVIDFKLYSQKHLLLHIIFIQSWIRYLPQRNNCRLLFAMNIRNWSQQLLIESFSL

SEQ ID NO: 85619 - protein, 351 aa, Setaria italica
  Transcript Sequence Number=SeqID_19645
  Gene Ontology: Mol. function=single-stranded DNA binding; Cellular component=nucleus; Biological process=nucleotide-excision repair
  Homolog annotation: Hit_ID=B9RUC5; Match level="QueryCoverage=75%, HitCoverage=15%, E-value=2e-26, Identity=35%"; Hit description=DNA -repair protein UVH3, putative
  Subcellular localization annotation: CTP_CleavageSite=12; ConfidenceScore=5.29e-01
IVDNAQSKREINSAVFRSNPTSSSRTTEPSTSKHLRNFGPDVETYRDERGRIRVSRVRAMGIRMTRDIQRNLDFIKENEQVKSRVHTNVHKGSTVSEEPPDFPEHLFESNKLQSSLSLDEDFLETAEDNHQTSSLVRGSNNISESSCYGNKETMEISFMDDQTEVKDNYDDIFLHLASGTASDLFADNDCLAKNMEEPEGSECIWEEGVIEGETLPIKLDEKGNNSAPENCSDDEVEWEEGDSLVPGVASSSEHNTYNVLKGDLEEEALLQEAIRRSLEDFDKQASENVSTEDMQASVEDRPLQFSDDVPKISEAPVETSSHSGAALVKETNEKSRTEINSDENDMIHGTG

SEQ ID NO: 85620 - protein, 80 aa, Setaria italica
  Transcript Sequence Number=SeqID_19646
MQMAATTTDSQAAVPPHHPHAHPHAPPQHAHPHHHMPQPRWVVIPYPPPPPMVAAPPPPPQFAKHFAAGPPPPPQAAGRR

SEQ ID NO: 85621 - protein, 95 aa, Setaria italica
  misc_feature (6)..(6): Xaa can be any naturally occurring amino acid
  Transcript Sequence Number=SeqID_19647
  Gene Ontology: Mol. function=hydrolase activity, acting on glycosyl bonds; Biological process=cell wall organization and biogenesis
  Homolog annotation: Hit_ID=B6U5Y4; Match level="QueryCoverage=76%, HitCoverage=17%, E-value=2e-33, Identity=95%"; Hit description =Polygalacturonase
TPQHHXVHLNSSSHVQITDNLISTGDDCVSMVGNCSDVRVKDISCGPGHGISIGSLGKNRTTDMVENVKVDTCFLTNTTNGVRIKSWQVCRMPPL

SEQ ID NO: 85622 - protein, 153 aa, Setaria italica
  Transcript Sequence Number=SeqID_19648
  Gene Ontology: Mol. function=hydrolase activity, acting on glycosyl bonds; Cellular component=extracellular region; Biological process =cell wall organization and biogenesis
  Homolog annotation: Hit_ID=B6U5Y4; Match level="QueryCoverage=99%, HitCoverage=37%, E-value=3e-75, Identity=89%"; Hit description =Polygalacturonase
  Pfam annotation: Domain name=Glyco_hydro_28; Domain location=1-149; Score=-68.2; E_value=1e-05; Accession=PF00295.9; Description =Glycosyl hydrolases family 28
SAIGSLGKNRTTDMVENVKVDTCFLTNTTNGVRIKSWQGGMGFARDLRFESIVMKNVSNPIIIDQYYCDQPTPCANQTRAVEVRKVEFAGIRGTSATAQAISIACSDAVPCQDLELKNVNLTLEGGGHATASCYRASGKTAGAVVPPSCLAKS

SEQ ID NO: 85623 - protein, 62 aa, Setaria italica
  misc_feature (57)..(57): Xaa can be any naturally occurring amino acid
  Transcript Sequence Number=SeqID_19649
  Gene Ontology: Mol. function=nucleotide binding; Biological process =defense response
MPDLMEAVENALVEGKILWLAQTILEGIFSGEHDEWIRHVGLGEGMKQLKSEIERVXTVVAA

SEQ ID NO: 85624 - protein, 141 aa, Setaria italica
  Transcript Sequence Number=SeqID_19650
  Gene Ontology: Mol. function=protein binding; Biological process =ubiquitin-dependent protein catabolic process
  Homolog annotation: Hit_ID=B6TJQ1; Match level="QueryCoverage=91%, HitCoverage=42%, E-value=1e-48, Identity=69%"; Hit description=ATPP2- A13
RCYLQQIWWLEVDGELEFCFPAGSYSLFFHLHLGRPYRRMGRRLCATEHMHGWDVTPTRFQLSTSDEQQVTSEYYLHLHEQGGWKLYHVGDFVVSNPDEPMKLKFSMMQIDCTHTKGGLCVDSVFIYPKGYKPERANIVCM

SEQ ID NO: 85625 - protein, 150 aa, Setaria italica
  Transcript Sequence Number=SeqID_19651
AEGSLLINYFFIFFKAGLLIILFALAHLIILLGVSSVLILSIIHFVLQNKNQELSNVTKITLVPGTGEIKSIRAEWISTPRPSSGQQEEDGWRGIPLSLSAEGGLKAYAVVRDRSPLSELGSREGVGRRRRREPARRSLAASPCRREGGA

SEQ ID NO: 85626 - protein, 97 aa, Setaria italica
  misc_feature (97)..(97): Xaa can be any naturally occurring amino acid
  Transcript Sequence Number=SeqID_19652
  Gene Ontology: Mol. function=transporter activity; Cellular component= membrane; Biological process=oligopeptide transport
  Homolog annotation: Hit_ID=Q7XUE5; Match level="QueryCoverage=98%, HitCoverage=17%, E-value=4e-33, Identity=73%"; Hit description =OSJNBa0076N16.17 protein
GSPLTRILQVLVVAFRNRKLEFPEKLEEAQERSAEPGSIEVLPETNSLKFLDKAYINRGKDGSWSVCSTTKVEETKIVLRVLPLFVSSMIGYVSNPX

SEQ ID NO: 85627 - protein, 485 aa, Setaria italica
  misc_feature (177)..(177): Xaa can be any naturally occurring amino acid
  Transcript Sequence Number=SeqID_19653
  Gene Ontology: Mol. function=transporter activity; Cellular component= membrane; Biological process=oligopeptide transport
  Homolog annotation: Hit_ID=Q7XUE5; Match level="QueryCoverage=100%, HitCoverage=80%, E-value=1e-171, Identity=63%"; Hit description =OSJNBa0076N16.17 protein
  Pfam annotation: Domain name=PTR2; Domain location=1-403; Score =228.1; E_value=2.3e-65; Accession=PF00854.13; Description=POT family
PSLRPPSCNIEAEPSNCKEVHGWNATLLYAALYISALGDGCMRACMPSLGADQFDHEDPPESRQQSSFFNWYTFGISFGGFIGLILIVWLENDKGWDIGFGLCAILILLGLLVVAVGLPFYRNQIPEGSPLTRILQVLVVAFRNRKLEFPEKLEEAQERSAEPGSIEVLPETNSLKXDSEKNTYHFVCSLLVRKSGEHYLVSSISYYNYVMHLVRFLDKAYINRGKDGSWSVCSTTKVEETKIVLRVLPLFVSSMIGYVSNPILFTFTVQQGGMTNTRLGKIRVSPATLFIIPTIFQMVMLPIYDQFLVPFLRKRTGYVNGITHLQRVGIGFASIILASVIAAVVERKRKEAAEQMSLFWLTPQFFLLGVSDVTSFPGLLEFFNSEAPRGMKSIAAALFWCVLGLSSLLATFLVQIVNRATRHGHRGGWLEAASLNNSRLDLFYWVVAVVGLLAFLNYMYWAKRYVYRHDPRVVTNEPPVDQDSP

SEQ ID NO: 85628 - protein, 236 aa, Setaria italica
  Transcript Sequence Number=SeqID_19654
  Gene Ontology: Mol. function=transcription regulator activity; Cellular component=nucleus
TKEPPKRKRARHSSTVVEPDVQRVDAPENSRNLIPDMNRLDQVEVQGMATQIVSFNHGGTTSVSLQHRGDTQVQVHLPDVEANSFDSAPAANATPTIIYMGGQHLPYQNSDSARSISENNFVADDDPGLNNLPSGYQTLPPKQSLPLSMMDQHVVPMGIKAPTDNIPYGDHMLGGNSTSVPGDMQQLIDFPFYGEQDKFAGSSFEGLPLDYISISSPIPDIDDLLHDDDLMEYLGT

SEQ ID NO: 85629 - protein, 98 aa, Setaria italica
  misc_feature (87)..(87): Xaa can be any naturally occurring amino acid
  Transcript Sequence Number=SeqID_19655
  Homolog annotation: Hit_ID=Q4AC18; Match level="QueryCoverage=100%, HitCoverage=20%, E-value=2e-25, Identity=54%"; Hit description =117M18_7
  Pfam annotation: Domain name=DUF618; Domain location=40-98; Score =84.1; E_value=5.1e-22; Accession=PF04818.5; Description=Protein of unknown function, DUF618
NNSAASIQTLSQWCIFHRKRAKRVVDTWEKQFNSATKDKKVSFLYLSNDILQNSKRKGGDFVNEFWRVLPRSLKHVYENGGEDGKKXVARLIGIWDER

SEQ ID NO: 85630 - protein, 63 aa, Setaria italica
  Transcript Sequence Number=SeqID_19656
  Gene Ontology: Mol. function=ligase activity, forming aminoacyl-tRNA and related compounds; Cellular component=cytoplasm; Biological process=tRNA aminoacylation for protein translation
  Homolog annotation: Hit_ID=UPI00001622DB; Match level="QueryCoverage =90%, HitCoverage=8%, E-value=2e-25, Identity=92%"; Hit description =EMB2761 (EMBRYO DEFECTIVE 2761); ATP binding / aminoacyl-tRNA ligase/ ligase, ...
  Homolog annotation: Hit description=forming aminoacyl-tRNA and related compounds / nucleotide binding / threonine-tRNA ligase
SGCKSSIDLKIEDALGRKWQCSTVQVDFNLPERFDITYVDSNSEKKRPIMIHRAVLGSLERFF

SEQ ID NO: 85631 - protein, 462 aa, Setaria italica
  Transcript Sequence Number=SeqID_19657
  Gene Ontology: Mol. function=ligase activity, forming aminoacyl-tRNA and related compounds; Cellular component=cytoplasm; Biological process=tRNA aminoacylation for protein translation
  Homolog annotation: Hit_ID=UPI00001622DB; Match level="QueryCoverage =83%, HitCoverage=59%, E-value=0.0, Identity=84%"; Hit description =EMB2761 (EMBRYO DEFECTIVE 2761); ATP binding / aminoacyl-tRNA ligase/ ligase, ...
  Homolog annotation: Hit description=forming aminoacyl-tRNA and related compounds / nucleotide binding / threonine-tRNA ligase
  Pfam annotation: Domain name=tRNA-synt_2b; Domain location=299-462; Score=179.1; E_value=1.3e-50; Accession=PF00587.17; Description=tRNA synthetase class II core domain (G, H, P, S and T)
  Pfam annotation: Domain name=tRNA_SAD; Domain location=192-244; Score= 93.8; E_value=5.9e-25; Accession=PF07973.6; Description=Threonyl and Alanyl tRNA synthetase s
  Pfam module annotation: Pfam domain module=tRNA-synt_2b::tRNA_SAD; Domain location=299-462::192-244
  Subcellular localization annotation: CTP_CleavageSite=54; ConfidenceScore=5.70e-01
MAAPSAPFLRSHPHRRALFPSLPRHRPAAAATSLLGFPPRKPGSPRRLPYTVVRSSSTASPSPPVEEAAAAPTNDAEEQERVVLPTNESSERLLRIRHTCAHVMAMAVQKLFPNSKVTIGPWIDNGFYYDFDMEPLTDKDLKKIKKEMDRIIRKNLPLVREEVSREEAQKRIEALNEPYKLEILESIKEEPITIYHIGEEWWDLCAGPHVESTGKIDRKAVELESVAGAYWRGNEKNQMLQRIYGTAWENEDQLKTYIHFKEEAKRRDHRRLGQDLDLFSIQEDAGGGLVFWHPKGAIIRHILEDSWKHIHLQHGYDLLYTPHVAKADLWKISGHIDFYKENMYNQMDVEDEMYQLRPMNCPYHILVYKRKLHSYRDFPIRVAELGTVYRYELSGSLHGLFRVRGFTQDDAHIFCLEDQIQDEIRGVLDLTEQILGQFGFKYYEINLSTRPEKSVGSDDIWE

SEQ ID NO: 85632 - protein, 315 aa, Setaria italica
  Transcript Sequence Number=SeqID_19658
  Gene Ontology: Mol. function=ligase activity, forming aminoacyl-tRNA and related compounds; Cellular component=cytoplasm; Biological process=tRNA aminoacylation for protein translation
  Homolog annotation: Hit_ID=UPI00001622DB; Match level="QueryCoverage =99%, HitCoverage=48%, E-value=1e-155, Identity=80%"; Hit description= EMB2761 (EMBRYO DEFECTIVE 2761); ATP binding / aminoacyl-tRNA ligase/ ligase, ...
  Homolog annotation: Hit description=forming aminoacyl-tRNA and related compounds / nucleotide binding / threonine-tRNA ligase
  Pfam annotation: Domain name=HGTP_anticodon; Domain location=219-308; Score=91.2; E_value=3.6e-24; Accession=PF03129.12; Description =Anticodon binding domain
  Pfam annotation: Domain name=tRNA-synt_2b; Domain location=1-116; Score=54.2; E_value=4.8e-13; Accession=PF00587.17; Description=tRNA synthetase class II core domain (G, H, P, S and T)
  Pfam module annotation: Pfam domain module=HGTP_anticodon::tRNA-synt _2b; Domain location=219-308::1-116
MYEMYQLRPMNCPYHILVYKRKLHSYRDFPIRVAELGTVYRYELSGSLHGLFRVRGFTQDDAHIFCLEDQIQDEIRGVLDLTEQILGQFGFKYYEINLSTRPEKSVGSDDIWEKATIALKNALDDKGWEYKVDEGGGAFYGPKIDLKIEDALGRKWQCSTVQVDFNLPERFDITYVDSNSEKKRPIMIHRAVLGSLERFFGVLIEHYAGDFPLWLAPTQARILPVTDNELQYCNEVASELKSRGFRVEVCHGERLPKLIRNAETQKVPLMAVVGPKEVQARTLTIRSRHNGEIGTMPVDEFITRLQLAVANKSSL

SEQ ID NO: 85633 - protein, 85 aa, Setaria italica
  Transcript Sequence Number=SeqID_19659
  Homolog annotation: Hit_ID=B6U0P9; Match level="QueryCoverage=100%, HitCoverage=100%, E-value=8e-23, Identity=64%"; Hit description =Wound induced protein
MAGAAKASWMVAMSVGAVEALKDQAGLCRWNYALRSVHRNAKANVRSLAQAKKMAPAATAAERRRADKAEEGMRTVMYLSCWGPN

SEQ ID NO: 85634 - protein, 317 aa, Setaria italica
  Transcript Sequence Number=SeqID_19660
  Gene Ontology: Mol. function=hydrolase activity, acting on acid anhydrides, catalyzing transmembrane movement of substances; Cellular component=membrane; Biological process=transport
  Homolog annotation: Hit_ID=Q2HVB6; Match level="QueryCoverage=84%, HitCoverage=52%, E-value=1e-57, Identity=44%"; Hit description =Protein F1K23.6-, putative
  Pfam annotation: Domain name=DUF2215; Domain location=1-239; Score =221.9; E_value=1.7e-63; Accession=PF10225.1; Description =Uncharacterized conserved protein (DU
MALGILLVVLIVLFQGMKLLPMGKKSLFYLTIYGSVIGVGSYVFHYFSTLVSSILENFGLGEEMYNPVSLFLVVAIILTGAGFGYWMVRKFILSKDGSVDAGIAQFVKWAMRVVATFFVMQSTLDPRLAMVALASCWSVCALLTGKKVQKKTTQKQKQSKVSSQLMLTQGSPSSPQVQFLSPSSKVGFGRTASRSSATQYGWSNLANGGRVSSALTNQVVPKQDKDEDYYSTFHNIEPRKYSKQEWEEFTQESTRKALAECTATPEFAQWVADNASRLRVEKDDDLSEEETIESSSSSEETGEEPDAADPGLWRLWG

SEQ ID NO: 85635 - protein, 150 aa, Setaria italica
  Transcript Sequence Number=SeqID_19661
DILDFQNWHKSQVTDSPQVKRCIEIAQLCVNADEHKRPTIDEIIAMLNEIHMSRSNSVPSLEKMEGQKTQPQNVAPIERSSVEHMPGTKAGPEWNRESARASSSQPPPVRANKEAQDATTTQKSWFQRDESGPSHQSFAPRQTERVVAKE

SEQ ID NO: 85636 - protein, 140 aa, Setaria italica
  Transcript Sequence Number=SeqID_19662
  Gene Ontology: Mol. function=hydrolase activity
  Homolog annotation: Hit_ID=Q84VJ1; Match level="QueryCoverage=87%, HitCoverage=37%, E-value=2e-53, Identity=78%"; Hit description =Biostress-resistance-related protein (Fragment)
  Pfam annotation: Domain name=Abhydrolase_2; Domain location=19-140; Score=-31.6; E_value=1.7e-05; Accession=PF02230.8; Description =PhospholipaseCarboxylesterase
MSYYGSSSSGGRSGRRVDYGRTYVVRPKGRHLATIVWLHGLGDNGASWSQLLDSLPLPNIKWICPTAATRPVAAFGGFPCTAWFDVEDTSIDGRDDTEGLDASAAHIANLLSSEPSDVKLGIGGFSMGAAVALHSAACYA

SEQ ID NO: 85637 - protein, 115 aa, Setaria italica
  Transcript Sequence Number=SeqID_19663
  Gene Ontology: Mol. function=protein serine/threonine kinase activity; Cellular component=integral to membrane; Biological process=protein amino acid phosphorylation
  Homolog annotation: Hit_ID=B9SGH1; Match level="QueryCoverage=98%, HitCoverage=13%, E-value=1e-21, Identity=46%"; Hit description =Kinase, putative
FTSPSSYTFPIQKQGRHFIRLYFFPFTYQSYDLALAKFTVSTQDVLLLSDFQQPDKTAPLFKEYSLNITRDTLVISFKPSNGIAFINAIEVVSVPDDLIVDAAQMVNPMQQYSGL

SEQ ID NO: 85638 - protein, 101 aa, Setaria italica
  Transcript Sequence Number=SeqID_19664
GMCTDFTILPMAVVHVETSGEVCAVFIANVSICVLKKVSISTHCDVTLSILCGTYKSCSNVETSGEIMAARPDSTMFFFLNNVGELSVISLRKEVIQNVQR

SEQ ID NO: 85639 - protein, 323 aa, Setaria italica
  Transcript Sequence Number=SeqID_19665
  Gene Ontology: Cellular component=chloroplast
  Homolog annotation: Hit_ID=B6TG86; Match level="QueryCoverage=99%, HitCoverage=83%, E-value=1e-161, Identity=91%"; Hit description=ATP binding protein
  Pfam annotation: Domain name=CS; Domain location=16-96; Score=25.3; E_ value=0.00012; Accession=PF04969.8; Description=CS domain
  Pfam annotation: Domain name=SKI; Domain location=139-279; Score= -27.2; E_value=0.0015; Accession=PF01202.14; Description=Shikimate kinase
  Pfam module annotation: Pfam domain module=CS::SKI; Domain location =16-96::139-279
PRSPSVVPSFGPAPSKDYEFTDGNGEVELRLDIQKLGIESSKDVFVDVDDTSLLIRAKSDGTLRTLVNIQTLFDRIKSSETIWFIDEDQLVVNLKKVEQELKWPDIDESWESLTSGITQLLTGISVHIVGDNTDINEAVAKEIAEGIGYLPVCTSELLESATEKSIDTWVASEGVDSVADAESVVLESLSSHVRTVVATLGGKQGAASRFDRWQYLHSGFTVWLSVSDASDEATAREEARRSVSSGSVAYAKADVVVKLGGWDPEYTRAVAQGCLVALKQLTLADKKLAGKKSLYIRLGCRGDWPNIEPPGWDPESDAPPTNV

SEQ ID NO: 85640 - protein, 449 aa, Setaria italica
  Transcript Sequence Number=SeqID_19666
  Gene Ontology: Mol. function=aspartic-type endopeptidase activity; Cellular component=extracellular region; Biological process =proteolysis
  Homolog annotation: Hit_ID=Q2QRT5; Match level="QueryCoverage=92%, HitCoverage=87%, E-value=7e-71, Identity=41%"; Hit description =Eukaryotic aspartyl protease family protein, expressed
MGRFLPLVLVAVVIFPLLMPAPLVLSAAVRPPVKINSAQAKKISDYFKKQAFDFLKDHALDVIPNVLSTPEGQKQGTKAADTAGLYVFNLSVGTSILQNITGILDITTELVWAQCACSADACLPPPGTTFDPSTSDTFAGVPCISQRCQSVIKQQCGPDPAANCTYLMQYDDYTNTTGYLGNDTFTFGQTQFPDVVFGCSKASYGDFFGASGVLGFSRGSLSLVSQLQLSWFSYLLVSDGPSPLQFGYDAVPQTENSHSTPLLNNDANPGLYYVKLTGIMIDGRQLNGIPAGTFDIQSNGSGGVFLSTTVPVTYLDEAAYNVVRKAFVSRITAEAVDGSALGLDLCYTLQPKDEMVVPKLTLVFDGTNAAMELKKYNYFFADNNTNLECLTILPSRGGSLLGSLLQTDTNMAYDIEGSRLIFETASAPTPDLKVSLMVVVQFLALALLF

SEQ ID NO: 85641 - protein, 112 aa, Setaria italica
  Transcript Sequence Number=SeqID_19667
VKRPEQRMLTEARHVPLKPQISTPASNISASSRPISTDSRGNIAASKRLDGMKKTRLPTNANNNSFLPKLVKSSVSGTSQPQRPNLSSGTEKFKSIFRDISDDEDDPLDHAL

SEQ ID NO: 85642 - protein, 100 aa, Setaria italica
  Transcript Sequence Number=SeqID_19668
TRASTKRGEARKLERRHLSATTLLQGVDDAAHERVHEPSLRIKVPERHLHPHPLRLPGGLHPPLLRPQKPLSDGPQRPHHVAQSTPPSPAIVPPPLPRAG

SEQ ID NO: 85643 - protein, 79 aa, Setaria italica
  Transcript Sequence Number=SeqID_19669
QVQEVALEAATVEEPLPVPPQPLPKPEPLPLPPQPLPKPEPLPMPPQPLPKPEPLPVPPQPLPKPEPLPVPPQPLPKPE

SEQ ID NO: 85644 - protein, 90 aa, Setaria italica
  Transcript Sequence Number=SeqID_19670
GRAWEEAVVAPAAGRAWEEAEVAPQPLPKPDPLPVPPQPLPKPEPLPVPPQPLPQPELPKPELPPPVLAGELPPKPEVVPTKPEVVPLQP

SEQ ID NO: 85645 - protein, 180 aa, Setaria italica
  Transcript Sequence Number=SeqID_19671
MASTNTMSSFMLVLALLLSCGGMSNAARRMQELPKPDLPPLPKPEEPKPEPLPVPPHALPNPEPLPVPPQPLPNPEPLPNPEPLPVPPQPLPKPEPLPVPPQPLPKPDPLPVPPQPLPKPDPLPVPPQPLPKPDPLPVPPQPLPQPELPKPELPPPVLAGELPPKPEAVPPKPEVVPPQP

SEQ ID NO: 85646 - protein, 203 aa, Setaria italica
  misc_feature (19)..(19): Xaa can be any naturally occurring amino acid
  Transcript Sequence Number=SeqID_19672
  Homolog annotation: Hit_ID=Q9MAL3; Match level="QueryCoverage=89%, HitCoverage=68%, E-value=9e-47, Identity=52%"; Hit description =F27F5.3
APAPAAEGPSGSAATEDPXLVRVADDGVPLEGVIQIEKPGDAGAQSKLVSYAKLGLLAGGDVLCLLLFSAIGRFSHGLSVLDAETFKTADPFIAGWLLSAYLLGGFGEDAKGRNGVGSAVITAAKSWAVGIPLGLAIRAVTSGHIPPTPFILVTMGSTGVLLTAWRALVSQILSTGQKQQDDVYRRGSPFELFELLTSLVRRW

SEQ ID NO: 85647 - protein, 156 aa, Setaria italica
  Transcript Sequence Number=SeqID_19673
  Homolog annotation: Hit_ID=B6U2N1; Match level="QueryCoverage=92%, HitCoverage=92%, E-value=2e-68, Identity=92%"; Hit description=Acid phosphatase/vanadium-dependent haloperoxidase related
  Pfam annotation: Domain name=DUF212; Domain location=10-146; Score =285.7; E_value=1e-82; Accession=PF02681.6; Description=Divergent PAP2 family
MGMAAAAAGVVNYPLVAALLAFAIAQSSKVFTTWYKDNRWDARQFIASGGMPSSHSATVTALAVAVGIQEGFRSATFATALVFACVVMHDAFGVRLHAGKQAEVLNQIVYELPQEHPLSETKPLREILGHTVPQVVAGCILGILMAVVMHLAVGSS

SEQ ID NO: 85648 - protein, 152 aa, Setaria italica
  Transcript Sequence Number=SeqID_19674
  Gene Ontology: Mol. function=damaged DNA binding; Cellular component =intracellular; Biological process=single strand break repair
  Homolog annotation: Hit_ID=B4G1L6; Match level="QueryCoverage=98%, HitCoverage=42%, E-value=8e-66, Identity=80%"; Hit description=DNA repair protein XRCC1
  Pfam annotation: Domain name=BRCT; Domain location=37-112; Score =41.0; E_value=4.7e-09; Accession=PF00533.18; Description=BRCA1 C Terminus (BRCT) domain
MSTRSLPSWMGSSKDGEDDSSKKKHAGTSQKAQKGSDFSKLLDGVVFVLSGFVNPERGMLRSQALDMGAEYRPDWTSDCTLLVCAFANTPKFRQVQADNGTIISKDWICESHKQRKLVDIEPYLMHAGKPWRKNKEPVESDQDQKEMHKEQV

SEQ ID NO: 85649 - protein, 93 aa, Setaria italica
  Transcript Sequence Number=SeqID_19675
  Subcellular localization annotation: CTP_CleavageSite=54; ConfidenceScore=5.54e-01
MELTVVPSISLSPLRALPLPTRRAARRPAFACRCSCSPDASQGATRRWFASLLTAAAAVGVGVAGGEAGAVSTSRRALRASKIPESEFTSLPK

SEQ ID NO: 85650 - protein, 87 aa, Setaria italica
  Transcript Sequence Number=SeqID_19676
  Gene Ontology: Mol. function=nucleoside-triphosphatase activity; Cellular component=integral to membrane; Biological process=transport
  Homolog annotation: Hit_ID=Q5Z9S8; Match level="QueryCoverage=88%, HitCoverage=5%, E-value=3e-10, Identity=49%"; Hit description =Pleiotropic drug resistance protein 12
MESAMEKVWESGRRMSRSIGRGMGMEAWGVDEAFMPHPWAGSRGGSRGGRSGRDDDEEALRWAAIERLPTYNRVRTAILSSSTEAEA

SEQ ID NO: 85651 - protein, 103 aa, Setaria italica
  Transcript Sequence Number=SeqID_19677
RGLLSNNLVALKGSCPNCGEQVFAFVKTDKSIRAPHRAECHVCECPLEYRTKIEVCQRPVISIPLCSVEMYSRVPLKLWERIYVMWVQWHAKQYSILCQGTIL

SEQ ID NO: 85652 - protein, 214 aa, Setaria italica
  Transcript Sequence Number=SeqID_19678
YYNGQPLIVDDMFDKVELKLRLYGSKSVVKYPRCSLIRQSTYADAGQEDQSMFMALSSIWMLLLLFGTSAFLVPSLYTLNLAFGDAFGARHLLYGAESLDAITRVNDLALVGLGYLVGYPIASASVGALRGLLSNNLVALKGSCPNCGEQVFAFVKTDKSIRAPHRAECHVCECPLEYRTKIEKSLSGPRRTWVYGRVYLVKQGHPRKRKWIND

SEQ ID NO: 85653 - protein, 133 aa, Setaria italica
  Transcript Sequence Number=SeqID_19679
  Gene Ontology: Mol. function=transferase activity, transferring glycosyl groups; Cellular component=membrane; Biological process =cell wall biogenesis
  Homolog annotation: Hit_ID=B9S905; Match level="QueryCoverage=100%, HitCoverage=22%, E-value=2e-38, Identity=53%"; Hit description =Galactoside 2-alpha-L-fucosyltransferase, putative
MYYESPPKTGEIVAVFQPSHEEQQQYTSNEHNQKALAEIYLLSYCDKIAMSAWSTFGYVAYSFAGVKPWILLRPDWNKEVSEVACVRSPSVEPCLHSPPLLGCRAKRDVDVAAVKPYVRHCEDVGFGLKLFDS

SEQ ID NO: 85654 - protein, 406 aa, Setaria italica
  Transcript Sequence Number=SeqID_19680
  Gene Ontology: Mol. function=metal ion binding
  Homolog annotation: Hit_ID=UPI00015057F5; Match level="QueryCoverage =96%, HitCoverage=50%, E-value=3e-81, Identity=42%"; Hit description =DNA binding / binding / protein binding / zinc ion binding
  Pfam annotation: Domain name=zf-C3HC4; Domain location=225-273; Score= 3.5; E_value=0.041; Accession=PF00097.17; Description=Zinc finger, C3HC4 type (RING finger)
LALILAGLDEKISLFISSVENTFSGVASKSISETKQPDIVLEMSEAHPVLDALRASIGLCQRNSQRLDPEESQSLWFQLLDSFSEPLKRLYGSQDVNEKSARSKGMEVPIEHLKGKRPSQQMRISAKQRCLNVLRKIFSQFVGEIIEVMAGYIPLPAIMAKLLSDNGSQEFGDFKFVIHRMLSMYLYEKRILETAKSVIEDDSFYTLSLLKRGVCHGFAPQTFACCICNCSLSKEGAISAIRLFSCGHATHLQCESEQSRSSNRESKDGCPVCLSTSNTQGRNKSPMFDNGLVKYSGAELEASHGVHQTHEIDHAERSRGLQNMSRYEILSNLQKEQKSFHIETVPPLKLAPPAIYHEKIQKRTSLVGEPSKHSVRSQKPQKIWQMKEQKSKQAGNRLPQKSNVLR

SEQ ID NO: 85655 - protein, 109 aa, Setaria italica
  Transcript Sequence Number=SeqID_19681
  Subcellular localization annotation: CTP_CleavageSite=69; ConfidenceScore=5.82e-01
MAAAAAARSFLRSSAPSSLRSAAARAASRAGPAPLPRRMPASAPRVLLRSPVEMSSVCLESLMPMHSATASALMTSLLAAPACKGFGWLSEGQGETRWTSSWMKTSPCF

SEQ ID NO: 85656 - protein, 44 aa, Setaria italica
  Transcript Sequence Number=SeqID_19682
  Gene Ontology: Mol. function=transcription factor activity; Cellular component=nuclear matrix; Biological process=embryonic development ending in birth or egg hatching
  Homolog annotation: Hit_ID=Q8I0R9; Match level="QueryCoverage=95%, HitCoverage=38%, E-value=1e-15, Identity=92%"; Hit description=PHF-5
  Pfam annotation: Domain name=PHF5; Domain location=1-43; Score=26.6; E_value=8.3e-07; Accession=PF03660.6; Description=PHF5-like protein
MAKHHPDLIMCRKQPGIAIGRLCEKCDGKCVICDSYVRPCTLRS

SEQ ID NO: 85657 - protein, 123 aa, Setaria italica
  misc_feature (15)..(15): Xaa can be any naturally occurring amino acid
  misc_feature (111)..(111): Xaa can be any naturally occurring amino acid
  Transcript Sequence Number=SeqID_19683
  Gene Ontology: Mol. function=protein binding; Cellular component =membrane; Biological process=vesicle-mediated transport
  Homolog annotation: Hit_ID=Q3HRZ4; Match level="QueryCoverage=82%, HitCoverage=36%, E-value=1e-19, Identity=52%"; Hit description =Syntaxin-like protein
  Pfam annotation: Domain name=SNARE; Domain location=34-96; Score =87.0; E_value=6.7e-23; Accession=PF05739.11; Description=SNARE domain
NMPEQRALLAESKRXQEVLQLDNEIVYNEAIIEEREQAIQEIQQQIGEVHEVFKDLATLVHAQGVIIEEIDTNIENSASATKEAKREVGKADKTQKSNSSLLCLLMVIFGXVVLLVVIIVLAA

SEQ ID NO: 85658 - protein, 60 aa, Setaria italica
  Transcript Sequence Number=SeqID_19684
  Subcellular localization annotation: CTP_CleavageSite=29; ConfidenceScore=5.12e-01
NHLFLIGCRYLQSYRITPKRTSKTGRSKRASLFTQGKPLKKDSRMTKERALTNHKRKRGF

SEQ ID NO: 85659 - protein, 73 aa, Setaria italica
  Transcript Sequence Number=SeqID_19685
HRQLKRQNFNVRVDFLNYNSFDMYIENSASATKEAKREVGKADKTQKSNSSLLCLLMVIFGVVLLVVIIVLAA

SEQ ID NO: 85660 - protein, 184 aa, Setaria italica
  misc_feature (173)..(173): Xaa can be any naturally occurring amino acid
  Transcript Sequence Number=SeqID_19686
  Gene Ontology: Mol. function=protein binding; Cellular component =membrane; Biological process=vesicle-mediated transport
  Homolog annotation: Hit_ID=Q6YVJ8; Match level="QueryCoverage=92%, HitCoverage=66%, E-value=1e-58, Identity=71%"; Hit description =Putative syntaxin
MSFADLEAGAVRAPLGRKARGGPSDARGLVFQITTAVASYRRLLNSLGTPKDTPTLRDQLQKTSQNILQLAKDAKDKLQKAAEADKSIDTSADKRVADMKLAKDFAATMEEFRKLQNLAIQRETAYKPIVPQNAQSNYTMDDRSADSGNMPEQRALLAESKRQEVLQLDNEIXYNEAIIEEREQ

SEQ ID NO: 85661 - protein, 50 aa, Setaria italica
  Transcript Sequence Number=SeqID_19687
LSMNYVIHFVIHNRRNTLRLLCQPILKFRVLKSIAIIPTVHEQKKKKTKK

SEQ ID NO: 85662 - protein, 125 aa, Setaria italica
  misc_feature (4)..(5): Xaa can be any naturally occurring amino acid
  Transcript Sequence Number=SeqID_19688
  Gene Ontology: Mol. function=catalytic activity; Biological process =metabolic process
  Homolog annotation: Hit_ID=B6SU17; Match level="QueryCoverage=94%, HitCoverage=41%, E-value=3e-60, Identity=90%"; Hit description =Phosphoglycerate mutase-like protein
HHHXXGHSGRRAISSLNCPPFLAVETCREHLGVHPCDKRRSITEYRPLFPAIDFSLIENDEDVLWEPDVREANESVGLRGMKFIDWLWTREEKEIAIVSHSGFLYHTLNMYSKECHPTIRDEVGK

SEQ ID NO: 85663 - protein, 186 aa, Setaria italica
  misc_feature (119)..(119): Xaa can be any naturally occurring amino acid
  Transcript Sequence Number=SeqID_19689
  Gene Ontology: Mol. function=catalytic activity; Biological process =metabolic process
  Homolog annotation: Hit_ID=B6SU17; Match level="QueryCoverage=91%, HitCoverage=62%, E-value=7e-88, Identity=88%"; Hit description =Phosphoglycerate mutase-like protein
TCKKIELVITSPLLRTMQTAVGVFGGENYTDGVNAPPLMVENAGHSGRRAISSLNCPPFLAVETCREHLGVHPCDKRRSITEYRPLFPAIDFSLIENDEDVLWEPDVREANESVGLRGXWTREEKEIAIVSHSGFLYHTLNMYSKECHPTIRDEVGKHFANCELRSMVLVDRRSVLPPQLWTLCPL

SEQ ID NO: 85664 - protein, 736 aa, Setaria italica
  misc_feature (19)..(19): Xaa can be any naturally occurring amino acid
  misc_feature (50)..(50): Xaa can be any naturally occurring amino acid
  misc_feature (189)..(189): Xaa can be any naturally occurring amino acid
  misc_feature (310)..(310): Xaa can be any naturally occurring amino acid
  misc_feature (320)..(320): Xaa can be any naturally occurring amino acid
  Transcript Sequence Number=SeqID_19690
  Gene Ontology: Mol. function=zinc ion binding; Cellular component =nucleus; Biological process=regulation of transcription
  Homolog annotation: Hit_ID=Q53K34; Match level="QueryCoverage=97%, HitCoverage=78%, E-value=1e-139, Identity=42%"; Hit description=Myb -like DNA-binding domain, putative
  Pfam annotation: Domain name=Myb_DNA-binding; Domain location=169 -215; Score=43.9; E_value=6.2e-10; Accession=PF00249.23; Description =Myb-like DNA-binding domain
  Pfam annotation: Domain name=ZZ; Domain location=109-153; Score=25.1; E_value=0.00017; Accession=PF00569.9; Description=Zinc finger, ZZ type
  Pfam module annotation: Pfam domain module=Myb_DNA-binding::ZZ; Domain location=169-215::109-153
RPKSNFVLVVCSIGKMDAXLKFLEFLSHWGLVNFHPFPPVTQKCELVESXTGADTAEEISLVEKLFQFKTVHSYLVPVPKKADVISPVQFTSLLAEPTLAEDAITTAESSVEYHCNSCSVDCSRKRYHCRTQVDFDLCSDCYNVGKFDEGMSNADFILMEYAEVPGSGGSNWTDQETLLLLEALEIFKXKEWDEIAEHVATKTKEQCMLYFLQMPIFDYFLDGKEFSETPQKITQDLAETGIEELPEEMDVDDNAEGKESTDEKTFKKADANSSETGTKLADQSVSAKEDTMNPGDNVLVASSIVDESNXSSLMDPANKXFKLMLMFLGNDASNFVIDVLRSTFEVIGHFLDKEDLGSFAEAGNPVMALAAFFASVVEREDAVTSCCNSLRAISEISPALQLATGHCFILPDPPSNLEDPTSNFSPCTGGECQGGVGGTQNVNATDKDSSEREESALALEKEKATFTSQKEHMELSNTKESFVEGPQAEVISNSTKDSDNRTAIMESSVASDKMRYGCNTIPCSATSTNTNEPSSIASQEASAASTKGTTNPERVEGDKPSSMELPDDGSPSHGKVDPEEIELAPVASSSMQQHESNQTGNGNTKEPNSNENIIAAAAADPVIRLQRAAGTAVSAAAVKAKFLAEQEEVHIRQLAALVIEKQFQKMEAKMSFLSEVDNLVLRSRELTEKMRKKLMLERSAIITSRMAAAASRTNQHGAPGTRLPLPVALVQQLRRP

SEQ ID NO: 85665 - protein, 110 aa, Setaria italica
  Transcript Sequence Number=SeqID_19691
PRAVVEAGGLRGSGFGLGRAGWRAALYGGRAAWQPPAGVVEEAAGVRVAGEEGRETRLMGRRWLPEAAKPARGYATSRAVTRGNLWRLPRSHQAGSIPGEPSPFRRRMAS

SEQ ID NO: 85666 - protein, 224 aa, Setaria italica
  misc_feature (24)..(24): Xaa can be any naturally occurring amino acid
  misc_feature (30)..(30): Xaa can be any naturally occurring amino acid
  misc_feature (129)..(129): Xaa can be any naturally occurring amino acid
  Transcript Sequence Number=SeqID_19692
  Gene Ontology: Mol. function=CDP-diacylglycerol-serine O -phosphatidyltransferase activity; Cellular component=integral to membrane; Biological process=phosphatidylserine biosynthetic process
  Homolog annotation: Hit_ID=Q9XI59; Match level="QueryCoverage=95%, HitCoverage=47%, E-value=1e-103, Identity=82%"; Hit description =F9L1.4 protein
  Pfam annotation: Domain name=PSS; Domain location=42-224; Score =256.0; E_value=8.9e-74; Accession=PF03034.7; Description =Phosphatidyl serine synthase
LDPERSLSADRVSSVKRGVFAMIXVFLAYXFLQAPSTVLIRPHPAIWRLVHGMAVVYLVALTFLLFQTRDDARQFMKYLHPDLGVELPERSYGTDCRIYVPDHPKSRFNNVNEIIFDEFVIAHILGWWXKAIMIRNQPLLWVLSIGFELMELTFRHMLPNFNECWWDSIVLDILICNWFGIWAGMKTVRYFDGKTYVWVGLSRQPNIISKFKRNAKAKLQQPST

SEQ ID NO: 85667 - protein, 274 aa, Setaria italica
  misc_feature (25)..(25): Xaa can be any naturally occurring amino acid
  misc_feature (43)..(43): Xaa can be any naturally occurring amino acid
  Transcript Sequence Number=SeqID_19693
  Gene Ontology: Mol. function=CDP-diacylglycerol-serine O -phosphatidyltransferase activity; Cellular component=integral to membrane; Biological process=phosphatidylserine biosynthetic process
  Homolog annotation: Hit_ID=Q9XI59; Match level="QueryCoverage=88%, HitCoverage=53%, E-value=1e-113, Identity=80%"; Hit description =F9L1.4 protein
  Pfam annotation: Domain name=PSS; Domain location=1-239; Score=423.5; E_value=3.3e-124; Accession=PF03034.7; Description=Phosphatidyl serine synthase
SYGTDCRIYVPDHPKSRFNNVNVFXEIIFDDFVYSLHILGWWXKAIMIRNQPLLWVLSIGFELMELTFRHMLPNFNECWWDSIVLDILICNWFGIWAGMKTVRYFDGKTYVWVGLSRQPNIISKFKRTLGQFTPAQWDKDEWYPLLGPWRFIQVLSLCIVFMAVELNTFFLKFCLWIPPRNPLIVYRLVLWWLIAIPTIREYNTYLQDRKPFKKVGSFCWLSLAICIVELLICIKFGYGLFPNSMPSWLITLWTGIALLLVLFLLVWTCKISEQ

SEQ ID NO: 85668 - protein, 41 aa, Setaria italica
  Transcript Sequence Number=SeqID_19694
  Homolog annotation: Hit_ID=B4FH62; Match level="QueryCoverage=82%, HitCoverage=11%, E-value=4e-11, Identity=97%"; Hit description=NAD -dependent epimerase/dehydratase
RGLGVWVEAKFKAFDLASKPEGEGTPTTDFRALFAQVNSRF

SEQ ID NO: 85669 - protein, 302 aa, Setaria italica
  Transcript Sequence Number=SeqID_19695
  Gene Ontology: Mol. function=catalytic activity; Cellular component =chloroplast; Biological process=cellular metabolic process
  Homolog annotation: Hit_ID=B4FH62; Match level="QueryCoverage=97%, HitCoverage=97%, E-value=1e-138, Identity=85%"; Hit description=NAD -dependent epimerase/dehydratase
  Pfam annotation: Domain name=3Beta_HSD; Domain location=57-302; Score= -126.3; E_value=0.021; Accession=PF01073.11; Description=3-beta hydroxysteroid dehydrogenaseisomerase family
  Pfam annotation: Domain name=Epimerase; Domain location=56-278; Score= -38.9; E_value=0.00032; Accession=PF01370.13; Description=NAD dependent epimerasedehydratase family
  Pfam annotation: Domain name=NmrA; Domain location=56-302; Score= -81.9; E_value=0.0016; Accession=PF05368.5; Description=NmrA-like family
  Pfam module annotation: Pfam domain module=3Beta_HSD::Epimerase::NmrA; Domain location=57-302::56-278::56-302
  Subcellular localization annotation: CTP_CleavageSite=41; ConfidenceScore=5.44e-01
MATAAAACVRVASPFTGAPIRPPCHVIAARRGPRRAGLAVSAAAAAAAGGGLPPTVLVTGAGGRTGQIVYKKLKERAGQFVGRGLVRTEESKGKIGGADDVFIGDIRDPESIASAIEGIDALIILTSAVPKMKPGFDPSKGGRPEFYFEEGSYPEQVDWIGQKNQIDAAKSIGVKHIVLVGSMGGTDINHPLNKLGNGNILVWKHKAEQYLADSGLPYTIIRAGGLQDKDGGLRELIVGKDDEILKTETKTIAREDVAEVCIQALLFDEAKFKAFDLASKPEGEGTPTTDFRALFAQVNSRF

SEQ ID NO: 85670 - protein, 73 aa, Setaria italica
  Transcript Sequence Number=SeqID_19696
  Gene Ontology: Mol. function=protein dimerization activity; Cellular component=nucleus; Biological process=regulation of transcription, DNA-dependent
  Homolog annotation: Hit_ID=Q5VR11; Match level="QueryCoverage=61%, HitCoverage=13%, E-value=8e-17, Identity=97%"; Hit description =Putative TGACG-motif binding factor
RKKAYLTELEAKAKDLELRNAELEQRVSTLQNENNTLRQILKNTTAHASKRSSGGGAGGKGGDGGKKHHFTKS

SEQ ID NO: 85671 - protein, 87 aa, Setaria italica
  Transcript Sequence Number=SeqID_19697
KRPEKTLPPITTKPAGREPDGCEKLEDKHIDVLKHATQRTPPPPPEQSKLKPRRSVSSARRLKTRANTPRIASSKKCKPPAATPRSP

SEQ ID NO: 85672 - protein, 58 aa, Setaria italica
  Transcript Sequence Number=SeqID_19698
MGEEASCNTVSVMEAATNAKPQPQQPKENGRAAAAAVVAEATAPVAEAAADPRLQGIS

SEQ ID NO: 85673 - protein, 82 aa, Setaria italica
  Transcript Sequence Number=SeqID_19699
  Gene Ontology: Mol. function=metal ion binding
  Homolog annotation: Hit_ID=B6U4A7; Match level="QueryCoverage=48%, HitCoverage=27%, E-value=1e-14, Identity=90%"; Hit description=RING -H2 finger protein
  Pfam annotation: Domain name=zf-C3HC4; Domain location=17-58; Score =44.9; E_value=3.2e-10; Accession=PF00097.17; Description=Zinc finger, C3HC4 type (RING finger)
RAAPRRGRRRRGAAADCRVCLARFEPESVVNRLPCGHLFHRACLETWLDYDHATCPLCRLRLLPPADDDYPALAAAGPAVRF

SEQ ID NO: 85674 - protein, 157 aa, Setaria italica
  misc_feature (152)..(152): Xaa can be any naturally occurring amino acid
  Transcript Sequence Number=SeqID_19700
  Gene Ontology: Mol. function=catalytic activity; Cellular component =chloroplast envelope; Biological process=metabolic process
  Homolog annotation: Hit_ID=B4FN64; Match level="QueryCoverage=84%, HitCoverage=44%, E-value=1e-35, Identity=54%"; Hit description=C-4 methylsterol oxidase
  Pfam annotation: Domain name=FA_hydroxylase; Domain location=3-93; Score=25.3; E_value=1.1e-07; Accession=PF04116.5; Description=Fatty acid hydroxylase
VDIIFSYIIRHHEFTAPTGFAMSYSHWAENLLLSIPALAGPVIAPCHITTQWLWFSIRLIEGINIHSGYHFPFSPSKLIPFYGGAAYHDYHHYAGGHSQSNFAPLFTYCDYLYRTDKGYRYHKLKQAKLKSLEEDNVEKKGGSTAFCNGKKXRYFCA

SEQ ID NO: 85675 - protein, 69 aa, Setaria italica
  Transcript Sequence Number=SeqID_19701
TAGKIKSRETNGAQERMSARGAIGEALARANMRENGGRMRVAVFFRRRWGSCWSVGFLLFSLNLIFALF

SEQ ID NO: 85676 - protein, 153 aa, Setaria italica
  misc_feature (70)..(70): Xaa can be any naturally occurring amino acid
  misc_feature (142)..(142): Xaa can be any naturally occurring amino acid
  Transcript Sequence Number=SeqID_19702
  Gene Ontology: Mol. function=oxidoreductase activity, acting on single donors with incorporation of molecular oxygen, incorporation of two atoms of oxygen; Cellular component=chloroplast; Biological process=fatty acid biosynthetic process
  Homolog annotation: Hit_ID=A1XCI5; Match level="QueryCoverage=96%, HitCoverage=14%, E-value=5e-62, Identity=75%"; Hit description =Lipoxygenase
SRCRRSFGPVGAVLVENEHHKETFIKEIRLVTGGDDSSAVTFDCNSWVHSKFDNPEKRVFFTVKIDRWIXQSLFLHVSVQSYLPSETPEGLSELRKKELETLRGNGHGERKSFERVYDYDVYNDLGDPDRNPAHQRPVLGGXRRVPYPRRCRT

SEQ ID NO: 85677 - protein, 217 aa, Setaria italica
  misc_feature (30)..(30): Xaa can be any naturally occurring amino acid
  misc_feature (109)..(109): Xaa can be any naturally occurring amino acid
  misc_feature (187)..(187): Xaa can be any naturally occurring amino acid
  Transcript Sequence Number=SeqID_19703
  Gene Ontology: Mol. function=oxidoreductase activity, acting on single donors with incorporation of molecular oxygen, incorporation of two atoms of oxygen; Cellular component=chloroplast; Biological process=fatty acid biosynthetic process
  Homolog annotation: Hit_ID=A1XCI6; Match level="QueryCoverage=99%, HitCoverage=26%, E-value=1e-95, Identity=73%"; Hit description =Lipoxygenase
  Pfam annotation: Domain name=Lipoxygenase; Domain location=1-217; Score=-181.3; E_value=2e-10; Accession=PF00305.11; Description =Lipoxygenase
LHPHFRYTMEINALARESLINADGIIEAAXWPGKYSVELSSAAYATWQFDTEALPNDGLMVWNSIKQWAADYVKIYYKSDEAVAGDAELQAFWEEVRTVGHGDKKDEPXGWPVLDGRDALVETLTTIMWVTSGHHSAVNFGQYHYGGYFPNRPTVIRKNMPVEEGRDDEMKRFLDQPEGTTRLGTIXSQTQMQAITVMTTLDILSSHSPDEEYMGDH

SEQ ID NO: 85678 - protein, 46 aa, Setaria italica
  Transcript Sequence Number=SeqID_19704
  Gene Ontology: Mol. function=oxidoreductase activity, acting on single donors with incorporation of molecular oxygen, incorporation of two atoms of oxygen; Cellular component=chloroplast; Biological process=fatty acid biosynthetic process
  Homolog annotation: Hit_ID=A1XCI5; Match level="QueryCoverage=89%, HitCoverage=4%, E-value=1e-13, Identity=87%"; Hit description =Lipoxygenase
MGNSAVYGPAESAITREILEKQMNNNLSVEEALAAKRLFILDYHDV

SEQ ID NO: 85679 - protein, 107 aa, Setaria italica
  Transcript Sequence Number=SeqID_19705
  Gene Ontology: Mol. function=oxidoreductase activity, acting on single donors with incorporation of molecular oxygen, incorporation of two atoms of oxygen; Cellular component=chloroplast; Biological process=fatty acid biosynthetic process
  Homolog annotation: Hit_ID=A1XCI5; Match level="QueryCoverage=84%, HitCoverage=9%, E-value=7e-40, Identity=85%"; Hit description =Lipoxygenase
  Pfam annotation: Domain name=PLAT; Domain location=1-90; Score=47.2; E_value=6.6e-11; Accession=PF01477.15; Description=PLATLH2 domain
RLGGAETGLEKERVTAFAHKTLVEGRYEAEFKVPASFGPVGAVLVENEHHKETFIKEIRLVTGGDDSSAVTFDCNSWVHSKFDNPEKRVFFTVKVSSELGFSDHLSP

SEQ ID NO: 85680 - protein, 172 aa, Setaria italica
  misc_feature (145)..(145): Xaa can be any naturally occurring amino acid
  Transcript Sequence Number=SeqID_19706
  Gene Ontology: Mol. function=oxidoreductase activity, acting on single donors with incorporation of molecular oxygen, incorporation of two atoms of oxygen; Cellular component=chloroplast; Biological process=fatty acid biosynthetic process
  Homolog annotation: Hit_ID=A1XCI5; Match level="QueryCoverage=79%, HitCoverage=15%, E-value=5e-66, Identity=88%"; Hit description =Lipoxygenase
MSSGWIAGSSAWSPDRSVVAPNVSCFTSENQPLLIKKELRFQHFPAIDDLYSDGIPLPAQTGFDAIRTVVPRMVKLVEDTTDHVLRFEIPEMMGRDRFSWFKDEEFARQTLAGLNPLSIELLTEFPIKSKLDPAVYGPAESAITXEILEKQMNNNLSVEEALAAKRLFILDY

SEQ ID NO: 85681 - protein, 141 aa, Setaria italica
  Transcript Sequence Number=SeqID_19707
  Gene Ontology: Mol. function=oxidoreductase activity, acting on single donors with incorporation of molecular oxygen, incorporation of two atoms of oxygen; Cellular component=chloroplast; Biological process=fatty acid biosynthetic process
  Homolog annotation: Hit_ID=A1XCI5; Match level="QueryCoverage=85%, HitCoverage=13%, E-value=3e-50, Identity=80%"; Hit description =Lipoxygenase
DVVGGVLDHVLRFEIPEMMGRDRFSWFKDEEFARQTLAGLNPLSIELLTEFPIKSKLDPAVYGPAESAITREILEKQMNNNLSVEEALAAKRLFILDYHDVFLPYVLRVREQPDTTLYGSRHRLLPPRSGCCSSASPGSPW

SEQ ID NO: 85682 - protein, 263 aa, Setaria italica
  Transcript Sequence Number=SeqID_19708
  Gene Ontology: Mol. function=oxidoreductase activity, acting on single donors with incorporation of molecular oxygen, incorporation of two atoms of oxygen; Cellular component=chloroplast; Biological process=fatty acid biosynthetic process
  Homolog annotation: Hit_ID=A1XCI6; Match level="QueryCoverage=91%, HitCoverage=26%, E-value=1e-121, Identity=84%"; Hit description =Lipoxygenase
  Pfam annotation: Domain name=Lipoxygenase; Domain location=1-258; Score=-97.5; E_value=4.3e-14; Accession=PF00305.11; Description =Lipoxygenase
LVRGKLLPFELSSAAYATWQFDTEALPNDLVRRGLAVRKDDGELELVIKDYPYANDGLMVWNSIKQWAADYVKIYYKSDEAVAGDAELQAFWEEVRTVGHGDKKDEPWWPVLDGRDALVETLTTIMWVTSGHHSAVNFGQYHYGGYFPNRPTVIRKNMPVEEGRDDEMKRFLDQPEGTLLDMLPTQMQAITVMTTLDILSSHSPDEEYMGDHAEPAWLAEPMVKAAFEKFGGRMKEIEGYVDECNKQTQEDYKETGRRTTRGT

SEQ ID NO: 85683 - protein, 388 aa, Setaria italica
  misc_feature (25)..(25): Xaa can be any naturally occurring amino acid
  misc_feature (62)..(62): Xaa can be any naturally occurring amino acid
  misc_feature (197)..(197): Xaa can be any naturally occurring amino acid
  misc_feature (210)..(210): Xaa can be any naturally occurring amino acid
  misc_feature (257)..(257): Xaa can be any naturally occurring amino acid
  misc_feature (323)..(323): Xaa can be any naturally occurring amino acid
  misc_feature (378)..(378): Xaa can be any naturally occurring amino acid
  Transcript Sequence Number=SeqID_19709
  Gene Ontology: Mol. function=oxidoreductase activity, acting on single donors with incorporation of molecular oxygen, incorporation of two atoms of oxygen; Cellular component=chloroplast; Biological process=fatty acid biosynthetic process
  Homolog annotation: Hit_ID=A1XCI6; Match level="QueryCoverage=97%, HitCoverage=41%, E-value=0.0, Identity=86%"; Hit description =Lipoxygenase
  Pfam annotation: Domain name=Lipoxygenase; Domain location=1-371; Score=296.5; E_value=5.9e-86; Accession=PF00305.11; Description =Lipoxygenase
TVKHIYLIIVFTHGPDATGAWLWKXLAKAHVLTHDTGYHQLVSHWLRTHCCVEPYIIAANRXQLSRLHPVYRLLHPHFRYTMEINALARESLINADGIIEAAFWPGKYSVELSSAAYATWQFDTEALPNDLVRRGLAVRKDDGELELVIKDYPYANDGLMVWNSIKQWAADYVKIYYKSDEAVAGDAELQAFWEEVXSTVGVYGDKKDEXPWWPVLDGRDALVETLTTIMWVTSGHHSAVNFGQYHYGGYFPNRPTXIRKNMPVEEGRDDEMKRFLDQPEGTLLDMLPTQMQAITVMTTLDILSSHSPDEEYMGDHAEPAWLXSPMVKAAFEKFGGRMKEIEGYVDECNNNPELRNRCGAGVVPYELLKPFSKPGVTXGRGIPNSISI

SEQ ID NO: 85684 - protein, 174 aa, Setaria italica
  Transcript Sequence Number=SeqID_19710
  Gene Ontology: Mol. function=UTP:glucose-1-phosphate uridylyltransfera se activity; Cellular component=cytoplasm; Biological process =metabolic process
  Homolog annotation: Hit_ID=B8Q219; Match level="QueryCoverage=69%, HitCoverage=25%, E-value=3e-57, Identity=88%"; Hit description=UDP -glucose pyrophosphorylase
  Pfam annotation: Domain name=UDPGP; Domain location=1-121; Score= -184.7; E_value=6e-06; Accession=PF01704.10; Description=UTP--glucose- 1-phosphate uridylyltransferase
EFGKSQEVDGVKVLQLETAAGAAIRFFDKAIGINVPRSRFLPVKATSDLLLVQSDLYTLVDGFVIRNPARTNPANPSITLGPEFKKVANFLARFKTIPSIVELDSLKVSGDVWFGSGITLKGEVNINRQSTGSRKLGRITKNRKLVDLEQTKERTNRTPKEYFRRRIDLTSTYN

SEQ ID NO: 85685 - protein, 273 aa, Setaria italica
  Transcript Sequence Number=SeqID_19711
  Gene Ontology: Mol. function=UTP:glucose-1-phosphate uridylyltransfera se activity; Cellular component=cytoplasm; Biological process =metabolic process
  Homolog annotation: Hit_ID=Q43772; Match level="QueryCoverage=76%, HitCoverage=43%, E-value=7e-95, Identity=81%"; Hit description=UTP- -glucose-1-phosphate uridylyltransferase
  Pfam annotation: Domain name=UDPGP; Domain location=28-270; Score =195.3; E_value=1.7e-55; Accession=PF01704.10; Description=UTP- -glucose-1-phosphate uridylyltransferase
TVRTNKDSTKASRRGTNKDYEPRISENEKTGFISLVSRYLTGEADQIEWSKIQTPTDEVVVPYDTLASPPEDLEETKKLLDKLVVLKLNGGLGTTMGCTGPKSVIEVRNGFTFLDLIVIQIESLNKKYGCNVPLLLMNSFNTHDDTQKIVEKYSNSDIEIHTFNQSQYPRIVTEDFSPLPSKGKAGKDGWYPPGHGDVFPSLNNSGKLDLLLAQGKEYVFVANSDNLGNLQKLNSSFIRDEGTTFNISQSLWSNLHAVLVLVIDQMVQDFCAS

SEQ ID NO: 85686 - protein, 518 aa, Setaria italica
  misc_feature (188)..(188): Xaa can be any naturally occurring amino acid
  Transcript Sequence Number=SeqID_19712
  Gene Ontology: Mol. function=UTP:glucose-1-phosphate uridylyltransfera se activity; Cellular component=cytoplasm; Biological process =metabolic process
  Homolog annotation: Hit_ID=Q43772; Match level="QueryCoverage=88%, HitCoverage=96%, E-value=0.0, Identity=85%"; Hit description=UTP- -glucose-1-phosphate uridylyltransferase
  Pfam annotation: Domain name=UDPGP; Domain location=73-486; Score =961.7; E_value=3.2e-286; Accession=PF01704.10; Description=UTP- -glucose-1-phosphate uridylyltransferase
  Subcellular localization annotation: CTP_CleavageSite=57; ConfidenceScore=5.39e-01
NNEQQQQQPTLRPHSSARLTSPPVLSFRSLEGPEDGRPNRRRQNHRHRGGRSTTSSRSFAAKVDKLDQISENEKTGFISLVSRYLTGEADQIEWSKIQTPTDEVVVPYDTLASPPEDLEETKKLLDKLVVLKLNGGLGTTMGCTGPKSVIEVRNGFTFLDLIVIQIESLNKKYGCNVPLLLMNSFNTXHDDTQKIVEKYSNSDIEIHTFNQSQYPRIVTEDFSPLPSKGKAGKDGWYPPGHGDVFPSLNNSGKLDLLLAQGKEYVFVANSDNLGAIVDMKILNHLINNQNEYCMEVTPKTLADVKGGTLISYEGRVQLLEIAQVPDAHVDEFKSIEKFKIFNTNNLWVNLKAIKRLVEADALKMEIIPNPKEVDGVKVLQLETAAGAAIRFFDKAIGINVPRSRFLPVKATSDLLLVQSDLYTLVDGFVIRNPARTNPANPSITLGPEFKKVANFLARFKTIPSIVELDSLKVSGDVWFGSGITLKGEVNITAKSGVKLEIPDGVVLDNKDVNDPKDL

SEQ ID NO: 85687 - protein, 50 aa, Setaria italica
  misc_feature (18)..(18): Xaa can be any naturally occurring amino acid
  Transcript Sequence Number=SeqID_19713
KSPRAKFFRWLMVQDKLXCKRNLLRKNIIDSATCDLCQHAEEDADHLFFK

SEQ ID NO: 85688 - protein, 217 aa, Setaria italica
  misc_feature (8)..(8): Xaa can be any naturally occurring amino acid
  Transcript Sequence Number=SeqID_19714
PVHVASLXTLICVVRGAPKALAPYLEKAVSYILHAMDPSNLIMRKACIISSMMALREMARVFPMVALNESMTRLAVGDAIGEIHNATIRVYDIESVTKIRILDASGPPGLPSLLAGSSNTAATILISSLSFSPDGEGLVAFSENGLMIRWWSLGTGWWERLSRSLTPIQCTKLIYVPPWEGFSPNSARLSIISSILGHDKHGSSEKTKKELDEADNL

SEQ ID NO: 85689 - protein, 188 aa, Setaria italica
  Transcript Sequence Number=SeqID_19715
LGAEITHFMSDILFQIECLSTAPSSSAIHKTAVAVTMREALVGTLLPSLAMADVTGFFSVIESQIWATSSDSPVHVASLKTLICVVRGAPKALAPYLEKAVSYILHAMDPSNLIMRKACIISSMMALREMARVFPMVALNESMTRLAVGDAIGEIHNATIRVYDIESVTKIRILDASGPPGLPSLLAG

SEQ ID NO: 85690 - protein, 495 aa, Setaria italica
  misc_feature (277)..(277): Xaa can be any naturally occurring amino acid
  misc_feature (281)..(281): Xaa can be any naturally occurring amino acid
  misc_feature (367)..(367): Xaa can be any naturally occurring amino acid
  Transcript Sequence Number=SeqID_19716
  Gene Ontology: Mol. function=phosphotransferase activity, alcohol group as acceptor; Biological process=metabolic process
  Homolog annotation: Hit_ID=Q7XLI1; Match level="QueryCoverage=92%, HitCoverage=72%, E-value=0.0, Identity=54%"; Hit description =OSJNBa0079F16.16 protein
  Pfam annotation: Domain name=AAA; Domain location=73-235; Score= -36.5; E_value=0.04; Accession=PF00004.21; Description=ATPase family associated with various cellular activities (AAA)
  Pfam annotation: Domain name=PRK; Domain location=73-245; Score=-2.6; E_value=4.6e-07; Accession=PF00485.10; Description=Phosphoribulokinase Uridine kinase family
  Pfam module annotation: Pfam domain module=AAA::PRK; Domain location =73-235::73-245
MNADLVQRCLEAGGRDLLLHHPSSPPSPTSASAAASSSILQSLPLHVSFDRGYYLLVKAIQELRARKDGHIVTVGIGGPTGSGKTSLAEKVASVLGCVVIVSMEDYRTGAGGDDGSSDIDAIDFDALTRNLQDLVKGKDTMVPLVDFQEKKRTGWRELKISSSGVVIVDGAYALHSTLRSLLDIRVAVVGGVHFSLLSKVQHDIGDSCSLDYLIDSIFPLFRKHIEPDLHHAQIRIDNSFVCSFREPYYKLKCKNESPDGTKFYSFDQNKAETEKGXRNLXMKIDDWIKVRQCGIRYYLSLGDQRIVDKYFIIRPKAEFEVGRTTLGGLLALGYSVVVSFKRTSTSVNRDQLLIAVEAIDTLNETFXLVLKGPSRKVVAAESSKLGIKGPWITKSYLEMILDSKGVPRLNTPPPVSSTLLTESQEKKIAAPKPIRVSAENITNLDDLMQPWTRSPPKKLEQEHVLAKWQFITDSSSRSNIQLAPLPDSYDLDRGL

SEQ ID NO: 85691 - protein, 96 aa, Setaria italica
  Transcript Sequence Number=SeqID_19717
  Gene Ontology: Mol. function=tRNA isopentenyltransferase activity; Biological process=tRNA processing
  Homolog annotation: Hit_ID=B2XWS7; Match level="QueryCoverage=80%, HitCoverage=23%, E-value=6e-34, Identity=93%"; Hit description =Isopentenyl transferase IPT6
AAVDEIKANTSRLAFRQRGKIQRLARMWRVRRVDATEVFLKRGHAADEAWQRLVAAPCIDAVRSFLLEDQEYSSMVTAAKASIFASRAAAVAAAVV

SEQ ID NO: 85692 - protein, 176 aa, Setaria italica
  Transcript Sequence Number=SeqID_19718
  Gene Ontology: Mol. function=binding; Biological process=metabolic process
  Homolog annotation: Hit_ID=B9SB49; Match level="QueryCoverage=98%, HitCoverage=99%, E-value=2e-71, Identity=71%"; Hit description =Armadillo repeat-containing protein, putative
  Pfam annotation: Domain name=Arm; Domain location=52-92; Score=2.4; E_ value=6.1; Accession=PF00514.15; Description=Armadillobeta-catenin -like repeat
  Pfam annotation: Domain name=Arm; Domain location=93-133; Score=39.4; E_value=1.4e-08; Accession=PF00514.15; Description=Armadillobeta -catenin-like repeat
  Pfam module annotation: Pfam domain module=Arm::Arm; Domain location =52-92::93-133
MFTNAQRQVERTGRSGTPRNQYLQDLVTQFQNATDEESKEKIAANLANFAYDPFNYAFMRQLNVLELFLDCITEPNERLVEFGIGGICNSCVDPANASVIVQCGGIPLVIQCLSSPVRNTVTYALGALYYLCNPSTKKEILKPDVVRIIREYAAVGAINTSFSNMANAFLEKHVDS

SEQ ID NO: 85693 - protein, 92 aa, Setaria italica
  Transcript Sequence Number=SeqID_19719
  Subcellular localization annotation: CTP_CleavageSite=60; ConfidenceScore=5.68e-01
PPFRTLPPTSHTIPARRPPPGSSLLSGGASSAAVAAPRLAPRSICRSPEGLAIRGCLAVVALAPADARQRRPRFEWPPETRGSRHRSGVSLA

SEQ ID NO: 85694 - protein, 115 aa, Setaria italica
  Transcript Sequence Number=SeqID_19720
  Gene Ontology: Mol. function=transporter activity; Cellular component= integral to membrane; Biological process=sodium ion transport
  Homolog annotation: Hit_ID=Q9FHJ8; Match level="QueryCoverage=100%, HitCoverage=16%, E-value=7e-57, Identity=92%"; Hit description=Urea active transporter-like protein
LEKRYVGSQHTSEWFNTAGRSVKTGLIASVIVSQWTWAATILQSSNVAWQYGVSGPFWYASGATIQVLLFGVMAIEIKRKAPNAHTVCEIVRARWGGAAHAVFLVFCLTTNVIVT

SEQ ID NO: 85695 - protein, 67 aa, Setaria italica
  Transcript Sequence Number=SeqID_19721
  Gene Ontology: Mol. function=hydrogen ion transporting ATP synthase activity, rotational mechanism; Cellular component=proton -transporting two-sector ATPase complex; Biological process=proton transport
  Homolog annotation: Hit_ID=Q40002; Match level="QueryCoverage=91%, HitCoverage=10%, E-value=2e-25, Identity=88%"; Hit description=V -type proton ATPase catalytic subunit A (Fragment)
MPIAYYNDDGHKITYSVIKHRLGDLFYRLVSQKFEDPAEGEDALVAKFKKLYDDLTAGFRNLEDEAR

SEQ ID NO: 85696 - protein, 113 aa, Setaria italica
  misc_feature (10)..(10): Xaa can be any naturally occurring amino acid
  misc_feature (73)..(73): Xaa can be any naturally occurring amino acid
  Transcript Sequence Number=SeqID_19722
  Gene Ontology: Mol. function=hydrogen ion transporting ATP synthase activity, rotational mechanism; Cellular component=proton -transporting two-sector ATPase complex; Biological process=ATP metabolic process
  Homolog annotation: Hit_ID=O23654; Match level="QueryCoverage=99%, HitCoverage=17%, E-value=7e-53, Identity=93%"; Hit description=V -type proton ATPase catalytic subunit A
  Pfam annotation: Domain name=ATP-synt_ab; Domain location=1-113; Score=-27.0; E_value=2.8e-07; Accession=PF00006.17; Description=ATP synthase alphabeta family, nucleotide-binding domain
AIPGAFGCGXVISQALSKYSNSEAVVYVGCGERGNEMAEVLMDFPQLTMTLDDGREESVMKRTTLVANTSNMXPVAAREASIYTGITIAEYFRDMGYNVSMMADSTSRNASAH

SEQ ID NO: 85697 - protein, 374 aa, Setaria italica
  Transcript Sequence Number=SeqID_19723
  Gene Ontology: Mol. function=protein binding; Biological process =protein metabolic process
  Homolog annotation: Hit_ID=Q6ER93; Match level="QueryCoverage=69%, HitCoverage=32%, E-value=2e-26, Identity=34%"; Hit description=Heat shock protein-related-like
  Subcellular localization annotation: CTP_CleavageSite=50; ConfidenceScore=5.33e-01
QLPDWNPNYGLAAHHTSELTLSFSSPATNSPDTSSISGFAPSFINANLMMSSKPWQFKLMQPWPNHQHDDPLAKSYDHQPLHANPSPESYSVSNSSVSGSAESPKFMELTAENLKILCNTLENRVPRHKDVVADIASVVLQCRSGMTRRMRWCQEKPSAVTWLIFQGGDNDGKEVVSQELARLVFGSYSKFTSISLPEFTQVHTDSSSSLLTLKRQRSPDTGHGYQRLYEAILENPHRVIMIDGIEKLDYDSEISIRNAIANGRIKGCNGDEISLEDAIVVLSCEALDSRSNASSPRLKQRVIDNGGKEENGMNIESGMESSGFTLDLNACAEDGEEDGVSVSDNMRILNIVDGVFFFQLAGFVTLSFLHFIKN

SEQ ID NO: 85698 - protein, 621 aa, Setaria italica
  Transcript Sequence Number=SeqID_19724
  Gene Ontology: Mol. function=hydrogen ion transporting ATP synthase activity, rotational mechanism; Cellular component=proton -transporting two-sector ATPase complex; Biological process=ATP metabolic process
  Homolog annotation: Hit_ID=O23654; Match level="QueryCoverage=99%, HitCoverage=99%, E-value=0.0, Identity=92%"; Hit description=V-type proton ATPase catalytic subunit A
  Pfam annotation: Domain name=ATP-synt_ab; Domain location=229-456; Score=362.8; E_value=6.3e-106; Accession=PF00006.17; Description=ATP synthase alphabeta family, nucleotide-binding domain
  Pfam annotation: Domain name=ATP-synt_ab_C; Domain location=474-618; Score=192.2; E_value=1.4e-54; Accession=PF00306.19; Description=ATP synthase alphabeta chain, C terminal domain
  Pfam annotation: Domain name=ATP-synt_ab_N; Domain location=22-84; Score=74.0; E_value=5.6e-19; Accession=PF02874.15; Description=ATP synthase alphabeta family, beta-barrel domain
  Pfam module annotation: Pfam domain module=ATP-synt_ab::ATP-synt_ab _C::ATP-synt_ab_N; Domain location=229-456::474-618::22-84
MAFGERITTFEDSEKESEYGYVRKVSGPVVVADGMGGAAMYELVRVGHDNLIGEIIRLEGDSATIQVYEETAGLMVNDPVLRTRKPLSVELGPGILGNIFDGIQRPLKTIAIKSGDVYIPRGVSVPALDKDQLWEFQPKKLGVGDAITGGDLYATVFENTLMQHHVALPPGSMGKISYIAPSGQYSLQDTVLELEFQGIKKQFTMLQTWPVRSPRPVASKVAADTPLLTGQRVLDALFPSVLGGTCAIPGAFGCGKTVISQALSKYSNSEAVVYVGCGERGNEMAEVLMDFPQLTMTLDDGREESVMKRTTLVANTSNMPVAAREASIYTGITIAEYFRDMGYNVSMMADSTSRWAEALREISGRLAEMPADSGYPAYLAARLASFYERAGKVKCLGSPDRTGSVTIVGAVSPPGGDFSDPVTSATLSIVQVFWGLDKKLAQRKHFPSVNWLISYSKYSKALESFYEKFDPDFIDIRTKAREVLQREDDLNEIVQLVGKDALAETDKITLETAKLLREDYLAQNAFTPYDKYCPFYKSVWMMRNIIHFNTLANQAVERAASADGQKITYSVIKHRLGDLFYRLVSQKFEDPAEGEDALVAKFKKLYDDLTAGFRNLEDEAR

SEQ ID NO: 85699 - protein, 192 aa, Setaria italica
  misc_feature (113)..(113): Xaa can be any naturally occurring amino acid
  misc_feature (165)..(165): Xaa can be any naturally occurring amino acid
  Transcript Sequence Number=SeqID_19725
  Gene Ontology: Mol. function=ATP binding; Biological process=apoptosis
  Homolog annotation: Hit_ID=Q8H5J9; Match level="QueryCoverage=97%, HitCoverage=34%, E-value=3e-36, Identity=45%"; Hit description =Fusarium resistance protein I2C-5-like
MEIFLSAVLGELITRSINFFISKCPKQPALDVDDHLQRVLLRAQVIIEEAMVRQITNQSMLQQLDMLRDTMYRGCYLLDTFRFQSHKEDAKDQIVSHPSLLFKVNSVKDFYFXWRRYTDFGRMLAVLDSLRSMILDANELVVFLTSYTRMYREPYSMHLLLGTAXVGRQMEAQHVINFLLHTRPPGAAEGWR

SEQ ID NO: 85700 - protein, 63 aa, Setaria italica
  Transcript Sequence Number=SeqID_19726
  Gene Ontology: Mol. function=tryptophan synthase activity; Cellular component=chloroplast; Biological process=aromatic amino acid family biosynthetic process
  Homolog annotation: Hit_ID=Q7XY02; Match level="QueryCoverage=69%, HitCoverage=19%, E-value=2e-15, Identity=88%"; Hit description =Putative tryptophan synthase alpha chain (Fragment)
TEKPVAVGFGVSTPEHVKQIAGWGADGVIVGSAMVRLLGEAASPEEGLKKLEELAKNLRAALA

SEQ ID NO: 85701 - protein, 66 aa, Setaria italica
  Transcript Sequence Number=SeqID_19727
  Homolog annotation: Hit_ID=B6T9C7; Match level="QueryCoverage=100%, HitCoverage=15%, E-value=1e-22, Identity=81%"; Hit description=Fizzy- related protein
  Subcellular localization annotation: CTP_CleavageSite=57; ConfidenceScore=5.44e-01
MAVADAKPRLNVPPSMAAALRLDPVPLSPPTSRRLAEAPKTPSPSKTTYSDRFIPCRSSSRLQNFA

SEQ ID NO: 85702 - protein, 346 aa, Setaria italica
  Transcript Sequence Number=SeqID_19728
  Gene Ontology: Mol. function=metal ion binding; Cellular component =integral to membrane
  Homolog annotation: Hit_ID=B9T0P2; Match level="QueryCoverage=85%, HitCoverage=62%, E-value=1e-144, Identity=80%"; Hit description =Protein binding protein, putative
  Pfam annotation: Domain name=zf-C3HC4; Domain location=285-322; Score= 35.5; E_value=2.1e-07; Accession=PF00097.17; Description=Zinc finger, C3HC4 type (RING finger)
  Pfam annotation: Domain name=zf-MIZ; Domain location=285-325; Score= -9.3; E_value=0.024; Accession=PF02891.12; Description=MIZ zinc finger
  Pfam module annotation: Pfam domain module=zf-C3HC4::zf-MIZ; Domain location=285-322::285-325
AAGTSSEDSIEATAGSEVDQASAAGRGAGGADAEANGAGSGASGNGGGDRAYQRYDVHHVARWIEQILPFSLLLLVVFIRQHLQGFFVTIWIAAVMFKSNDILRKQTALKGERKISVLIGITVIFMIHVFGVYWWYRNDDLLRPLFMLPPKDIPPFWHAIFIIMVNDTMVRQAAMAVKCMLLMYYKNCRGRNYRRQGQMLTLVEYLLLLYRALLPTPVWYRFFLNKEYGSLFSSLTTGLYLTFKLTSVVEKVQSFLAAVKALSRKDVHYGSYATAEQVLVAGDMCAICQEKMHVPVLLCCKHIFCEDCVSEWFERERTCPLCRALVKPADIRSFGDGSTSLFFQLF

SEQ ID NO: 85703 - protein, 42 aa, Setaria italica
  Transcript Sequence Number=SeqID_19729
  Gene Ontology: Mol. function=protein-glutamine gamma-glutamyltransfera se activity
  Homolog annotation: Hit_ID=Q6KF70; Match level="QueryCoverage=90%, HitCoverage=7%, E-value=2e-13, Identity=94%"; Hit description =Transglutaminase
HSLRTQFEFEKNTNVKQVEQMRTMEMNLITMTKQAEKLCAAA

SEQ ID NO: 85704 - protein, 84 aa, Setaria italica
  misc_feature (61)..(61): Xaa can be any naturally occurring amino acid
  Transcript Sequence Number=SeqID_19730
  Subcellular localization annotation: CTP_CleavageSite=37; ConfidenceScore=5.11e-01
VAAAAQAAAQAAGAQVAASQPGTAQATAVSAAAPNPYASAYANYPTAYQQGTQPGEYQQGXAGAYQQATQAGAYQQGTQPAAYQ

SEQ ID NO: 85705 - protein, 430 aa, Setaria italica
  Transcript Sequence Number=SeqID_19731
  Gene Ontology: Mol. function=protein-glutamine gamma-glutamyltransfera se activity
  Homolog annotation: Hit_ID=B6U0E3; Match level="QueryCoverage=100%, HitCoverage=100%, E-value=6e-94, Identity=73%"; Hit description =Transglutaminase
  Pfam annotation: Domain name=DUF827; Domain location=56-260; Score= -110.9; E_value=0.041; Accession=PF05701.3; Description=Plant protein of unknown function (DUF827)
  Subcellular localization annotation: CTP_CleavageSite=47; ConfidenceScore=5.12e-01
MAHRGHLDGLNAQAPGLLRHGSFAAGSLSNRSPLDSSSTLEMLENKLAMQTAEVEKLIRENQRLAKSHVVLRQDIVDTEKEMQLIRTHLGEVQTETDLQIRDLLERIRLMEADIQSGDTVKKELHQVHMEAKRLIAERQMLNLEIENANNELQKLSASGDNKSLTELLAELDGLRKEHHSLRTQFEFEKNTNVKQVEQMRTMEMNLITMTKQAEKLRADVANAERRAQAAAAQAAAQAAGAQVAASQPGTAQATAVSAAAPNPYASAYANYPTAYQQGTQPGEYQQGTQAGAYQQATQAGAYQQGTQPAAYQQGTQAGAYAYAYNATAYQMHAAQANTYAGYPGYQVPGYAQTAVPNYPGAYAVPPQQPISSGAATDVGNMYGVVGSTGYPAGQVQPSSGTANAAQAPPPPPPPAAPYPGTYDPARGAQR

SEQ ID NO: 85706 - protein, 161 aa, Setaria italica
  Transcript Sequence Number=SeqID_19732
  Gene Ontology: Mol. function=nucleoside-triphosphatase activity; Cellular component=nucleus; Biological process=cell cycle
  Homolog annotation: Hit_ID=Q96QE3; Match level="QueryCoverage=60%, HitCoverage=5%, E-value=1e-14, Identity=41%"; Hit description=ATPase family AAA domain-containing protein 5
VYNFRNGFPFPSFSDKQSEHSCPSDVINVDNHLLVSGASCQASLLDLHGRPEVPQNGCEPAYYLWTDKYRPETAAQVCGNSEHVKFLAEWLKGWDERGHKTGAANGDTNDSSYQDESDADSAYHASDCDNVLLITGPVGCGKSAAVFACAREQGFNVIEVN

SEQ ID NO: 85707 - protein, 67 aa, Setaria italica
  Transcript Sequence Number=SeqID_19733
KECARYKISNATYMTMPRKLRITYSAPARNYRLFTCKQSQILSDIACDSARRRSFSSRKLLYGTFPS

SEQ ID NO: 85708 - protein, 109 aa, Setaria italica
  Transcript Sequence Number=SeqID_19734
  Gene Ontology: Mol. function=metal ion binding
  Homolog annotation: Hit_ID=B9TA62; Match level="QueryCoverage=91%, HitCoverage=20%, E-value=1e-15, Identity=39%"; Hit description=Zinc finger protein, putative
LARGGGHGGTARLPRLRYGFILWRYAVRLLRRVETRVTNRWVRRSYLEQWNTSVQLDPMLPFAFTSLDDIVSPCTASDGHDISFCPICDCEVKLRSKHCKTCERCVDGF

SEQ ID NO: 85709 - protein, 179 aa, Setaria italica
  Transcript Sequence Number=SeqID_19735
  Gene Ontology: Mol. function=phosphatidylinositol phosphate kinase activity; Biological process=phosphatidylinositol metabolic process
  Homolog annotation: Hit_ID=Q652R9; Match level="QueryCoverage=99%, HitCoverage=10%, E-value=3e-68, Identity=67%"; Hit description =Finger-containing phosphoinositide kinase-like
VKPDTKKGGSMDPGDYVKIKCIASGNPTDSNFVRGIVCSKNVRHKRMVSEHRNAKLLILGGALEYQKVSNKLASIGTILEQEKEHLRTIVGKIESRQPNVLLIEKSASSFAQELLAKDISLVLNVKRPLLDRISRCTGGQVASSIDNIISARLGQCDLFKVEKIPESSSAEHTGKLSSN

SEQ ID NO: 85710 - protein, 1233 aa, Setaria italica
  Transcript Sequence Number=SeqID_19736
  Gene Ontology: Mol. function=phosphatidylinositol phosphate kinase activity; Biological process=phosphatidylinositol metabolic process
  Homolog annotation: Hit_ID=Q652R9; Match level="QueryCoverage=100%, HitCoverage=72%, E-value=0.0, Identity=46%"; Hit description=Finger -containing phosphoinositide kinase-like
  Pfam annotation: Domain name=PIP5K; Domain location=989-1224; Score =194.3; E_value=3.4e-55; Accession=PF01504.10; Description =Phosphatidylinositol-4-phosphate 5-Kinase
RKLLAIDISLVLNVKRPLLDRISRCTGGQVASSIDNIISARLGQCDLFKVEKIPESSSAEHTGKCSIKTLMFFEGCLKRLGCTVLLRGNCREELKKIKRAMQLAVFAAYHLSLETSFLADEGATVPRIPSMPVIDAPDLQTHRDNVSASPADHNIPENLRDTEERYPHNATINQIFENISAAPTLLSASTLLPFDGVSQGTVPECGASEFPAGRINSQALSNSCHPNASCIKHSISPCSLSDYFRMSCAVTDYDDSYKFLQSSIASDACHASASSMKPCLLENCRSHPSIDNLQSGNTDVKDELSAGYLSGTDNNQSILVSLSSTCIPKSLACERSHLLRIKFYGSVDKPLGRYLREDLFDQAYCCPSCKEPSESHVRCYMHQHGSLTISVRRFLSQKLPGEHDGRIWMWHRCMRCKPKDGMPPATHRVIMSDAAWGLSFGKFLELSFSNHMTANRVASCGHSLQRDCLRFYGYGNMVAAFQYSPMVTLSVNLPPPVLDFSFHATQEWVKREAVEVFGKMESLHKEVYDLLHNIEKSIITEDDSVKTSMQRQIMEMKDLLNIERNEYEALLLPVIRGSAHSVKSKIDILELNRIRRGLFLDAHTWDCRLCGIDSLREGGDVSRTDSFNQEKPQGTNEARPELHQAITRLGGTWQEPCPRRSTGSPRKSLLSTEGHSKDHQSAMVEKDLQIGLMDGVAGDAGGLDLVFSKFNIYEGHHVSEDPIKTDPVERLPSLASILADKIDMAWSGSGELHYNLPHDLTKADENRSFSLLNNPSCKKATAPVRIHSFDAVLRLHQREQTGLVPASLHSALKPADSFRDLTSLVKDPMTNMRRAFSQISPRTRGNLNSVLTRAPKYITSASDMVKNGARLLLPNISCEGSVVITVYDDDPTSVVSYAMTSQEYVEHVTHKMNASSSFSDFTKASSNRLDGSSSLHEDLSDLKGTHFRFNFDDDVSSADSTKFSVTCYFARQFDALRKKCCPSDIDYIRSLSRCKRWSAQGGKSNVYFAKTMDERFIIKQVTKTELDSFVEFAPHYFRHLTESLSSRSPTCLAKIMGLYQVGIKSLKGGREVKMDLMVMENIFFQRTISRVYDLKGSVRSRYNSDTSGHNKVLLDSNLIEALHTKPMFLGSKAKRRLERAVWNDTSFLASLDVMDYSLLVGIDEEKSELVVGIIDFLRQYTWDKQLETWVKASGILGGPKNESPTVISPIQYKKRFRKAMSRYFLAVPDQWTS

SEQ ID NO: 85711 - protein, 55 aa, Setaria italica
  Transcript Sequence Number=SeqID_19737
  Gene Ontology: Mol. function=protein transporter activity; Cellular component=mitochondrial inner membrane; Biological process=protein transport
  Homolog annotation: Hit_ID=B3VTB6; Match level="QueryCoverage=100%, HitCoverage=37%, E-value=1e-14, Identity=72%"; Hit description=Amino acid selective channel protein
ERVRGRSDWKNAMIGGALSGALISGATNNHKDKIIKDAITAGAVATAVEFINCLT

SEQ ID NO: 85712 - protein, 125 aa, Setaria italica
  misc_feature (48)..(48): Xaa can be any naturally occurring amino acid
  Transcript Sequence Number=SeqID_19738
  Gene Ontology: Mol. function=protein transporter activity; Cellular component=mitochondrial inner membrane; Biological process=protein transport
  Homolog annotation: Hit_ID=B3VTB6; Match level="QueryCoverage=100%, HitCoverage=84%, E-value=3e-30, Identity=57%"; Hit description=Amino acid selective channel protein
  Pfam annotation: Domain name=Tim17; Domain location=1-125; Score =77.2; E_value=5.8e-20; Accession=PF02466.11; Description =Tim17Tim22Tim23 family
PSTVRTVFPSKYSVVGSVACKVAAEETFECLHRGDVSKHKLEHALKKXMCKEGAYWGTVAGVYVGMVYGVERVRGRSDWKNAMIGGALSGALISGATNNHKDKIIKDAITAGAVATAVEFINCLT

SEQ ID NO: 85713 - protein, 146 aa, Setaria italica
  Transcript Sequence Number=SeqID_19739
  Gene Ontology: Mol. function=protein transporter activity; Cellular component=mitochondrial inner membrane; Biological process=protein transport
  Homolog annotation: Hit_ID=B3VTB6; Match level="QueryCoverage=100%, HitCoverage=100%, E-value=2e-53, Identity=71%"; Hit description =Amino acid selective channel protein
  Pfam annotation: Domain name=Tim17; Domain location=18-146; Score =133.1; E_value=9.1e-37; Accession=PF02466.11; Description =Tim17Tim22Tim23 family
MPHGRFSGSLSSPKIDVVIDMGNPFLNRTVDGFLKIGAVGACKVAAEETFECLHRGDVSKHKLEHALKKMCKEGAYWGTVAGVYVGMVYGVERVRGRSDWKNAMIGGALSGALISGATNNHKDKIIKDAITAGAVATAVEFINCLT

SEQ ID NO: 85714 - protein, 688 aa, Setaria italica
  misc_feature (15)..(15): Xaa can be any naturally occurring amino acid
  Transcript Sequence Number=SeqID_19740
  Gene Ontology: Mol. function=nucleic acid binding; Cellular component= cytoplasm; Biological process=mRNA polyadenylation
  Homolog annotation: Hit_ID=B6T7Z7; Match level="QueryCoverage=100%, HitCoverage=99%, E-value=0.0, Identity=74%"; Hit description=RNA recognition motif family protein
  Pfam annotation: Domain name=PWI; Domain location=19-84; Score=-10.1; E_value=0.1; Accession=PF01480.9; Description=PWI domain
  Pfam annotation: Domain name=RRM_1; Domain location=514-583; Score =64.0; E_value=5.6e-16; Accession=PF00076.14; Description=RNA recognition motif. (a.k.a. RRM, RBD, o
  Pfam module annotation: Pfam domain module=PWI::RRM_1; Domain location=19-84::514-583
EGRTFNANFTGKGVXTLLQDRVKEKLRELMGDYSDDTLAEYVVVLLRNGRCKDEAAKELQVFLGDDNDAFVSWLWDHLSSNLHLYVQPKATTSNDEPKSTSSAGRGLPVRSLTSSVQVNCEPEAEAQKTTIAHQKRDWGRIIREQSEAVPLRSVVANVSHAEEKDFHESHAEERDSHKSHAGRRTRSPDMHNHRKRSREADSRSTKRVSNPVIDAPRRLLQFAVRDAVRTVQPVTPRSESASKRLRSVVSTLASDSALDITHIRLQKTNSDVRIPALRAAAEAAEDAIKGSFSGSVFNRLGRMPTINHTDALREQDPEGEEYENIDNIRAENQVEFYERNQYGGSDAYMHDQESEEATGSAPNIDEYERYNGLGSRQSRLSSSAGKESLVLGYVRGAAEVRGRRLIAQGTHAGSGPSPSGKNLNMSANTSMRKLPTHQTRDAVVSDPQVPMEKKVADARNSNVKITHVNDTVMTDKSKDFIHSGSMLEAQKASSLAAGSNTTGQPEGGPDSRTVFVNNVHFGASKDALTRHFNKFGAVLKTLLVSDGITGQPTGSAYIEFLHKESAEQALTLNGTSFMSRILKVVRKSSTEATQLSGLPRASRGSPFASRLIRTAYPRPTFPGAIRGRLPLRGGARSFQWKRGAADSTDAGKPSQTAPAAPGNQLVTPITRSFTYTRTEPKSNDGAMA

SEQ ID NO: 85715 - protein, 345 aa, Setaria italica
  misc_feature (279)..(279): Xaa can be any naturally occurring amino acid
  Transcript Sequence Number=SeqID_19741
  Gene Ontology: Mol. function=metal ion binding
  Homolog annotation: Hit_ID=B9S1H3; Match level="QueryCoverage=47%, HitCoverage=21%, E-value=7e-10, Identity=26%"; Hit description =Synaptonemal complex protein, putative
ADCVGFEFMSPEKAAMAAAADLDLIPSTCETCKDIHPTAEELLECQRYVNWSDPNETQLEEILLKSLDTTFDNAVSLITTMGYSEAAARAAVVRAAAQYNWRESLAGFGEAAVEVLKTEGDMLPREGASIEDMRKIEQAVLGSMVAVVNEAQPFYTTGDVMFCLLMSDMNVANACAMDYSTASLPAVGAQVIAQPVMGNYEPGSGPDLSVSITNPQTGVTFRGKLTPVPPSSYGSVKADSSTVPTSSKPSVSGKMQCVIPNIEPKEHPIPTRDHSEDQXPFVAAATQSVKNDKPSPSKRGSSKRDSLHRQKLTSFDKSSRALGSKGSLRSGKYSSSGVVLDRNAG

SEQ ID NO: 85716 - protein, 122 aa, Setaria italica
  Transcript Sequence Number=SeqID_19742
  Subcellular localization annotation: CTP_CleavageSite=18; ConfidenceScore=5.36e-01
MALRGITPRRRPLLPVPRAFFSSNPPFPPPPPPANGPDAAHPLPSSPQSNPGAPPRDSASALFQDIRERLRVSPRSPPPRRIPMNHSPKELPDVRQALESFRRSGGLTSPSTPGASPPLPEP

SEQ ID NO: 85717 - protein, 385 aa, Setaria italica
  misc_feature (83)..(83): Xaa can be any naturally occurring amino acid
  misc_feature (125)..(125): Xaa can be any naturally occurring amino acid
  misc_feature (158)..(158): Xaa can be any naturally occurring amino acid
  misc_feature (168)..(168): Xaa can be any naturally occurring amino acid
  misc_feature (184)..(184): Xaa can be any naturally occurring amino acid
  Transcript Sequence Number=SeqID_19743
  Homolog annotation: Hit_ID=Q9XI85; Match level="QueryCoverage=99%, HitCoverage=75%, E-value=1e-152, Identity=65%"; Hit description =F7A19.11 protein
  Pfam annotation: Domain name=DUF246; Domain location=1-339; Score =602.9; E_value=3.4e-178; Accession=PF03138.6; Description=Plant protein family
MRSEICDMVAVARLLNLTMVVPELDKRSFWADQSNFGDIFDVRHFIDSLRDEVHIIKQLPERLDPGDSDVILQMPPVSWSDEXYYLHQILPLFSKYSAIHFNKTDARLANNGISTELQLLRCRVXFHALKFTLKLRDWGINLVHKLRAKGSFVALHLXRYEMDMLAFXGCNHGLSSEEAEELKXMRYAYPWWRDKEIDSQAKRSQGLCPLTPEETSLVLKALGFQKEALIYIAAGEIYGGDRRLEPLRAAFPKLVRKEMLLDSEVLRQFQNHSSQMAALDFIVSTASDVFIPTFDGNMAKLVEGHRRFLGFRRSVVLDRRKLVELLDLYTNKAISWDNFASSVQETHKSRVAQPSCRQKLENRPKEEDYFYANPHECLANSSLCS

SEQ ID NO: 85718 - protein, 40 aa, Setaria italica
  Transcript Sequence Number=SeqID_19744
MVFKLTFVMICMGKLDEDYGLLYITFYNCRVGYFRVWGFS

SEQ ID NO: 85719 - protein, 390 aa, Setaria italica
  Transcript Sequence Number=SeqID_19745
  Gene Ontology: Mol. function=protein binding; Biological process =apoptosis
  Homolog annotation: Hit_ID=Q53Q38; Match level="QueryCoverage=93%, HitCoverage=74%, E-value=1e-128, Identity=63%"; Hit description =Leucine Rich Repeat family protein
  Pfam annotation: Domain name=LRR_1; Domain location=116-137; Score =11.1; E_value=2.3; Accession=PF00560.25; Description=Leucine Rich Repeat
  Pfam annotation: Domain name=LRR_1; Domain location=139-160; Score =8.0; E_value=9.1; Accession=PF00560.25; Description=Leucine Rich Repeat
  Pfam annotation: Domain name=LRR_1; Domain location=162-183; Score =8.2; E_value=8.2; Accession=PF00560.25; Description=Leucine Rich Repeat
  Pfam annotation: Domain name=LRR_1; Domain location=319-341; Score =3.4; E_value=68; Accession=PF00560.25; Description=Leucine Rich Repeat
  Pfam module annotation: Pfam domain module=LRR_1::LRR_1::LRR_1::LRR _1; Domain location=116-137::139-160::162-183::319-341
EKITPEDVAELNLMELIARNLLQVEEYDELGRVNTCKMHDIVRDLALSIANDEKFSSANDQAAMIQMDQEVRRLSLCGWKDSDAPTTKIPHLRTLFSLDGVISTRMLASIFSESSYLTVLELQDSEITEVPVSIGNLFNLRYIGLRRTRIKSLPECIEKLSNLQTLDIKQTKIEKLPRGIVKVKKLRHLLADRVIDEKQKDFQYFAGVQPPKDLSKLVELQTLETVEATNDLADQLDKLRKLQSVWIGKVSAMHSAELFATLSNLPLLSSLLLNAIDENQTLHLEALKPQYKQLHRLIVRGHLAARTLQCPIFHSHGENLKFLALSWSGLQEDPLPLLAQHVPNLTYLSLNRVSSADTLVMSDGCFPQLKTLVLKNLCNVKLLMIGKGDP

SEQ ID NO: 85720 - protein, 87 aa, Setaria italica
  Transcript Sequence Number=SeqID_19746
GAASRCLRRAAEPSNSSSIWTGEIFTLSPLTSAGEWRQRKDLSRACGRSGLSLSPSGRRTFQFKFHLDGNAKIPAATGLACGQALRF

SEQ ID NO: 85721 - protein, 226 aa, Setaria italica
  Transcript Sequence Number=SeqID_19747
  Gene Ontology: Mol. function=nutrient reservoir activity; Cellular component=extracellular region; Biological process=oxidation reduction
  Homolog annotation: Hit_ID=Q10BU2; Match level="QueryCoverage=88%, HitCoverage=84%, E-value=5e-80, Identity=74%"; Hit description =Germin-like protein 3-7
  Pfam annotation: Domain name=Cupin_1; Domain location=70-217; Score =130.1; E_value=6.9e-36; Accession=PF00190.14; Description=Cupin
  Pfam annotation: Domain name=Cupin_2; Domain location=104-179; Score =50.5; E_value=6.4e-12; Accession=PF07883.3; Description=Cupin domain
  Pfam module annotation: Pfam domain module=Cupin_1::Cupin_2; Domain location=70-217::104-179
MSKPSSSASLLLLLLSSATLAATCLADPEPVQDFCVAAQRGSDATASLAFPGLPCKPASTVVSDDFFFAAHARAASTDNPAGAGVTPGNVEAFPGLNTLGLSLNRVDLAPGGVNPLHTHPRAAELVHVEEGEMLVGFVSTDGRFYSKVVRAGESFVIPRGMMHFQYNVGAAAARAMTVFNSQLPGVVLAAQSLFGAEPEVPDAVLAKSFQVDAEIIKLLKSKFRKG

SEQ ID NO: 85722 - protein, 276 aa, Setaria italica
  misc_feature (139)..(139): Xaa can be any naturally occurring amino acid
  Transcript Sequence Number=SeqID_19748
  Gene Ontology: Mol. function=transferase activity; Cellular component= endoplasmic reticulum
  Homolog annotation: Hit_ID=Q0R3Z8; Match level="QueryCoverage=97%, HitCoverage=74%, E-value=1e-124, Identity=78%"; Hit description =Putative alpha 1,3-xylosyltransferase
AAFAAAAGNGTVLLAAVSGPYHPFLSNWLISVRRAGRADQVLVIAEDYETLDRINAAWPGHAVLVPPAPDAQAAHKFGSQGFFNFTSRRPRHLLQILELGYSVMYNDVDMVWLADPFPYLVGDHDVYFMDDMTPVKPTXHSNELPPPGKKGRTYICSCMIFLRPTEGAKLLLRKWIEELKEQPWSKQKKANDQPGFNWALNKTAGQVDVYLLPQSAFPTGGLYFKNKTWVKETKGKHVIIHNNYITGFEKKIKRFRDHGLWLVDEHSHESQSLGRI

SEQ ID NO: 85723 - protein, 126 aa, Setaria italica
  misc_feature (74)..(74): Xaa can be any naturally occurring amino acid
  Transcript Sequence Number=SeqID_19749
  Gene Ontology: Cellular component=nucleus; Biological process =regulation of transcription, DNA-dependent
LEEFKHFLPDNPTPPQAATISRVRNDEKSTLIHSARSVQTIKRERAFLSTADRASSVDRPDPEHDLLRRCTKEXNNACHSQDRRDYERNDKYDNGGLCGRKPQRKLEETGDDALGGPSISPLSFND

SEQ ID NO: 85724 - protein, 156 aa, Setaria italica
  Transcript Sequence Number=SeqID_19750
  Gene Ontology: Mol. function=structural constituent of ribosome; Cellular component=ribonucleoprotein complex; Biological process =translation
  Homolog annotation: Hit_ID=B4FC48; Match level="QueryCoverage=98%, HitCoverage=99%, E-value=1e-70, Identity=84%"; Hit description=50S ribosomal protein L11
  Pfam annotation: Domain name=Ribosomal_L11; Domain location=82-152; Score=92.6; E_value=1.4e-24; Accession=PF00298.11; Description =Ribosomal protein L11, RNA binding domain
  Pfam annotation: Domain name=Ribosomal_L11_N; Domain location=18-77; Score=80.1; E_value=8.2e-21; Accession=PF03946.6; Description =Ribosomal protein L11, N-terminal domain
  Pfam module annotation: Pfam domain module=Ribosomal_L11::Ribosomal _L11_N; Domain location=82-152::18-77
MMAATLKDAAARKPVLATIRLIVPAGAARPAPPVGPALGFYRLNLMAFCKDFNARTQKYKAETPMQVTLTAYKDSTFEFVVKSPSVSWFLKKAAGIETASSRPGHSNVSSLTLRHVYEIAKLKQADPFCKHMSLEALCKSIIGTANSMGIEIVKDL

SEQ ID NO: 85725 - protein, 112 aa, Setaria italica
  Transcript Sequence Number=SeqID_19751
MASRTSVPSLALLLALLLSCAVMMSSAARKLEEEAAPKEEEPELPPHLPVPELPVPEHELPPLPKVELPPFPEVHLPPKPELPPFPKVELPPKPEMPSIPEFHFPQPEAAKP

SEQ ID NO: 85726 - protein, 47 aa, Setaria italica
  Transcript Sequence Number=SeqID_19752
AEYQPFVSVDLCTAVLLLSSINRFRLRLSEFPVKLKIFMKLLVAVPI

SEQ ID NO: 85727 - protein, 95 aa, Setaria italica
  Transcript Sequence Number=SeqID_19753
  Gene Ontology: Mol. function=isoleucine-tRNA ligase activity; Cellular component=cytoplasm; Biological process=tRNA aminoacylation for protein translation
  Homolog annotation: Hit_ID=Q9FI67; Match level="QueryCoverage=56%, HitCoverage=5%, E-value=3e-20, Identity=85%"; Hit description =Isoleucyl-tRNA synthetase
FDSGSSWAAVLAKRDGLKFPADIYLEGSDQHRGWFQSSLLTSIATTGKAPYSNVDLNLQDKFPADIYLEGSDQHRGWFQSSLLTSIATTGSIFMV

SEQ ID NO: 85728 - protein, 201 aa, Setaria italica
  misc_feature (138)..(138): Xaa can be any naturally occurring amino acid
  Transcript Sequence Number=SeqID_19754
  Gene Ontology: Mol. function=isoleucine-tRNA ligase activity; Cellular component=cytoplasm; Biological process=tRNA aminoacylation for protein translation
  Homolog annotation: Hit_ID=B9RT52; Match level="QueryCoverage=99%, HitCoverage=17%, E-value=9e-73, Identity=64%"; Hit description =Isoleucyl tRNA synthetase, putative
TGMLDEFLPNVSLVTWTTTPWTIPANAAVAVNPELAYAVAEVHSVPISESTSGGKQRKVGSILSAEKGKLFVIVASDLVTTLESKWGVKLVVHKSFPGSALEHSRYVHPVNGNECSVVLGGDYITTESGTGLVHTAPXHGQEDYITGLKYGLPIISPVDDEGNFTAEAGQFGGLSVLGAGNAAVVKYLDEQCSLILEEPYK

SEQ ID NO: 85729 - protein, 676 aa, Setaria italica
  Transcript Sequence Number=SeqID_19755
  Gene Ontology: Mol. function=isoleucine-tRNA ligase activity; Cellular component=cytoplasm; Biological process=tRNA aminoacylation for protein translation
  Homolog annotation: Hit_ID=B9RT52; Match level="QueryCoverage=95%, HitCoverage=58%, E-value=0.0, Identity=72%"; Hit description =Isoleucyl tRNA synthetase, putative
  Pfam annotation: Domain name=Anticodon_1; Domain location=400-565; Score=143.1; E_value=8.9e-40; Accession=PF08264.5; Description =Anticodon-binding domain
  Pfam annotation: Domain name=tRNA-synt_1; Domain location=3-357; Score=121.0; E_value=4e-33; Accession=PF00133.14; Description=tRNA synthetases class I (I, L, M and V)
  Pfam annotation: Domain name=tRNA-synt_1g; Domain location=49-364; Score=-277.2; E_value=0.0059; Accession=PF09334.3; Description=tRNA synthetases class I (M)
  Pfam annotation: Domain name=zf-FPG_IleRS; Domain location=634-663; Score=49.4; E_value=1.4e-11; Accession=PF06827.6; Description=Zinc finger found in FPG and IleRS
  Pfam module annotation: Pfam domain module=Anticodon_1::tRNA-synt _1::tRNA-synt_1g::zf-FPG_IleRS; Domain location=400-565::3-357::49 -364::634-663
SPPRTEHSLPFTGWTYLLCSKADPGNDLCTTTESGTGLVHTAPGHGQEDYITGLKYGLPIISPVDDEGNFTAEAGQFGGLSVLGAGNAAVVKYLDEQCSLILEEPYKHKYPYDWRSKEPTIFRATEQWFASVDGFRNAAMDAIRQVTWVPSQAENRIVAMTSSRSDWCISRQRTWGVPIPVFYHVDSKEPLITEETIEHIKSIVSKKGSDAWWYMTTEELLPDKYRDKASEYRKGTDTMDVWFDSGSSWAAVLAKRDGLKFPADIYLEGSDQHRGWFQSSLLTSIATTGKAPYSNVITHGFVLDEKGFKMSKSIGNVVDPEKLIVGGKNQKEEPTYGADVLRLWVSSVDYTGDVLIGQQILRQMSDMYRKLRGTMRFLLSNLHDWNPDNSVPYNDLPKIDKYALFQLETVVASMKDGYENYQFYKVYQMLQRFAIVGLSNFYLDVAKDRLYVGGRASFTRKSCQTVLTAHLLYLVRAIAPIMPHLAEDIWQNLPFQYTLEDGSLAKFVFDLKWPEKNEEWLSVAKDDVDFLGIILELRSEINKILENARTGKLIGSSLDAKVYLHAGSSDTAIKLQELSSASNDADALHRLFITSQVEVLPTLSEETASSVSYIGKFSDPRTGDIWIGVTRADGSKCERCWNYTRDVGSFRDHPTLCARCYGVIDLQPQPAAAAVS

SEQ ID NO: 85730 - protein, 71 aa, Setaria italica
  Transcript Sequence Number=SeqID_19756
RRFHRHEPPRPPVLLRRRQAHQGARPPHADLVQSHRSFGPFLQSGTSMPDLEADLNWSCLLVYLIDTLFSL

SEQ ID NO: 85731 - protein, 65 aa, Setaria italica
  Transcript Sequence Number=SeqID_19757
FGGRLKLVLPSCLSHRHSFFLVIGRGDQLIGTTSLSLKDKISISSQEACDFYFIFLNRRPAFAPV

SEQ ID NO: 85732 - protein, 66 aa, Setaria italica
  misc_feature (49)..(49): Xaa can be any naturally occurring amino acid
  Transcript Sequence Number=SeqID_19758
MARGPGMPAAAALGAVVILAAAAGWHGAEGKSCTNAFPGLTSHTERAAXQLRSAPRAPVPERSRPR

SEQ ID NO: 85733 - protein, 302 aa, Setaria italica
  Transcript Sequence Number=SeqID_19759
  Gene Ontology: Mol. function=protein binding
  Homolog annotation: Hit_ID=B6SWC5; Match level="QueryCoverage=100%, HitCoverage=65%, E-value=1e-157, Identity=89%"; Hit description =Kelch motif family protein
  Pfam annotation: Domain name=Kelch_1; Domain location=15-60; Score =57.4; E_value=5.3e-14; Accession=PF01344.17; Description=Kelch motif
  Pfam annotation: Domain name=Kelch_1; Domain location=62-111; Score =56.4; E_value=1.1e-13; Accession=PF01344.17; Description=Kelch motif
  Pfam annotation: Domain name=Kelch_2; Domain location=15-60; Score =26.3; E_value=0.00012; Accession=PF07646.7; Description=Kelch motif
  Pfam annotation: Domain name=Kelch_2; Domain location=62-111; Score =28.5; E_value=2.7e-05; Accession=PF07646.7; Description=Kelch motif
  Pfam module annotation: Pfam domain module=Kelch_1::Kelch_1::Kelch _2::Kelch_2; Domain location=15-60::62-111::15-60::62-111
VRSWFWRRNGLDQMPFCGCSVGVADGSLYVVGGFSKAVALNCVWRYDPFLNLWEEASPMMTGRAFCKATFLNGKLYVVGGVSRGRNGLLPLRSAEVFDPKTGLWSELPEMPFAKAQVLPTAFLADVLKPIATGMAPYKGKLYVPQSLYSWPFFFDIGGEIYDPELNSWSTMPDGLGDGWPARQAGTKLGIVIDDKLYTLEPSSSLDSGQIKRYNSEEDTWVAITPQVPVNDFTDAEAPYLLAGLRGRLHVITKVANNTLQVMQAVVQNSADNRASEENVLWTPVASRNFGTAELVSCQVLDV

SEQ ID NO: 85734 - protein, 83 aa, Setaria italica
  Transcript Sequence Number=SeqID_19760
LPILCCVSQGRVNEDWRKAGYLEAINVTNSRSVDHRRAPTKIGGGTTGRRMGNGDEVVVWREMGAMRRIAGGGGDAGRARSRR

SEQ ID NO: 85735 - protein, 243 aa, Setaria italica
  Transcript Sequence Number=SeqID_19761
  Gene Ontology: Mol. function=transcription regulator activity; Cellular component=nucleus; Biological process=regulation of transcription
  Homolog annotation: Hit_ID=B4FMK3; Match level="QueryCoverage=80%, HitCoverage=70%, E-value=1e-57, Identity=61%"; Hit description=BHLH transcription factor
  Pfam annotation: Domain name=HLH; Domain location=89-138; Score=33.0; E_value=1.2e-06; Accession=PF00010.18; Description=Helix-loop-helix DNA-binding domain
FSLALSLDAAAAEASGSGKHGEGGKADREAVQLPGLFPPVFGGGVQPTHLRPSPPTQVFHAQQPKQGGAAVGPQPPAPRPKVRARRGQATDPHSIAERLRRERIAERMRALQELVPNTNKTDRAAMLDEILDYVKFLRLQVKVLSMSRLGGAGAVAQLVADIPLSVKGEASDSGSKQQIWEKWSTDGTEKQVAKLMEEDIGAAMQFLQSKALCMMPISLAMAIYDTQNPQDGHSLKPEPNTSS

SEQ ID NO: 85736 - protein, 116 aa, Setaria italica
  Transcript Sequence Number=SeqID_19762
  Gene Ontology: Mol. function=hydrolase activity, hydrolyzing O -glycosyl compounds; Cellular component=chloroplast; Biological process=carbohydrate metabolic process
  Homolog annotation: Hit_ID=Q53MQ1; Match level="QueryCoverage=100%, HitCoverage=14%, E-value=6e-37, Identity=68%"; Hit description =Glycosyl hydrolase family 3 C terminal domain containing protein, expressed
  Pfam annotation: Domain name=Glyco_hydro_3_C; Domain location=5-116; Score=3.9; E_value=2.4e-07; Accession=PF01915.14; Description =Glycosyl hydrolase family 3 C terminal domain
  Subcellular localization annotation: CTP_CleavageSite=70; ConfidenceScore=5.10e-01
IQGYVKNVKFLAGCNSAACNAAATQQAAALASSSDAVILFMGLSQTQESEGKDRTSLLLPGNQQSLITAVANAAKRPVILVLLSGGPVDITFAQSNPKIGAILWAGYPGQAGGLAI

SEQ ID NO: 85737 - protein, 61 aa, Setaria italica
  Transcript Sequence Number=SeqID_19763
  Gene Ontology: Biological process=vesicle docking during exocytosis
  Homolog annotation: Hit_ID=B9S0W7; Match level="QueryCoverage=96%, HitCoverage=9%, E-value=1e-14, Identity=59%"; Hit description =Vacuolar protein sorting, putative
KSTNHSVCSELKDFVRRLHSLPEIARHVHLAQHLQSFTGKPSFHARLDIEQTILEVQNFEM

SEQ ID NO: 85738 - protein, 169 aa, Setaria italica
  misc_feature (94)..(94): Xaa can be any naturally occurring amino acid
  misc_feature (139)..(139): Xaa can be any naturally occurring amino acid
  misc_feature (159)..(159): Xaa can be any naturally occurring amino acid
  Transcript Sequence Number=SeqID_19764
  Gene Ontology: Mol. function=signal transducer activity; Cellular component=late endosome membrane; Biological process=vesicle docking during exocytosis
  Homolog annotation: Hit_ID=B9S0W7; Match level="QueryCoverage=96%, HitCoverage=28%, E-value=1e-45, Identity=57%"; Hit description =Vacuolar protein sorting, putative
VNFIPRCFEYVEEMIHKQEPIENVLRLLVLLSLTNAGLPKKNFDYLRREMLHSYGFEHMNLLYNLEKAGLFKKQESRSNWVGITRALQLIVDPXSDISYIFSGYAPLSIRLVQHAVRSGWRSIEELLKLLPGPHLDLKXGGLTIDSSLEVHPGSGAQQXIDRVGHRSLV

SEQ ID NO: 85739 - protein, 144 aa, Setaria italica
  misc_feature (101)..(101): Xaa can be any naturally occurring amino acid
  misc_feature (118)..(118): Xaa can be any naturally occurring amino acid
  Transcript Sequence Number=SeqID_19765
  Gene Ontology: Cellular component=late endosome membrane; Biological process=vesicle docking during exocytosis
  Homolog annotation: Hit_ID=B9S0W7; Match level="QueryCoverage=99%, HitCoverage=25%, E-value=1e-55, Identity=69%"; Hit description =Vacuolar protein sorting, putative
FELDHSLQECLIEGDTSSIWHVAKAIHKLEFAFGVIPNVRAKGVASTKAAELLNNMQLEDPVNMDDMGIPEINTVILLDREVDMVTPMCSQLTYEGLLDEXEVDASIMGTQQDGKKVXVPLNSSDKLYKEIRDLNFEVVVQVFT

SEQ ID NO: 85740 - protein, 106 aa, Setaria italica
  Transcript Sequence Number=SeqID_19766
  Gene Ontology: Biological process=vesicle docking during exocytosis
  Homolog annotation: Hit_ID=B9S0W7; Match level="QueryCoverage=79%, HitCoverage=14%, E-value=8e-14, Identity=52%"; Hit description =Vacuolar protein sorting, putative
KVFHIYSHITVISHFTAGRSIEELLKLLPGPHLDLKRGGLTIDSSLEVHPGSGAQQSIDRVGHRSLVLVVFIGGVTFAEIAALRFLSAQEGMGYDFLVATNKRYVK

SEQ ID NO: 85741 - protein, 62 aa, Setaria italica
  Transcript Sequence Number=SeqID_19767
  Gene Ontology: Biological process=vesicle docking during exocytosis
  Homolog annotation: Hit_ID=B9S0W7; Match level="QueryCoverage=100%, HitCoverage=10%, E-value=7e-13, Identity=59%"; Hit description =Vacuolar protein sorting, putative
MAQIPNLDNAPLNLAALREQSQKDLLGILKSIRGKKCLVIDPKLAGTLSLIVQTSLLKEYGA

SEQ ID NO: 85742 - protein, 304 aa, Setaria italica
  Transcript Sequence Number=SeqID_19768
  Gene Ontology: Cellular component=late endosome membrane; Biological process=vesicle docking during exocytosis
  Homolog annotation: Hit_ID=B9S0W7; Match level="QueryCoverage=97%, HitCoverage=49%, E-value=1e-108, Identity=64%"; Hit description =Vacuolar protein sorting, putative
PCNILQMLQINNGSVEVDASIMGTQQDGKKVKVPLNSSDKLYKEIRDLNFEVVVQVLRQKATSIQQDYAEVKSTNTQSVSELKDFVRRLHSLPEIARHVHLAQHLQSFTGKPSFHARLDIEQTILEVQNFEICFEYVEEMIHKQEPIENVLRLLVLLSLTNAGLPKKNFDYLRREMLHSYGFEHMNLLYNLEKAGLFKKQESRSNWVGITRALQLIVDVNDTANPSDISYIFSGYAPLSIRLVQHAVRSGWRSIEELLKLLPGPHLDLKRGGLTIDSSLEVHPGSGAQQSIDRVGHRSLIYCWL

SEQ ID NO: 85743 - protein, 590 aa, Setaria italica
  misc_feature (345)..(345): Xaa can be any naturally occurring amino acid
  Transcript Sequence Number=SeqID_19769
  Gene Ontology: Cellular component=late endosome membrane; Biological process=vesicle docking during exocytosis
  Homolog annotation: Hit_ID=B9S0W7; Match level="QueryCoverage=95%, HitCoverage=95%, E-value=0.0, Identity=65%"; Hit description =Vacuolar protein sorting, putative
  Pfam annotation: Domain name=Sec1; Domain location=33-581; Score =207.2; E_value=4.4e-59; Accession=PF00995.15; Description=Sec1 family
EIPNLDNAPLNLAALREQSQKDLLGILKSIRGKKCLVIDPKLAGTLSLIVQTSLLKEYGAELRILSSDPLQTECPKIVYLVRSQLSLMKFIASQIRNDESKGLQREYFLYFVPRRIVACEKILEEEKVHQKLTLGEYPLYLVPLDDDVLSFELDHSLQECLIEGDTSSIWHVAKAIHKLEFAFGVIPNVRAKGVASTKAAELLNNMQLEDPVNMDDMGIPEINTVILLDREVDMVTPMCSQLTYEGLLDEMLQINNGSVEVDASIMGTQQDGKKVKVPLNSSDKLYKEIRDLNFEVVVQVLRQKATSIQQDYAEVKSTNTQSVSELKDFVRRLHSLPEIARHVHXKPSFHARLDIEQTILEVQNFEICFEYVEEMIHKQEPIENVLRLLVLLSLTNAGLPKKNFDYLRREMLHSYGFEHMNLLYNLEKAGLFKKQESRSNWVGITRALQLIVDVNDTANPSDISYIFSGYAPLSIRLVQHAVRSGWRSIEELLKLLPGPHLDLKRGGLTIDSSLEVHPGSGAQQSIDRVGHRSLVLVVFIGGVTFAEIAALRFLSAQEGMGYDFLVATTKVVNGNTILRPIIASSKSGMM

SEQ ID NO: 85744 - protein, 59 aa, Setaria italica
  Transcript Sequence Number=SeqID_19770
RKEGTADKEKKPGSSKCVTTKDCHLKRLVCAKKCTMAAHKKCAAKCSRACTAAGLPICT

SEQ ID NO: 85745 - protein, 72 aa, Setaria italica
  Transcript Sequence Number=SeqID_19771
FFFQGDLEIHEYFHQLEKNDPTLQQHYPGQCFAANNWLGNCLNMMIQPQQNKLVEAGDATVRINRQTHILII

SEQ ID NO: 85746 - protein, 192 aa, Setaria italica
  Transcript Sequence Number=SeqID_19772
  Gene Ontology: Mol. function=choline transmembrane transporter activity; Cellular component=intracellular membrane-bounded organelle; Biological process=positive regulation of I-kappaB kinase/NF-kappaB cascade
  Homolog annotation: Hit_ID=Q9M7X1; Match level="QueryCoverage=98%, HitCoverage=29%, E-value=1e-70, Identity=62%"; Hit description =MJK13.4 protein
  Pfam annotation: Domain name=DUF580; Domain location=1-190; Score =16.7; E_value=4.6e-09; Accession=PF04515.4; Description=Protein of unknown function, DUF580
WVRFILESLRRRLKFVNSAHDSWFGKTASSSSQCCLGCIDWTLKSVNRNAYIMIAITGKGFCKASALATELIMKNILRIGKVNVIGDVILMLGKLCVSLFCALFAFIMLDKHKYRSGHNKISSPLVPVLVSWALGYTVAKLFFAVVEMSIDTIMLSFCQDTEEHEGNARYAPPLLMETLDEESELRRLTEGP

SEQ ID NO: 85747 - protein, 76 aa, Setaria italica
  misc_feature (28)..(28): Xaa can be any naturally occurring amino acid
  Transcript Sequence Number=SeqID_19773
  Gene Ontology: Mol. function=transferase activity, transferring glycosyl groups; Cellular component=integral to membrane; Biological process=cell wall organization and biogenesis
  Homolog annotation: Hit_ID=Q7PC73; Match level="QueryCoverage=100%, HitCoverage=15%, E-value=2e-29, Identity=73%"; Hit description =Probable mannan synthase 5
  Subcellular localization annotation: CTP_CleavageSite=51; ConfidenceScore=5.06e-01
YCRQQFRWACGSANLFRKMAWKVLVAKXFFLVRRVVAPTVAFILYNIIIPVSVMIPEVFLPVWGVAYIPTALTVVT

SEQ ID NO: 85748 - protein, 50 aa, Setaria italica
  Transcript Sequence Number=SeqID_19774
TLPRHSHASSFSLYSSEVSRMTHILHHTMRRISLSLFGFSSSCSVILRSW

SEQ ID NO: 85749 - protein, 71 aa, Setaria italica
  Transcript Sequence Number=SeqID_19775
  Pfam annotation: Domain name=4F5; Domain location=1-56; Score=55.2; E_ value=2.6e-13; Accession=PF04419.6; Description=4F5 protein family
MTRGDQRERDRQRAQARRPVAKGRDDGLTPEQRRERDAKALQEKAARKAAQAAGGADAKGGKGAGKNGVKK

SEQ ID NO: 85750 - protein, 212 aa, Setaria italica
  misc_feature (7)..(7): Xaa can be any naturally occurring amino acid
  misc_feature (205)..(205): Xaa can be any naturally occurring amino acid
  Transcript Sequence Number=SeqID_19776
  Gene Ontology: Mol. function=cobalt ion transmembrane transporter activity; Cellular component=integral to membrane; Biological process=cobalamin biosynthetic process
  Homolog annotation: Hit_ID=UPI000034EF75; Match level="QueryCoverage =99%, HitCoverage=54%, E-value=4e-78, Identity=66%"; Hit description =cobalt ion transmembrane transporter
  Pfam annotation: Domain name=CbiQ; Domain location=2-201; Score= -13.9; E_value=0.0017; Accession=PF02361.8; Description=Cobalt transport protein
VVLPARXNIYMPVGLVAFLALLSVWILPNHVWKDQLGRVALLSGFIFIMLGFGADGAPSLVQTRTPPPSVLGIPNVPCSTSGYSYTIMKLGPLQFTRKGLSVASTSASLSFVIFQSASLCLTTTTPEQLASALWWFMIPLKHIGVPVPEIILTLLLSLRFINLVFDEVRNSALAIVARRINWKKLSAMETIDVFFNYIQRIFKNXFDHAETN

SEQ ID NO: 85751 - protein, 94 aa, Setaria italica
  Transcript Sequence Number=SeqID_19777
  Subcellular localization annotation: CTP_CleavageSite=54; ConfidenceScore=5.57e-01
HCTVRHCSLPHPLPANARGSRTVRALRPMAAVAGSAGRSARPVVALALLLLAVSAAAPVATAGASAAVNGDRLRAEQIRKQASDAAASAAALAA

SEQ ID NO: 85752 - protein, 63 aa, Setaria italica
  Transcript Sequence Number=SeqID_19778
  Homolog annotation: Hit_ID=Q651X7; Match level="QueryCoverage=84%, HitCoverage=7%, E-value=7e-15, Identity=69%"; Hit description =Cellulose synthase-like protein E1
GRNMPLNGFCLQVVLCGLLVIINIPIYEAMFLRKDRGRIPFSVTLASVGVVMFALSLYHYFEV

SEQ ID NO: 85753 - protein, 50 aa, Setaria italica
  Transcript Sequence Number=SeqID_19779
IITKFLVMTRVAKRSGRTCYHYFTSEKIITRSSPLAFCGNRCKKYTSNPL

SEQ ID NO: 85754 - protein, 721 aa, Setaria italica
  Transcript Sequence Number=SeqID_19780
  Gene Ontology: Mol. function=transferase activity, transferring glycosyl groups; Cellular component=integral to membrane; Biological process=cellulose biosynthetic process
  Homolog annotation: Hit_ID=B6SW15; Match level="QueryCoverage=99%, HitCoverage=99%, E-value=0.0, Identity=77%"; Hit description=CSLE6 -cellulose synthase-like family E
  Pfam annotation: Domain name=Cellulose_synt; Domain location=3-721; Score=300.1; E_value=4.8e-87; Accession=PF03552.6; Description =Cellulose synthase
MERLFATEKLGGRALYKLHATTLFVGICLVLCYRATHVPAAGRAAWLGMLAAELWFGFYWVITQSARWCPSRRCAFKDRLAARYGERLPCVDIFVCTADPQSEPPSLVMATVLSLMAYNYPPEKLNVYLSDDGGSILTFYALWETSAFAKHWLPFCRRYKIEPRSPAAYFAQSDKPSDPRALEEWSFVKGLYEEMTERIDSAVRSGKVPEQIRVNHKGFSEWNTGANSKDHQPIVQILIDGKDRDAVDNEGNVLPTLVYMAREKRPQYHHNFKAGAMNALIRVSSVISNSPIIMNVDCDMYSNNSDSIREALCFFLDEETGHKIAFVQYPQNYNNMTKNNIYGNSLNVINKVEMGGMDTWGGPLYIGTGCFHRREALCGRTFTKDYKEDWDRGIKTQQGIDLTEEKAKSLATCTYELNTQWGNEIGLKYGCPVEDVITGLAIHCRGWNSVYNDPPRAAFVGVAPTTMAQTILQHKRWSEGNFSIFLSKYCPFLFGHGKTRLPHQMGYSIYGLWAPNSLPTLYYVVIPSLGLLKGTPLFPEIMSPWITPFIYVSVVENIYSLYEALTSGDTLKGWWNGQRMWMVKRITSYLYGVIDNIRKLLGLSKMGFVVSPKVSDEDESKRYEQEIMEFGTSSPEYVIIATIALLNLVCLVGGLCRILTSGQNMQLNGFFLQVVLCGLLVIINIPIYEAMFLRKDRGRIPFSVTLASLGFVMLALFVPIF

SEQ ID NO: 85755 - protein, 62 aa, Setaria italica
  Transcript Sequence Number=SeqID_19781
SKHTTQKNLAQDQICTVQDPRSYVQIQEPSLPKLRFIIAYFTQTNLPHPPALNQKIQHHGQN

SEQ ID NO: 85756 - protein, 37 aa, Setaria italica
  Transcript Sequence Number=SeqID_19782
GAKIVPFIFTSIIFSATFLSVCYIRGLCQAYNAVQDS

SEQ ID NO: 85757 - protein, 358 aa, Setaria italica
  Transcript Sequence Number=SeqID_19783
  Gene Ontology: Mol. function=transposase activity; Cellular component= membrane; Biological process=transposition, DNA-mediated
  Homolog annotation: Hit_ID=Q10N80; Match level="QueryCoverage=82%, HitCoverage=97%, E-value=2e-73, Identity=49%"; Hit description =Transposon protein, putative, CACTA, En/Spm sub-class
  Pfam annotation: Domain name=Plant_tran; Domain location=216-310; Score=-54.2; E_value=0.09; Accession=PF04827.6; Description=Plant transposon protein
  Pfam annotation: Domain name=Transposase_11; Domain location=136-302; Score=31.0; E_value=4.9e-06; Accession=PF01609.13; Description =Transposase DDE domain
  Pfam module annotation: Pfam domain module=Plant_tran::Transposase _11; Domain location=216-310::136-302
MVHLKAMGKKIWGIVNEGFIILDEKNMSEADDANELLNDQAMNVLYGALDINEFNRVKNLTTVYEIWNKLMKIHEETSTVKEAKLYVFKGKFSEFSMKKDEDVSTMFNQLNDIVNELKGLGFNIHPKLQEARFWPQDCIGTIDGTHIPVTVTLVDQPKYIGWHGYPSQNVMAVCDFDMRFTFAVTGWSGSIHDTRVLLDTLLTYKEQFSHPPDGKYYLVDSGYPNRKGFLAPYKGQRYHVYEWQHGQHPAGLKEVFNHAHSSLRNVIERSFGVLKMKWRILLNLPSYLVNKQSKIIVTCMALHNFIRDSVIHYVHFEQDFEEDDANPTQPSTDGGAAALGNDMDMGALRDAIVVAMVS

SEQ ID NO: 85758 - protein, 119 aa, Setaria italica
  misc_feature (58)..(58): Xaa can be any naturally occurring amino acid
  Transcript Sequence Number=SeqID_19784
  Gene Ontology: Mol. function=phosphoric ester hydrolase activity; Cellular component=chloroplast; Biological process=carbohydrate metabolic process
  Homolog annotation: Hit_ID=B6SRX9; Match level="QueryCoverage=99%, HitCoverage=29%, E-value=7e-65, Identity=98%"; Hit description =Fructose-1,6-bisphosphatase
  Pfam annotation: Domain name=FBPase; Domain location=1-119; Score= -107.7; E_value=1.2e-06; Accession=PF00316.12; Description=Fructose-1- 6-bisphosphatase
PVAAGYVLYSSATILCISFGAGTHAFTLDWSTGEFILTHPSLQIPPRGQIYSVNDARXFDWPEGLRKYIDTIRQGKGQHPKKYSARYVCSLVADFHRTLIYGGVAMNPRDHLRLVYEAN

SEQ ID NO: 85759 - protein, 70 aa, Setaria italica
  Transcript Sequence Number=SeqID_19785
  Subcellular localization annotation: CTP_CleavageSite=52; ConfidenceScore=5.09e-01
ASLFLVNSFACTIAGTTCGWSLRILLHPLRFQLSALSFWTLVIAATPTAQLSASRSKKDQEQKSWGCNNH

SEQ ID NO: 85760 - protein, 93 aa, Setaria italica
  Transcript Sequence Number=SeqID_19786
GPRADRGETSHEQNGNQHRGGRQNPRSGPSRRRHESDTRADTKASRRSDPTGYTEGAAAADKPRIKRILRGSLGLSPTRCGERCGGDFGGDLR

SEQ ID NO: 85761 - protein, 253 aa, Setaria italica
  Transcript Sequence Number=SeqID_19787
LRIHYFRVTGSGRVIGHNNDLLELFCGVSPIDDRHTMFPVARAAIAPADRHLYIICKHRPAAGSSSTSGQQAHEKVFPPKAFSLNTADKSLSTLPPLPFTRGSWEAISACGKLWVPVVLVKRGSYGEAWSLIVYKLIGDCWSEVNSVEFPYKHSLERGYSGTLLQGYVVLHTNILLSFSNSSFFLFKCTSGDLSRVDTNGTSQYIPITGKAVYVKLHDMIYFIRGTKLFAYKYTPKWDKLLAAPIVIRKYLAL

SEQ ID NO: 85762 - protein, 227 aa, Setaria italica
  Transcript Sequence Number=SeqID_19788
  Gene Ontology: Mol. function=ATP-dependent helicase activity; Cellular component=nucleus; Biological process=nuclear-transcribed mRNA catabolic process, nonsense-mediated decay
  Homolog annotation: Hit_ID=Q5VQL1; Match level="QueryCoverage=93%, HitCoverage=21%, E-value=4e-62, Identity=62%"; Hit description=DEAD -box ATP-dependent RNA helicase 14
  Pfam annotation: Domain name=DEAD; Domain location=142-227; Score= -16.5; E_value=0.00065; Accession=PF00270.21; Description=DEADDEAH box helicase
  Subcellular localization annotation: CTP_CleavageSite=57; ConfidenceScore=5.35e-01
MYIPCPIHNMLSCFQPRSAAGANVSQSAQFTNQVSQAANGSQMSTEAYRAKHEITIVGNEAPAPFMTFQSTGFPSEILREALQVNNPSRGSTCLLSCSASCAFSLCYILDLDLYPYTVIHILVISKGIYFLQVMQAGFSAPTPIQAQSWPIALKGRDIVAVAKTGSGKTLGYLIPGFILLKRLQHNSREGPTVLVLSPTRELATQIQDEAIKFGKSSRISSTCLYGR

SEQ ID NO: 85763 - protein, 668 aa, Setaria italica
  Transcript Sequence Number=SeqID_19789
  Gene Ontology: Mol. function=ATP-dependent helicase activity; Cellular component=nucleus; Biological process=nuclear-transcribed mRNA catabolic process, nonsense-mediated decay
  Homolog annotation: Hit_ID=Q5VQL1; Match level="QueryCoverage=98%, HitCoverage=98%, E-value=0.0, Identity=65%"; Hit description=DEAD -box ATP-dependent RNA helicase 14
  Pfam annotation: Domain name=DEAD; Domain location=181-351; Score =256.3; E_value=7.3e-74; Accession=PF00270.21; Description=DEADDEAH box helicase
  Pfam annotation: Domain name=Helicase_C; Domain location=420-496; Score=130.3; E_value=6e-36; Accession=PF00271.23; Description =Helicase conserved C-terminal domain
  Pfam annotation: Domain name=ResIII; Domain location=177-346; Score= -17.7; E_value=0.0016; Accession=PF04851.7; Description=Type III restriction enzyme, res subunit
  Pfam annotation: Domain name=WW; Domain location=22-52; Score=40.5; E_ value=6.7e-09; Accession=PF00397.18; Description=WW domain
  Pfam module annotation: Pfam domain module=DEAD::Helicase _C::ResIII::WW; Domain location=181-351::420-496::177-346::22-52
MASSASAPASKGPRYAPPDPTLPKPWRALIDGNTGYLYFWNPDTKVTQYERPVAAVPASPSQPPGYSRPEERARSSGPSESRSEAAVSRSQYVPPSDNRTRNDHAEPRSAAGANVSQSAQFTNQVSQAANGSQMSTEAYRAKHEITIVGNEAPAPFMTFQSTGFPSEILREVMQAGFSAPTPIQAQSWPIALKGRDIVAVAKTGSGKTLGYLIPGFILLKRLQHNSREGPTVLVLSPTRELATQIQDEAIKFGKSSRISSTCLYGGAPKGPQLRELDRGADVVVATPGRLNDILEMNRVSLRQVSYLVLDEADRMLDMGFEPQIRKIVKQIPSRRQTLMYTATWPKEVRKIASDLLVNPIQVNIGNTDQLVANKSITQHVEVISHSEKSRRLDQILRSQEPGSKVIIFCSTKRMCDQLARNLSRQYGASAIHGDKSQAERDSVLSDFRSGRCPVLVATDVAARGLDIKDIRVVVNYDFPTGVEDYVHRIGRTGRAGATGSAFTFFGDQDSKYASDLVKILEGADQSVPPQLKEMASRGGYGGRSRRWASSDDSYGGQGYGGRRSTDSFNNSSFGNQAGGGSSFHSSFHNSTSGGQFGDTPSFHGSSRNNQTGDNPSFPPSSSNNQSGDGLSFHERFYGPRGGDQSRTSNDGFRARSRSPSKAVGVSNW

SEQ ID NO: 85764 - protein, 52 aa, Setaria italica
  Transcript Sequence Number=SeqID_19790
SYKRVLMYCLHLYEWLKSCSSSIVLSSTWYKLHTGHTHISSQKHQNEKNDEK

SEQ ID NO: 85765 - protein, 85 aa, Setaria italica
  misc_feature (21)..(21): Xaa can be any naturally occurring amino acid
  Transcript Sequence Number=SeqID_19791
  Gene Ontology: Mol. function=calcium ion binding; Cellular component =membrane
  Homolog annotation: Hit_ID=Q3HRP1; Match level="QueryCoverage=85%, HitCoverage=31%, E-value=1e-31, Identity=91%"; Hit description =Calcineurin B-like protein 6
  Pfam annotation: Domain name=efhand; Domain location=34-62; Score =27.7; E_value=4.7e-05; Accession=PF00036.24; Description=EF hand
KPCCLRKQEVKQMVVATLAEXSGMNLSDDIIEGIIDKTFEEADTKHDGKIDKEEWRNLVLRHPSLLKNMTLPYLRSVLLMSLPFS

SEQ ID NO: 85766 - protein, 60 aa, Setaria italica
  Transcript Sequence Number=SeqID_19792
KAGGTFHLLIHKLIICSKLHVLVHMIGLRVPCCMYFSYRCYNTLYVIIIHPLKSCSDFST

SEQ ID NO: 85767 - protein, 222 aa, Setaria italica
  Transcript Sequence Number=SeqID_19793
  Gene Ontology: Mol. function=calcium ion binding; Cellular component =membrane; Biological process=abscisic acid mediated signaling
  Homolog annotation: Hit_ID=Q3HRP1; Match level="QueryCoverage=98%, HitCoverage=96%, E-value=1e-117, Identity=94%"; Hit description =Calcineurin B-like protein 6
  Pfam annotation: Domain name=efhand; Domain location=119-147; Score =21.3; E_value=0.0041; Accession=PF00036.24; Description=EF hand
  Pfam annotation: Domain name=efhand; Domain location=163-191; Score =27.7; E_value=4.7e-05; Accession=PF00036.24; Description=EF hand
  Pfam annotation: Domain name=efhand; Domain location=82-110; Score =25.9; E_value=0.00017; Accession=PF00036.24; Description=EF hand
  Pfam module annotation: Pfam domain module=efhand::efhand::efhand; Domain location=119-147::163-191::82-110
MDFLRRLAAGLLKCCDLDIPNRPKGLEDPERLARETVFNVNEIEALYELFKKISSAVVDDGLINKDEFQLALFKTNRKDSMFADRVFDLFDTKHNGILEFEEFARALSVFHPNAPIDEKIDFAFKLYDLKQQGFIEKQEVKQMVVATLAESGMNLSDDIIEGIIDKTFEEADTKHDGKIDKEEWRNLVLRHPSLLKNMTLPYLRDITTTFPSFVFNSQVEDA

SEQ ID NO: 85768 - protein, 106 aa, Setaria italica
  Transcript Sequence Number=SeqID_19794
CTTDKKEYQDRQQDERAGLPASGAAPRGRTIGGGARSGWWGRRPLTWSCIVACCIIIIYSIYSAFFFAMMSSGWFMVAMQCNAHYRRRLQYVSSFVENLTGIFLSR

SEQ ID NO: 85769 - protein, 357 aa, Setaria italica
  misc_feature (11)..(11): Xaa can be any naturally occurring amino acid
  misc_feature (13)..(13): Xaa can be any naturally occurring amino acid
  misc_feature (185)..(185): Xaa can be any naturally occurring amino acid
  Transcript Sequence Number=SeqID_19795
  Gene Ontology: Mol. function=transferase activity, transferring pentosyl groups; Cellular component=imidazoleglycerol-phosphate synthase complex; Biological process=histidine biosynthetic process
  Homolog annotation: Hit_ID=B9SVA2; Match level="QueryCoverage=99%, HitCoverage=60%, E-value=1e-167, Identity=79%"; Hit description =Imidazole glycerol phosphate synthase subunit hisf, putative
  Pfam annotation: Domain name=His_biosynth; Domain location=48-340; Score=193.8; E_value=4.7e-55; Accession=PF00977.13; Description =Histidine biosynthesis protein
MGNIQAVQFHXEXSGATGLSILKNFTSVLTLQERKVPARRKASKLAKRVIACLDVRSNDNGDLVVTKGDQYDVRDHTSSKEVRNLGKPVDLASQYYIDGADEVSFLNITGFRDFPLGDLPMLEVLRCASEKVFVPLTVGGGIRDFTDANGRYYSSLEVASEYFRSGADKISIGSDAVYAAEAFFXTGVKTGKSSLEQISRVYGNQAVVVSIDPRRVYVNSPEDVPFKTVKVSSKGPSGEEYAWYQCTVSGGRDSRPIGAYELAKAVEELGAGEILLNCIDCDGQGCGFDIDLVQMVSDAVTIPVIASSGAGAVEHFSEVFEKTNASAALAAGIFHRKEVPILAVKEHLVDAGVEVRM

SEQ ID NO: 85770 - protein, 299 aa, Setaria italica
  misc_feature (10)..(10): Xaa can be any naturally occurring amino acid
  misc_feature (293)..(293): Xaa can be any naturally occurring amino acid
  Transcript Sequence Number=SeqID_19796
FSDDEKEVEXKRSLRQARRQTDRQHEPKKHSGDKKRSQPRGGGFRKDMPPRNRDVPTPGQQSQPRFHRSDMAPAVAENTARSSGPQDAPMNAPTMLPPGPMNPPMPSPVHLANQMGGCFINPAQQFLPQQPNMVWPGGLPPSPNPNMGVDGAALAASIMQNLLAGANQFQQQLQNQNFGGFPNQMPMPFPQFMPQTGMPANQLPFGGGPPVGNYSFGAAPQMPMGLGNFCQPPPHMASGNRHEQGPRPGFPADSPGFPNQAQPHGDGAELSPPQFNSGQFNQGSPPFRGGRPXQRGGRH

SEQ ID NO: 85771 - protein, 128 aa, Setaria italica
  Transcript Sequence Number=SeqID_19797
  Gene Ontology: Mol. function=catalytic activity; Biological process =culmination during sorocarp development
  Homolog annotation: Hit_ID=B6SYF6; Match level="QueryCoverage=87%, HitCoverage=29%, E-value=2e-44, Identity=74%"; Hit description =Catalytic/ hydrolase
GAVEPVDEEAPADDDSGAAEGVEVCCFDNRGMGRSSVPAQKSQYTTATMAKDALALLDHLGWRKVHVFGHSMGAMIASKLAAMAPDRVASLALLNTTGGGYQCIPKVDWHTISLAYRFLRARTPEQRA

SEQ ID NO: 85772 - protein, 163 aa, Setaria italica
  misc_feature (21)..(21): Xaa can be any naturally occurring amino acid
  Transcript Sequence Number=SeqID_19798
  Gene Ontology: Cellular component=chloroplast
  Homolog annotation: Hit_ID=B9RVD0; Match level="QueryCoverage=60%, HitCoverage=23%, E-value=1e-41, Identity=79%"; Hit description=Prli -interacting factor l, putative
  Pfam annotation: Domain name=CobW_C; Domain location=66-160; Score =135.5; E_value=1.7e-37; Accession=PF07683.6; Description=Cobalamin synthesis protein cobW C-termina
GGERQRETEIGERIESSVSEXSHEDHAEHEHEHDHDHHHDHDHHHHHDRDHGHDHHAHDHTHDPGVSSVSIVCEGEMDLEKADMWLGNLLLEHSDDIYRMKGLLSVSGMPQRFVFQGVHDIFQGSPERMWEPNEPRINKIVFIGRNLNKEELEKGFKDCLLKK

SEQ ID NO: 85773 - protein, 342 aa, Setaria italica
  Transcript Sequence Number=SeqID_19799
  Gene Ontology: Cellular component=chloroplast
  Homolog annotation: Hit_ID=B9RVD0; Match level="QueryCoverage=93%, HitCoverage=68%, E-value=1e-126, Identity=71%"; Hit description=Prli- interacting factor l, putative
  Pfam annotation: Domain name=CobW_C; Domain location=268-341; Score =46.1; E_value=1.3e-10; Accession=PF07683.6; Description=Cobalamin synthesis protein cobW C-termina
  Pfam annotation: Domain name=cobW; Domain location=7-194; Score =278.7; E_value=1.3e-80; Accession=PF02492.11; Description=Cobalamin synthesis proteinP47K
  Pfam module annotation: Pfam domain module=CobW_C::cobW; Domain location=268-341::7-194
NEQYPDPTNTITGFLGSGKTTLLNHILTAHHGKRIAVIENEFGEVDIDGSLVAAQTAGAEDIMMLNNGCLCCTVRGDLVRMIGELVNKKKGKFDHIVIETTGLANPAPIIQTFYAEDVVFNDVKLDGVVTLVDAKHARLHLDEVKPKGIVNEAVQQIAYADRIIVNKIDLVNEPEVSSLVERIRGINRMANLKRAEYGKVDLDYVLGIGGFDLERIESSVSEKSHEDHAEHEHEHDHDHHHDHDHHHHHDRDHGHDHHAHDHTHDPGVSSVSIVCEGEMDLEKADMWLGNLLLEHSDDIYRMKGLLSVSGMPQRFVFQGVHDIFQGILPRRRNSREDQNRRP

SEQ ID NO: 85774 - protein, 190 aa, Setaria italica
  Transcript Sequence Number=SeqID_19800
  Gene Ontology: Mol. function=transferase activity, transferring glycosyl groups; Cellular component=plasma membrane; Biological process=sucrose metabolic process
  Homolog annotation: Hit_ID=Q6EZE8; Match level="QueryCoverage=100%, HitCoverage=18%, E-value=2e-73, Identity=72%"; Hit description =Sucrose-phosphate synthase
SEARIVSDDEDEAAKDERNLYIVLISIHGLVRGENMELGRDSDTGGQVKYVVELARALAATAGVHRVDLLTRQISCPDVDWTYGEPVEMITRHSDADADDGSGDGGAYIVRLPCGPRDKYLPKESLWPHIPEFVDRALAHVTNVARALGEHLAGIDGTPAPVWPYVIHGHYADAAEAAAHLASALNVPMV

SEQ ID NO: 85775 - protein, 84 aa, Setaria italica
  Transcript Sequence Number=SeqID_19801
FSHLLFGCNSQCVCCFMGACILVPLVCWEEFKTYIVFPFCCINPWSFWAMHFPYYKPCAFCPTRYLLYLLRSSSQTLDNLEGTI

SEQ ID NO: 85776 - protein, 397 aa, Setaria italica
  Transcript Sequence Number=SeqID_19802
  Gene Ontology: Mol. function=GTP binding; Cellular component=plastid outer membrane; Biological process=protein transport
  Homolog annotation: Hit_ID=B9T0W6; Match level="QueryCoverage=98%, HitCoverage=37%, E-value=1e-107, Identity=47%"; Hit description =Protein translocase, putative
VPTLPYFLSCLLRSREHPRSSNDRNAGSVDSELDLDELLNEVQEDEEDDYDQLPPFKPLSKSQVAKLSKEQQKLYFDEYDYRTKLLQKKQLKEQVRRFKEMKEGNDNDVPSEDGHPDDEYDTDRSPMPDWALPSSFDSDDPVHRYRCLEPTPNLLVRAVNNPEVWDHDCGFDGVSVQHSLDVANKYPASLWVQVNKDKREFTIHMDSSMSVKHGDHASSLAGFDIQTIMDQLAYTLRGETKVKNFRKNTTTGGLSVTFLGNTVVTGAKFEDKLSVGNRLTLVANTGAVSVSGDSAYGVNMEATLHEKSYPVGQGLTTLGASLVRCHKEWTMTANLDSQFSVGRTSNMAVHVDLNNKLTGRVSIKANTSEQLKIALLGVCSATMYLWNKMHPGADANA

SEQ ID NO: 85777 - protein, 96 aa, Setaria italica
  Transcript Sequence Number=SeqID_19803
  Gene Ontology: Biological process=response to stress
  Homolog annotation: Hit_ID=Q6ST18; Match level="QueryCoverage=100%, HitCoverage=100%, E-value=2e-37, Identity=84%"; Hit description=Heat shock factor-binding protein 1
  Pfam annotation: Domain name=HSBP1; Domain location=23-76; Score =106.8; E_value=7.2e-29; Accession=PF06825.4; Description=Heat shock factor binding protein 1
MASPNSGIPIKAEQDSDGSAQSTADMTAFVQNLLMQMQTRFQAMSENIISKIDEMGMRIDELEQSINDLKAEMGSDSMTTPSKTKDEGSKPAGSSA

SEQ ID NO: 85778 - protein, 80 aa, Setaria italica
  misc_feature (8)..(8): Xaa can be any naturally occurring amino acid
  misc_feature (56)..(56): Xaa can be any naturally occurring amino acid
  Transcript Sequence Number=SeqID_19804
MMFSDIAXNLVCICIRRFCTKAVISAVLWAEPSESCSALMGMPELGLAITAGDGEXSNGCRSGRRWILLERTFISGEQIN

SEQ ID NO: 85779 - protein, 124 aa, Setaria italica
  misc_feature (28)..(28): Xaa can be any naturally occurring amino acid
  Transcript Sequence Number=SeqID_19805
  Gene Ontology: Mol. function=protein serine/threonine kinase activity; Cellular component=integral to membrane; Biological process=protein amino acid phosphorylation
  Homolog annotation: Hit_ID=Q336X4; Match level="QueryCoverage=82%, HitCoverage=11%, E-value=1e-26, Identity=58%"; Hit description =Protein kinase domain containing protein, expressed
  Subcellular localization annotation: CTP_CleavageSite=59; ConfidenceScore=5.25e-01
RDAYTRDAYTVLSSFTPPSAGVVKEFFXPAGGPGDFRVMFTPDPGSAAFVNAVELFPAPAELLWNSTSPVTPVGAAANVATWRQQALETVYRLNVGGPKVSKENDTLWRTWLPDDPPTYGPTPR

SEQ ID NO: 85780 - protein, 231 aa, Setaria italica
  misc_feature (217)..(217): Xaa can be any naturally occurring amino acid
  Transcript Sequence Number=SeqID_19806
  Gene Ontology: Mol. function=nucleoside-triphosphatase activity; Cellular component=integral to membrane; Biological process=transport
  Homolog annotation: Hit_ID=Q8GU87-2; Match level="QueryCoverage=99%, HitCoverage=16%, E-value=1e-108, Identity=83%"; Hit description =Isoform 2 of Pleiotropic drug resistance protein 6
PQRPTAPRPSRGTDVLCEVDVAGLSSGDRTALVDRLLADSGDAEHFFRRIRSRFDAVHIEFPKIEVRYEDLTVDAYVHVGSRALPTIPNFICNMTEAFLRHMRIYRGGRMKLPILDNISGIIRPSRMTLLLGPPSSGKTTLLLALAGRLGPGLKMSGNITYNGHHLNEFVPQRTSAYVSQQDWHASEMTVRETLEFAGRCQGVGIKYDMLVELLRRXKNAGIKPDEDLDVF

SEQ ID NO: 85781 - protein, 190 aa, Setaria italica
  Transcript Sequence Number=SeqID_19807
  Gene Ontology: Mol. function=protein tyrosine kinase activity; Biological process=protein amino acid phosphorylation
  Homolog annotation: Hit_ID=B9SKP2; Match level="QueryCoverage=100%, HitCoverage=15%, E-value=3e-71, Identity=67%"; Hit description =Receptor protein kinase, putative
  Pfam annotation: Domain name=Pkinase; Domain location=1-168; Score= -102.3; E_value=0.021; Accession=PF00069.17; Description=Protein kinase domain
  Pfam annotation: Domain name=Pkinase_Tyr; Domain location=1-165; Score=-140.7; E_value=0.00022; Accession=PF07714.9; Description =Protein tyrosine kinase
  Pfam module annotation: Pfam domain module=Pkinase::Pkinase_Tyr; Domain location=1-168::1-165
VVQGVAHALAYLHHDCNPAIVHRDTTVNNILLESEFEPRLSDFGTAKLLGSASTNWTSVAGSYGYMAPELAYTMRVTEKCDVYSFGVVALEVMMGKHPGDLLTSLPAISASKEDDLLLQDVLDQRLDPPMGEIAEEIVFVVRIALACTRANPESRPSMRSVAQEISAHTQACLSEPFRQITVSKLTDYQK

SEQ ID NO: 85782 - protein, 172 aa, Setaria italica
  Transcript Sequence Number=SeqID_19808
  Gene Ontology: Mol. function=isomerase activity; Cellular component =chloroplast envelope
  Homolog annotation: Hit_ID=B6TFR7; Match level="QueryCoverage=98%, HitCoverage=62%, E-value=1e-25, Identity=35%"; Hit description =Chalcone isomerase
  Pfam annotation: Domain name=Chalcone; Domain location=1-168; Score= -45.9; E_value=6.2e-05; Accession=PF02431.7; Description=Chalcone -flavanone isomerase
MRVKNLNLYAFGLYIQPDSICKKLGPKYACIPDAELKDHPDFYEDLLRENIDMTVRLVVSYNGLSIGTVRDAFEKSLCFRLQKMNPNTDYHCLKTFGSYFSEDIRIPAGTKIDFRQTSDGQLITEIDGRQIGTVQSKDLCRAFFDMYIGDPPVSVETKQDIAQNVAGLIRRC

SEQ ID NO: 85783 - protein, 313 aa, Setaria italica
  misc_feature (24)..(24): Xaa can be any naturally occurring amino acid
  misc_feature (280)..(280): Xaa can be any naturally occurring amino acid
  Transcript Sequence Number=SeqID_19809
  Gene Ontology: Cellular component=chloroplast envelope
  Homolog annotation: Hit_ID=B6TFR7; Match level="QueryCoverage=47%, HitCoverage=52%, E-value=3e-19, Identity=35%"; Hit description =Chalcone isomerase
  Subcellular localization annotation: CTP_CleavageSite=33; ConfidenceScore=5.46e-01
EQSEAFSSFNKFAGAFYFWFSRAXNPKLLQRLSAAAGSSSRACRSHIKQVTSCLQHLPGLQFGSQLREEHAVQVLLARLASATFGRLWTEVEEHHACNVLMLAAATVIPPFENISPKMLAESLALGKDGGHIREPADQPYSEENRSGCACVAVPRLILPEDATEPKTGIKFPTILEDNSNLSTEVLVGIGFRSMRIMRVKNLNLYAFGLYIQPDSICKKLGPKYACIPDAELKDHPDFYEDLLRENIDMTVRLVVSYNGLSIGTVRDAFEKSLCFRLQKXNPNTDYHCLKTFGSYFSEDIRIPAGTKIDFRQN

SEQ ID NO: 85784 - protein, 57 aa, Setaria italica
  Transcript Sequence Number=SeqID_19810
PLNLEKFLVVIFYQSLSKCAQVNTLYQLSPLCTVFVIVINSHLCRATDCLHCKPTFL

SEQ ID NO: 85785 - protein, 95 aa, Setaria italica
  Transcript Sequence Number=SeqID_19811
  Gene Ontology: Mol. function=1,3-beta-glucan synthase activity; Cellular component=1,3-beta-glucan synthase complex; Biological process=1,3-beta-glucan biosynthetic process
  Homolog annotation: Hit_ID=Q8H046; Match level="QueryCoverage=82%, HitCoverage=3%, E-value=8e-39, Identity=94%"; Hit description =Putative callose synthase
VKGMEVALLLVIFLAYGFNNGGAVGYILLSISSWFMALSWLFAPYLFNPSGFEWQKIVEDFRDWTNWLFYRGGIGVKGEESWEAWWEEELQHIYT

SEQ ID NO: 85786 - protein, 68 aa, Setaria italica
  Transcript Sequence Number=SeqID_19812
  Gene Ontology: Mol. function=glutathione transferase activity; Cellular component=chloroplast; Biological process=auxin mediated signaling pathway
  Homolog annotation: Hit_ID=P04907; Match level="QueryCoverage=97%, HitCoverage=29%, E-value=2e-28, Identity=90%"; Hit description =Glutathione S-transferase 3
  Pfam annotation: Domain name=GST_N; Domain location=2-68; Score=56.0; E_value=1.4e-13; Accession=PF02798.12; Description=Glutathione S -transferase, N-terminal domain
MAPLKLYGLPLSPNVVRVATVLNEKGLEFEVVPVDLTTGAHKQPEFLALNPFGQIPALEDGDEVLYGT

SEQ ID NO: 85787 - protein, 1003 aa, Setaria italica
  misc_feature (400)..(400): Xaa can be any naturally occurring amino acid
  Transcript Sequence Number=SeqID_19813
  Gene Ontology: Mol. function=1,3-beta-glucan synthase activity; Cellular component=1,3-beta-glucan synthase complex; Biological process=1,3-beta-glucan biosynthetic process
  Homolog annotation: Hit_ID=Q6WGM8; Match level="QueryCoverage=98%, HitCoverage=51%, E-value=0.0, Identity=81%"; Hit description=Beta 1 ,3 glucan synthase
HKVDELIEDEMKLRESAVFSGNLGELERKTLKRKKVLATLKVLWSVIEDMTKEISPEDAKNLISEEMKKVMQKDAARTEDVVPYNIIPLDALSTTTNAIVTFPEVRAAISILQYHRDLPRLPGTFSVPDARNSDMLDLLQCVFGFQEGNVKNQREHIIHLLANEQSRVGKPSGNEPKIDDGAVHAVFSKALDNYIKWCNYLPTRPIWNNTDSLTKEKKLLYVCLYYLMWGEAANVRFLPEGLCYIFHHLARELEEILRKQTAEPAKSCSSDGSVSFLENVISPLYDVIAAEAANNKNGRAPHSAWRNYDDFNEFFWSNKCFNLDWPWKLSNPFFSKPSRKEKGLLGRNHHYGKTSFVEHRTFLHLYHSFHRLWIFLIMMFQALTIIAFNNDSFDMKTVLXLFSLGPTYVAMKFVESLLDILMMYGAYSTSRGSAITRVLWRFCWFTVASLTICYLYVKALQDGTHSATFKIYGFVIGAYFGVKIIMSLLTSVPCCHGLTEACYRWSAVRLVKWMHQENNYVGRGMHESPLDYIKYVAFWIIILGAKFSFTYFLQIKPLVKPTRAVINFRGLQYAWHDFFSKNNHNAITILCLWAPVVSIYLLDIHVFYTVMSAIYGFLLGARDRLGEIRSVEAVHRFFEKFPEAFMEKLHVAIPKRKQLRSSGQEAELDKLNASRFAPFWNEIVRNLREEDYINNAELELLLMPKNDGVLPIVQWPLFLLASKVFLAKDIAADYNESQEELWLRVSKDDYMKYAVVECFHSVYHILTSILEKEGCLWVERIYGGIRESISKKNIKSDLHFEKLHIVIAKLVAVLGILRGTTESNDLKKGAVNAIQDLYEVVHHEVFSVDISGYLDEWTQINRARAEGRLFNNLKWPNDPGLKDLIKRLYSLLTIKESAASVPKNLEARRRLQFFMNSLFMKMPVARPASETLSFSVFTPYYSEIVLYSMAELQKKNEDGITTLFYLQKIYPDEWRNFLTRINRVNLLEIKQRSYTRRFLHSSG

SEQ ID NO: 85788 - protein, 969 aa, Setaria italica
  misc_feature (19)..(19): Xaa can be any naturally occurring amino acid
  Transcript Sequence Number=SeqID_19814
  Gene Ontology: Mol. function=1,3-beta-glucan synthase activity; Cellular component=1,3-beta-glucan synthase complex; Biological process=1,3-beta-glucan biosynthetic process
  Homolog annotation: Hit_ID=Q8H046; Match level="QueryCoverage=99%, HitCoverage=47%, E-value=0.0, Identity=87%"; Hit description =Putative callose synthase
  Pfam annotation: Domain name=Glucan_synthase; Domain location=91-846; Score=844.5; E_value=6.2e-251; Accession=PF02364.7; Description=1,3 -beta-glucan synthase component
KLVAVLGILRGTTESNDLXKGAVNAIQDLYEVVHHEVFSVDISGYLDEWTQINRARAEGRLFNNLKWPNDPGLKDLIKRLYSLLTIKESAASVPKNLEARRRLQFFMNSLFMKMPVARPASETLSFSVFTPYYSEIVLYSMAELQKKNEDGITTLFYLQKIYPDEWRNFLTRINRDENAADSELFGNPNDILELRLWASYRGQTLARTVRGMMYYRKALMLQSYLERIQSEDLESTFPSAGSADTHFELSPEARAQADLKFTYVVTCQIYGKQKGEGKPEAADIALLMQRNEALRVAYIDEVESVKNGKPSTEYYSKLVKADIHGKDKEIYSIKLPGNPKLGEGKPENQNHAIIFTRGNAVQTIDMNQDNYFEEALKMRNLLEEFSLKRGKHYPSILGVREHVFTGSVSSLASFMSNQETSFVTLGQRVLSNPLKVRMHYGHPDVFDRIFHITRGGISKASRSINISEDIYAGFNSTLRQGSITHHEYIQVGKGRDVGLNQIAVFEGKVSGGNGEQVLSRDIYRLGQLFDFFRMLSFYVTTVGFYFCTMLTVLTVYIFLYGKTYLALSGVGESIQNRADILQNTALNTALNTQFLFQIGVFTAVPMILGFILESGVLTAFVQFITMQFQLCSVFFTFSLGTRTHYFGRAILHGGAKYRATGRGFVVRHIKFAENYRLYSRSHFVKGMEVALLLVIFLAYGFNNGGAVGYILLSISSWFMALSWLFAPYLFNPSGFEWQKIVEDFRDWTNWLFYRGGIGVKGEESWEAWWEEELQHIYTIRGRILETILSLRFFIFQYGVVYHMSASGESTALSVYWISWAVLGGLFVLLLVFGLNPKAMVHFQLFLRLVKSIALLMVLAGLIVATVFTALSVKDVFASILAFVPTGWGILSIAVAWKPIVKKLGLWKTVRSLARLYDAGMGMIIFVPIAICSWFPFISTFQTRLLFNQAFSRGLEISLILAGNNPNAGM

SEQ ID NO: 85789 - protein, 221 aa, Setaria italica
  misc_feature (126)..(126): Xaa can be any naturally occurring amino acid
  misc_feature (165)..(165): Xaa can be any naturally occurring amino acid
  misc_feature (193)..(193): Xaa can be any naturally occurring amino acid
  misc_feature (203)..(203): Xaa can be any naturally occurring amino acid
  Transcript Sequence Number=SeqID_19815
  Gene Ontology: Mol. function=glutathione transferase activity; Cellular component=chloroplast; Biological process=auxin mediated signaling pathway
  Homolog annotation: Hit_ID=P04907; Match level="QueryCoverage=95%, HitCoverage=95%, E-value=5e-88, Identity=77%"; Hit description =Glutathione S-transferase 3
  Pfam annotation: Domain name=GST_C; Domain location=106-202; Score =61.4; E_value=3.5e-15; Accession=PF00043.17; Description=Glutathione S-transferase, C-terminal domain
  Pfam annotation: Domain name=GST_N; Domain location=2-77; Score =103.4; E_value=8e-28; Accession=PF02798.12; Description=Glutathione S-transferase, N-terminal domain
  Pfam module annotation: Pfam domain module=GST_C::GST_N; Domain location=106-202::2-77
MAPLKLYGLPLSPNVVRVATVLNEKGLEFEVVPVDLTTGAHKQPEFLALNPFGQIPALEDGDEVLYESRAINRYIATKYKSDGADLLPTIPSAKLEVWLEVESHHFYPNASPLVYHLLVKPMMGGXAPDPLVVDKHAHQLAKVLDIYEDHLAKNKYLAGDEFTLXDANHMSYLFYLSKTPKAGLVAERPHVKXWWEDIAARPXAFKKTVAGIPFPPPPSAA

SEQ ID NO: 85790 - protein, 170 aa, Setaria italica
  Transcript Sequence Number=SeqID_19816
ELLNQEKGRQRKKLERTKKMKRQHEVLYAVPYAACVYEQEERNPIRADRRLAEGARESGEDSREPEAEPQDGAVGVWRAVAADGLHGLDEEAEAPHRRHVERQRRRREGQRHQQLQHLRPAAPTTGERASSCPRRTNQILSWRLGRSVGTVRRGGSLVIAETGPPGRDGR

SEQ ID NO: 85791 - protein, 86 aa, Setaria italica
  Transcript Sequence Number=SeqID_19817
MMARRAWVFCLLLTVAGAVATADAESEAEALSTYIVHVAPAHAPRSSRPRVLSSAYRSFLRGHLPAGPAPRLLYSYAHAATGFAAR

SEQ ID NO: 85792 - protein, 62 aa, Setaria italica
  Transcript Sequence Number=SeqID_19818
NLQGRIGYSYRIQVTLISTLFLFVKLNIRTSQMHLLQHPNQFIPLSKVFLSVSVISLVLQVR

SEQ ID NO: 85793 - protein, 40 aa, Setaria italica
  Transcript Sequence Number=SeqID_19819
TSELVKCCKKRVSSWYFQSDHHILQMPFIVYGLFDQFNSE

SEQ ID NO: 85794 - protein, 110 aa, Setaria italica
  Transcript Sequence Number=SeqID_19820
NTRISRVKSDAARKELVLRLCVSPFSILRTNSFLAASDVQFDEKKQVSTDEYKSDAARKELVLRIELIKQAIYNEWHLEDIDDLIENTKNFTYEMIGDLDLISCTDFLIV

SEQ ID NO: 85795 - protein, 229 aa, Setaria italica
  Transcript Sequence Number=SeqID_19821
PQYSSSPTSKRVGNKEIQGECRHQASGSCFPFVLDVGARRRARRLGRNWEKAGEDHSRRLSYPPRSNKAKKELPNLQNERDNRYRKKYLAQRNKLIGMLEEMHLTSSDVQFDEKKQVSTDEYKSEKRKVKHIIRKVKSDAARKELVLRIELIKQAIYNEWHLEDIDDLIENTKNFTYEMIGDVEIVHYDGQNLVDILSRLRKDARKSATDHDEKNKLTAGLRLGNLYKK

SEQ ID NO: 85796 - protein, 55 aa, Setaria italica
  Transcript Sequence Number=SeqID_19822
TYKVPTRSILESFWPNTFCRKILYQHKLISYTENINEEIKHQRYRNKALLRENGI

SEQ ID NO: 85797 - protein, 100 aa, Setaria italica
  Transcript Sequence Number=SeqID_19823
LTVATRASQEFAVMMDMNSCFKMKCYSVYWQEAVESASLANGRTRLYTINGAHSVSMDQDPERSLLCLRCKSSVKLYKFAACFSLENLLHISGIILRFVM

SEQ ID NO: 85798 - protein, 103 aa, Setaria italica
  Transcript Sequence Number=SeqID_19824
MRRHGSEASPSIVHTSSIALLQERFRNLQKVKEMREGRELQKVHSTDADRTSSLSSALNLGLQVANSTERPRWFLHPDLIRPSRPLRGPVYHGLGANGGQTSP

SEQ ID NO: 85799 - protein, 83 aa, Setaria italica
  Transcript Sequence Number=SeqID_19825
  Gene Ontology: Mol. function=substrate-specific transmembrane transporter activity; Cellular component=integral to membrane; Biological process=transmembrane transport
  Homolog annotation: Hit_ID=B6TAG3; Match level="QueryCoverage=68%, HitCoverage=10%, E-value=2e-23, Identity=98%"; Hit description =Arabinose-proton symporter
LVGCLSVVSLLGSLSGGRTSDAIGRKWTMGLGAIVFQIGAVIMTFAPSFTVLMIGRLLAGVGIGFGAMVSGVYIDRKYLPPRL

SEQ ID NO: 85800 - protein, 74 aa, Setaria italica
  misc_feature (63)..(63): Xaa can be any naturally occurring amino acid
  Transcript Sequence Number=SeqID_19826
MSARLLRRVLQEREAATQDPDVAEDEQPEEEEEASPPRAAARNLFDLLDGGDDEEEDKEDEAXKSQPLSYTEQK

SEQ ID NO: 85801 - protein, 76 aa, Setaria italica
  Transcript Sequence Number=SeqID_19827
  Gene Ontology: Mol. function=nucleic acid binding; Cellular component= intracellular
  Homolog annotation: Hit_ID=B9RFQ6; Match level="QueryCoverage=97%, HitCoverage=10%, E-value=1e-24, Identity=71%"; Hit description =Nucleic acid binding protein, putative
  Pfam annotation: Domain name=DUF537; Domain location=7-76; Score =41.0; E_value=4.6e-09; Accession=PF04396.6; Description=Protein of unknown function, DUF537
MGEYATVKTSVWWDIENCQVPRNCDAHLIAQNMSSALTAAGYTGPITISAYGDTNCVPNPVQHALSSTGIALNHVP

SEQ ID NO: 85802 - protein, 74 aa, Setaria italica
  Transcript Sequence Number=SeqID_19828
  Gene Ontology: Mol. function=sequence-specific DNA binding; Cellular component=nucleus; Biological process=regulation of transcription, DNA-dependent
  Homolog annotation: Hit_ID=Q6IEQ0; Match level="QueryCoverage=93%, HitCoverage=19%, E-value=1e-24, Identity=73%"; Hit description=WRKY transcription factor 31
  Pfam annotation: Domain name=WRKY; Domain location=17-74; Score =108.9; E_value=1.7e-29; Accession=PF03106.7; Description=WRKY DNA -binding domain
EEPGEQEVTRIPVGGPPADLWAWRKYGQKPIKGSPYPRGYYRCSTDKDCKARKQVERCRADPGTLIVTYTGDHS

SEQ ID NO: 85803 - protein, 119 aa, Setaria italica
  Transcript Sequence Number=SeqID_19829
  Gene Ontology: Mol. function=hydrolase activity; Biological process =glutamine metabolic process
  Homolog annotation: Hit_ID=UPI00005DC28E; Match level="QueryCoverage =95%, HitCoverage=25%, E-value=1e-42, Identity=69%"; Hit description =hydrolase
LHEWFADDLADGEDGGKQLMVNSYHHQGVRRLAQRFVPMAFAPDGLIEGFYDPNAYNPAEGKFIMGLQFHPERMRKPGSDEFDYPGCARPYQEFVRAVVAYQEKQLAAAHVPRSAVPTS

SEQ ID NO: 85804 - protein, 345 aa, Setaria italica
  Transcript Sequence Number=SeqID_19830
  Gene Ontology: Mol. function=nicotianamine synthase activity; Biological process=nicotianamine biosynthetic process
  Homolog annotation: Hit_ID=B6TZC0; Match level="QueryCoverage=91%, HitCoverage=87%, E-value=1e-133, Identity=77%"; Hit description =Nicotianamine synthase 3
  Pfam annotation: Domain name=NAS; Domain location=22-301; Score =647.7; E_value=1.1e-191; Accession=PF03059.8; Description =Nicotianamine synthase protein
MVDMGNKQEEEVQVPVPEEGMASEEEEAALVHKIAGLAAAIAKLPSLSPSPEVNALFTELVTACIPPSAVDVERLGPELQEMRARLIRLCADAEGLLEAHYSDLLAGFDNPLDHLGLFPYFNNYILLSELEHGLLASHVPGPAPARVAFVGSGPLPLSSLVLAARHLPAASFDNYDICGEANERARRLVRADAGLGARMAFRTSDVAHVTRDLASYDVVFLAALVGMAAEEKARVVEHLGRHMAPGAALVVRSAHGARGFLYPVVDPEEIRRGGFEVLAVHHPEGEVINSVIIARKPVPADAQAGGGVAHAHAHGAVLSRPCLCCEMEARAHQKMEEVALEQLPS

SEQ ID NO: 85805 - protein, 134 aa, Setaria italica
  Transcript Sequence Number=SeqID_19831
HMLFRCLPHPKTLKLAFCCSAPLFTESLRVRMKPSFWPLSSVPHLPPCLVEPKNEKKKKVVMWLYLQCPTPKLQYNLLPHKETEGCIFLLLPERATVRQANLRRESTGVLPCSFGCGSDGGLHVTSPAGGRAIH

SEQ ID NO: 85806 - protein, 61 aa, Setaria italica
  Transcript Sequence Number=SeqID_19832
AYHLFGRCPQFLTSLLAWLKPKNRKKEEGGNVVVFTMSYSKAAVQSFTSQRNRRLHLLAAT

SEQ ID NO: 85807 - protein, 61 aa, Setaria italica
  Transcript Sequence Number=SeqID_19833
  Subcellular localization annotation: CTP_CleavageSite=16; ConfidenceScore=5.34e-01
PPSAAPPFPTRRRPPTAATPSPEPPTPPRAPPAAGGQREPPATAAAPQAFAATRVHERLEF

SEQ ID NO: 85808 - protein, 143 aa, Setaria italica
  Transcript Sequence Number=SeqID_19834
  Gene Ontology: Mol. function=acetolactate synthase activity; Cellular component=chloroplast; Biological process=branched chain family amino acid biosynthetic process
  Homolog annotation: Hit_ID=Q6K2E8; Match level="QueryCoverage=95%, HitCoverage=21%, E-value=2e-71, Identity=94%"; Hit description =Acetolactate synthase 1, chloroplastic
  Pfam annotation: Domain name=TPP_enzyme_C; Domain location=1-120; Score=73.8; E_value=6.2e-19; Accession=PF02775.13; Description =Thiamine pyrophosphate enzyme, C-term
QHQQQPANPGVTVVDIDWDGSFQMNIQELAMIRIENLPVKVFVLNNQHLGMVVQWEDRFYKANRAHTYLGNPDNESEIYPDFVTIAKGFNIPAARVTKKSEVRAAIKKMLETPGPYLLDIIVPHQEHVLPMIPSGGAFKDMIL

SEQ ID NO: 85809 - protein, 124 aa, Setaria italica
  misc_feature (27)..(27): Xaa can be any naturally occurring amino acid
  Transcript Sequence Number=SeqID_19835
  Gene Ontology: Mol. function=acetolactate synthase activity; Cellular component=chloroplast; Biological process=branched chain family amino acid biosynthetic process
  Homolog annotation: Hit_ID=Q41769; Match level="QueryCoverage=90%, HitCoverage=17%, E-value=3e-40, Identity=76%"; Hit description =Acetolactate synthase 2, chloroplastic
  Pfam annotation: Domain name=TPP_enzyme_C; Domain location=27-124; Score=75.0; E_value=2.8e-19; Accession=PF02775.13; Description =Thiamine pyrophosphate enzyme, C-term
DEEIQPQYAIQVLDELTKGEAIIATGXVGQHQMWAAQYYTYKRPRQWLSSAGLGAMGFGLPAAAGAAVANPGVTVVDIDGDGSFQMNIQELAMIRIENLPVKVFVLNNQHLGESPLLLIQLIMP

SEQ ID NO: 85810 - protein, 466 aa, Setaria italica
  Transcript Sequence Number=SeqID_19836
  Gene Ontology: Mol. function=acetolactate synthase activity; Cellular component=chloroplast; Biological process=branched chain family amino acid biosynthetic process
  Homolog annotation: Hit_ID=Q41769; Match level="QueryCoverage=100%, HitCoverage=73%, E-value=0.0, Identity=90%"; Hit description =Acetolactate synthase 2, chloroplastic
  Pfam annotation: Domain name=TPP_enzyme_C; Domain location=280-435; Score=227.0; E_value=4.9e-65; Accession=PF02775.13; Description =Thiamine pyrophosphate enzyme, C-term
  Pfam annotation: Domain name=TPP_enzyme_M; Domain location=85-218; Score=238.0; E_value=2.4e-68; Accession=PF00205.14; Description =Thiamine pyrophosphate enzyme, central d
  Pfam annotation: Domain name=TPP_enzyme_N; Domain location=1-63; Score=-48.9; E_value=7.2e-05; Accession=PF02776.10; Description =Thiamine pyrophosphate enzyme, N-termina
  Pfam module annotation: Pfam domain module=TPP_enzyme_C::TPP_enzyme _M::TPP_enzyme_N; Domain location=280-435::85-218::1-63
AFQETPIVEVTRSITKHNYLVLDVEDIPRVVQEAFFLASSGRPGPVLVDIPKDIQQQMAVPVWDTHMCLPGYIARLPKPPATELLEQVLRLVGESRRPVLYVGGGCAASGEELRRFVEMTGIPVTTTLMGLGNFPSDDPLSLRMLGMHGTVYANYAVDKADLLLAFGVRFDDRVTGKIEAFASRAKIVHIDIDPAEIGKNKQPHVSICADVKLALQGMNTLLEGITSKKSFDFGSWHDELDQQKRGFPLGYKTFDEEIQPQYAIQVLDELTKGEAIIATGVGQHQMWAAQYYTYKRPRQWLSSAGLGAMGFGLPAAAGAAVANPGVTVVDIDGDGSFQMNIQELAMIRIENLPVKVFVLNNQHLGMVVQWEDRFYKANRAHTYLGNPDNESEIYPDFVTIAKGFNIPAARVTKKSEVRAAIKKMLETPGPYLLDIIVPHQEHVLPMIPSGGAFKDMILDGDGRTVY

SEQ ID NO: 85811 - protein, 94 aa, Setaria italica
  Transcript Sequence Number=SeqID_19837
  Gene Ontology: Mol. function=transcription regulator activity; Cellular component=nucleus; Biological process=regulation of transcription
  Pfam annotation: Domain name=HLH; Domain location=42-81; Score=2.6; E_ value=0.092; Accession=PF00010.18; Description=Helix-loop-helix DNA -binding domain
EDEDDVLSTGRTPGCRAGGSPDSTCSSGYGGGGRKQETGGEKKKERMKKMVRTLKGIVPGGDRMDTPAVLDEAVRYLKSLKVEAKKLGARGSSS

SEQ ID NO: 85812 - protein, 191 aa, Setaria italica
  misc_feature (7)..(7): Xaa can be any naturally occurring amino acid
  Transcript Sequence Number=SeqID_19838
  Gene Ontology: Mol. function=heat shock protein binding
  Homolog annotation: Hit_ID=Q8RYN2; Match level="QueryCoverage=97%, HitCoverage=14%, E-value=4e-36, Identity=44%"; Hit description =Auxilin-like protein
NACCDQXFDVEQFYPVSFHPDGDQRFSMSYNKASRGRPDDVVEMTTCIVEPSISYVVDSCNLSNDSEMDNVPVTDTGAHANGVKEKMSPQNAAAVGLKSANSESVVDQQLHIPTCPSISENICEDESFNKRSSNHSVSSEETPSPEKDEPTEWLQPSAVKSANSASVVCQQQHMHIPTCAPISKNICEDDS

SEQ ID NO: 85813 - protein, 140 aa, Setaria italica
  misc_feature (112)..(112): Xaa can be any naturally occurring amino acid
  Transcript Sequence Number=SeqID_19839
  Gene Ontology: Mol. function=binding
  Homolog annotation: Hit_ID=B9SQ20; Match level="QueryCoverage=95%, HitCoverage=7%, E-value=4e-31, Identity=54%"; Hit description =Symplekin, putative
SDKQEGSGGSIARLPLLAHLGVEFPLELDPWEILQKHVLSDYANNEGHELTLCILNRLYREAEQDQDFLSSRTATSVYESFLLSVVCLLKIDATLSQMLFLSHHSCPFSAAXAENLRDMFPASDKSLGKLLCEIPYLPEG

SEQ ID NO: 85814 - protein, 925 aa, Setaria italica
  misc_feature (323)..(323): Xaa can be any naturally occurring amino acid
  Transcript Sequence Number=SeqID_19840
  Gene Ontology: Mol. function=binding; Cellular component=plasma membrane
  Homolog annotation: Hit_ID=B9SQ20; Match level="QueryCoverage=63%, HitCoverage=45%, E-value=0.0, Identity=62%"; Hit description =Symplekin, putative
EESLPPMERSNDSSNKRSLGEDMNHMIEDDGHSNKRVRHALDAQEHSEEANKRNVESTSVDISSGQPISIRTENSEAVYQLIGMFAALAAQGDRAAGSLQILSSSIASDLLAEVVMVNMQHIPMSRPEVDQQQLPSTSSGDGIPFQSSFSLLASLLKKVNQIDQDEVPPAKESAVVPSVADDIVTVPASSPGPSSVNLPMEENSSSPTVPLCVETAEVKVTSAGANSLIDILESSETSHASTEPQGTQEHASSYISSLHADNSSAGLSLAQSSETRSPSSSTVEANHSQLSSLNSLGSQYVLPKLVVNNVDLSDEAKDLLQKXESFLRILESDKQEGSGGSIARLPLLAHLGVEFPLELDPWEILQKHVLSDYANNEGHELTLCILNRLYREAEQDQDFLSSRTATSVYESFLLSVAENLRDMFPASDKSLGKLLCEIPYLPEGVFKLLEGLCSPGSNEKQDKDIQSGDRVTQGLSAVWNLIMLRPSNRDRCLEIALQSSTHHLEEVRMKAIRLVANKLFPMASISKKIEDFANEKLNSVLEVIPSGDSAATETATSEAHNDGGLENLSASMANAQTLMSLYFALCTKKHSLLRHVFAIYGSLPQAAKQAVHRQVPILIRTIGSSPDLLGIISDPPGDSRDLLMQVLQTLTDAAVPSKELISSIKNLYSKTKDVEVLFAILAHLPKDEVLPVFPSIVNLPMDKFQTALSRILQGSSRNGPSLDPSEILIAIHVIDTDKEGIPLKKVMDACSACFEQRTIFTQQVLAKTLNQLVEQIPLPLLFMRTVMQVIGVFPALVDFVMEIMSRLVSKQIWKYPKLWVGFLKCAILTKPQSYGVLLQLPAPQLENALSKNPTLKAPLVEHAEQPNVRSTLPRSTLVVLGLAEDQQPPPPAVSQAQSSQNLAAETSSSAADTTTEVTQESSAAS

SEQ ID NO: 85815 - protein, 312 aa, Setaria italica
  Transcript Sequence Number=SeqID_19841
  Homolog annotation: Hit_ID=B6TYN1; Match level="QueryCoverage=86%, HitCoverage=58%, E-value=1e-136, Identity=85%"; Hit description =Transposon protein Mutator sub-class
DRSAANALARELLVLLGGGRERKRGTGRAPEDAAAEAALEEKIPQRDTWKPFWARGLDMVGYSINGLRTSTLPFVETGTERSTQMLRLTLGRDETTRLLDECKENGVRLCSAMAAATMLAARQSKPLESGQQETYSVVTLINCRKFLEPALDDHNVGFFYSAITNTHTVHGEEGLWELAKRCHDSYTSAKSNKKHLTDISDLNFLMCRAIENPQLTTAGALRTALVSVFEEPVIADMAELQGNAGVEDCVCCATVHGIGPSIGVFDSIRDGRLDCACMYPSPLHSRKQIQEIFDRVKQILLHASDEGFEDCA

SEQ ID NO: 85816 - protein, 88 aa, Setaria italica
  Transcript Sequence Number=SeqID_19842
  Homolog annotation: Hit_ID=Q8H8U5; Match level="QueryCoverage=46%, HitCoverage=16%, E-value=4e-12, Identity=82%"; Hit description =Protein IN2-1 homolog B
AGGGQLGKVDIAYVRFIGRFQIFYSNIKNYDITKGRPNLQKFIEPEWSNTRDAVEVIDKTMGLSQNNHLILYTMRCSYDLHYHLAAYT

SEQ ID NO: 85817 - protein, 242 aa, Setaria italica
  Transcript Sequence Number=SeqID_19843
  Gene Ontology: Mol. function=glutathione transferase activity; Cellular component=cytoplasm; Biological process=metabolic process
  Homolog annotation: Hit_ID=Q8H8U5; Match level="QueryCoverage=97%, HitCoverage=96%, E-value=1e-120, Identity=89%"; Hit description =Protein IN2-1 homolog B
  Pfam annotation: Domain name=GST_C; Domain location=129-219; Score =14.9; E_value=0.0031; Accession=PF00043.17; Description=Glutathione S-transferase, C-terminal domain
  Pfam annotation: Domain name=GST_N; Domain location=30-105; Score =10.4; E_value=0.082; Accession=PF02798.12; Description=Glutathione S- transferase, N-terminal domain
  Pfam module annotation: Pfam domain module=GST_C::GST_N; Domain location=129-219::30-105
MAATAPPSSVKEVLPSPLTSASEPPPLFDGTTRLYVAYHCPYAQRAWIARNYKGLQDKIKIVAIDLADRPSWYKEKVYPENKVPSLEHNNQVKGESLDLVKYIDSNFEGPSLLPDDPAKQQFAEELLAYTDAFNKALYSSILSKEDVSEESVAALDKIEEALGKFNDCPFFLGQFSLVDIAYVPFIERFQIFYSNIKNYDITKGRPNLQKFIEEVNKIDAYTQTKQDPQLLLEHTKKRLGIA

SEQ ID NO: 85818 - protein, 167 aa, Setaria italica
  Transcript Sequence Number=SeqID_19844
  Gene Ontology: Mol. function=substrate-specific transmembrane transporter activity; Cellular component=integral to membrane; Biological process=transmembrane transport
  Homolog annotation: Hit_ID=B6SWN7; Match level="QueryCoverage=100%, HitCoverage=34%, E-value=3e-50, Identity=63%"; Hit description=Amino acid permease
LTALSGYLLFGDDTESDVLTNFDKDLGIRFSSVLNYIVRIGYVVHLVLVFPVVHFSLRQTVDSLIFGELATPSRKKTLTLTVVLLALIYLGSTMIPNIWMAFKFTGATTGLALGFMFPALVALRLDKEGSRLGHGERLLSLGLLGLSIVVSVIGVVGNVYTLKSKSD

SEQ ID NO: 85819 - protein, 98 aa, Setaria italica
  Transcript Sequence Number=SeqID_19845
  Gene Ontology: Mol. function=hydrolase activity, hydrolyzing O -glycosyl compounds; Cellular component=cytoplasm; Biological process= anti-apoptosis
  Homolog annotation: Hit_ID=B9RBT0; Match level="QueryCoverage=98%, HitCoverage=35%, E-value=1e-31, Identity=72%"; Hit description =Anamorsin, putative
  Pfam annotation: Domain name=DUF689; Domain location=2-89; Score= -20.5; E_value=3.2e-06; Accession=PF05093.5; Description=Protein of unknown function (DUF689)
MLLTEEDLKKPQLPFVGDCEVGATRKACKNCTCGRAEAEAKVEKLELTAEQVINPQSACGSCGLGDAFRCGTCPYRGLPPFKPGEKVSLSGNFLAADI

SEQ ID NO: 85820 - protein, 263 aa, Setaria italica
  Transcript Sequence Number=SeqID_19846
  Gene Ontology: Mol. function=hydrolase activity, hydrolyzing O -glycosyl compounds; Cellular component=cytoplasm; Biological process= anti-apoptosis
  Homolog annotation: Hit_ID=Q259F3; Match level="QueryCoverage=93%, HitCoverage=19%, E-value=1e-100, Identity=74%"; Hit description =H0124B04.9 protein
  Pfam annotation: Domain name=DUF689; Domain location=4-254; Score =319.2; E_value=8.4e-93; Accession=PF05093.5; Description=Protein of unknown function (DUF689)
  Pfam annotation: Domain name=Methyltransf_11; Domain location=5-85; Score=8.0; E_value=0.017; Accession=PF08241.4; Description =Methyltransferase domain
  Pfam module annotation: Pfam domain module=DUF689::Methyltransf_11; Domain location=4-254::5-85
MAAALAVTDEVALPIRAVGDLAAAADVSREEVAVITQCASLGGKLPFDDGSVGAVLAVIKNVESLREQLVAEINRVLQAGGRVLIHSSAPSSSQKPNTDIERKLLMGGFVEVQASAASSLDNVQSVTVKAKKASWSVGSSFPLKKATKALPKIQIDDDSELIDEDSLLTEEDLKKPQLPVVGDCEVGATRKACKNCTCGRAEAEAQVEKLELTAEQINNPQSACGSCGLGDAFRCGTCPYRGLPPFKPGEKVSLSGNFLAADI

SEQ ID NO: 85821 - protein, 125 aa, Setaria italica
  Transcript Sequence Number=SeqID_19847
MAAVSLSPPLLLLAVLLLTTAGTTQCHGHKRHHHHTDRTRRPNKAAAADASPPADTAHHAICHKTPHPVSCLAAVASHPDAVAVASAKAVEASAVSVQLLPPNLLSVVLASLRGAASALSSLLPR

SEQ ID NO: 85822 - protein, 472 aa, Setaria italica
  Transcript Sequence Number=SeqID_19848
SKVGGRKDIVESISGDREGSSSNNKDFPQKKRLIERRSTNEKGTFVPEKPVGKLQKQVQPNVVMDEHIKWDKESKDTTDVVSFTFTSPLVKPSAGPSRLAGKWDSRSNFNLDAGCDKDDSDGKAEGLSSVGLNFVNGDALSLLLEKKLKELTSKIDPSITFTRGDTFVPATFTLEEPPTSSCSNWGSESGVFDCSPSEAKPSQYDYCPSAQSSTKGQIFRGSKLKVEEPEECSSISNARKEQEYEDLSPLSVLEPTFLSESCWSSECSGSSDGSKAVYSSSSEVKTTTGNFLMNPPPVDIEAKTTDSASSASVDASDISDVTQCSKKSRHTELEYIEDVLSNVNLTTDELGSLFVNQDGSALDPLLFEKLENMHVYAQGKEPLGRRGYRRLLFDCINECLETRRSTYFRAGYAAWSKGVAALSRGVEAEVCNEITSWKSMGEWVEDELVDKDMSSGLGTWVDFRVEAVYVGP

SEQ ID NO: 85823 - protein, 327 aa, Setaria italica
  Transcript Sequence Number=SeqID_19849
  Gene Ontology: Mol. function=hydrolase activity
  Homolog annotation: Hit_ID=B4FRE0; Match level="QueryCoverage=100%, HitCoverage=95%, E-value=1e-161, Identity=84%"; Hit description =Monoglyceride lipase
  Pfam annotation: Domain name=Abhydrolase_1; Domain location=42-266; Score=22.7; E_value=8.3e-05; Accession=PF00561.12; Description =alphabeta hydrolase fold
VLVCGWLAAASPKALVFLCHGYGMECSGFMRECGVRLAAAGYGVFGIDYEGHGKSMGSRCYIRSFRRLVDDCHHFFKSICELEEYRSKSRFLYGESMGGAVALLLHRKDPAFWDGAVLVAPMCKISEKVKPHPLVITLLTQVEDVIPKWKIVPTKDVIDAAFKDPAKREKIRRNKLIYQDKPRLKTALEMLRTSMYIEDSLSQVKLPFFVLHGEADTVTDPEVSRALYERAASGDKTIKLYPGMWHGLTAGEPDENVEAIFSDIVAWLNERSRSWTMEDRLRKLMLATGKLVDGENGGGAPAHARPQRQRRGFLCGLAGRTHHHAEM

SEQ ID NO: 85824 - protein, 93 aa, Setaria italica
  Transcript Sequence Number=SeqID_19850
  Subcellular localization annotation: CTP_CleavageSite=45; ConfidenceScore=5.04e-01
MERAPALCLLISLLAFYLLVPSSAVPLSRLQKMPMQKAGQMPSVKGSTPEPKMKTERFVPEDGKSVISERMAFETQDYGPPVPNNHHKPPGWR

SEQ ID NO: 85825 - protein, 126 aa, Setaria italica
  Transcript Sequence Number=SeqID_19851
  Gene Ontology: Mol. function=hydrolase activity, acting on glycosyl bonds; Cellular component=extracellular region; Biological process =cell wall organization and biogenesis
  Homolog annotation: Hit_ID=B6TPQ7; Match level="QueryCoverage=75%, HitCoverage=19%, E-value=5e-44, Identity=86%"; Hit description =Polygalacturonase
EPASGGAAAVYDVVKDFGAVGDGVADDTDAIKTAWDTACADDGDGVVLARAGYSFLVHTTVFTGPCQGSVTIQLDGTMVAPSDPDKWPANNKRNWLVFYNAHGTTLRGAGLIDGKGQNWWELPCKV

SEQ ID NO: 85826 - protein, 73 aa, Setaria italica
  Transcript Sequence Number=SeqID_19852
  Gene Ontology: Mol. function=isomerase activity
  Homolog annotation: Hit_ID=B6TY43; Match level="QueryCoverage=100%, HitCoverage=23%, E-value=5e-15, Identity=62%"; Hit description=APRL3- Zea mays adenosine 5'-phosphosulfate reductase-like
  Subcellular localization annotation: CTP_CleavageSite=21; ConfidenceScore=5.18e-01
MAPRQPWWMALLLPFLLAGVGSSAAASVPTDACRVPTTVESVLGTPEMCSTLDRLGDPVGVIEGDEVTLAKAV

SEQ ID NO: 85827 - protein, 127 aa, Setaria italica
  Transcript Sequence Number=SeqID_19853
  Gene Ontology: Mol. function=isomerase activity; Biological process =cell redox homeostasis
  Homolog annotation: Hit_ID=B6TY43; Match level="QueryCoverage=83%, HitCoverage=32%, E-value=9e-55, Identity=94%"; Hit description=APRL3- Zea mays adenosine 5'-phosphosulfate reductase-like
  Pfam annotation: Domain name=Thioredoxin; Domain location=4-103; Score=-17.2; E_value=0.0052; Accession=PF00085.12; Description =Thioredoxin
GDEVTLAKAVNLLHMNKDDYIAILFYASWCPFSQECKPNFETLASLFPTIRHFAFEESAIRPSIISRYGIHGFPTLFLLNSTMRVRYHGPRTVKSLAAFYTDVSGVLFVPYKLLSHFSYWMALLECL

SEQ ID NO: 85828 - protein, 124 aa, Setaria italica
  Transcript Sequence Number=SeqID_19854
  Gene Ontology: Mol. function=isomerase activity; Biological process =cell redox homeostasis
  Homolog annotation: Hit_ID=B6TY43; Match level="QueryCoverage=68%, HitCoverage=26%, E-value=9e-43, Identity=95%"; Hit description=APRL3- Zea mays adenosine 5'-phosphosulfate reductase-like
AILFYASWCPFSQECKPNFETLASLFPTIRHFAFEESAIRPSIISRYGIHGFPTLFLLNSTMRVRYHGPRTVKSLAAFYTDVSGVLFVPYKLLSHFSYWMALLECLSKFILVALHIEQLIHVRL

SEQ ID NO: 85829 - protein, 277 aa, Setaria italica
  Transcript Sequence Number=SeqID_19855
  Gene Ontology: Mol. function=isomerase activity; Biological process =cell redox homeostasis
  Homolog annotation: Hit_ID=B6TY43; Match level="QueryCoverage=98%, HitCoverage=84%, E-value=1e-149, Identity=92%"; Hit description =APRL3-Zea mays adenosine 5'-phosphosulfate reductase-like
  Pfam annotation: Domain name=Thioredoxin; Domain location=15-123; Score=-15.4; E_value=0.0038; Accession=PF00085.12; Description =Thioredoxin
MDSEMCSTLDRLGDPVGVIEGDEVTLAKAVNLLHMNKDDYIAILFYASWCPFSQECKPNFETLASLFPTIRHFAFEESAIRPSIISRYGIHGFPTLFLLNSTMRVRYHGPRTVKSLAAFYTDVSGINALVKSTAGEAMVHSLDDIEHKKDAEQENCPFWWARSPEKILQQDTYLALATTFVILRLLYLLFPKIDSFARWAWRRHNLFANLTGAHEYFLNYLEQARQKFHRLYPSSSKRGNLQEGAMNATAWASKSLASVSIGEPSTMGRTNSTSELR

SEQ ID NO: 85830 - protein, 81 aa, Setaria italica
  Transcript Sequence Number=SeqID_19856
SRSRPLCPATAAAAAAVTPAAAASFGTAAAEEADRLRRVRGGAGPDRARDPRHLADSPGDEEIFREFFLLSSARDFGVSCS

SEQ ID NO: 85831 - protein, 95 aa, Setaria italica
  Transcript Sequence Number=SeqID_19857
  Gene Ontology: Mol. function=hydrolase activity, acting on glycosyl bonds; Cellular component=vacuole; Biological process=polysaccharide catabolic process
  Homolog annotation: Hit_ID=Q09023; Match level="QueryCoverage=97%, HitCoverage=28%, E-value=8e-35, Identity=76%"; Hit description =Endochitinase CH25
  Pfam annotation: Domain name=Glyco_hydro_19; Domain location=7-95; Score=54.9; E_value=3e-13; Accession=PF00182.11; Description =Chitinase class I
GGGVGSIISQSLFDQMLLHRNDNACPARGFYTYAAFIAAANAFPGFGTTGDLDTRKREIAAFLGQTSHETTGGWATAPDGPYSWGYCFKQEQNPG

SEQ ID NO: 85832 - protein, 227 aa, Setaria italica
  Transcript Sequence Number=SeqID_19858
  Gene Ontology: Mol. function=RNA binding; Cellular component =nucleolus; Biological process=biological_process
  Homolog annotation: Hit_ID=Q6VBQ7; Match level="QueryCoverage=92%, HitCoverage=94%, E-value=1e-100, Identity=86%"; Hit description =Partner of Nob1
  Pfam annotation: Domain name=KH_1; Domain location=148-200; Score =27.7; E_value=4.7e-05; Accession=PF00013.21; Description=KH domain
MEVERSTTAAAAGGSSAEMAVDHAAGSGAVEKPRFDALMPSEMSGGRPQFRKVPVPPHRFSPLKRCWMEIYTPVYEHMKVDIRMNIKARRVELKTRKDTPDVSNLQKCADFVHAFMLGFDIADAVALLRLDDLYVDSFEIKDVKTLRGEHLSRAIGRLSGKGGKTKYAIENSTRTRIVIADTKIHILGSFVNIKVARDSLCSLILGSPAGKVYSKLRAVSARLAERC

SEQ ID NO: 85833 - protein, 142 aa, Setaria italica
  misc_feature (134)..(134): Xaa can be any naturally occurring amino acid
  Transcript Sequence Number=SeqID_19859
  Gene Ontology: Mol. function=transporter activity; Cellular component= membrane; Biological process=oligopeptide transport
  Homolog annotation: Hit_ID=B9SKJ1; Match level="QueryCoverage=97%, HitCoverage=24%, E-value=7e-32, Identity=49%"; Hit description =Peptide transporter, putative
RKLEIPAAAMNVFEILGVTAFVFIYSFCIVKIMSKVWREPTELERMGIGLVISTLAMITSGVVEQQRLKHATGEASSSLTILWQIPQYVLIGASEVFMYVTMTEFFNDQLPEGLRSLGSAMSVASMSAGNFVSXLLVTVVMA

SEQ ID NO: 85834 - protein, 90 aa, Setaria italica
  Transcript Sequence Number=SeqID_19860
  Gene Ontology: Mol. function=oxidoreductase activity, acting on single donors with incorporation of molecular oxygen, incorporation of two atoms of oxygen
  Homolog annotation: Hit_ID=B1PYP0; Match level="QueryCoverage=98%, HitCoverage=9%, E-value=2e-20, Identity=57%"; Hit description =Lipoxygenase
TGGGSLTKKVTSTLSAFTTAQAVAGDRRRSFPSLAAIDALYEDGYKNKPGQQPDNLERYFTDLLQRQVELLLKGEKEEVKEDIRKVFKFQ

SEQ ID NO: 85835 - protein, 130 aa, Setaria italica
  Transcript Sequence Number=SeqID_19861
  Gene Ontology: Mol. function=drug transporter activity; Cellular component=membrane; Biological process=multidrug transport
  Homolog annotation: Hit_ID=B7ZGM0; Match level="QueryCoverage=86%, HitCoverage=24%, E-value=2e-29, Identity=50%"; Hit description =Putative MATE transporter
  Pfam annotation: Domain name=MatE; Domain location=2-126; Score=-5.8; E_value=0.0044; Accession=PF01554.10; Description=MatE
  Subcellular localization annotation: CTP_CleavageSite=57; ConfidenceScore=5.37e-01
FLPNPELQTSVLSICLTSVTLLFTIPFGLGAAGSTRVANGLGAGNPDGARSAVRVVLSMAAMDAVIVGGTLLAARRLVGLAYSSEEEVVSFVAAMVPLVCITVVTDSIQGVLSGCQVLFASISRRLRLRF

SEQ ID NO: 85836 - protein, 66 aa, Setaria italica
  Transcript Sequence Number=SeqID_19862
  Gene Ontology: Mol. function=nucleotide binding; Biological process =defense response
  Homolog annotation: Hit_ID=B7UBD5; Match level="QueryCoverage=100%, HitCoverage=7%, E-value=2e-28, Identity=90%"; Hit description=NBS -LRR disease resistance protein
MVEPAISAVAGSIKDLAVQETTLLCGVIGEAGFLKDELQRLQGFLQDADTKRRSGNANATVCISQI

SEQ ID NO: 85837 - protein, 130 aa, Setaria italica
  Transcript Sequence Number=SeqID_19863
  Gene Ontology: Mol. function=O-methyltransferase activity
  Homolog annotation: Hit_ID=B6TR72; Match level="QueryCoverage=98%, HitCoverage=43%, E-value=3e-59, Identity=88%"; Hit description =Caffeoyl-CoA O-methyltransferase 1
  Pfam annotation: Domain name=Methyltransf_3; Domain location=1-127; Score=88.1; E_value=3.1e-23; Accession=PF01596.9; Description=O -methyltransferase
RRRCLEVAKKYYQRAGVAHKIDVKHALAADSLRSLLDCGEASSYDFAFVDADKRMYEEYFELLLKLVRVGGLIVMDNVLWYGRVADPLVDDRKTISIRNFNKKVLEDKRVDISMVPIGDGMTICRKLVDT

SEQ ID NO: 85838 - protein, 325 aa, Setaria italica
  Transcript Sequence Number=SeqID_19864
  Gene Ontology: Mol. function=zinc ion binding; Cellular component =COPII vesicle coat; Biological process=ER to Golgi vesicle-mediated transport
  Homolog annotation: Hit_ID=Q2QSF9; Match level="QueryCoverage=51%, HitCoverage=15%, E-value=1e-56, Identity=70%"; Hit description =Retrotransposon protein, putative, unclassified, expressed
  Subcellular localization annotation: CTP_CleavageSite=27; ConfidenceScore=5.77e-01
ASQQPPPFGGPPGVASRAPPPFGGPPSAASQVPPPFGGPPAAVSQTSPPLGGPPAVTSRPFGGPSVAASQAPPFGGPPSAGSQPLPFGGPPAMASQPAPPMFGAPRPTFPGQPGPTAAASSQAMPPSFGAPQQPPTPFGGQTQFGGPQPGVQPPFAAQSAPVAQQLPFMGPPRANAPAFGPPSWQTQGAGSGAMQPPMGMPGIPGMQPNTLGPPGTPTMPYSPHAGTQVSTPSKIDPTQIPRPIPEASVIIYETRQGGQATVPPAASSEFIVKDTGNCSPRLMRCTVNQIPCTGDLLTTSAMPLALMVQPFALPHPSEEPIQLVD

SEQ ID NO: 85839 - protein, 146 aa, Setaria italica
  Transcript Sequence Number=SeqID_19865
  Gene Ontology: Mol. function=zinc ion binding; Cellular component =nucleus; Biological process=transcription initiation
  Homolog annotation: Hit_ID=B9T6E1; Match level="QueryCoverage=93%, HitCoverage=8%, E-value=7e-32, Identity=44%"; Hit description =Nuclear receptor binding set domain containing protein 1, nsd, putative
  Pfam annotation: Domain name=PHD; Domain location=13-66; Score=11.1; E_value=0.0016; Accession=PF00628.21; Description=PHD-finger
RKGEEEAVDGEDLCFVCKDGGELRVCDFRSCHKAYHPVCVGKDSDFLNSNEEFICEWHTCFICEGRSRYYCYCCPWHTFCQGCVSQAEFVPVLRKTKGFCINCLRMTIMIEKNVDVDSDGERADFNDRATYEFLFKEYWEIVRDKE

SEQ ID NO: 85840 - protein, 74 aa, Setaria italica
  Transcript Sequence Number=SeqID_19866
  Subcellular localization annotation: CTP_CleavageSite=33; ConfidenceScore=5.53e-01
APRSAPRDGVRRTPAYLAVLPPPSPRSILLSFSSSSRSRDGFSSLVVSWHFGRIWLMMDEFLPVSWCAGLCDPL

SEQ ID NO: 85841 - protein, 131 aa, Setaria italica
  Transcript Sequence Number=SeqID_19867
  Gene Ontology: Mol. function=fructose-bisphosphate aldolase activity; Cellular component=chloroplast; Biological process=metabolic process
  Homolog annotation: Hit_ID=Q40677; Match level="QueryCoverage=82%, HitCoverage=27%, E-value=4e-57, Identity=97%"; Hit description =Fructose-bisphosphate aldolase, chloroplastic
  Pfam annotation: Domain name=Glycolytic; Domain location=2-131; Score= -50.2; E_value=1.5e-10; Accession=PF00274.11; Description=Fructose -bisphosphate aldolase class-I
  Subcellular localization annotation: CTP_CleavageSite=55; ConfidenceScore=5.53e-01
GSSVGLKVPGPTSGSLGSSVVTPLKLLHRRIPPSVPGIMFLSGGQSEVEATQNLNAMNQGPNPWHVSFSYARALQNTCLKTWGGVPENVKAAQDALLLRAKANSLAQLGKYTSDGEAAEAKEGMFVKNYSY

SEQ ID NO: 85842 - protein, 78 aa, Setaria italica
  Transcript Sequence Number=SeqID_19868
DSNPMIGPLDAGGMLPSRTVKMSDPWTMSFTGMGLILYQIVRYEFHNFKMCICAVRCSLKEVKRYHYYYFVCFIDHMG

SEQ ID NO: 85843 - protein, 91 aa, Setaria italica
  misc_feature (68)..(68): Xaa can be any naturally occurring amino acid
  Transcript Sequence Number=SeqID_19869
  Homolog annotation: Hit_ID=B6TF70; Match level="QueryCoverage=46%, HitCoverage=10%, E-value=4e-13, Identity=83%"; Hit description =Macrophage erythroblast attacher
AWTVNCTSLESDCYLYCVTIGSSFIWNQLQVEYCSCSTKILLPDAVFYLQILFEKDRWDFLVDMFKQXIFAKLYGMTLEPLLNIYLQAGLT

SEQ ID NO: 85844 - protein, 322 aa, Setaria italica
  misc_feature (5)..(6): Xaa can be any naturally occurring amino acid
  Transcript Sequence Number=SeqID_19870
  Gene Ontology: Mol. function=actin binding; Cellular component =integral to plasma membrane; Biological process=negative regulation of myeloid cell apoptosis
  Homolog annotation: Hit_ID=B6TF70; Match level="QueryCoverage=100%, HitCoverage=79%, E-value=1e-169, Identity=88%"; Hit description =Macrophage erythroblast attacher
LTSLXXRLHGLKRKMEEGARAEEVQVQRCRARLDRLASASTGEDAEWEDMRLKRILVDYMLRMSYYDSATKLAETSGIQDLVDIDVFLDAKRVIDSLQNNEVAPALAWCAENKSRLKKSKSKLEFLLRLQEFVEFVKAKNCIQAIAYARKYLAPWGSIHMKELQRVTATLVFRSNTNCAPYKILFEKDRWDFLVDMFKQDFCKLYGMTLEPLLNIYLQAGLTALKTPLCSEGSCPKEDPLSLEGFRKLAEPLPFSKQHHSKLVCYITKELMDTENPPRVLPNGYVYSEKALQEMAKKNDGKITCPRTGDVCDFSECVRAFIS

SEQ ID NO: 85845 - protein, 49 aa, Setaria italica
  Transcript Sequence Number=SeqID_19871
CRHLCMVHHAISSNCSCISLSYSKHLLPHSGIVVILLLKRVSRCKLCHL

SEQ ID NO: 85846 - protein, 105 aa, Setaria italica
  Transcript Sequence Number=SeqID_19872
  Gene Ontology: Mol. function=aspartic-type endopeptidase activity; Biological process=proteolysis
  Homolog annotation: Hit_ID=B6SL29; Match level="QueryCoverage=100%, HitCoverage=21%, E-value=2e-43, Identity=84%"; Hit description =Aspartic proteinase nepenthesin-2
AYAALRSAFRSGMAAYGYPAAPPNGILDTCYNFAGYGSVTLPNVALTFSSGATLTLGADGILSFGCLAFAPSGSDGGMAILGNVQQRSFEVRIDGESVGFKPGSC

SEQ ID NO: 85847 - protein, 59 aa, Setaria italica
  Transcript Sequence Number=SeqID_19873
PFLVLVNHIRPILKCMFVKFDWPSCRKVKVTQLTRLCCQFCVSLCTSVASQAHICTSPL

SEQ ID NO: 85848 - protein, 58 aa, Setaria italica
  Transcript Sequence Number=SeqID_19874
QLQLVGQMDNVRILMHRTVRSIIWYRLFIFLLIPELLVYQITQPATSRSNGQRKNSHA

SEQ ID NO: 85849 - protein, 344 aa, Setaria italica
  misc_feature (165)..(165): Xaa can be any naturally occurring amino acid
  misc_feature (319)..(319): Xaa can be any naturally occurring amino acid
  misc_feature (326)..(326): Xaa can be any naturally occurring amino acid
  Transcript Sequence Number=SeqID_19875
  Gene Ontology: Mol. function=diacylglycerol kinase activity; Cellular component=integral to membrane; Biological process=activation of protein kinase C activity
  Homolog annotation: Hit_ID=A8QM12; Match level="QueryCoverage=100%, HitCoverage=48%, E-value=1e-176, Identity=86%"; Hit description =Diacylglycerol kinase 1
  Pfam annotation: Domain name=C1_1; Domain location=75-136; Score =39.0; E_value=1.8e-08; Accession=PF00130.14; Description=Phorbol estersdiacylglycerol binding do
  Pfam annotation: Domain name=C1_1; Domain location=8-65; Score=7.1; E_ value=0.0045; Accession=PF00130.14; Description=Phorbol estersdiacylglycerol binding do
  Pfam module annotation: Pfam domain module=C1_1::C1_1; Domain location=75-136::8-65
DKVPAASHVWRKEVVPRSKGLKCCVCLKSVSPRQYSGGTIHQCDICGAAAHPSCSGNAHEDCKCVSMAGLNHVLHQWAVQWIDTADHSEEDSFCCYCDESCNGAFLAGYPIWYCMWCQRLVHVDCHTSLAKETGDICDLGPLKRLILSPLCVKELHWTGAGIFSXITSGANELASTVRETIMIRRKRYKKGTASADSDSSGAIELPSDAEGDSQEANSAAKRRDDQANGKLNEVHQSSESEKDKQPVPDNTAATSRSNGQRKNSHAQNSQKYEIVNVPSDSRPLLVFINKRSGAQSGDSLRQRLQILLNPVQVFELSKXQGPEVGXALFRKVTHFRVLVCGGDG

SEQ ID NO: 85850 - protein, 371 aa, Setaria italica
  Transcript Sequence Number=SeqID_19876
  Gene Ontology: Mol. function=diacylglycerol kinase activity; Cellular component=integral to membrane; Biological process=activation of protein kinase C activity
  Homolog annotation: Hit_ID=A8QM12; Match level="QueryCoverage=99%, HitCoverage=51%, E-value=0.0, Identity=95%"; Hit description =Diacylglycerol kinase 1
  Pfam annotation: Domain name=DAGK_acc; Domain location=150-307; Score= 143.3; E_value=7.4e-40; Accession=PF00609.11; Description =Diacylglycerol kinase accessory domain
  Pfam annotation: Domain name=DAGK_cat; Domain location=4-133; Score =131.1; E_value=3.5e-36; Accession=PF00781.16; Description =Diacylglycerol kinase catalytic domain
  Pfam module annotation: Pfam domain module=DAGK_acc::DAGK_cat; Domain location=150-307::4-133
LLRPLLVFINKRSGAQSGDSLRQRLQILLNPVQVFELSKHQGPEVGLALFRKVTHFRVLVCGGDGTAGWVLDAIEKQKFEAPPPVAILPAGTGNDLARVLCWGGGLGVIEKRGGLFSVLQDVEHAAVTVLDRWKITIKDNQGKLMAPPKFMNNYFGVGCDAKVALDIHNLREENPERFYSQFMNKVLYAREGAKNIMDNTFDYFPWDVKLEIDGSKIDIPQDSEGILVANIRSYMGGVDLWKNEDDCSDAYLPQSMHDKKLEVVSFTGMLHLGRLQVGLSRAKRLAQGHHIKIEISIKMPIQVDGEPWSQEPCTIEVSHHNQAFMLKRVSEEPLGHAASVMADILENAENSGIISALQKRTLLQEIASRLL

SEQ ID NO: 85851 - protein, 346 aa, Setaria italica
  misc_feature (73)..(73): Xaa can be any naturally occurring amino acid
  Transcript Sequence Number=SeqID_19877
  Homolog annotation: Hit_ID=B6UE27; Match level="QueryCoverage=91%, HitCoverage=49%, E-value=1e-137, Identity=78%"; Hit description =Ternary complex factor MIP1
MEWRLWRRRGHRAFAKPLKSFSSSEHKRSKSYFEDMYAADALRSSDKTIVLPKPEVVKAKVKSDINKDVQPGXGAQSTLRKEILQLEKHLKDQQVVRGALEKALGPDAAPVNLSPENPMPKAANELIREIATLELEVKNMEQYLLTLYRKAFEQQAPTFSPPDHQDASKPSVSSRSGQLREMPMAMKSCKSRGDAALRSSYPPPHKKWNDPLTDCCTSVRPDRAVDSDVLRCQSALSYRGVCSSRILPSEDDSLARALRSCHSQPFSFLEEGETGASGMISLAEYLGTNVADHIPETPNNLSEEMVRCMAGIYCRLADPPLVHHGSSSSPTSSFSSASAISPQYVG

SEQ ID NO: 85852 - protein, 101 aa, Setaria italica
  Transcript Sequence Number=SeqID_19878
IIEFIGIGASQAVVHSMRKKDRRAGFVVSGEFILGKKGEGSHLSYAKGRESWAEPEVTFPDPPRRFFSLSRPIIVPSPAIGSALSIHLFFFTWIFFFLSCS

SEQ ID NO: 85853 - protein, 73 aa, Setaria italica
  Transcript Sequence Number=SeqID_19879
  Homolog annotation: Hit_ID=B6TW62; Match level="QueryCoverage=63%, HitCoverage=26%, E-value=2e-10, Identity=69%"; Hit description =Disease resistance response protein 206
MAAAAATALLLLPILAAAPWAASAASGEKSTHMKLYWHDVVSGPSPTAVPVARAAVTNNSKTAFGAVVVIDDP

SEQ ID NO: 85854 - protein, 130 aa, Setaria italica
  Transcript Sequence Number=SeqID_19880
  Gene Ontology: Mol. function=glyceraldehyde-3-phosphate dehydrogenase (NADP+) (phosphorylating) activity; Cellular component=chloroplast; Biological process=reductive pentose-phosphate cycle
  Homolog annotation: Hit_ID=P09315; Match level="QueryCoverage=100%, HitCoverage=32%, E-value=8e-63, Identity=91%"; Hit description =Glyceraldehyde-3-phosphate dehydrogenase A, chloroplastic
  Pfam annotation: Domain name=Gp_dh_N; Domain location=67-130; Score= -31.9; E_value=7.2e-07; Accession=PF00044.16; Description =Glyceraldehyde 3-phosphate dehydrogenas
  Subcellular localization annotation: CTP_CleavageSite=83; ConfidenceScore=5.74e-01
MASPMLSATTAPLQSAGLSEFSGLRSSASLPLRRNATSDDFVNAVSFRTHAVGTSGGPRRAPTEAKLKVAINGFGRIGRNFLRCWHGRDDSPLEVIAINDTGGVKQASHLLKYDSTLGIFDADVKPVGDN

SEQ ID NO: 85855 - protein, 813 aa, Setaria italica
  Transcript Sequence Number=SeqID_19881
  Gene Ontology: Mol. function=binding
  Homolog annotation: Hit_ID=Q7EY18; Match level="QueryCoverage=100%, HitCoverage=41%, E-value=0.0, Identity=69%"; Hit description =Putative tetratricopeptide repeat(TPR)-containing protein
DLRTQDAAAWLEYFESKVIEQQEAARNGTRKPDASIASKGHLSVSDLLDYINPNQENKGRDSESGKRRYSSIKVLSHSNESSNGASPEISPRDSTPIIDVEEQVKELSKDDSTEIISEAEVKQSPKSFEQPAPSELPIEIHEVNINVPKEVLQDETAEPEDGWQPVQRPKSAGGPGKQIKHYRPTARKVYDPDSHDPTYTSQYKARNSYSNNRYYFLRKRTVVPTTYTDPQQHVKVQTSGARFGRKIYKAVTYRVKPGTASTEVQDTSKSTEQVSGKAETQVTYSQAHDPTSIDHKESELHGALVASSGNAPSYKDVALARPGTIVKTQIQKSRDDVPQNQPSLGQIIAQEMKDSLVDSLRVEQRPVSSNANNPKEIANVPEQIQQSEETKFSGREPEIENLGKDGSQNLPISVIGSEPGSSKEDANVFSNTRQEPSSSGNADAAIEFSESTGSAIAEQSGKSDVELFEGLPSSIEPVSVTASTTNTGSLEGVASEKSNPNLVLSNIDLREMPNKKLSAAAPPFNPSPPGLSPHAGNVGIPPPGAIPGVAPWPVNVSLHPGHSSMVPSGPPLCTSPHHLYPPAPRSPNLMHPMPFIYPPYSQPQVVPSTTFPMNTNIFRPNHYGWQTYMSPGPSEFVPVSAWSNSHTVEFITPTHGVDPISQSLADKHIQSDAAVVSIGPSLDSSAVAVKEEMETPAVVGSDNFISNKHDDQDKQLKDAIRIELNPDMQADNSQDIGVTNHSRSNMKNEDEGSFRIYVKGKSRRKQTLRIPISLLNKTYGSRSFKFVYNRVVRENDIFRPSSVSFAEVVSSGN

SEQ ID NO: 85856 - protein, 290 aa, Setaria italica
  Transcript Sequence Number=SeqID_19882
  Gene Ontology: Mol. function=protein serine/threonine kinase activity; Cellular component=plasma membrane; Biological process =protein amino acid phosphorylation
  Homolog annotation: Hit_ID=B6SP14; Match level="QueryCoverage=99%, HitCoverage=30%, E-value=1e-131, Identity=82%"; Hit description =Receptor protein kinase-like
  Subcellular localization annotation: CTP_CleavageSite=48; ConfidenceScore=5.34e-01
SNVPSWFSDLKSIMTLTMQSVGLSGQLPQKLFSFPQLRHLVLNNNELNGTLDMGNNIRTHLDVFDIRNNKISSVTVYNSFNVENLKLEGNPLCNDSLLSDTTPCTGLQTEAPPQPVPFDVQCANPFIETIIFRAPSFANVIEYLPQLEKNLSGQLSSCTPNRLGLRPYFNEGGYLKVAIKACPVNQKKFNYSQVLNCFNLTLQTYKPPEKFGPYYVKADPYPFHDKTSRAVLIGIVTGSVLLIVGLTLVGFYAVQQKKQAQRLVSVNNPFASWGSMGEDIGEATKTRKVL

SEQ ID NO: 85857 - protein, 61 aa, Setaria italica
  Transcript Sequence Number=SeqID_19883
  Gene Ontology: Biological process=protein transport
  Homolog annotation: Hit_ID=B6TVZ1; Match level="QueryCoverage=86%, HitCoverage=24%, E-value=7e-23, Identity=96%"; Hit description=VPS28- like protein
  Pfam annotation: Domain name=VPS28; Domain location=3-58; Score= -99.0; E_value=0.026; Accession=PF03997.4; Description=VPS28 protein
WPGSAPSLPPDFEGKVKVNEWLSKLHKMGAADELTEQQARQLNFDLDSAYSAFLAALPAGM

SEQ ID NO: 85858 - protein, 130 aa, Setaria italica
  misc_feature (86)..(86): Xaa can be any naturally occurring amino acid
  misc_feature (98)..(98): Xaa can be any naturally occurring amino acid
  Transcript Sequence Number=SeqID_19884
  Subcellular localization annotation: CTP_CleavageSite=18; ConfidenceScore=5.34e-01
PPPPLPQEPAPLKPPPAPESLESSSPPTRSPSSNRHHGKQALETNPGNAASDRPTPGAKKPRRSAASESKLLSCSPAIGWANGSEXGNAGCISKRTSXGRWGRTGSAPRPAAAGRTRSEGEEGWGGRGVD

SEQ ID NO: 85859 - protein, 109 aa, Setaria italica
  misc_feature (1)..(30): Xaa can be any naturally occurring amino acid
  Transcript Sequence Number=SeqID_19885
  Subcellular localization annotation: CTP_CleavageSite=57; ConfidenceScore=5.18e-01
XXXXXXXXXXXXXXXXXXXXXXXXXXXXXXFFFFLGLSNFFTWWLWSTTTLSLSETSGAMVKQSLYKSYIQKELENESIRSYRILYNPPSNSRHISPKLKSIRILSDII

SEQ ID NO: 85860 - protein, 61 aa, Setaria italica
  Transcript Sequence Number=SeqID_19886
RRSTSPLYYSQIRKSGFECIVHDHDQINSHHIYTCMDTANRAGSIHTTPADGRDRTAYSQR

SEQ ID NO: 85861 - protein, 176 aa, Setaria italica
  Transcript Sequence Number=SeqID_19887
  Gene Ontology: Mol. function=nucleic acid binding
  Homolog annotation: Hit_ID=B6U5X6; Match level="QueryCoverage=85%, HitCoverage=81%, E-value=2e-38, Identity=52%"; Hit description=DNA binding protein
  Pfam annotation: Domain name=DDA1; Domain location=26-85; Score=50.1; E_value=8.7e-12; Accession=PF10172.1; Description=Det1 complexing ubiquitin ligase
  Pfam annotation: Domain name=SAP; Domain location=141-175; Score =38.5; E_value=2.6e-08; Accession=PF02037.19; Description=SAP domain
  Pfam module annotation: Pfam domain module=DDA1::SAP; Domain location= 26-85::141-175
  Subcellular localization annotation: CTP_CleavageSite=43; ConfidenceScore=5.00e-01
MGADGRGSGGRKGSSPAKPAEGRTSSLLAGLPSRGNFTESDVASSMGGLKVYICLHDTAPPEGQVVKTDTNNILIRALQLSKHKSEAKDMSSKMPGESSRGKRNAARNLDGKNPSKRPNIGSPTGSSAHEESSSGFSELTLQSFTVEKLRSLLKERGLSPKGKKDELIARLRDASG

SEQ ID NO: 85862 - protein, 107 aa, Setaria italica
  Transcript Sequence Number=SeqID_19888
  Subcellular localization annotation: CTP_CleavageSite=69; ConfidenceScore=5.18e-01
EVVLDADAVVDSYRPRQGLDTYVSPSPARRSRCHLRRGGSSSPTDEVPNGSLLQSARGAGRRWLRRRSSASRGGGGARGTACELSRWARSKGEVARGTRRSEQGGRA

SEQ ID NO: 85863 - protein, 143 aa, Setaria italica
  misc_feature (97)..(97): Xaa can be any naturally occurring amino acid
  Transcript Sequence Number=SeqID_19889
  Gene Ontology: Mol. function=metal ion binding
MSGYKYLVHGEHRVLKQVQEDPTRSESSYKIRLDPYGAHKEQLVTVEKVWDDTSESGLLGGTADPGNHHKDLCLSFALYKLLRRRFYDLPMHELKRXAGKEKIRSLIFGYILRDYERAFRVTGVELSFLQDLFYSKHATIVCR

SEQ ID NO: 85864 - protein, 133 aa, Setaria italica
  Transcript Sequence Number=SeqID_19890
  Gene Ontology: Mol. function=electron carrier activity; Biological process=oxidation reduction
  Homolog annotation: Hit_ID=Q8LL74; Match level="QueryCoverage=92%, HitCoverage=23%, E-value=1e-28, Identity=52%"; Hit description =Cytochrome P450 monooxygenase CYP72A16
GTVTRTTARNRLGLALRAQGLPVTDYSFPSGDMKEFVRLAAAARSQPMPPASHAIAPRALSFEHSITRQHGNVAVTWFGPEPRVIVNDPKLMREILANKHGQFGKQRSFLWIERLLANGLTVHQGEKWVTHRR

SEQ ID NO: 85865 - protein, 243 aa, Setaria italica
  Transcript Sequence Number=SeqID_19891
  Gene Ontology: Mol. function=metal ion binding; Biological process =metal ion transport
  Homolog annotation: Hit_ID=B6UFP9; Match level="QueryCoverage=49%, HitCoverage=58%, E-value=4e-25, Identity=54%"; Hit description =Extensin
MPTLIITVDLDCCRCSSKIQKVLCCIQERGEFVIEKIVYEKDKVLVSGPFDADKLSCKLCCKAGKIIKNIEVAKPPPPPPPKTEPPKPKPPPCKVICPYPCPYPCPQPGWPCSCPTPHCGCQPKPPPPEEKPKTPKPKPEQKPKPEPEPAPCKVIYPYPYPYPYPWPCNCPTPHCECQSKPPPTTPAPAPPPPEPPQPPACRCPTWPSCYCSGYPPYMPPPMPYPYPMVVCDDSPPYGACSIM

SEQ ID NO: 85866 - protein, 238 aa, Setaria italica
  Transcript Sequence Number=SeqID_19892
  Gene Ontology: Mol. function=tetrahydrofolylpolyglutamate synthase activity; Biological process=folic acid and derivative biosynthetic process
  Homolog annotation: Hit_ID=B6U8C5; Match level="QueryCoverage=99%, HitCoverage=42%, E-value=1e-111, Identity=81%"; Hit description =Folylpolyglutamate synthase
ANTWLEKQGHLDRMHARHSDALPDQFIKGLSSACLQGRAQIVPDPQVNSENDKDGNSSLVFYLDGAHSPESMEMCARWFAHVTNYDRMQPVSLKQPHADRNSKKILLFNCMTVRDPQRLLPHLLDTCAQNGLHFEQALFVPNQSQYNKLGSLASPPSEREQTDLSWQLSLQRVWESLPHSNKGLNGVNTSKTSSVFESLPLAIQWLRETAKQNPSTQFQVLVTGSLHLVGDVLRLLKK

SEQ ID NO: 85867 - protein, 126 aa, Setaria italica
  misc_feature (8)..(8): Xaa can be any naturally occurring amino acid
  Transcript Sequence Number=SeqID_19893
  Gene Ontology: Mol. function=mismatched DNA binding; Cellular component=intracellular; Biological process=mismatch repair
  Homolog annotation: Hit_ID=Q1XBQ7; Match level="QueryCoverage=98%, HitCoverage=10%, E-value=3e-58, Identity=87%"; Hit description=DNA mismatch repair protein
  Pfam annotation: Domain name=GIY-YIG; Domain location=34-107; Score =42.1; E_value=2.1e-09; Accession=PF01541.16; Description=GIY-YIG catalytic domain
LDLYNKSXSIPELVDVFCVAYGAREQPPPSTVGRSCIYVIIRSDNKLYVGQTDDLVGRLRAHRSKEGMQDATILYIVVPGKSVACQLETLLINQLPLKGFKLINKADGKHRNFGISRISGEAIATH

SEQ ID NO: 85868 - protein, 413 aa, Setaria italica
  Transcript Sequence Number=SeqID_19894
  Gene Ontology: Mol. function=transferase activity; Cellular component= plastid outer membrane; Biological process=glycolysis
  Homolog annotation: Hit_ID=Q8LQ68; Match level="QueryCoverage=99%, HitCoverage=80%, E-value=0.0, Identity=90%"; Hit description =Hexokinase-6
  Pfam annotation: Domain name=Hexokinase_1; Domain location=2-158; Score=140.3; E_value=6.2e-39; Accession=PF00349.13; Description =Hexokinase
  Pfam annotation: Domain name=Hexokinase_2; Domain location=165-408; Score=260.9; E_value=3.1e-75; Accession=PF03727.8; Description =Hexokinase
  Pfam module annotation: Pfam domain module=Hexokinase_1::Hexokinase _2; Domain location=2-158::165-408
VSLPATGDEHGLFYALDLGGTNFRVIRVQLGGREKRVVKQQYEEVSIPPHLMVGTSTELFDFIAAELEKFVRTEGEDFHLPDGKQRELGFTFSFPVHQTSISSGTLIKWTKGFSINGTVGEDVVAELSRAMERQGLDMKVTALVNDTVGTLAGGRYVDNDVAAAVILGTGTNAAYVEHANAIPKWNGLLPRSGNMVINMEWGNFRSDKLPSSEYDKALDFESLNPGEQIYEKMISGMYLGEIVRRILLKLAHDASLFGDVVPPKLEQLFVLRTPDMSAMHHDTSHDLKHLGAKLKDILGVPDTSLEARYITLHVCDLVAERGARLAAAGIYGILKKLGKDKLPNDFSQQRTVVAMDGGLYEHYKKFSACLEATLTDLLGEEAASSVVVKLANDGSGIGAALLAASHSQYAEAA

SEQ ID NO: 85869 - protein, 55 aa, Setaria italica
  Transcript Sequence Number=SeqID_19895
  Gene Ontology: Mol. function=hydrolase activity, acting on carbon -nitrogen (but not peptide) bonds
  Homolog annotation: Hit_ID=B6TJL6; Match level="QueryCoverage=98%, HitCoverage=11%, E-value=2e-14, Identity=74%"; Hit description =Amidohydrolase family protein
MAAPPAVDVILHNATVVTVDGALRVLRDGAVAVAGDRIAAVGPSADVLAAFPGAA

SEQ ID NO: 85870 - protein, 59 aa, Setaria italica
  misc_feature (9)..(9): Xaa can be any naturally occurring amino acid
  Transcript Sequence Number=SeqID_19896
  Gene Ontology: Mol. function=serine-type endopeptidase activity; Biological process=proteolysis
IFGFIGHEXVDLGMLMASQWMVPCLAATACLMLYLSYRVQQKRRRRRKGSVASRLTSMV

SEQ ID NO: 85871 - protein, 133 aa, Setaria italica
  Transcript Sequence Number=SeqID_19897
  Gene Ontology: Mol. function=metal ion binding; Cellular component =nucleus; Biological process=regulation of transcription, DNA -dependent
  Homolog annotation: Hit_ID=A0SQ38; Match level="QueryCoverage=78%, HitCoverage=13%, E-value=7e-43, Identity=80%"; Hit description=VIL2 protein
VSERGGERERSPPSASLAVSGARPIRHGSPRGGAIIDPAKCRLMSVDEKRELVRELSRSPESAPDKLQAWSRREIVEILCSDLGRERKYTGLSKQRMLDYLFRVVTGKSSGPVEHVQEKEKESIPEPNTINHQ

SEQ ID NO: 85872 - protein, 697 aa, Setaria italica
  Transcript Sequence Number=SeqID_19898
  Gene Ontology: Mol. function=metal ion binding; Cellular component =nucleus; Biological process=regulation of transcription, DNA -dependent
  Homolog annotation: Hit_ID=A0SQ38; Match level="QueryCoverage=97%, HitCoverage=90%, E-value=0.0, Identity=67%"; Hit description=VIL2 protein
  Pfam annotation: Domain name=PHD; Domain location=110-178; Score=1.3; E_value=0.019; Accession=PF00628.21; Description=PHD-finger
NRTNNRNKTSVFPLPSKIRLDYLFRVVTGKSSGPVEHVQEKEKESIPEPNTINHQSPAKRPRKSDNPSRLPIIANNSGASDVTAPTNNQRYCQNVACRAILRDKFCRRCSCCICFSYDDNKDPSLWLFCGSDQPSQKDSCGFSCHLECALKDERTGILQSGQCKKLDGGYYCTRCWKQNDLLGSWKKQLVIAKDARRLDVLCHRIFLSHKILISTEKYLVLHEIVDTALKKLEAEVGPLSGAPNMGRGIVSRLTVGPEVQKLCAQAIDAMESMFSDAAPANSRIQRPSMVPPNFIKFEAITQTSVTIFLDLDQCPMLAQEATSFNLWHRVAVTESYLSNPSGIILAPSKKLPVTELAPATSYIFKVVAFKNSIELGSWEVRMKTCCQKEHPRGSVPGGAGLEQNNGSLKTNSDGQSDPSSEGVDSNNNTAVYADLNKSPESDFEYCENPEILDSDKASHHPSEQMNNLQNIQMAAARATEVTELEEAPGLSASALDEEPNPCVQTGLLRESSNSVEHNQRTIPRSQDTSNAPDGNELVIIAPRYSCSVPPTAPKAMENGNENGGRSFKPKPCDKIVQNGYSKPEREPGNSSNKRTSGKLDDIGHKDCCSEASYEYCVRVVRWLECEGYIETNFRVKFLTWFSLRATPHERKIVSVYVDTLIEDPVHLSGQLVDSFSETIYSKKRSSMPSGFCMDLWH

SEQ ID NO: 85873 - protein, 47 aa, Setaria italica
  Transcript Sequence Number=SeqID_19899
RERALQRRADPTSEQYEVRSITEREYRTLSDALQSENSSTSELAYVE

SEQ ID NO: 85874 - protein, 192 aa, Setaria italica
  Transcript Sequence Number=SeqID_19900
  Gene Ontology: Cellular component=outer membrane
  Homolog annotation: Hit_ID=B9SQQ8; Match level="QueryCoverage=99%, HitCoverage=36%, E-value=1e-61, Identity=59%"; Hit description =Sorting and assembly machinery (Sam50) protein, putative
  Subcellular localization annotation: CTP_CleavageSite=73; ConfidenceScore=5.65e-01
VPFSFYNAALNAGISAGVVLPLGRGFWGSPSSVPDRFFLGGNSSPVCSLGGLNSLLGFKTRGIGPTELRRFVPSESAMDDSAASPGRDYLGGDFAVSAFADLSFDLPLKLFRDAGIHGHAFLTAGNLAKLSESEYRNFSFAEFRRTFRSSAGVGIIIPTKLFRVEINYCYILKQFEHDRGKTGIRFSFSSPM

SEQ ID NO: 85875 - protein, 48 aa, Setaria italica
  Transcript Sequence Number=SeqID_19901
LFGLLSEELCCRALGLILNMFSSWLSGIGGNPHLVRTQFGIYFSFMDS

SEQ ID NO: 85876 - protein, 154 aa, Setaria italica
  Transcript Sequence Number=SeqID_19902
  Gene Ontology: Mol. function=transporter activity; Cellular component= intracellular; Biological process=transport
  Homolog annotation: Hit_ID=B6TMQ2; Match level="QueryCoverage=89%, HitCoverage=54%, E-value=1e-62, Identity=84%"; Hit description =Phosphatidylinositol transfer protein CSR1
  Pfam annotation: Domain name=CRAL_TRIO_N; Domain location=8-72; Score= 24.4; E_value=0.00021; Accession=PF03765.7; Description=CRALTRIO, N -terminus
MASAAGGGPAGEGEWLKVAELRAMVQAQDPHAKQEVDNLTLRRFLRARDHNVDKASAMFLKFLQWRREAAPGGFVPEEQVRRELAQDKAWMGGVDRAGRPILVGFLARHYSAERDMAEYKSFVVYFFDKICARIPRGQEKFLAIIDLKGWGFFG

SEQ ID NO: 85877 - protein, 94 aa, Setaria italica
  Transcript Sequence Number=SeqID_19903
  Gene Ontology: Mol. function=transporter activity; Cellular component= intracellular; Biological process=transport
  Homolog annotation: Hit_ID=B6T7Q2; Match level="QueryCoverage=100%, HitCoverage=37%, E-value=1e-43, Identity=88%"; Hit description =Phosphatidylinositol transfer protein CSR1
RAYIASIEIMQNYYPERLGKALMINVPYIFMKVWKTMIYPFIDTNTRDKFVFVEDKDQHETLRKEIDESQLPEFLGGKMPLVSLKDYVQQPESV

SEQ ID NO: 85878 - protein, 249 aa, Setaria italica
  Transcript Sequence Number=SeqID_19904
  Gene Ontology: Mol. function=transporter activity; Cellular component= intracellular; Biological process=transport
  Homolog annotation: Hit_ID=B6T7Q2; Match level="QueryCoverage=100%, HitCoverage=99%, E-value=1e-112, Identity=80%"; Hit description =Phosphatidylinositol transfer protein CSR1
  Pfam annotation: Domain name=CRAL_TRIO; Domain location=86-248; Score= 59.2; E_value=1.5e-14; Accession=PF00650.12; Description=CRALTRIO domain
  Pfam annotation: Domain name=CRAL_TRIO_N; Domain location=7-71; Score= 21.1; E_value=0.0005; Accession=PF03765.7; Description=CRALTRIO, N -terminus
  Pfam module annotation: Pfam domain module=CRAL_TRIO::CRAL_TRIO_N; Domain location=86-248::7-71
MASAGGGAAGEGEWLKVAELRAVVQAQDPRAKEVDNLTLRRFLRARDHSVDKAAAMFIKFLKWRREAVPDGFVPEERVRRELAQDKAWMGGVDRAGRPILVGFLARHYSAERDMAEYKSFVVYFFDKICARIPRGQEKFLAIIDLKGWGYANCDVRAYIASIEIMQNYYPERLGKALMINVPYIFMKVWKTMIYPFIDTNTRDKFVFVEDKDQHETLRKEIDESQLPEFLGGKMPLVSLKDYVQHPQAV

SEQ ID NO: 85879 - protein, 98 aa, Setaria italica
  misc_feature (16)..(16): Xaa can be any naturally occurring amino acid
  misc_feature (38)..(38): Xaa can be any naturally occurring amino acid
  misc_feature (69)..(69): Xaa can be any naturally occurring amino acid
  Transcript Sequence Number=SeqID_19905
  Gene Ontology: Mol. function=binding
  Homolog annotation: Hit_ID=Q84LJ8; Match level="QueryCoverage=95%, HitCoverage=48%, E-value=3e-28, Identity=67%"; Hit description =Putative RNA-binding protein (Fragment)
  Pfam annotation: Domain name=YTH; Domain location=1-60; Score=3.3; E _value=0.00039; Accession=PF04146.7; Description=YT521-B-like family
QQDKWNVSSVKWRIVXNVPNNILKHTILGNHENKPVTXTHDTLEIHLEQGLQMFKLFKEHVSKTSILDXDFTSYKSHQKLMQDKRAKQQQIQKQVHSN

SEQ ID NO: 85880 - protein, 194 aa, Setaria italica
  misc_feature (38)..(38): Xaa can be any naturally occurring amino acid
  misc_feature (119)..(119): Xaa can be any naturally occurring amino acid
  misc_feature (150)..(150): Xaa can be any naturally occurring amino acid
  Transcript Sequence Number=SeqID_19906
  Gene Ontology: Mol. function=binding
  Homolog annotation: Hit_ID=Q10RI3; Match level="QueryCoverage=84%, HitCoverage=20%, E-value=1e-48, Identity=63%"; Hit description=YT521- B-like family protein, expressed
  Pfam annotation: Domain name=YTH; Domain location=64-141; Score=47.8; E_value=4.3e-11; Accession=PF04146.7; Description=YT521-B-like family
HNWNVWASTTNGSKKLDAAYQEAQSKSSACPIFLFPWXDLFRTLYFVVDVKLVSFAWYALHDETSGEYKWPVDFEKTLEYWQQDKWNVSSVKWRIVQDVPNNILKHTILGNHENKPVTXTHDTLEIHLEQGLQMFKLFKEHVSKTSILDXDFTSYKSHQKLMQDKRAKQQQIQKQVDCLRLLRSGTVELHFHNQ

SEQ ID NO: 85881 - protein, 105 aa, Setaria italica
  Transcript Sequence Number=SeqID_19907
SKARTKPEARPASPPTRQTLPHGAETPQRCRLCGGSGVRMDQEVIIIRQTHPPEAAGSTPATRPGSRFRDRGRRQARTPATKGRRDPRGRAVECEDGEVDRNRIQ

SEQ ID NO: 85882 - protein, 546 aa, Setaria italica
  Transcript Sequence Number=SeqID_19908
  Gene Ontology: Mol. function=transferase activity, transferring glycosyl groups
  Homolog annotation: Hit_ID=B9RLK0; Match level="QueryCoverage=90%, HitCoverage=92%, E-value=0.0, Identity=65%"; Hit description =Glycosyltransferase QUASIMODO1, putative
  Pfam annotation: Domain name=Glyco_transf_8; Domain location=206-521; Score=274.9; E_value=1.9e-79; Accession=PF01501.12; Description =Glycosyl transferase family 8
GKRGSNGWRSIARRRALEHRRSARRRLPGWIWWLLGIFLLVGLMLFVLHHNQKEQFRPPVVDNGSEIEEVPHEKVNFTEELLSSTSFARQLADQMTLAKAYVILAKEHGNLQLAWELSSQIRNCQRLLSEGAVSGRAITQEEAHPIISRLARLIYKAQDAHYDISTTIVTLKSHALALEERAKAAIVQSAEFGQLAAESFPKSLHCLTVKLTEEWLRNPKYRSRSEEQRNSTRLVDNNLYHFCIFSDNVLATSVVVNSTVSNANHPQQLVFHVVTDRIHFGAMSTWFLINDFKGCTVEVRCIDEFSWLNASSSPLVRQLSEVETQGYYYSAGSKNPEREIKFRNPKFVSLLNHLRFYLPQILPNLEKVVFLDDDVVVQKDLTQLFSIELHGNVIGAVETCLESFHRYHKYLNFSHPTISSKIDPHTCGWAFGMNIFDLIAWRKANATSLYHYWQEQNSDLLLWRTGTLPAGLLTFYGLMEPLDRRWHVLGLGYDVDIDVRLIESAAVVHYNGNMKPWLKLAIRRYKYIWERYVNFSHPYVRECMLH

SEQ ID NO: 85883 - protein, 384 aa, Setaria italica
  Transcript Sequence Number=SeqID_19909
  Gene Ontology: Mol. function=structural constituent of ribosome; Cellular component=ribonucleoprotein complex; Biological process =translation
  Homolog annotation: Hit_ID=B6SVP3; Match level="QueryCoverage=98%, HitCoverage=74%, E-value=0.0, Identity=88%"; Hit description =Structural constituent of ribosome
  Pfam annotation: Domain name=Ribosomal_S5; Domain location=225-291; Score=46.8; E_value=8.3e-11; Accession=PF00333.12; Description =Ribosomal protein S5, N-terminal domain
  Pfam annotation: Domain name=Ribosomal_S5_C; Domain location=301-375; Score=24.4; E_value=1.8e-05; Accession=PF03719.7; Description =Ribosomal protein S5, C-terminal domain
  Pfam module annotation: Pfam domain module=Ribosomal_S5::Ribosomal_S5_ C; Domain location=225-291::301-375
KATGKPTTRQTNERAERYTPDAIKRRVDEFERKCKRHGELLRSFAEAETLDEAHKWMTKIDKFEERHLKLPLEYRVIGDMMNRLKDATGKERFVLLQKLNRAVRIMECKEAFDPSNPANFGLIQHQQVGSPEDLVLNAGFDKEKQMIQGEQLEDDDDEEFNEAKERDDMLIEKLNAIEKKIEDKLAELDHTFGKKGRVLEEEIKDLVEERNSLSEKKRRPMYRKGFDIKVIDVNRTCKVTKGGQIAKFTALLATGNYHGVVGFAKAKGPTAKIAIQRAYEKCFQNLHYMERYEDHTIAHAIQAKYEKTKIYLWPGPMRSGMSAAGRTVETVLYLAGFSNVKSKIIGSRNPLNVIKALFIALNAIETPKDVQQKFGRTVVESYLL

SEQ ID NO: 85884 - protein, 244 aa, Setaria italica
  Transcript Sequence Number=SeqID_19910
  Homolog annotation: Hit_ID=B6UBA9; Match level="QueryCoverage=94%, HitCoverage=63%, E-value=6e-59, Identity=60%"; Hit description=IQ calmodulin-binding motif family protein
  Pfam annotation: Domain name=IQ; Domain location=110-130; Score=20.3; E_value=0.0077; Accession=PF00612.19; Description=IQ calmodulin -binding motif
  Pfam annotation: Domain name=IQ; Domain location=88-108; Score=33.1; E_value=1.1e-06; Accession=PF00612.19; Description=IQ calmodulin -binding motif
  Pfam module annotation: Pfam domain module=IQ::IQ; Domain location =110-130::88-108
MGRAMRWLKKVLTGTKKEGERGRKEHSNAACASGGLGLGPPPVEKRRWSFAKPRHSMADGGRRPSVTAVAAGELSQVRPCNCGLEREVEAAVVIQKAFRGYLARKALRALKSLVKLQALVRGYLVRKQAATTLRRLQALMRLQARTASSRKSVEQERIGGARVKPVVHRRRLSDGGDNGFDRSPRIVEMDTCQLRCRSSRITSRYAADPPGASPLLYFQKPASRLLGQELEPPHPKTTPQKKRN

SEQ ID NO: 85885 - protein, 241 aa, Setaria italica
  misc_feature (234)..(234): Xaa can be any naturally occurring amino acid
  Transcript Sequence Number=SeqID_19911
  Gene Ontology: Mol. function=protein serine/threonine kinase activity; Cellular component=integral to membrane; Biological process=protein amino acid phosphorylation
  Homolog annotation: Hit_ID=Q2R8P3; Match level="QueryCoverage=99%, HitCoverage=30%, E-value=1e-107, Identity=78%"; Hit description =Protein kinase domain containing protein, expressed
  Pfam annotation: Domain name=Pkinase; Domain location=1-235; Score =32.3; E_value=2.1e-10; Accession=PF00069.17; Description=Protein kinase domain
  Pfam annotation: Domain name=Pkinase_Tyr; Domain location=1-227; Score=-27.5; E_value=6.7e-12; Accession=PF07714.9; Description =Protein tyrosine kinase
  Pfam module annotation: Pfam domain module=Pkinase::Pkinase_Tyr; Domain location=1-235::1-227
RDRETAFNSELTALARANHKNIVCLLGCCADSGERVLVYEFMANGTLHDQLHSRVPMAPAVSSWRGRLAIALDAARGIEYMHVYAVPPIIHRDVKSANILLDDAWTAKIADFGLSSVLDPTAGACDDAGGGGEPLYTGGTVGYMDPEYYRLQHLTDKSDVYSFGVVLLELMSGCRVVQRYAESVTPKNVVQFAVPHILADEVARVLDPRLPAPTPEEAEALAYVGYLAADCVGXVGCDRPS

SEQ ID NO: 85886 - protein, 47 aa, Setaria italica
  Transcript Sequence Number=SeqID_19912
VSSGILKRNCGSEAMSRKDSFGELLTNLPRIASLPQFLFKIPEDTEN

SEQ ID NO: 85887 - protein, 411 aa, Setaria italica
  misc_feature (14)..(14): Xaa can be any naturally occurring amino acid
  Transcript Sequence Number=SeqID_19913
  Gene Ontology: Mol. function=zinc ion binding; Cellular component =intracellular
  Homolog annotation: Hit_ID=Q9M9L9; Match level="QueryCoverage=36%, HitCoverage=38%, E-value=5e-22, Identity=43%"; Hit description =F10A16.6 protein
VLFDCLSNFPANIXLKIGTWEYVSRYEGDLAKCYFAKHKLVWEVLEGGLKSKIEIQWSDITALKATCPENGQGTLDVVLARPPLFFKETDPQPRKHTLWQATSDFTGGQASMHRRHFLQCPSTLLSKNFEKLVQCDQRLYQLSQQPEIVLETPVFEPRCSIFEDPVESKCAGFTNLKDEHEALPGYSGSLSPCAGSSMSAKNEANDSIGMPAEYLPQTVGSGAGAVGLQAISRNVNGAAPEFNIPHWWSQLKVPGLRPSMSVDDLVNHLGNCISEHITSGNTALAKNEVPTKETLEEIAQYLLGDAQGPPVSASEERSLMARVDSLCCLIQKDTVPVAKPKPEPNDSGGIGVDASDGSDEEFSSAPTGKTTDAAELPAMSRKDSFGELLTNLPRIASLPQFLFKIPEDTEN

SEQ ID NO: 85888 - protein, 97 aa, Setaria italica
  Transcript Sequence Number=SeqID_19914
  Subcellular localization annotation: CTP_CleavageSite=89; ConfidenceScore=5.01e-01
MVRRSLPFRAAMDGGRATALWLVLVASAIVSASSSGEASANGQPATPTGPDTNVLCVSKCGTCPTVCTSPRAPRPSDAGTAPRRRRRRRAAAGTRRC

SEQ ID NO: 85889 - protein, 149 aa, Setaria italica
  Transcript Sequence Number=SeqID_19915
  Gene Ontology: Mol. function=transferase activity, transferring groups other than amino-acyl groups
  Homolog annotation: Hit_ID=Q7X880; Match level="QueryCoverage=95%, HitCoverage=31%, E-value=7e-36, Identity=53%"; Hit description =OSJNBa0043L24.8 protein
RSPYYPLAGRLREEGGRKLVVDCAAQGVMFAEADADLTADDFGDVQSPPFPCFERFILESTSIAGVEPVVDRPLLYIQVTRLRCGGFIFGQRFCHCVVDAPGGMQFEKAVCELACGAAAPSIAPAWGRELFMARRPPRPSYPHLEYREP

SEQ ID NO: 85890 - protein, 153 aa, Setaria italica
  Transcript Sequence Number=SeqID_19916
  Homolog annotation: Hit_ID=Q656G6; Match level="QueryCoverage=32%, HitCoverage=11%, E-value=2e-15, Identity=80%"; Hit description=Alpha- mannosidase-like
MYASDQRPRRAPPLPRQRRRLPAPDSAARLRALPAPDDGLRILSSNDESLENVIHGASIGAGDDEPDIVARVQMDTTTAEIVGANADDETKQDPSEQEERQELERQEHERLRELWLSLLEREQRLELRLQELEGLRAQVATLRELEGRVRRPS

SEQ ID NO: 85891 - protein, 51 aa, Setaria italica
  misc_feature (24)..(24): Xaa can be any naturally occurring amino acid
  Transcript Sequence Number=SeqID_19917
  Homolog annotation: Hit_ID=B6TN26; Match level="QueryCoverage=92%, HitCoverage=12%, E-value=3e-09, Identity=68%"; Hit description=Outer envelope protein
FPFFGVWEKKGGENKRTAPMKTKXLQLMLQVPQDNFQNPAFLFNVKRRWDL

SEQ ID NO: 85892 - protein, 530 aa, Setaria italica
  misc_feature (9)..(9): Xaa can be any naturally occurring amino acid
  Transcript Sequence Number=SeqID_19918
  Gene Ontology: Mol. function=signal transducer activity; Cellular component=nucleus; Biological process=ubiquitin-dependent protein catabolic process
  Homolog annotation: Hit_ID=Q5Z8K3; Match level="QueryCoverage=100%, HitCoverage=84%, E-value=0.0, Identity=90%"; Hit description=Adagio -like protein 1
  Pfam annotation: Domain name=F-box; Domain location=116-164; Score =32.7; E_value=1.5e-06; Accession=PF00646.25; Description=F-box domain
  Pfam annotation: Domain name=Kelch_1; Domain location=213-261; Score =15.8; E_value=0.043; Accession=PF01344.17; Description=Kelch motif
  Pfam annotation: Domain name=Kelch_1; Domain location=265-313; Score =11.4; E_value=0.14; Accession=PF01344.17; Description=Kelch motif
  Pfam annotation: Domain name=Kelch_1; Domain location=318-366; Score =10.8; E_value=0.17; Accession=PF01344.17; Description=Kelch motif
  Pfam annotation: Domain name=Kelch_1; Domain location=370-422; Score =4.9; E_value=0.89; Accession=PF01344.17; Description=Kelch motif
  Pfam annotation: Domain name=Kelch_1; Domain location=437-485; Score =8.3; E_value=0.34; Accession=PF01344.17; Description=Kelch motif
  Pfam annotation: Domain name=Kelch_2; Domain location=213-264; Score =16.1; E_value=0.15; Accession=PF07646.7; Description=Kelch motif
  Pfam annotation: Domain name=Kelch_2; Domain location=266-313; Score =25.5; E_value=0.00022; Accession=PF07646.7; Description=Kelch motif
  Pfam annotation: Domain name=Kelch_2; Domain location=317-366; Score =9.5; E_value=2.4; Accession=PF07646.7; Description=Kelch motif
  Pfam annotation: Domain name=Kelch_2; Domain location=371-422; Score =35.6; E_value=2e-07; Accession=PF07646.7; Description=Kelch motif
  Pfam annotation: Domain name=Kelch_2; Domain location=437-485; Score =32.9; E_value=1.3e-06; Accession=PF07646.7; Description=Kelch motif
  Pfam module annotation: Pfam domain module=F-box::Kelch_1::Kelch _1::Kelch_1::Kelch_1::Kelch_1::Kelch_2::Kelch_2::Kelch_2::Kelch _2::Kelch_2; Domain location=116-164::213-261::265-313::318-366::370 -422::437-485::213-264::...
  Pfam module annotation: Domain location=266-313::317-366::371 -422::437-485
RGPFAQRRXPLVDAAMVSNIRRCIDNGTEFRGDLLNFRKDGSPLMNRLHLTPIYGDDATITHYMGIQFFTNANVDLGPLPGSITKEPVRSTRFAPDNSFRPISTGPGESNFCREYSSIFQLTDEVLCQSILSRLSPRDIASVSSVCRRMYHLTRNEDLWRMVCQNAWGSETTQALETVPAARRLGWGRLARELTTLEAVAWRKLTVGGAVEPSRCNFSACAVGNRVVLFGGEGVNMQPMNDTFVLDLNASNPEWRHINVSAAPPGRWGHTLSCLNGSWLVVFGGCGRQGLLNDVFMLDLDAKQPTWREIPGVAPPVPRSWHSSCTLDGTKLVVSGGCADSGVLLSDTYLLDVTMDRPVWREVPASWKPPSRLGHSMSVYGGRKILMFGGLAKSGPLRLRSSDVYTMDLSEEEPCWRCLTGSGMPGAGNPAGAGPPPRLDHVAVSLPGGRILIFGGSVAGLHSASQLYLLDPTEEKPTWRILNVPGRPPRFAWGHSTCVVGGTKAIVLGGQTGEEWMLTEIHELSLASNTV

SEQ ID NO: 85893 - protein, 101 aa, Setaria italica
  Transcript Sequence Number=SeqID_19919
  Gene Ontology: Mol. function=RNA binding; Cellular component=nuclear exosome (RNase complex); Biological process=rRNA processing
  Homolog annotation: Hit_ID=B9SFN0; Match level="QueryCoverage=86%, HitCoverage=28%, E-value=5e-33, Identity=72%"; Hit description=Rrp4, putative
DAATLCVINCQAEVRGFQHDGSLHLQARSEKYGKLERGQLLTVPPYLVKRKKQHFHHLAQYDVDLILGCNGFIWVGEHVVVDEKVKATEDQQKSSDEAENF

SEQ ID NO: 85894 - protein, 62 aa, Setaria italica
  Transcript Sequence Number=SeqID_19920
DAATLCVINCQAEVRGFQHDGSLHLQARSEKYGKVHASSATLPLVALSICPFNASNLALYYL

SEQ ID NO: 85895 - protein, 219 aa, Setaria italica
  Transcript Sequence Number=SeqID_19921
  Gene Ontology: Mol. function=RNA binding; Cellular component=exosome (RNase complex); Biological process=rRNA processing
  Homolog annotation: Hit_ID=B9SFN0; Match level="QueryCoverage=100%, HitCoverage=68%, E-value=3e-98, Identity=77%"; Hit description=Rrp4, putative
  Pfam annotation: Domain name=EXOSC1; Domain location=89-159; Score= -21.5; E_value=0.044; Accession=PF10447.1; Description=Exosome component EXOSC1CSL4
MRDLHLSLNQTQRVRLEAALHELQSLTPAAASAAAVTVADTIPVNQEDNILKGHGTSDQDGEVVATLCGVVERVNKLVYVRTLRARYKPEVGDIIVGRVIEIAPKRWRLEINFSQDAVLMLSSMNLPDGIQRRRTAVDELNMRSIFEENDVICAEVRGFQHDGSLHLQARSEKYGKLERGQLLTVPPYLVKRKKQHFHHLAQYDVDLILGCNGFIWVGE

SEQ ID NO: 85896 - protein, 193 aa, Setaria italica
  Transcript Sequence Number=SeqID_19922
  Gene Ontology: Mol. function=RNA binding; Cellular component=exosome (RNase complex); Biological process=rRNA processing
  Homolog annotation: Hit_ID=B9SFN0; Match level="QueryCoverage=94%, HitCoverage=58%, E-value=3e-70, Identity=66%"; Hit description=Rrp4, putative
WSISGSRRTAVDELNMRSIFEENDVICAEVRGFQHDGSLHLQARSEKYGKLERGQLLTVPPYLVKRKKQHFHHLAQYDVDLILGCNGFIWVGEHVVVDEKVKATEDQQKSSDEAENFTPLETRKHICRLANAVRVLSALGFTLTVELIIETAEASASSNVEVNDMLGAEFYVQTAEREAKRRADLLRKKNGAR

SEQ ID NO: 85897 - protein, 198 aa, Setaria italica
  Transcript Sequence Number=SeqID_19923
  Homolog annotation: Hit_ID=B9R9B2; Match level="QueryCoverage=98%, HitCoverage=37%, E-value=1e-71, Identity=61%"; Hit description=KDEL motif-containing protein 1, putative
  Pfam annotation: Domain name=DUF821; Domain location=1-198; Score =210.9; E_value=3.3e-60; Accession=PF05686.4; Description=Arabidopsis thaliana protein of unknown function (DUF821)
NTMVKWTDRSPYAYWKGNPNVGAGRRFLLRCNASGKRDWNARIYAQDWGKELRQGFRESDLSKQCTHRYKIYIEGRGWSVSEKYILACDSVALMVRPRFHDFFSRGLAPLRHYWPVVRDRGIAMCRSIKFAVDWGNAHTDKAREIGGNASRFVREDLAMDRVYDYMFHLLSEYARLLRYRPAVPRGAAEVTVESMMRG

SEQ ID NO: 85898 - protein, 41 aa, Setaria italica
  Transcript Sequence Number=SeqID_19924
HPRVRIPKFPTCLLMPHKLTVALAHDAASRSASCASATCSS

SEQ ID NO: 85899 - protein, 82 aa, Setaria italica
  Transcript Sequence Number=SeqID_19925
  Subcellular localization annotation: CTP_CleavageSite=75; ConfidenceScore=5.68e-01
QLHLSLSSTGKSAEKKLGRAVAMAAKAVSFLMLVLLLLGVAFPVVSSLASSFQPSSSSRFPVCAMCSFNSLSSVLSSQGGGR

SEQ ID NO: 85900 - protein, 184 aa, Setaria italica
  Transcript Sequence Number=SeqID_19926
  Gene Ontology: Cellular component=extracellular region
  Homolog annotation: Hit_ID=Q53AN3; Match level="QueryCoverage=34%, HitCoverage=58%, E-value=2e-26, Identity=87%"; Hit description =Gibberellin-stimulated protein
  Pfam annotation: Domain name=GASA; Domain location=70-184; Score =152.0; E_value=1.8e-42; Accession=PF02704.6; Description=Gibberellin regulated protein
  Subcellular localization annotation: CTP_CleavageSite=29; ConfidenceScore=5.20e-01
YSISSILLPAAVLRCHHHRHRPPSPRSIKAQPGQGSFSVPIISPLLQQLHLSLSSTGKSAEKKLGRAVAMAAKAVSFLMLVLLLLGVAFPVEVEAGGNGRGNGNGNGGGSGNGNGYGRGNLKPWECSSKCASRCSQTQYHKACITFCNKCCATCLCVPPGFYGNKGACPCYNNWKTKEGGPKCP

SEQ ID NO: 85901 - protein, 45 aa, Setaria italica
  Transcript Sequence Number=SeqID_19927
SLSCQLVRNKAAEMVEEMVYKTPELKDRLHFPRGPHNLHHVVPTV

SEQ ID NO: 85902 - protein, 262 aa, Setaria italica
  Transcript Sequence Number=SeqID_19928
  Gene Ontology: Mol. function=protein serine/threonine kinase activity; Cellular component=plasma membrane; Biological process =protein amino acid phosphorylation
  Homolog annotation: Hit_ID=B9RS14; Match level="QueryCoverage=98%, HitCoverage=52%, E-value=5e-48, Identity=33%"; Hit description =Serine-threonine protein kinase, plant-type, putative
  Pfam annotation: Domain name=LRR_1; Domain location=1-23; Score=3.1; E_value=77; Accession=PF00560.25; Description=Leucine Rich Repeat
  Pfam annotation: Domain name=LRR_1; Domain location=141-163; Score =18.2; E_value=0.034; Accession=PF00560.25; Description=Leucine Rich Repeat
  Pfam annotation: Domain name=LRR_1; Domain location=165-187; Score =17.1; E_value=0.073; Accession=PF00560.25; Description=Leucine Rich Repeat
  Pfam annotation: Domain name=LRR_1; Domain location=189-211; Score =15.6; E_value=0.21; Accession=PF00560.25; Description=Leucine Rich Repeat
  Pfam annotation: Domain name=LRR_1; Domain location=212-234; Score =15.4; E_value=0.23; Accession=PF00560.25; Description=Leucine Rich Repeat
  Pfam annotation: Domain name=LRR_1; Domain location=25-47; Score=6.9; E_value=15; Accession=PF00560.25; Description=Leucine Rich Repeat
  Pfam annotation: Domain name=LRR_1; Domain location=49-72; Score=2.1; E_value=1.2e+02; Accession=PF00560.25; Description=Leucine Rich Repeat
  Pfam annotation: Domain name=LRR_1; Domain location=74-93; Score=6.1; E_value=21; Accession=PF00560.25; Description=Leucine Rich Repeat
  Pfam annotation: Domain name=LRR_1; Domain location=96-118; Score =7.3; E_value=12; Accession=PF00560.25; Description=Leucine Rich Repeat
  Pfam module annotation: Pfam domain module=LRR_1::LRR_1::LRR_1::LRR _1::LRR_1::LRR_1::LRR_1::LRR_1::LRR_1; Domain location=1-23::141 -163::165-187::189-211::212-234::25-47::49-72::74-93::96-118
PLGNLEVSNNLLSGKLPDTLCYNKNLYDLVVFNNNFSGVLPANIGDCQTLDNIMAYSNNFTGEFPEKVWWAFPKLTTVMIQNNGFTGTLPSVISPNITRIEMGNNLFSGAVPSSAPGLNVFKAENNQFFGALPANMSGFANLTDLNLAGNRISGSIPPSIQSLKSLNYLNLSSNQISGDIPAAIGSLAVLNMLDLSNNKLSGDIPQEFNNLRLTFLNLSSNQLTGEIPQSLQSTAFDKAFLGNRGLCATASLNMDIPACPYH

SEQ ID NO: 85903 - protein, 261 aa, Setaria italica
  Transcript Sequence Number=SeqID_19929
  Gene Ontology: Mol. function=nucleic acid binding; Cellular component= chloroplast; Biological process=mRNA processing
  Homolog annotation: Hit_ID=A6N0D0; Match level="QueryCoverage=68%, HitCoverage=96%, E-value=4e-92, Identity=93%"; Hit description =Chloroplast 28 kDa ribonucleoprotein (Fragment)
  Pfam annotation: Domain name=RRM_1; Domain location=179-249; Score =113.1; E_value=9.1e-31; Accession=PF00076.14; Description=RNA recognition motif. (a.k.a. RRM, RBD, o
  Pfam annotation: Domain name=RRM_1; Domain location=83-153; Score =94.9; E_value=2.9e-25; Accession=PF00076.14; Description=RNA recognition motif. (a.k.a. RRM, RBD, o
  Pfam module annotation: Pfam domain module=RRM_1::RRM_1; Domain location=179-249::83-153
LAPTPPRLLRLRSARRLPLAPLAASDSFESSVGVDYAEPAAADGAESEQEEAFASGEEEEEDAAVEEEEEVGEYVEPPEEAKVYVGNLPYDVDSERLAQLFEQAGVVEVAEVIYNRETDRSRGFGFVTMSTVEEAEKAVEMFHRYDVNGRLLTVNKAAPRGSRVERERSPRQFGPSFRIYVGNLPWQVDDSKLVQLFSEHGKVVDARVVYDRETGRSRGFGFVTMATQEELDDAIAALDGQSLDGRALRVNVAEERPQRGF

SEQ ID NO: 85904 - protein, 127 aa, Setaria italica
  misc_feature (8)..(8): Xaa can be any naturally occurring amino acid
  misc_feature (88)..(88): Xaa can be any naturally occurring amino acid
  misc_feature (102)..(102): Xaa can be any naturally occurring amino acid
  Transcript Sequence Number=SeqID_19930
  Gene Ontology: Cellular component=plasma membrane; Biological process= response to desiccation
  Homolog annotation: Hit_ID=Q5MJ29; Match level="QueryCoverage=92%, HitCoverage=65%, E-value=2e-57, Identity=94%"; Hit description=Late embryonic abundant-like protein
  Pfam annotation: Domain name=LEA_2; Domain location=1-127; Score =93.2; E_value=8.8e-25; Accession=PF03168.5; Description=Late embryogenesis abundant protein
LDSVSFKXSMSRECITLHSNVNISNPYDHRLPICEVTYTLKCAGKVVASGTMPDPGWIAASDSTKLEIPAKVPYDFLISIVKDVGRDXGHRLRAPGGAHHRXLPIVGKFTIPLSTSGVVSKSSPNLF

SEQ ID NO: 85905 - protein, 170 aa, Setaria italica
  Transcript Sequence Number=SeqID_19931
  Gene Ontology: Cellular component=plasma membrane; Biological process= response to desiccation
  Homolog annotation: Hit_ID=Q5MJ29; Match level="QueryCoverage=99%, HitCoverage=96%, E-value=6e-77, Identity=85%"; Hit description=Late embryonic abundant-like protein
  Pfam annotation: Domain name=LEA_2; Domain location=12-161; Score =299.3; E_value=8.3e-87; Accession=PF03168.5; Description=Late embryogenesis abundant protein
MASEHAEPKQKQSLMDKAKEFVVDKIAHIPKPEASLDSVSFKSMSRECITLHSNVNISNPYDHRLPICEVTYTLKCAGKVVASGTMPDPGWIAASDSTKLEIPAKVPYDFLISIVKDVGRDWDIDYELQVGLTIDLPIVGKFTIPLSTSGEFKLPTIKDMLFSRTPSEAS

SEQ ID NO: 85906 - protein, 91 aa, Setaria italica
  Transcript Sequence Number=SeqID_19932
PAYKLNEQVHGLAFPKHERRLACNYDHFSVHGRPHRHLPIYRGATSLYVNEPEHAGCSAASAAAAGGHLAFGDAWTNSPALGPSGGAVRCP

SEQ ID NO: 85907 - protein, 206 aa, Setaria italica
  misc_feature (17)..(17): Xaa can be any naturally occurring amino acid
  misc_feature (94)..(94): Xaa can be any naturally occurring amino acid
  misc_feature (193)..(193): Xaa can be any naturally occurring amino acid
  Transcript Sequence Number=SeqID_19933
  Gene Ontology: Mol. function=oxidoreductase activity; Biological process=metabolic process
  Homolog annotation: Hit_ID=B6T3T7; Match level="QueryCoverage=99%, HitCoverage=65%, E-value=3e-73, Identity=68%"; Hit description =Carbonyl reductase 3
CGVQYAHDTDYGSVTTXEKETLSAMDMDQRFGWLWENCRETYDTAKKGLRTNYYGTKQVIEALLPLLQASSDGRIVNVSSHFGQLRLFRNEELXKRELNDIDNLTEERLDELLNMFVKDFEAGTVDSRGWPKYFSTYKVAKATLNAYSRILAREHPELRVNCVHPGYVKTDLTIHSGFLTPEEGGSRVAMVAXLLPKGGVTGAFFE

SEQ ID NO: 85908 - protein, 390 aa, Setaria italica
  misc_feature (370)..(370): Xaa can be any naturally occurring amino acid
  Transcript Sequence Number=SeqID_19934
  Gene Ontology: Mol. function=zinc ion binding
  Homolog annotation: Hit_ID=Q2R7K6; Match level="QueryCoverage=99%, HitCoverage=44%, E-value=4e-97, Identity=52%"; Hit description=RWP -RK domain containing protein, expressed
  Pfam annotation: Domain name=PB1; Domain location=293-375; Score =66.8; E_value=8.3e-17; Accession=PF00564.16; Description=PB1 domain
  Pfam annotation: Domain name=RWP-RK; Domain location=42-93; Score =112.8; E_value=1.2e-30; Accession=PF02042.7; Description=RWP-RK domain
  Pfam module annotation: Pfam domain module=PB1::RWP-RK; Domain location=293-375::42-93
  Subcellular localization annotation: CTP_CleavageSite=78; ConfidenceScore=5.02e-01
IKANVLSGHQKMNTNDLLGDMKRAKKLKPSTTSHGEKTSTSMEKNISLSVLQKYFAGSLKDASKSLGVCPTTLKRICRQHGISRWPSRKIKKVNRSLEKIQNVISSVHGVVDRELKYDPATGFLISSISPSGNPLLIDVEGDGVDPAHIESESSQLKIKLDCGASQGEYQGQLVLKAQEEKLSEIDFSLNEGRLSLNSHSSGTSNRSLSADTYNVSHFINEKATSFQTGLGIVGSQGNNASRDLFLVPQSNIGTETLPSSSSKTDYSSGSASSHGTFQKCSKTQASANEGNTTVTVKANYKDDAVRFKLLPSMKHHDLLEEIAKRMKLSVGSFHLKYRDDEDDWVILESDADLQECLDILEITRSHVVKXQVRDVTHPAASSGSSSVLGM

SEQ ID NO: 85909 - protein, 59 aa, Setaria italica
  Transcript Sequence Number=SeqID_19935
MSQKITARSSGEFLQRSMSATDLDITELAPQNTHHVASEDADVKGFPLFFLNLTFIHIC

SEQ ID NO: 85910 - protein, 130 aa, Setaria italica
  Transcript Sequence Number=SeqID_19936
  Homolog annotation: Hit_ID=A6MGY3; Match level="QueryCoverage=56%, HitCoverage=9%, E-value=1e-10, Identity=41%"; Hit description=IFA binding protein
QSYSNSSTSDDLSTSDAIEDDLSNEASVAEDSWLNRQDSSRETEHTSSGKGDSSSVLNGEVDLTTVQKEIASLNRRLKTLEGDRNFLEHSINSLRNGTEGLVFIQEIACNLRELRAIATDKKDSLLQHVQ

SEQ ID NO: 85911 - protein, 89 aa, Setaria italica
  misc_feature (6)..(6): Xaa can be any naturally occurring amino acid
  Transcript Sequence Number=SeqID_19937
  Gene Ontology: Mol. function=binding
SDLHLXLTVNLALLQDRTNQSIDHEGMRMASASRFGAHDGFAELKDFLSIAYQDFHEDTKGSSDSRCLHEMLEESQSGSPVSSPVKFFW

SEQ ID NO: 85912 - protein, 915 aa, Setaria italica
  Transcript Sequence Number=SeqID_19938
  Homolog annotation: Hit_ID=A6MGY3; Match level="QueryCoverage=98%, HitCoverage=97%, E-value=7e-44, Identity=32%"; Hit description=IFA binding protein
  Pfam annotation: Domain name=DUF593; Domain location=627-720; Score =171.0; E_value=3.4e-48; Accession=PF04576.7; Description=Protein of unknown function, DUF593
MGTRVPILRRVSSALSTALLEWILMLLLFIDAVYSFLVTRFARFCRLPAPCPFCSRLDHVLGNEKPCFYRELICKTHKSEISSLAFCHLHQKLASAQSLCEGCCEKTSDDEIADEPVMDVNELDSNQRNDVVRNSNPTRICSCCGQHFKQRSVPLAYRKIAELEHTEAVGSPKIYTDYSVAGQVHESLEPRDIYHQSDYTSHERDSLLQMTSDSEVEVPCAHDVKSSHSCEASAVEEDLQEDAACEQPVLPSPEAIKESERKVEAELNVTDTHDTSSTCPGTDGHPDSRTDGDRMEEKESLLTKWASQHVPILVKEDSCLKDADISQLPAAASDELPQTRGETEPSQSTNEGNTDPFRSQFTILEEHYAVSGERNINDNLELVHGPENTGRSSGEFPQRSVSATDLDITELAPQNTQHVASEDAHVKDDRGDICVSQAGADFETTGEVEGCIKKIEPIGDMGTHKLVVQDPSDKDCADEPHIPAAAVKSGGEVSQDHGTIEGYPKTSEAIVERRPSLSTQISMNEAYRLAIGSKSSLPSPTLTDVILGKDSTSSINEELRLLLSQLSASRGLEAPWVDPGPSPRAYGRGDELVVQNITKRISLERDASGLESLDGSIVSEMEGESAIDRLRRQVDLDRKSIHLLCRELEEERNASAIAASQALAMITKLQDEKAAMQMEASHYQRMMEEQAEYDSDALAKANELLAEREQQIEELEVELENYRRQYGGEPIEEQAKTPFKQENAVIAFLEEGGLEVPMINTPRGTNSLVSFEEERAYIASSLKKLEQKLQSYSNSSTSDDLSTSDAIEDDLSNEASVAEDSWLNRQDSSRETEHTSSGKGDSSSVLNGEVDLTTVQKEIASLNRRLKTLEGDRNFLEHSINSLRNGTEGLVFIQEIACNLRELRAIATDKSAYLY

SEQ ID NO: 85913 - protein, 107 aa, Setaria italica
  misc_feature (18)..(18): Xaa can be any naturally occurring amino acid
  misc_feature (76)..(76): Xaa can be any naturally occurring amino acid
  Transcript Sequence Number=SeqID_19939
  Gene Ontology: Mol. function=RNA-directed DNA polymerase activity; Biological process=RNA-dependent DNA replication
  Homolog annotation: Hit_ID=Q5SMW3; Match level="QueryCoverage=85%, HitCoverage=49%, E-value=1e-17, Identity=45%"; Hit description=Cyst nematode resistance protein-like
CSYTRNVWAQLSEWTRCXAIEPERWDAHDTLHDWWTALAGEQVPDKRGFRSFIILVLWEVWKERNARVFHRQEQSXPRLVARIRDEAATWVSGWCGAPRSVFGRREA

SEQ ID NO: 85914 - protein, 64 aa, Setaria italica
  Transcript Sequence Number=SeqID_19940
EIGGLNKSYSSWLPLPLHPSSETRSLFSFSTKGVTTESLIVYHRSLIEIWRGTRSQEGGSLALA

SEQ ID NO: 85915 - protein, 56 aa, Setaria italica
  misc_feature (38)..(38): Xaa can be any naturally occurring amino acid
  Transcript Sequence Number=SeqID_19941
  Pfam annotation: Domain name=zf-CCHC; Domain location=39-56; Score =18.2; E_value=0.00059; Accession=PF00098.15; Description=Zinc knuckle
PQQPKDAFQRRERYKAHIRGKWLNYFSTQHRVAECRYXSKCWRCLQWGHKAHSCPS

SEQ ID NO: 85916 - protein, 82 aa, Setaria italica
  misc_feature (54)..(54): Xaa can be any naturally occurring amino acid
  Transcript Sequence Number=SeqID_19942
IPWRQWAMSFVATHYALAKSMGFGTANLVRVLVTTIEHSSVSWKNLILDKYSYXLKKNICLFQWALCQVILIIANKDYFGLK

SEQ ID NO: 85917 - protein, 73 aa, Setaria italica
  Transcript Sequence Number=SeqID_19943
TTYASAEWRTSGSGPTASLPAENHTHGRNRPFVDQRIIAGGLIKTLEMRLISGIMKFGSAFSTATRVAVEGNR

SEQ ID NO: 85918 - protein, 243 aa, Setaria italica
  Transcript Sequence Number=SeqID_19944
  Gene Ontology: Mol. function=zinc ion binding; Cellular component =intracellular
  Homolog annotation: Hit_ID=Q9LPJ4; Match level="QueryCoverage=91%, HitCoverage=72%, E-value=4e-53, Identity=50%"; Hit description =F6N18.8
  Pfam annotation: Domain name=PLATZ; Domain location=37-148; Score =290.1; E_value=4.8e-84; Accession=PF04640.6; Description=PLATZ transcription factor
  Pfam annotation: Domain name=zf-FCS; Domain location=120-150; Score =12.0; E_value=0.03; Accession=PF06467.6; Description=MYM-type Zinc finger with FCS sequence mot
  Pfam module annotation: Pfam domain module=PLATZ::zf-FCS; Domain location=37-148::120-150
MVMVSVAASPSPMVRSEEDLGPPWLRPLLGTSFFVPCRMHPELSKNECNLFCLGCTGDALCAYCLPAHRDHHVVQIRRSSYHNVIRVSEVGKLIDISHVQTYVINSAKIVFLNGRPQARPGKGVTNTCEICCRSLPDSFRFCSLGCKLGGMQWDPSLTFAIRPKRGQGSGDDGSGSDDSFSPKKPRRMAGFDLGRFDRPGIRWSDDEGSRSNNGRPITPGTPPINRCRPSRRKGIPHRAPFYG

SEQ ID NO: 85919 - protein, 79 aa, Setaria italica
  Transcript Sequence Number=SeqID_19945
YHEYSDANNLRPITSTLLFRQHRWTHAQMSPSQSSQGTEHDLKALVICATKNSHTLWLVWWSGAVNISAKPLTATGRLG

SEQ ID NO: 85920 - protein, 241 aa, Setaria italica
  Transcript Sequence Number=SeqID_19946
  Gene Ontology: Mol. function=hydrolase activity; Cellular component =cytosol; Biological process=one-carbon compound metabolic process
  Homolog annotation: Hit_ID=Q00XC3; Match level="QueryCoverage=85%, HitCoverage=90%, E-value=9e-18, Identity=29%"; Hit description =Phospholipase/carboxyhydrolase (ISS)
  Pfam annotation: Domain name=FSH1; Domain location=19-228; Score= -5.1; E_value=5.5e-07; Accession=PF03959.5; Description=Serine hydrolase (FSH1)
MGSLGGEDRRQPEARGRRPRFLCLHGFRTSAEIMRKQVVGKWPADVTARLDLVFADAPFPAEGKSDVDGIFDPPYYEWFQFDKEFTEYKNFDKCLAYIEELMIKDGPFDGLMGFSQGAILSAALPGLQEQGLALTRVPKIKYLIIIGGAKFLSPTVAEKAYANKIACTSLHFIGDNDFLKTHGEKLIESCVDPFVIRHPKGHTVPRLDDKSLQVMLRFLEKIEKETSEHASTDVDEKEVCL

SEQ ID NO: 85921 - protein, 79 aa, Setaria italica
  Transcript Sequence Number=SeqID_19947
IVLVCEYPSNMWKIQLTPEHHPIDRLSGSQSTQTETELAAHAKSEGTESCTAATNLLRGHQFNWLVRYITITVGIVSNY

SEQ ID NO: 85922 - protein, 197 aa, Setaria italica
  Transcript Sequence Number=SeqID_19948
  Gene Ontology: Mol. function=transferase activity; Cellular component= mitochondrion
  Homolog annotation: Hit_ID=B9SU37; Match level="QueryCoverage=100%, HitCoverage=68%, E-value=5e-68, Identity=33%"; Hit description =Pentatricopeptide repeat-containing protein, putative
  Pfam annotation: Domain name=PPR; Domain location=112-146; Score=8.7; E_value=0.83; Accession=PF01535.12; Description=PPR repeat
  Pfam annotation: Domain name=PPR; Domain location=147-181; Score =33.0; E_value=1.2e-06; Accession=PF01535.12; Description=PPR repeat
  Pfam annotation: Domain name=PPR; Domain location=42-76; Score=43.5; E_value=8.5e-10; Accession=PF01535.12; Description=PPR repeat
  Pfam annotation: Domain name=PPR; Domain location=7-41; Score=41.0; E_ value=4.8e-09; Accession=PF01535.12; Description=PPR repeat
  Pfam annotation: Domain name=PPR; Domain location=77-111; Score=55.6; E_value=1.9e-13; Accession=PF01535.12; Description=PPR repeat
  Pfam module annotation: Pfam domain module=PPR::PPR::PPR::PPR::PPR; Domain location=112-146::147-181::42-76::7-41::77-111
GVKPNIVSYNALLGAYASHGAHKEALETFKLLKQNGLRPDIVSYSSLLNAYGRSAQPEKARDVFNEMRKNACKPNKVSYNALIDAYGSAGMLKEAVSFLHEMERDGIQPDVVSISTLLTACGRCRQLAKIDTILAAAKSRGIELNTVAYNSGIGSYLSLGDYEKALELYTLMRASNVKPDAVTYNILISGSCKLGRY

SEQ ID NO: 85923 - protein, 94 aa, Setaria italica
  Transcript Sequence Number=SeqID_19949
FLSSSASRTVADLVAAVQVPGLDEDEGRRVCLASLPMCSAHGLALIALGLPAAGVTTVLPHPGAASSSLWEAVATHAATDVVAAPEALAGGPMP

SEQ ID NO: 85924 - protein, 143 aa, Setaria italica
  Transcript Sequence Number=SeqID_19950
  Gene Ontology: Mol. function=ATP-dependent helicase activity; Cellular component=nucleus; Biological process=ribosome biogenesis
  Homolog annotation: Hit_ID=Q0DWT8; Match level="QueryCoverage=99%, HitCoverage=27%, E-value=3e-70, Identity=88%"; Hit description=DEAD -box ATP-dependent RNA helicase 1
  Pfam annotation: Domain name=DEAD; Domain location=1-142; Score=14.2; E_value=4.1e-06; Accession=PF00270.21; Description=DEADDEAH box helicase
FQEAAWVETVGPGAFERDVCINSPTGSGKTLAYALPIVQMLSTRKVRCLRALIVLPTRDLALQVKEVFDAIAPVVGLSVGSAVGQSSIADEVSNLVRKPKQELYPTIDEEYVKMEPQTKVDILVATPGRLMDHINMTNGFSLE

SEQ ID NO: 85925 - protein, 92 aa, Setaria italica
  Transcript Sequence Number=SeqID_19951
QASLQGFQWGVWRLSCCCTCNHNSNVCQCCALYFYPPIPITFLPFLVCTYVCSSIQLLLALDTICFFSFSYWVREGCRLAVLYGREDVFVLF

SEQ ID NO: 85926 - protein, 129 aa, Setaria italica
  misc_feature (72)..(72): Xaa can be any naturally occurring amino acid
  misc_feature (103)..(103): Xaa can be any naturally occurring amino acid
  Transcript Sequence Number=SeqID_19952
  Gene Ontology: Mol. function=protein serine/threonine kinase activity; Biological process=protein amino acid phosphorylation
  Homolog annotation: Hit_ID=Q2R936; Match level="QueryCoverage=82%, HitCoverage=16%, E-value=5e-48, Identity=90%"; Hit description =Mitogen-activated kinase kinase kinase alpha, putative, expressed
  Pfam annotation: Domain name=Pkinase; Domain location=1-128; Score= -59.5; E_value=6e-05; Accession=PF00069.17; Description=Protein kinase domain
  Pfam annotation: Domain name=Pkinase_Tyr; Domain location=9-129; Score=-136.6; E_value=0.00012; Accession=PF07714.9; Description =Protein tyrosine kinase
  Pfam module annotation: Pfam domain module=Pkinase::Pkinase_Tyr; Domain location=1-128::9-129
YQYQSPRRICNLDPTDTSSFVQEIVLLSQLSHPNIVQYYGSDLSNETLSVYLEYVSGGSIHKLLQEYGPFGXAVLRNYTAQILSGLAYLHGRNTVHRDIKRGXNILVDPNGDIKLADFGCQAYISVHIY

SEQ ID NO: 85927 - protein, 103 aa, Setaria italica
  Transcript Sequence Number=SeqID_19953
  Gene Ontology: Mol. function=protein serine/threonine kinase activity; Biological process=protein amino acid phosphorylation
  Homolog annotation: Hit_ID=Q2R936; Match level="QueryCoverage=92%, HitCoverage=15%, E-value=5e-35, Identity=76%"; Hit description =Mitogen-activated kinase kinase kinase alpha, putative, expressed
  Subcellular localization annotation: CTP_CleavageSite=74; ConfidenceScore=5.52e-01
MISYKYILFQVQTSIAMSSYRSLSPLRDIRNLPAPTSPIPSTANRRIAAINPSNVRMNMSLPVSPCSSPLRQYRQSNRSCLPSPPHPAYSAGAANYSPINNAL

SEQ ID NO: 85928 - protein, 93 aa, Setaria italica
  Transcript Sequence Number=SeqID_19954
  Gene Ontology: Mol. function=protein serine/threonine kinase activity; Cellular component=cytoplasm; Biological process=protein amino acid phosphorylation
  Homolog annotation: Hit_ID=Q2R936; Match level="QueryCoverage=58%, HitCoverage=8%, E-value=9e-24, Identity=96%"; Hit description =Mitogen-activated kinase kinase kinase alpha, putative, expressed
MLISYIVNALRLSIETTVILICVLHTEMQSNETLSVYLEYVSGGSIHKLLQEYGPFGEAVLRNYTAQILSGLAYLHGRNTVHRYLPVIYIINP

SEQ ID NO: 85929 - protein, 550 aa, Setaria italica
  Transcript Sequence Number=SeqID_19955
  Gene Ontology: Mol. function=protein serine/threonine kinase activity; Biological process=protein amino acid phosphorylation
  Homolog annotation: Hit_ID=Q2R936; Match level="QueryCoverage=99%, HitCoverage=84%, E-value=0.0, Identity=78%"; Hit description=Mitogen- activated kinase kinase kinase alpha, putative, expressed
  Pfam annotation: Domain name=Pkinase; Domain location=143-399; Score =315.7; E_value=9.7e-92; Accession=PF00069.17; Description=Protein kinase domain
  Pfam annotation: Domain name=Pkinase_Tyr; Domain location=143-399; Score=137.7; E_value=3.7e-38; Accession=PF07714.9; Description =Protein tyrosine kinase
  Pfam module annotation: Pfam domain module=Pkinase::Pkinase_Tyr; Domain location=143-399::143-399
FDRLSETSSTLPGRAVANESRKQSHVLTEGRIFTNNQALEHPRLSETSVSPRKEFHLQNLDLDRTTYCRGRKSTEIVFSTQVPSSPPSSRGHHYSTSPVPSRTFGQSQASPTAWQDDSRSSSSPQPLPLPPGSPCLPSCSLQWKKGKLLGSGTFGQVYLGFNSEGGQMCAIKEVKVISDDSNSKECLRQLNQEIVLLSQLSHPNIVQYYGSDLSNETLSVYLEYVSGGSIHKLLQEYGPFGEAVLRNYTAQILSGLAYLHGRNTVHRDIKGANILVDPNGDIKLADFGMAKHISAYTSIKSFKGSPYWMAPEVIMNSNGYSLSVDIWSLGCTILEMATAKPPWSQYEGVAAIFKIGNSKDIPDIPDHLSSEAKSFLKLCLQRDPAARPTAAQLMDHPFVKDHATPRSSRSGMTRDMFSTSTDGKNSTVQTSIAMSSYRSLSPLRDIRNLPAPTSPIPSTANRRIAAINPSNVRMNMSLPVSPCSSPLRQYRQSNRSCLPSPPHPAYSAGAANYSPINNALYPMRPSSGLTDPWLEISPLNTQTFDSPRRL

SEQ ID NO: 85930 - protein, 128 aa, Setaria italica
  misc_feature (52)..(52): Xaa can be any naturally occurring amino acid
  misc_feature (110)..(110): Xaa can be any naturally occurring amino acid
  Transcript Sequence Number=SeqID_19956
  Gene Ontology: Mol. function=UDP-glucose 4-epimerase activity; Cellular component=integral to membrane; Biological process =galactose metabolic process
  Homolog annotation: Hit_ID=Q8H0B2; Match level="QueryCoverage=100%, HitCoverage=23%, E-value=8e-43, Identity=71%"; Hit description =Probable UDP-arabinose 4-epimerase 3
DNLSRGNMGAVKVLQELFPHPGRLQFIFADLGDQKSVSSLMLPKLLCLCFLXLWSYIQSLVFHLTGSQVNKIFAENAFDAVMHFAAVAYVGESTLEPLRYYHNITSNTLXLILEAMASHGVKTLIYSS

SEQ ID NO: 85931 - protein, 188 aa, Setaria italica
  misc_feature (12)..(12): Xaa can be any naturally occurring amino acid
  Transcript Sequence Number=SeqID_19957
  Gene Ontology: Mol. function=UDP-glucose 4-epimerase activity; Cellular component=integral to membrane; Biological process =galactose metabolic process
  Homolog annotation: Hit_ID=Q8H0B2; Match level="QueryCoverage=100%, HitCoverage=46%, E-value=8e-99, Identity=92%"; Hit description =Probable UDP-arabinose 4-epimerase 3
AEDIILDFSKSXGADMAVMILRYYNVIGSDPEGRLGEAPRPELREHGRISGACFDAALGIIPGLKVKGRDYPTADGTCIRDYIDVTDLVDAHVKALNKAEPRKVGIYNVGTGRGRSVNEFVDACKKATGVDIKIEYLSRRPGDYAEVYSDPTKINKELNWTAQYTDLKESLSVAWRWQKSHPHGYGTN

SEQ ID NO: 85932 - protein, 108 aa, Setaria italica
  Transcript Sequence Number=SeqID_19958
  Gene Ontology: Mol. function=UDP-glucose 4-epimerase activity; Cellular component=integral to membrane; Biological process =galactose metabolic process
  Homolog annotation: Hit_ID=Q8H0B2; Match level="QueryCoverage=93%, HitCoverage=24%, E-value=1e-50, Identity=93%"; Hit description =Probable UDP-arabinose 4-epimerase 3
VISTLVLLVDAHVKALDKAEPRKVGIYNVGTGRGRSVNEFVDACKKATGVDIKIEYLSRRPGDYAEVYSDPTKINKELNWTAQYTDLKESLSVAWRWQKSHPHGYGTN

SEQ ID NO: 85933 - protein, 338 aa, Setaria italica
  Transcript Sequence Number=SeqID_19959
  Gene Ontology: Mol. function=UDP-glucose 4-epimerase activity; Cellular component=integral to membrane; Biological process =galactose metabolic process
  Homolog annotation: Hit_ID=Q8H0B2; Match level="QueryCoverage=98%, HitCoverage=81%, E-value=0.0, Identity=92%"; Hit description =Probable UDP-arabinose 4-epimerase 3
  Pfam annotation: Domain name=3Beta_HSD; Domain location=67-321; Score= -75.2; E_value=2.4e-05; Accession=PF01073.11; Description=3-beta hydroxysteroid dehydrogenaseisomerase family
  Pfam annotation: Domain name=Epimerase; Domain location=66-329; Score= 227.3; E_value=4e-65; Accession=PF01370.13; Description=NAD dependent epimerasedehydratase family
  Pfam annotation: Domain name=NAD_binding_4; Domain location=68-311; Score=-72.0; E_value=0.00022; Accession=PF07993.4; Description=Male sterility protein
  Pfam annotation: Domain name=Polysacc_synt_2; Domain location=66-316; Score=-170.1; E_value=0.0032; Accession=PF02719.7; Description =Polysaccharide biosynthesis protein
  Pfam annotation: Domain name=adh_short; Domain location=64-195; Score= -54.6; E_value=0.054; Accession=PF00106.17; Description=short chain dehydrogenase
  Pfam module annotation: Pfam domain module=3Beta_HSD::Epimerase::NAD _binding_4::Polysacc_synt_2::adh_short; Domain location=67-321::66 -329::68-311::66-316::64-195
MIPLNRRSSLPRAGMEYFDARRKPHNVAKIIAALVLTTLCIFVLKQSPGFGGNSVFSRHEPGVIHVLVTGGAGYIGSHASLRLLKDNYRVTIVDNLSRGNMGAVKVLQELFPHPGRLQFIFADLGDQKSVNKIFAENAFDAVMHFAAVAYVGESTLEPLRYYHNITSNTLLILEAMASHGVKTLIYSSTCATYGEPEKMPITEATPQFPINPYGKAKKMAEDIILDFSKSKGADMAVMILRYFNVIGSDPEGRLGEAPRPELREHGRISGACFDAALGIIPGLKVKGRDYPTADGTCIRDYIDVTDLVDAHVKALNKAEPRKVGIYNVGTGRRTVTVK

SEQ ID NO: 85934 - protein, 63 aa, Setaria italica
  Transcript Sequence Number=SeqID_19960
  Gene Ontology: Mol. function=hydrolase activity
  Homolog annotation: Hit_ID=Q9FIZ7; Match level="QueryCoverage=100%, HitCoverage=4%, E-value=6e-23, Identity=76%"; Hit description=5 -oxoprolinase
  Pfam annotation: Domain name=Hydant_A_N; Domain location=10-63; Score= -70.0; E_value=0.093; Accession=PF05378.5; Description=Hydantoinaseoxo prolinase N-terminal region
MGSDAAEKFRFCIDRGGTFTDIYAEVPGRSEGYVMKLLSVDPSNYDDAPIEGIRRILEEFTGE

SEQ ID NO: 85935 - protein, 99 aa, Setaria italica
  Transcript Sequence Number=SeqID_19961
RAENPTAAADIDCGAAHGFSPGGAAASCDTVVASPSPAAADHHPDDASAVAAPYGGDYDDDEEDEDGFGSSELLEHNYAVFSPPTLLYDHHPHSKFPFC

SEQ ID NO: 85936 - protein, 53 aa, Setaria italica
  Transcript Sequence Number=SeqID_19962
LFFEFRYLNLPSALAFVVNISMGSPEVWTVLYKGLYTEMCQTWRLRCRTAWST

SEQ ID NO: 85937 - protein, 169 aa, Setaria italica
  misc_feature (106)..(106): Xaa can be any naturally occurring amino acid
  Transcript Sequence Number=SeqID_19963
  Gene Ontology: Mol. function=catalytic activity; Biological process =cellular metabolic process
  Homolog annotation: Hit_ID=Q6Y682; Match level="QueryCoverage=86%, HitCoverage=36%, E-value=3e-62, Identity=72%"; Hit description=38 kDa ribosome-associated protein
  Pfam annotation: Domain name=Epimerase; Domain location=2-143; Score=- 65.4; E_value=0.03; Accession=PF01370.13; Description=NAD dependent epimerasedehydratase family
LTLHKLHTVPPNASLIVPNSKKSTSRYIYCSSAGVYLKSDLLPHCESDAVDPKSRHKGKLETESLLTSRGVNWTSIRPVYIYGPLNYNPVEEWFFHRLKEGRPIPXPGAGNQITQLGHVKDLATAFNLVLGNPKASQQIFNISGAKYVTFDGLARACAKVMRDLAKNKK

SEQ ID NO: 85938 - protein, 376 aa, Setaria italica
  misc_feature (229)..(229): Xaa can be any naturally occurring amino acid
  Transcript Sequence Number=SeqID_19964
  Gene Ontology: Mol. function=catalytic activity; Biological process =cellular metabolic process
  Homolog annotation: Hit_ID=Q6Y682; Match level="QueryCoverage=85%, HitCoverage=80%, E-value=1e-135, Identity=67%"; Hit description=38 kDa ribosome-associated protein
  Pfam annotation: Domain name=3Beta_HSD; Domain location=55-300; Score= -111.9; E_value=0.0031; Accession=PF01073.11; Description=3-beta hydroxysteroid dehydrogenaseisomerase family
  Pfam annotation: Domain name=Epimerase; Domain location=54-272; Score= 23.5; E_value=7.3e-09; Accession=PF01370.13; Description=NAD dependent epimerasedehydratase family
  Pfam annotation: Domain name=NmrA; Domain location=54-302; Score= -111.2; E_value=0.089; Accession=PF05368.5; Description=NmrA-like family
  Pfam module annotation: Pfam domain module=3Beta_HSD::Epimerase::NmrA; Domain location=55-300::54-272::54-302
  Subcellular localization annotation: CTP_CleavageSite=46; ConfidenceScore=5.67e-01
MAATASLKSSFLLPSPISDFSGAAVSVSTQKRRRSWQPRGARIQVSAAADSKNILVMGGTRFIGVFLSRLLVKEGHQVTLFTRGKAPITQQLPGESDAEYAEFSSKIQHLKGDRMDFEFVKTSLAAKGYNVVYDINGREAVEVEPIIEALPNLEQYIYCSSAGVYLKSDLLPHCESDAVDPKSRHKGKLETESLLTSRGVNWTSIRPVYIYGPLNYNPVEEWFFHRLKXARPIPIPGAGNQITQLGHVKDLATAFNLVLGNPKASQQIFNISGAKYVTFDGLARACAKAGGFPEPELVHYNPKDFDFGKKKAFPFRDQHFFASIEKATRELGWTPEFDLVEGLTDSYNLDFGRGTFRKAADFTTDDMILGKKLATV

SEQ ID NO: 85939 - protein, 111 aa, Setaria italica
  Transcript Sequence Number=SeqID_19965
  Subcellular localization annotation: CTP_CleavageSite=13; ConfidenceScore=5.11e-01
SYEAIQRSRRGPRSAGAAADPASSKRWTAPLLRSQAQRSCPCRLLTSPCHVERCSGAGIHLHYFALRSSSLTCTMPKPTSRPPLKFQLRPLPAPLLGCASASCSTTVGHLF

SEQ ID NO: 85940 - protein, 227 aa, Setaria italica
  misc_feature (217)..(217): Xaa can be any naturally occurring amino acid
  Transcript Sequence Number=SeqID_19966
YWSRNNLMDVPPFRNHSSDALPADEVLPLQVDLGATHNPGVFRHCHDLGNQAPRCRDEITWENLDVKGSILRKPNPCSAQGRSTHHRLIDLEKPAALDDDVEIVSSTAFTSYANHNVGLFNNSQSLPLESSPLVRDRLCSAPYITSGLAGSSDSPDSSPPVRAKDGVSGRMCIDLLVRLSRRFGSSPEPSIASCSLVASSATRHSGDFSNNSRKTLXKGSESSIGSS

SEQ ID NO: 85941 - protein, 196 aa, Setaria italica
  Transcript Sequence Number=SeqID_19967
  Gene Ontology: Mol. function=transferase activity, transferring groups other than amino-acyl groups
  Homolog annotation: Hit_ID=Q7Y009; Match level="QueryCoverage=94%, HitCoverage=40%, E-value=7e-39, Identity=43%"; Hit description =Putative hydroxycinnamoyl transferase
RVASVGGRCSTFQCLLAHAWKKVTAARDLPPEEPTQIRVAVNCRGRAQPPVPMEYFGNMVLWAFPRMQAREVLSSSYAAVAGAIRDAVARVDAEYIQSFVDFGEVAERAGEELASTAARPGTAFCPDLEVDSWLGFRFHDLDFGHGPPCAFLPPDLPIEGLMIFVPSCSAKGGVDLFVALNDEHVDAFKQICYSMD

SEQ ID NO: 85942 - protein, 73 aa, Setaria italica
  Transcript Sequence Number=SeqID_19968
HFPVLFTQSKRTSPFLMEMTATQWWQLIQNPQERKDEKNQVRRDPERASRLSWVFVFSETSWQTGHRRSLLLL

SEQ ID NO: 85943 - protein, 318 aa, Setaria italica
  Transcript Sequence Number=SeqID_19969
  Gene Ontology: Mol. function=protein dimerization activity; Cellular component=nucleus; Biological process=regulation of transcription, DNA-dependent
  Homolog annotation: Hit_ID=B6UCY7; Match level="QueryCoverage=95%, HitCoverage=86%, E-value=1e-123, Identity=77%"; Hit description=DNA binding protein
  Pfam annotation: Domain name=bZIP_1; Domain location=179-237; Score =28.1; E_value=3.6e-05; Accession=PF00170.13; Description=bZIP transcription factor
GAAAAHHRHGHGHHQRTSSESFIEEQPPSWLDDLLNEPETPAARQHGRAGHRRSSSDSFALFDTGAASAGAYSNGFEGMGGGGGQPAPWGGVQEYYAKSGSFGRAHGRPWEQGMPHLAGFRHGGGLPMPAKDKVGGHHGPPNALRDHDHGMDKRTPGDAGHDQKVGAKEGVLLKHAQSEADNKRAKQQYAQRSRVRKLQYIAELEGRVQALQSEGVDVSAEMEFLTQQNIILDLENKALKQRLESLAQEQLIKRFQQEMFEREIGRLRSLYQQQQQQQQSPVLVRSNSRDLDAQFANLSLKHKDPNSGRDALSGSLRT

SEQ ID NO: 85944 - protein, 195 aa, Setaria italica
  Transcript Sequence Number=SeqID_19970
MGDVSLNRPMKAEPAAGGTAKGNRILNMMSAGWTDERHMLYISSMEASFVDQLYNHRHRPHNTNGNGFKVLRRGVWEYIKYEKTNARAQSGTKCCVPASPWIRHFRPRDCGSNAQSDGLEASVGDHESGTQTNGERLSVSRGRKWEACKGENQLLDESTEVSDQNFADEEAEVEAESSKARKERRLSSTSHYRDE

SEQ ID NO: 85945 - protein, 48 aa, Setaria italica
  Transcript Sequence Number=SeqID_19971
YIFRGMFLAKLFIRRFDEFFGNLSCSYRFSEPLFPSISWPTTAPPPPA

SEQ ID NO: 85946 - protein, 80 aa, Setaria italica
  Transcript Sequence Number=SeqID_19972
  Gene Ontology: Mol. function=sequence-specific DNA binding; Cellular component=nucleus; Biological process=regulation of transcription, DNA-dependent
  Homolog annotation: Hit_ID=Q10LT9; Match level="QueryCoverage=87%, HitCoverage=20%, E-value=3e-16, Identity=59%"; Hit description=WRKY DNA binding domain containing protein
  Pfam annotation: Domain name=WRKY; Domain location=6-47; Score=28.0; E_value=3.1e-07; Accession=PF03106.7; Description=WRKY DNA -binding domain
RECVCRSYYRCTHRSDQGCNAKRQVQVCEADPSKFVVTYYGDHTCRDPSTIPLVVPAAGAAPDCANNLINFGTSGTNNNA

SEQ ID NO: 85947 - protein, 115 aa, Setaria italica
  misc_feature (67)..(67): Xaa can be any naturally occurring amino acid
  misc_feature (89)..(89): Xaa can be any naturally occurring amino acid
  Transcript Sequence Number=SeqID_19973
  Gene Ontology: Mol. function=cysteine-type peptidase activity; Cellular component=nucleus; Biological process=ubiquitin-dependent protein catabolic process
  Homolog annotation: Hit_ID=B4FI55; Match level="QueryCoverage=96%, HitCoverage=24%, E-value=3e-46, Identity=85%"; Hit description =Ubiquitin carboxyl-terminal hydrolase
HQDAHEFLNFLLNEIVDILEKETRSAKVSPETTSPEKVSNGAAVNGVRKEPLVTWVHKNFQLPFLFXGTLTNETRCLMCETVTAKDETXFFDLSVDIEQNSSLTSCLKNFFPLRL

SEQ ID NO: 85948 - protein, 55 aa, Setaria italica
  Transcript Sequence Number=SeqID_19974
FPFNTKSNGLLLYNNFNLNSEVQTSLSFFVLRGKKTLLLYTNGQQLHTLYQFKVC

SEQ ID NO: 85949 - protein, 70 aa, Setaria italica
  Transcript Sequence Number=SeqID_19975
  Gene Ontology: Mol. function=cysteine-type peptidase activity; Cellular component=nucleus; Biological process=ubiquitin-dependent protein catabolic process
  Homolog annotation: Hit_ID=B4FI55; Match level="QueryCoverage=88%, HitCoverage=14%, E-value=3e-26, Identity=91%"; Hit description =Ubiquitin carboxyl-terminal hydrolase
GVRKEPLVTWVHKNFQGTLTNETRCLMCETTVTAKDETFFDLSVDIEQNSSLTSCLKNFLSSAFKVSVEK

SEQ ID NO: 85950 - protein, 112 aa, Setaria italica
  Transcript Sequence Number=SeqID_19976
  Gene Ontology: Mol. function=cysteine-type peptidase activity; Cellular component=nucleus; Biological process=ubiquitin-dependent protein catabolic process
  Homolog annotation: Hit_ID=Q0JCS2; Match level="QueryCoverage=95%, HitCoverage=28%, E-value=1e-55, Identity=98%"; Hit description =Ubiquitin carboxyl-terminal hydrolase
  Pfam annotation: Domain name=UCH; Domain location=1-105; Score=-36.7; E_value=6.8e-05; Accession=PF00443.21; Description=Ubiquitin carboxyl- terminal hydrolase
SRLSSYIEQLGRYKKLSYRVVFPMELKLSNTSDDVDTEYSLFAVVVHVGSGPNHGHYVSLVKSHNHWLFFDDENVEMVEEQTLQTFFGSSHEYSGNTDHGYILFYEGLGGKS

SEQ ID NO: 85951 - protein, 137 aa, Setaria italica
  Transcript Sequence Number=SeqID_19977
  Gene Ontology: Mol. function=cysteine-type peptidase activity; Cellular component=nucleus; Biological process=ubiquitin-dependent protein catabolic process
  Homolog annotation: Hit_ID=B4FI55; Match level="QueryCoverage=70%, HitCoverage=23%, E-value=4e-46, Identity=87%"; Hit description =Ubiquitin carboxyl-terminal hydrolase
  Subcellular localization annotation: CTP_CleavageSite=34; ConfidenceScore=5.27e-01
MAKTARSPTAEASPPAAADKHRSGSAAGSGLRSLASAASGWWDRWAVMGSGLSKLERAFGDQFPEGERYFGLENFGNTCYCNSVLQALYFCIPFREQLLEYYANNKNPGDAEENLLTCLADLFMQISQAKKKTGVIA

SEQ ID NO: 85952 - protein, 342 aa, Setaria italica
  Transcript Sequence Number=SeqID_19978
  Gene Ontology: Mol. function=cysteine-type peptidase activity; Cellular component=nucleus; Biological process=ubiquitin-dependent protein catabolic process
  Homolog annotation: Hit_ID=B4FI55; Match level="QueryCoverage=78%, HitCoverage=64%, E-value=1e-135, Identity=85%"; Hit description =Ubiquitin carboxyl-terminal hydrolase
  Pfam annotation: Domain name=UCH; Domain location=111-332; Score =79.9; E_value=9.1e-21; Accession=PF00443.21; Description=Ubiquitin carboxyl-terminal hydrolase
  Subcellular localization annotation: CTP_CleavageSite=59; ConfidenceScore=5.67e-01
RFLSSSSSSSSSPARIETPRVSHRPPTAHLLHLSPSAARARGEPPNPRTANPVRSPTVEASSAAERSRSGLGSGFRYLAGAASGWWDRWMVMGASGSKLEKALGDQFPEGERYFGLENFGNTCYCNSVLQALYFCIPFREQLLEYYAKSRNVEDAEENLLTCLADLFSQISASKKKTGVIAPKRFIQMVRKLNEYFRGYMHQDAHEFLNFLLNEIVDILEKETRSAKVSPETTSPEKVSNGAAVNGVRKEPLVTWVHKNFQGTLTNETRCLMCETVTAKDETFFDLSVDIEQNSSLTSCLKNFFSTETLNADDKFFCDKCCSLQEAEKTKTKCRFIFHLLRN

SEQ ID NO: 85953 - protein, 367 aa, Setaria italica
  misc_feature (290)..(290): Xaa can be any naturally occurring amino acid
  Transcript Sequence Number=SeqID_19979
  Gene Ontology: Mol. function=cysteine-type peptidase activity; Cellular component=nucleus; Biological process=ubiquitin-dependent protein catabolic process
  Homolog annotation: Hit_ID=Q0JCS2; Match level="QueryCoverage=93%, HitCoverage=93%, E-value=0.0, Identity=89%"; Hit description =Ubiquitin carboxyl-terminal hydrolase
  Pfam annotation: Domain name=UCH; Domain location=10-349; Score =324.6; E_value=2e-94; Accession=PF00443.21; Description=Ubiquitin carboxyl-terminal hydrolase
PSTRPTTRRRRYFGLENFGNTCYCNSVLQALYFCIPFREQLLEYYANNKNPGDAEENLLTCLADLFMQISQAKKKTGVIAPKRFVQRVKKQNELFRSYMHQDAHEFLNFLLNELVDILEKESSAAKDSPQSSSPEKAPNGPVQPLANGVKKEPPVTLVHKNFQGILTNETRCLRCETVTARDETFLDLSVDIEQNSSITSCLKNFCSTETLNAEDKFFCDKCCSLQEAQKRMKIKKAPHILVIHLKRFKYIEQLGRYKKLSYRVVFPMELKLSSKSDDVDCEYSLFAVVXHVGSGPNHGHYVAKIKSHDHWLSFDDDNVEMIPESTLQTFYGSSREYSGNTDHGYILFYERVGGNCDEKADPPEGSV

SEQ ID NO: 85954 - protein, 114 aa, Setaria italica
  Transcript Sequence Number=SeqID_19980
  Gene Ontology: Mol. function=hydrolase activity, acting on acid anhydrides, catalyzing transmembrane movement of substances; Cellular component=integral to membrane; Biological process =metabolic process
  Homolog annotation: Hit_ID=Q6TXM4; Match level="QueryCoverage=72%, HitCoverage=8%, E-value=1e-23, Identity=62%"; Hit description=Proton P-ATPase
  Pfam annotation: Domain name=Cation_ATPase_N; Domain location=28-108; Score=110.6; E_value=5.3e-30; Accession=PF00690.18; Description =Cation transporterATPase, N-terminus
RRRLHHPRQRVPHEPQELENLALLLLLEEIKNEAVDLENIPVEEVFQTLKCTNKGLSSEEAQARIDVFGPNKLEEKKESKILKFLGFMWNPLSWVMEAAAIMAIALDQTEGRTR

SEQ ID NO: 85955 - protein, 85 aa, Setaria italica
  Transcript Sequence Number=SeqID_19981
  Gene Ontology: Mol. function=substrate-specific transmembrane transporter activity; Cellular component=integral to membrane; Biological process=transmembrane transport
  Homolog annotation: Hit_ID=Q852B0; Match level="QueryCoverage=97%, HitCoverage=15%, E-value=3e-37, Identity=95%"; Hit description =Putative sugar transporter protein
MQALSLFLLAAYYKILNNSPFVAVGALLLYVGAYQVSFGPISWLMVSEIFPLRTRGRGISLAVLTNFGSNALVTFAFSPLQEFLG

SEQ ID NO: 85956 - protein, 92 aa, Setaria italica
  Transcript Sequence Number=SeqID_19982
  Gene Ontology: Mol. function=transporter activity; Cellular component= integral to membrane; Biological process=transport
  Homolog annotation: Hit_ID=Q852B0; Match level="QueryCoverage=36%, HitCoverage=6%, E-value=1e-09, Identity=91%"; Hit description =Putative sugar transporter protein
MVPCFVKMGLVAIEDHYSCKGEYEYLARGLGEFIDQYCPKTFGVMPLNHYGAMCHAMHGAPLYIAETSPPQIRGTLISLKELFIALGILVVV

SEQ ID NO: 85957 - protein, 153 aa, Setaria italica
  misc_feature (126)..(126): Xaa can be any naturally occurring amino acid
  Transcript Sequence Number=SeqID_19983
  Gene Ontology: Mol. function=transporter activity; Cellular component= integral to membrane; Biological process=transport
  Homolog annotation: Hit_ID=B9S3F0; Match level="QueryCoverage=80%, HitCoverage=26%, E-value=6e-24, Identity=48%"; Hit description=Sugar transporter, putative
SGSLTRLQPCSTDRYPFLFPALGGLLFGYDIGATSGATISVQSADLSGTTWFNRSSVQLGLVASGSLYGALGGSILAHRIADFLGRRIELVTAAALYILGALVTGFAPNFVGLIIGRILYGIGIGXETSPPQIRGTLISLKELFIALGILVVV

SEQ ID NO: 85958 - protein, 494 aa, Setaria italica
  Transcript Sequence Number=SeqID_19984
  Gene Ontology: Mol. function=substrate-specific transmembrane transporter activity; Cellular component=integral to membrane; Biological process=transmembrane transport
  Homolog annotation: Hit_ID=Q852B0; Match level="QueryCoverage=87%, HitCoverage=82%, E-value=0.0, Identity=80%"; Hit description =Putative sugar transporter protein
  Pfam annotation: Domain name=MFS_1; Domain location=41-443; Score =97.4; E_value=5e-26; Accession=PF07690.8; Description=Major Facilitator Superfamily
  Pfam annotation: Domain name=Sugar_tr; Domain location=37-492; Score =316.6; E_value=5.2e-92; Accession=PF00083.16; Description=Sugar (and other) transporter
  Pfam module annotation: Pfam domain module=MFS_1::Sugar_tr; Domain location=41-443::37-492
MRRARAMLGVAPPWRGMRPSRGHPSYSVLIHHCSEPRFLFPALGGLLFGYDIGATSGATISVQSADLSGTTWFNRSSVQLGLVASGSLYGALGGSILTHRIADFLGRRIELVTAAALYILGALVTGFAPNFVGLIIGRILYGIGIGLAMHGAPLYIAETSPPQIRGTLISLKELFIVLGILFGYLVGSLEIDNVGGWRYMFGFGAPLAAIMAIGMWTLPPSPKWLLLRAVQGKGSMEDNKKKAIQALRTLRGRSTSEKVLADDVEDTIVSIKAAYAGQEGEGNIWEVFEGASLKAFTIGGGLVLFQQITGQPSVLYYAASILQTAGFSAASDAARVAILIGLFKLLMTGVAVLKVDDLGRRPLLIGGVGGIALSLFLLAAYYKILNNSPFVAVGALLLYVGAYQVSFGPISWLMVSEIFPLRTRGRGISLAVLTNFGSNALVTFAFSPLQEFLGPENIFFLFGAIAVLSLVFVILNVPETKGLSLEEIESKILK

SEQ ID NO: 85959 - protein, 72 aa, Setaria italica
  Transcript Sequence Number=SeqID_19985
SSERKGPDLSISAVGYQDRSGDLGPPFGSEPMFANQVVEKASPWNKVNNHDGHNGMRAEFLRWTREFCTLTS

SEQ ID NO: 85960 - protein, 107 aa, Setaria italica
  Transcript Sequence Number=SeqID_19986
  Gene Ontology: Mol. function=protein binding; Cellular component =cytoplasm; Biological process=vesicle docking during exocytosis
  Homolog annotation: Hit_ID=B6U2C0; Match level="QueryCoverage=96%, HitCoverage=15%, E-value=1e-49, Identity=95%"; Hit description=SNARE- interacting protein KEULE
ADVLPAQSMRSRRIGGTWARHRNSDDGYSSDSVLKHASSDFRKLGQRLFIFVIGGATRSELRAAHKLSGKLKREIILGSSSLDDPLQFITKLKMFSIEELSLDDLQI

SEQ ID NO: 85961 - protein, 106 aa, Setaria italica
  Transcript Sequence Number=SeqID_19987
GTHYFVVLHTSTSFTTKFTTFQHDITLILTPQTHTHMLICYAATQPHNSAKDTHAASYTNIRACRITSTNSCMHAHPFHLGNSNYHTATTAVCQSLNYARTPCFMN

SEQ ID NO: 85962 - protein, 409 aa, Setaria italica
  Transcript Sequence Number=SeqID_19988
  Gene Ontology: Mol. function=protein binding; Cellular component =cytoplasm; Biological process=vesicle docking during exocytosis
  Homolog annotation: Hit_ID=B6U2C0; Match level="QueryCoverage=96%, HitCoverage=59%, E-value=0.0, Identity=90%"; Hit description=SNARE -interacting protein KEULE
  Pfam annotation: Domain name=Sec1; Domain location=1-399; Score= -204.1; E_value=0.0031; Accession=PF00995.15; Description=Sec1 family
RSVVIVDRSIDQIAPIIHEWTYDAMCHDLLCMDGNKYVQEVPSKNDSANEQKEVLLEDHDPVWLELRHAHIADVNERLHEKMTKFISKNEAAQLQQTRSGVELSTKQLQKMVQALPQYSDEIDKLTLHVEVAGKLNNIIKEQHLKDVGQLEQDLVFGDAGTKELINFLRTRLDVNRENKLRLLMIYASINPKKFGSEKGAKLMQLAGLSADDIIAVNNMHCLHGPDTKKSSVGSFTLKFDLHKEKPGIRKERIGEESTWMLSRFYPILENLIEKLSKGELPKDEYHCMNDPSPSFRGIPGSTSAQTSPANQPAQSMRSRRIGGTWARHRNSDDGYSSDSVLKHASSDFRKLGQRLFIFVIGGATRSELRAAHKLSGKLKREIILGSSSLDDPLQFITAHTGERGVIFIR

SEQ ID NO: 85963 - protein, 174 aa, Setaria italica
  Transcript Sequence Number=SeqID_19989
  Gene Ontology: Mol. function=DNA-directed DNA polymerase activity; Cellular component=apoplast; Biological process=nucleobase, nucleoside, nucleotide and nucleic acid metabolic process
  Homolog annotation: Hit_ID=Q6K777; Match level="QueryCoverage=100%, HitCoverage=7%, E-value=6e-96, Identity=94%"; Hit description=DNA polymerase
  Pfam annotation: Domain name=DUF1744; Domain location=1-170; Score =2.1; E_value=5e-15; Accession=PF08490.4; Description=Domain of unknown function (DUF1744)
ECPKLQAIKAAVRALDDFPCVTIPSNARDNNYQALGWQATAGRTSMQRCAASAQWFNERISLARYAHVPLGNFELDWLLFTADVFFSRALRDQQQVLWISDDGIPDLGGTYEGDTCFADEVIQPALTYPGAYRRVSVELKIHHLAVNSLLKSSQVDEMEGGSISSFGSDMPPGP

SEQ ID NO: 85964 - protein, 118 aa, Setaria italica
  Transcript Sequence Number=SeqID_19990
  Subcellular localization annotation: CTP_CleavageSite=61; ConfidenceScore=5.90e-01
IPLSLSQSQGRSRRGAPTRTSPKSPRAPDNSSSHRYTHAAPSTTATRRSCSLRTHTGPRLRAGRDPGGPRGSDSPVLTALDSAASASIRPQGYQSGIMVMKMEIEDDGAVGGTGGTWT

SEQ ID NO: 85965 - protein, 171 aa, Setaria italica
  misc_feature (25)..(25): Xaa can be any naturally occurring amino acid
  misc_feature (36)..(36): Xaa can be any naturally occurring amino acid
  Transcript Sequence Number=SeqID_19991
  Gene Ontology: Cellular component=cell wall
  Homolog annotation: Hit_ID=B3V945; Match level="QueryCoverage=100%, HitCoverage=42%, E-value=8e-57, Identity=61%"; Hit description=PAE
  Pfam annotation: Domain name=PAE; Domain location=1-171; Score=119.2; E_value=1.4e-32; Accession=PF03283.5; Description=Pectinacetylesterase
AVETAKNLYYRGFRVWRAIIDDLLXTVRGMNKAQNXLFLSGCSAGGLAAILHCDRFHDLFPATTKVKCFSDAGYFVDGKDISGNYYARSIYKNVVNLHGSTKNLPASCTSKQSPELCMFPQYVVPTLRTPLFILNAAYDSWQIKNVLAPSPADPKKTWAQCKLDIKNCSPS

SEQ ID NO: 85966 - protein, 204 aa, Setaria italica
  Transcript Sequence Number=SeqID_19992
  Gene Ontology: Mol. function=RNA-directed DNA polymerase activity; Biological process=RNA-dependent DNA replication
  Homolog annotation: Hit_ID=Q01N39; Match level="QueryCoverage=94%, HitCoverage=16%, E-value=1e-32, Identity=42%"; Hit description =H0215A08.3 protein
FLVFSFFLFWFYDVEVKEIPLLGRKYTWLNERTSPTLVRLDRAFCCLGWEGIFPDSVLQSAASTVSDHCPLILGLKIQKSGKRHFHFESFWTKVPGFFQAVWDAPVQSNCAVERLFLKLQRLSRGLQKMGPKKIENIKLQIEMAKEILHRLEIARDSRELSSSEEWLRKKLKLHCLGLASFERTITRLRSRILYLCEGDTNTSF

SEQ ID NO: 85967 - protein, 144 aa, Setaria italica
  misc_feature (101)..(101): Xaa can be any naturally occurring amino acid
  misc_feature (110)..(110): Xaa can be any naturally occurring amino acid
  misc_feature (121)..(122): Xaa can be any naturally occurring amino acid
  Transcript Sequence Number=SeqID_19993
  Gene Ontology: Mol. function=magnesium ion binding; Cellular component=chloroplast; Biological process=metabolic process
  Homolog annotation: Hit_ID=Q673F9; Match level="QueryCoverage=79%, HitCoverage=13%, E-value=1e-35, Identity=62%"; Hit description=Ent -kaurene synthase-like protein 1
  Subcellular localization annotation: CTP_CleavageSite=38; ConfidenceScore=5.25e-01
MPNITAAAPASCSPSGAILASRAPRRGVVKAYPEKRLVAENVRVQNMHRKELEARIRNQLQRPELPPSSYDTAWVSMVPLRGSHQSPCFPQCVEWILQNQXDDGSWGCQXFDSSVNKDVLXXTLACVIALKEMECCRENIRRGL

SEQ ID NO: 85968 - protein, 144 aa, Setaria italica
  misc_feature (16)..(16): Xaa can be any naturally occurring amino acid
  Transcript Sequence Number=SeqID_19994
QSLLLDEVLLVITGFXSVFTLASNDNAAYSFLVGGIGGFFYLLLLQRSVDGLPVISLPSEASSTQPSVSGFSGVRRPWLILSLVMVAGAVALKYGAGGDSFELTPTELFVGTAGFLANKVAVLLAAFKPMQSDLKGEDGSGDST

SEQ ID NO: 85969 - protein, 45 aa, Setaria italica
  Transcript Sequence Number=SeqID_19995
  Gene Ontology: Mol. function=protein serine/threonine kinase activity; Biological process=protein amino acid phosphorylation
  Homolog annotation: Hit_ID=Q5N8C4; Match level="QueryCoverage=91%, HitCoverage=3%, E-value=4e-14, Identity=82%"; Hit description =Putative receptor-like protein kinase 2
  Pfam annotation: Domain name=LRRNT_2; Domain location=1-38; Score =26.0; E_value=0.00015; Accession=PF08263.4; Description=Leucine rich repeat N-terminal domain
MNSTVAALQALTKNWQNVPQSWTGQTDPCTSWDGVSCSNGRVTEV

SEQ ID NO: 85970 - protein, 109 aa, Setaria italica
  Transcript Sequence Number=SeqID_19996
  Subcellular localization annotation: CTP_CleavageSite=62; ConfidenceScore=5.40e-01
SVTSSTVLASHHLGGQDQKCTTQWQLAMQRVLLLSLLLVGLRPSSSQTNSQDGKPSGFQRVTGRMLPPYLGLFIYSLSGCCSLISIRFIDTSIQDGCISWDGVSCSNGR

SEQ ID NO: 85971 - protein, 81 aa, Setaria italica
  Transcript Sequence Number=SeqID_19997
SYFLESWWTTIHRHPILSSSVLSASGYVNETRGANSAIFECFKHITVSTTEEEKKNYIRSPPKKWKKETRVRMTVHMYLSN

SEQ ID NO: 85972 - protein, 80 aa, Setaria italica
  Transcript Sequence Number=SeqID_19998
  Gene Ontology: Mol. function=hydrogen ion transporting ATP synthase activity, rotational mechanism; Cellular component=proton -transporting ATP synthase complex, catalytic core F(1); Biological process=ATP synthesis coupled proton transport
  Homolog annotation: Hit_ID=B6SUX2; Match level="QueryCoverage=100%, HitCoverage=32%, E-value=4e-37, Identity=95%"; Hit description=ATP synthase
  Pfam annotation: Domain name=OSCP; Domain location=1-71; Score=-34.7; E_value=0.00013; Accession=PF00213.10; Description=ATP synthase delta (OSCP) subunit
ATVTSVVQLESQDLAQIAQHVQKMTGAQNVRLKTQLNPELIAGFTVQYGRDGSNLIDMSVRKQIEEIASEFELPSVPLEV

SEQ ID NO: 85973 - protein, 66 aa, Setaria italica
  Transcript Sequence Number=SeqID_19999
  Gene Ontology: Mol. function=hydrogen ion transporting ATP synthase activity, rotational mechanism; Cellular component=proton -transporting ATP synthase complex, catalytic core F(1); Biological process=ATP synthesis coupled proton transport
  Homolog annotation: Hit_ID=B6SUX2; Match level="QueryCoverage=100%, HitCoverage=26%, E-value=1e-29, Identity=93%"; Hit description=ATP synthase
AQIAQHVQKMTGAQNVRLKTQLNPELIAGFTVQYGRDGSNLIDMSVRKQIEEIASEFELPSVPLEV

SEQ ID NO: 85974 - protein, 204 aa, Setaria italica
  Transcript Sequence Number=SeqID_20000
  Gene Ontology: Mol. function=hydrogen ion transporting ATP synthase activity, rotational mechanism; Cellular component=proton -transporting ATP synthase complex, catalytic core F(1); Biological process=ATP synthesis coupled proton transport
  Homolog annotation: Hit_ID=B6SUX2; Match level="QueryCoverage=86%, HitCoverage=70%, E-value=1e-82, Identity=87%"; Hit description=ATP synthase
  Pfam annotation: Domain name=OSCP; Domain location=21-195; Score =286.9; E_value=4.4e-83; Accession=PF00213.10; Description=ATP synthase delta (OSCP) subunit
RLAPPRRRGDLARPRAAADAAAESYATALSEVAAENGTLEQTVSDLEKLEKIFADEAVAEFFDNPTVPREEKTQLIDEIAKSSELQPHVVNFLNVVVDNFRAAIVPQIVAEFENVYNALTGTEVATVTSVVQLESQDLAQIAQHVQKMTGAQNVRLKTQLNPELIAGFTVQYGRDGSNLIDMSVRKQIEEIASEFELPSVPLEV

SEQ ID NO: 85975 - protein, 102 aa, Setaria italica
  Transcript Sequence Number=SeqID_20001
EAVLDMQLYEKALDVFEDDPATSGILHKHLLRSMGIPIVDKVLITLAKDSKLKNGMEVEDSEEEHVQLSTADRTSLAKDLPGALSLKAQALIEALEGKVKFW

SEQ ID NO: 85976 - protein, 202 aa, Setaria italica
  Transcript Sequence Number=SeqID_20002
  Gene Ontology: Mol. function=protein binding
  Homolog annotation: Hit_ID=Q9VI55; Match level="QueryCoverage=85%, HitCoverage=24%, E-value=8e-26, Identity=34%"; Hit description =CG1104, isoform A
  Pfam annotation: Domain name=DUF2042; Domain location=1-202; Score =253.1; E_value=6.7e-73; Accession=PF09743.1; Description =Uncharacterized conserved protein (DUF2042
VELVQKLQERGIIDFDLLHTTSGKEYITSDHLKHEIKMEIKKQGRASLVDLSDTLGVDLYHVERQSQKVVSDDPTLMLINGEIMSQSYWDTVTEEINEKLQERSQIALAEIAAQLHIGSDLVISILEPRLGTIVKGRLEGGQLYTPAYVSRITAMVRGAARGITVPTNLPSVWNSLQQQLQEMHGASGVSVDGSCFQSNTNG

SEQ ID NO: 85977 - protein, 233 aa, Setaria italica
  Transcript Sequence Number=SeqID_20003
  Gene Ontology: Mol. function=protein binding
  Homolog annotation: Hit_ID=Q5ZMG1; Match level="QueryCoverage=87%, HitCoverage=25%, E-value=6e-19, Identity=30%"; Hit description =UPF0555 protein KIAA0776 homolog
  Pfam annotation: Domain name=DUF2042; Domain location=3-154; Score =19.4; E_value=5.2e-10; Accession=PF09743.1; Description =Uncharacterized conserved protein (DUF2042
MSFSKFTHMPFKRTFAYVMLLLFPSFQVKGRLEGGQLYTPAYVSRITAMVRGAARGITVPTNLPSVWNSLQQQLQEMHGASGVSVEGSFFQSIFNGLLKEGAVLGSIRAGGQWTPAVFAHAQKESVDAFFSQNSYIGYDVLQKLAIPQPKQYLEARYPDGIALDAVFVHPSVVDMLDTAVGDAIENGHWIDSLSVLPSYISGPDATKILSICPSLQKAIKSSKAVVFGESCVF

SEQ ID NO: 85978 - protein, 208 aa, Setaria italica
  Transcript Sequence Number=SeqID_20004
  Gene Ontology: Mol. function=protein binding
  Homolog annotation: Hit_ID=Q5ZMG1; Match level="QueryCoverage=99%, HitCoverage=24%, E-value=4e-12, Identity=29%"; Hit description =UPF0555 protein KIAA0776 homolog
TSYEKALDVFEDDPATSGILHKHLLRSMGIPIVDKVLITLAKDSKLKNGMEVEDSEEEHVQLSTADRTSLAKDLPGALSLKAQALIEALEGKRFDSFMDALRDILEESGLTFKKLDKRLERSMLHSYRKDLTAQVSSENDPVSFLPKVVALLFLQAYNKALQAPGRAVGAVITLLLDLLPATTFKVLADYHSTTVKLLALQAAATDDE

SEQ ID NO: 85979 - protein, 99 aa, Setaria italica
  Transcript Sequence Number=SeqID_20005
MYNSWQRFDSFMDALRDILEESGLTFKKLDKRLERSMLHSYRKDLTAQVSSENDPVSFLPKVVALLFRQAYIMNLFHPFAYNKALQAPGRAVGAVITLL

SEQ ID NO: 85980 - protein, 553 aa, Setaria italica
  Transcript Sequence Number=SeqID_20006
  Gene Ontology: Mol. function=protein binding
  Homolog annotation: Hit_ID=Q8CCJ3-2; Match level="QueryCoverage=48%, HitCoverage=79%, E-value=1e-15, Identity=27%"; Hit description =Isoform 3 of UPF0555 protein KIAA0776
KLAIPQPKQYLEARYPDGIALDAVFVHPSVVDMLDTAVGDAIENGHWIDSLSVLPSYISGPDATKILSICPSLQKAIKSSKAVVFGESCVFSNVFIKGIFDRLEKDMDSFGIRHSFGQGRPVNMNLGSEHKTGSGQYSDTKDLGDNDTSSTGVSSDRGSKKKRGKGTGSTKGGSLEKDDDNGESIPVKGKKAHRKNKDAGSSGDVKHGGKKAPEKMKDESANIFPDELIEQKVLAVAPELEELGGSDDSNAPLKLLSSHLRPMLVDSWMKKRNTMLSGNAERRRNLLDNLQKQIDEAVLDMQLYEKALDVFEDDPATSGILHKHLLRSMGIPIVDKVLITLAKDSKLKNGMEVEDSEEEHVQLSTADRTSLAKDLPGALSLKAQALIEALEGKWSTSRRNRRFDSFMDALRDILEESGLTFKKLDKRLERSMLHSYRKDLTAQVSSENDPVSFLPKVVALLFLQAYNKALQAPGRAVGAVITLLKDKLPASTFKVLADYHSTTVKLLALQAAATDDEEDCTSDRMREKKDDLEERLMPELKSLVLGTATAHAC

SEQ ID NO: 85981 - protein, 146 aa, Setaria italica
  Transcript Sequence Number=SeqID_20007
GTEALGVLDRRGKEGSKHPPPGAVVVAQPQLVAIRERVTTTSSNPPGSVTSGSVDGKRVIGAANPGPEDAADLLRMCLQCGVPKTYSHAKGMVCPLCGDRPAQPKEPEKKKGSTVKDKEKIKRMKGQSSHASWKSETEMALRQQFD

SEQ ID NO: 85982 - protein, 184 aa, Setaria italica
  Transcript Sequence Number=SeqID_20008
  Gene Ontology: Mol. function=sequence-specific DNA binding; Cellular component=nucleus
  Homolog annotation: Hit_ID=B6STZ1; Match level="QueryCoverage=98%, HitCoverage=51%, E-value=7e-49, Identity=62%"; Hit description=GATA transcription factor 9
MASEWEMAMGVELGMGMGTYHGHHNASSITTAPMSSHHSGGASYSTAHHHHYYGMPPMGDAMRVDELLDLSTGAGAHDFFPTAAGAAAADNGHHSGAMGEPSPTANSSDHQTSLLSFADEFYIPSEEAAELEWLSKFVDDSYSDMPNYSSHAAMAAAAAANAAGNGGGNSGGQDSCVTAAPGRG

SEQ ID NO: 85983 - protein, 218 aa, Setaria italica
  Transcript Sequence Number=SeqID_20009
LLLLFQVKFSVLTCSISISDHSYCVSDKRVLILVLAQAGIHFAISAFWFLWAPTIVADGRYAQLSVIYPCFLASRMLGSAGFPWFYGATAPLRNEDSLTIAYIGAGLALSIVAYDYQEIGTLVILFCIFHACVGFILPSLARLRTKYLPNELRGGMMSFSLSLANAAILVFLLQGAHPRSIPNSTILGVASCGLLGAGGCIHMLRRWRKHTRQNARSL

SEQ ID NO: 85984 - protein, 152 aa, Setaria italica
  Transcript Sequence Number=SeqID_20010
  Gene Ontology: Mol. function=ubiquitin-protein ligase activity; Cellular component=ubiquitin ligase complex; Biological process =ubiquitin-dependent protein catabolic process
  Homolog annotation: Hit_ID=Q6K5K9; Match level="QueryCoverage=99%, HitCoverage=32%, E-value=6e-54, Identity=70%"; Hit description =Avr9/Cf-9 rapidly elicited protein-like
  Pfam annotation: Domain name=Arm; Domain location=103-143; Score =30.4; E_value=7.3e-06; Accession=PF00514.15; Description =Armadillobeta-catenin-like repeat
  Pfam annotation: Domain name=Arm; Domain location=61-102; Score=15.1; E_value=0.15; Accession=PF00514.15; Description=Armadillobeta-catenin- like repeat
  Pfam module annotation: Pfam domain module=Arm::Arm; Domain location =103-143::61-102
MRQAIKYLRLATKQNSDFRAVLGERPDSISRMIFARSTPGLQNDPQVLEDMVTIILNFSLHDSNKKVIGDDPEAIPFLIWALKSGDMGSRGNSAAAIFTLSALDSNKEKIGELGAIGPLVDLLDNGNIIAKKDAASAIFNLCLLHENKSRAT

SEQ ID NO: 85985 - protein, 96 aa, Setaria italica
  Transcript Sequence Number=SeqID_20011
  Pfam annotation: Domain name=HMG_box; Domain location=32-74; Score= -7.3; E_value=0.066; Accession=PF00505.11; Description=HMG (high mobility group) box
  Subcellular localization annotation: CTP_CleavageSite=25; ConfidenceScore=5.07e-01
RARPTPRRRATARLKAGGGAGKRKKAAASGKPKRPPSAFFVCRSEFRQEYQAQHPDNKSVAAVSHLHSVLPPFFFGGICRCLISSTLRVGGLGEQG

SEQ ID NO: 85986 - protein, 53 aa, Setaria italica
  Transcript Sequence Number=SeqID_20012
NGPQTQTRHIRQNRSPRFMQGTRCTPKERIKPKTSQFMQGTRLTPKEHIKPKH

SEQ ID NO: 85987 - protein, 142 aa, Setaria italica
  Transcript Sequence Number=SeqID_20013
  Gene Ontology: Mol. function=DNA binding; Cellular component=nucleus; Biological process=regulation of transcription, DNA-dependent
  Homolog annotation: Hit_ID=Q8SBC5; Match level="QueryCoverage=71%, HitCoverage=70%, E-value=2e-27, Identity=62%"; Hit description=High mobility group box protein 2
  Pfam annotation: Domain name=HMG_box; Domain location=33-102; Score =110.1; E_value=7.6e-30; Accession=PF00505.11; Description=HMG (high mobility group) box
  Subcellular localization annotation: CTP_CleavageSite=62; ConfidenceScore=5.13e-01
MKGKADTSKKGDGRLKAGGGAGKRKKAAASGKPKRPPSAFFVFMSEFRQEYQAQHPDNKSVAAVSKAAGEKWRAMSEEEKQPYVDQAGQKKQDYEKNKANFDKKESTSSKKAKTQDDEGSDKSKSEVDDEDGGSDEENEEDE

SEQ ID NO: 85988 - protein, 104 aa, Setaria italica
  Transcript Sequence Number=SeqID_20014
QREKGRNRTRPREHHHQSTQAEVLPVPPFLTPSPGADPASDAIPHADPSRVPLPSTRPCSSSRRRVPGGEWHAVGDPSAFPAWAGVFRSRGISQVTVNAPDITE

SEQ ID NO: 85989 - protein, 93 aa, Setaria italica
  Transcript Sequence Number=SeqID_20015
  Gene Ontology: Mol. function=catalytic activity; Cellular component =endoplasmic reticulum membrane; Biological process=metabolic process
  Homolog annotation: Hit_ID=B6U6S2; Match level="QueryCoverage=88%, HitCoverage=11%, E-value=6e-41, Identity=92%"; Hit description=Acyl -CoA synthetase long-chain family member 3
VRQPLIQSRTTTRRFMNICLGVPVGQGYGLTETCAGAAFSEWDDTSVGRVGPPLPCCYVKLVSWEEGGYTISDSPMPRGEVVVGGYSITKGYY

SEQ ID NO: 85990 - protein, 77 aa, Setaria italica
  Transcript Sequence Number=SeqID_20016
  Gene Ontology: Mol. function=catalytic activity; Biological process =metabolic process
  Homolog annotation: Hit_ID=B6U6S2; Match level="QueryCoverage=83%, HitCoverage=7%, E-value=4e-18, Identity=73%"; Hit description=Acyl -CoA synthetase long-chain family member 3
FLFFFLVFKSFGWKAARLEKFEIPAKILLLPEPWTPAKILLLPEPWTPESGLVTAALKLKREQIKTKFKDDLNKLYH

SEQ ID NO: 85991 - protein, 131 aa, Setaria italica
  Transcript Sequence Number=SeqID_20017
RPEHAGKRKVSGKMEVFRVLIRESTPNEYCGKYSLGKVCTCQLRKVKSYKQCGSLGGSRNRCQARHHRASSNLMSILFNAGFVYYHLTQEYQLYLLTSMTVSSIQSKPINANLDIAARKWWTNTAHTCVIP

SEQ ID NO: 85992 - protein, 174 aa, Setaria italica
  misc_feature (159)..(159): Xaa can be any naturally occurring amino acid
  Transcript Sequence Number=SeqID_20018
  Gene Ontology: Mol. function=catalytic activity; Cellular component =endoplasmic reticulum membrane; Biological process=metabolic process
  Homolog annotation: Hit_ID=B6U6S2; Match level="QueryCoverage=98%, HitCoverage=23%, E-value=1e-82, Identity=84%"; Hit description=Acyl -CoA synthetase long-chain family member 3
ARYTSSKIKKGTKGDVSVLKPTLMISVPAILDRIRDAVFKKVGEKGGVTKKLFDFAYNRNLAAIEGSWFGSWAPERMIWDNLIFKPIRAMLGGRVRFVLCGGAPLSSDTQRFMNICLGVPVGQGYGLTETCAGAAFSEWDDTSVGRVGPPLPCCYVKLXSWEEGGYTISDSPMP

SEQ ID NO: 85993 - protein, 726 aa, Setaria italica
  Transcript Sequence Number=SeqID_20019
  Gene Ontology: Mol. function=catalytic activity; Cellular component =endoplasmic reticulum membrane; Biological process=metabolic process
  Homolog annotation: Hit_ID=B6U6S2; Match level="QueryCoverage=100%, HitCoverage=100%, E-value=0.0, Identity=87%"; Hit description=Acyl -CoA synthetase long-chain family member 3
  Pfam annotation: Domain name=AMP-binding; Domain location=139-619; Score=314.6; E_value=2e-91; Accession=PF00501.20; Description=AMP -binding enzyme
MGEVTENNSDMSILQRIATSDVPFLKDYGLNGVVGAVLLAIVIPFLLTSVFSRKTKKRAVQADVGGEPGLAMRNSRFSSLVQVPWEGATTMAALFEMASKKYSRRKCLGTRKLINREFVESADGKKFEKLHLGEYEWDTYAEAFNRACNFASGLIKMGHNLDSHAAIFSDTRAEWIIAAQGCFRQNLTAVTIYASLGEDALVHSLNETQVSTLICDSKQLKKLPAISSKLKSLRHVIYIEDEPVEAETLNQMKHWTTLSFTEVEELGKTSHIDARLPSSSDTAVIMYTSGSTGLPKGVMITHGNMVATTAAVMTIVPNLGMDDVYLAYLPLAHVFELAAETVMLASGTAIGYGTALTMTDTSNKIKKGTKGDVSVLKPTLMISVPAILDRIRDAVFKKVGEKGGVTKKLFDFAYNRNLAAIEGSWFGSWAPERMIWDNLIFKPIRAMLGGRVRFVLCGGAPLSSDTQRFMNICLGVPVGQGYGLTETCAGAAFSEWDDTSVGRVGPPLPCCYVKLVSWEEGGYTISDSPMPRGEVVVGGYSITKGYYNNEAKTNEVYKVDERGMRWFYTGDIGQFHPDGCIEIIDRKKDIVKLQHGEYVSLGKVESALSTSNYVDNIMVYADPFHNYCVALVVPAHQALEKWAQNSGINYKDFEELCQNDQAIKEVQQSLSKAGKAARLEKFEIPAKILLLPEPWTPESGLVTAALKLKREQIKTKFKDDLNKLYH

SEQ ID NO: 85994 - protein, 92 aa, Setaria italica
  Transcript Sequence Number=SeqID_20020
MAPTRGAGGGVRLPPMNALEILRETVRVLRGDPHAFTSILFLLLCPASGCLLLSAAALDGAVVLPLARRLLVAGAASGLPLTHFVRQLAHHI

SEQ ID NO: 85995 - protein, 201 aa, Setaria italica
  Transcript Sequence Number=SeqID_20021
  Gene Ontology: Mol. function=thiopurine S-methyltransferase activity; Cellular component=cytoplasm; Biological process=metabolic process
  Homolog annotation: Hit_ID=B6SUY9; Match level="QueryCoverage=100%, HitCoverage=86%, E-value=1e-110, Identity=94%"; Hit description=S -adenosylmethionine-dependent methyltransferase/ methyltransferase/ thiopurine S-methyltransferase
  Pfam annotation: Domain name=Methyltransf_11; Domain location=40-138; Score=27.8; E_value=4.3e-05; Accession=PF08241.4; Description =Methyltransferase domain
  Pfam annotation: Domain name=Methyltransf_12; Domain location=40-136; Score=37.0; E_value=7.4e-08; Accession=PF08242.4; Description =Methyltransferase domain
  Pfam annotation: Domain name=TPMT; Domain location=1-195; Score =194.7; E_value=2.6e-55; Accession=PF05724.3; Description=Thiopurine S-methyltransferase (TPMT)
  Pfam module annotation: Pfam domain module=Methyltransf _11::Methyltransf_12::TPMT; Domain location=40-138::40-136::1-195
AADGWEKSWEFGVAPWDLGKPTPVIEHLVRSGTLPKGRALVPGCGMGYDVVALACPERFVVGLDVSDLAIKKAKQWSSSLPNADYFTFLAEDFFKWIPSEQFDLIFDYTFFCALDPSLRVAWAETVNRLLKPDGELLTLIYLISDQEGGPPYNNTVADYQKVLEPLGFRAVLMEDNELAIKPRKGCEKLGRWKRCAHQSSL

SEQ ID NO: 85996 - protein, 68 aa, Setaria italica
  Transcript Sequence Number=SeqID_20022
  Gene Ontology: Mol. function=thiopurine S-methyltransferase activity; Cellular component=cytoplasm; Biological process=metabolic process
  Homolog annotation: Hit_ID=B6SUY9; Match level="QueryCoverage=83%, HitCoverage=24%, E-value=9e-29, Identity=100%"; Hit description=S -adenosylmethionine-dependent methyltransferase/ methyltransferase/ thiopurine S-methyltransferase
IICLLIFSICVQWSSSLPNADYFTFLAEDFFKWIPSEQFDLIFDYTFFCALDPSLRVAWAETVNRLLK

SEQ ID NO: 85997 - protein, 245 aa, Setaria italica
  misc_feature (127)..(127): Xaa can be any naturally occurring amino acid
  Transcript Sequence Number=SeqID_20023
  Gene Ontology: Mol. function=thiopurine S-methyltransferase activity; Cellular component=cytoplasm; Biological process=metabolic process
  Homolog annotation: Hit_ID=B6SUY9; Match level="QueryCoverage=84%, HitCoverage=92%, E-value=1e-110, Identity=90%"; Hit description=S -adenosylmethionine-dependent methyltransferase/ methyltransferase/ thiopurine S-methyltransferase
  Pfam annotation: Domain name=Methyltransf_11; Domain location=92-182; Score=27.0; E_value=7.8e-05; Accession=PF08241.4; Description =Methyltransferase domain
  Pfam annotation: Domain name=Methyltransf_12; Domain location=92-180; Score=35.2; E_value=2.6e-07; Accession=PF08242.4; Description =Methyltransferase domain
  Pfam annotation: Domain name=TPMT; Domain location=52-239; Score =186.7; E_value=6.3e-53; Accession=PF05724.3; Description=Thiopurine S-methyltransferase (TPMT)
  Pfam module annotation: Pfam domain module=Methyltransf _11::Methyltransf_12::TPMT; Domain location=92-182::92-180::52-239
MRALSRVGEPVRWLASRARPRRGMGSSAAAGGRRDPGENPKVGRLRELFTGDAADGWEKSWEFGVTPWDLGKPTPVIEHLVRSGTLPKGRALVPGCGMGYDVVALACPERFVVGLDVSDLAIKKAKXDYFTFLAEDFFKWIPSEQFDLIFDYTFFCALDPSLRVAWAETVNRLLKPDGELLTLIYLISDQEGGPPYNNTVADYQKVLEPLGFRAVLMEDNELAIKPRKGCEKLGRWKRCAHQSSL

SEQ ID NO: 85998 - protein, 314 aa, Setaria italica
  Transcript Sequence Number=SeqID_20024
  Gene Ontology: Mol. function=binding; Cellular component=plasma membrane; Biological process=cellular iron ion homeostasis
  Homolog annotation: Hit_ID=B9SS47; Match level="QueryCoverage=99%, HitCoverage=42%, E-value=6e-97, Identity=60%"; Hit description=O -linked n-acetylglucosamine transferase, ogt, putative
  Pfam annotation: Domain name=TPR_1; Domain location=111-144; Score =9.0; E_value=0.49; Accession=PF00515.20; Description=Tetratricopeptid e repeat
  Pfam annotation: Domain name=TPR_1; Domain location=166-199; Score =14.7; E_value=0.1; Accession=PF00515.20; Description=Tetratricopeptid e repeat
  Pfam annotation: Domain name=TPR_1; Domain location=200-233; Score =17.8; E_value=0.042; Accession=PF00515.20; Description =Tetratricopeptide repeat
  Pfam annotation: Domain name=TPR_1; Domain location=270-305; Score =9.1; E_value=0.47; Accession=PF00515.20; Description=Tetratricopeptid e repeat
  Pfam annotation: Domain name=TPR_2; Domain location=111-144; Score =12.8; E_value=0.88; Accession=PF07719.9; Description=Tetratricopeptid e repeat
  Pfam annotation: Domain name=TPR_2; Domain location=166-199; Score =15.4; E_value=0.24; Accession=PF07719.9; Description=Tetratricopeptid e repeat
  Pfam annotation: Domain name=TPR_2; Domain location=200-233; Score =22.7; E_value=0.0015; Accession=PF07719.9; Description =Tetratricopeptide repeat
  Pfam annotation: Domain name=TPR_2; Domain location=270-305; Score =13.8; E_value=0.65; Accession=PF07719.9; Description=Tetratricopeptid e repeat
  Pfam annotation: Domain name=TPR_2; Domain location=40-73; Score=4.8; E_value=8.5; Accession=PF07719.9; Description=Tetratricopeptide repeat
  Pfam annotation: Domain name=TPR_2; Domain location=75-108; Score =3.5; E_value=12; Accession=PF07719.9; Description=Tetratricopeptide repeat
  Pfam module annotation: Pfam domain module=TPR_1::TPR_1::TPR_1::TPR _1::TPR_2::TPR_2::TPR_2::TPR_2::TPR_2::TPR_2; Domain location=111 -144::166-199::200-233::270-305::111-144::166-199::200-233::270 -305::40-73::75-108
GISLSNQARYATTDIERASQQHEALEVLGKAGKKMGNRDFGIIYSLSLENAVQRKLDTAVRYAKKLLKLEAGSELKTWLLIARIMSAQKRFEDAECIVNAALDQAGKWSQGDLLQTKAKIQIAQGQFRKAIETYTQILALIQIRMKSFGAGVSMLQGTKTDKNLEIKTWYDLALLYLRMLQWKDAELCIAKIKAISPHSPLACHATGKLLEAKGLSKEALRAYSIALDLDPKHVPSLTSTATVLRQLCKKPLPAVRCFLTDALRLDRTNHVAWFNLGLLYEEEGDSAAIEASECFKAAAALEESAPVEPFRIHQ

SEQ ID NO: 85999 - protein, 728 aa, Setaria italica
  misc_feature (102)..(102): Xaa can be any naturally occurring amino acid
  Transcript Sequence Number=SeqID_20025
  Gene Ontology: Mol. function=protein serine/threonine kinase activity; Cellular component=integral to membrane; Biological process=protein amino acid phosphorylation
  Homolog annotation: Hit_ID=Q9SGP2; Match level="QueryCoverage=99%, HitCoverage=94%, E-value=0.0, Identity=41%"; Hit description=Leucine- rich repeat receptor-like protein kinase
  Pfam annotation: Domain name=LRR_1; Domain location=108-130; Score =6.6; E_value=16; Accession=PF00560.25; Description=Leucine Rich Repeat
  Pfam annotation: Domain name=LRR_1; Domain location=12-35; Score=0.0; E_value=3e+02; Accession=PF00560.25; Description=Leucine Rich Repeat
  Pfam annotation: Domain name=LRR_1; Domain location=132-154; Score =12.3; E_value=1.3; Accession=PF00560.25; Description=Leucine Rich Repeat
  Pfam annotation: Domain name=LRR_1; Domain location=156-178; Score =6.5; E_value=17; Accession=PF00560.25; Description=Leucine Rich Repeat
  Pfam annotation: Domain name=LRR_1; Domain location=180-202; Score =17.0; E_value=0.078; Accession=PF00560.25; Description=Leucine Rich Repeat
  Pfam annotation: Domain name=LRR_1; Domain location=204-226; Score =12.9; E_value=1; Accession=PF00560.25; Description=Leucine Rich Repeat
  Pfam annotation: Domain name=LRR_1; Domain location=228-250; Score =1.9; E_value=1.3e+02; Accession=PF00560.25; Description=Leucine Rich Repeat
  Pfam annotation: Domain name=LRR_1; Domain location=252-274; Score =18.3; E_value=0.032; Accession=PF00560.25; Description=Leucine Rich Repeat
  Pfam annotation: Domain name=LRR_1; Domain location=276-298; Score =14.5; E_value=0.46; Accession=PF00560.25; Description=Leucine Rich Repeat
  Pfam annotation: Domain name=LRR_1; Domain location=299-322; Score =3.1; E_value=76; Accession=PF00560.25; Description=Leucine Rich Repeat
  Pfam annotation: Domain name=LRR_1; Domain location=36-58; Score=4.8; E_value=36; Accession=PF00560.25; Description=Leucine Rich Repeat
  Pfam annotation: Domain name=LRR_1; Domain location=60-82; Score=8.9; E_value=6; Accession=PF00560.25; Description=Leucine Rich Repeat
  Pfam annotation: Domain name=LRR_1; Domain location=84-106; Score =4.8; E_value=37; Accession=PF00560.25; Description=Leucine Rich Repeat
  Pfam annotation: Domain name=Pkinase; Domain location=417-676; Score =114.2; E_value=4.3e-31; Accession=PF00069.17; Description=Protein kinase domain
  Pfam annotation: Domain name=Pkinase_Tyr; Domain location=417-695; Score=75.1; E_value=2.5e-19; Accession=PF07714.9; Description =Protein tyrosine kinase
  Pfam module annotation: Pfam domain module=LRR_1::LRR_1::LRR_1::LRR _1::LRR_1::LRR_1::LRR_1::LRR_1::LRR_1::LRR_1::LRR_1::LRR_1::LRR _1::Pkinase::Pkinase_Tyr; Domain location=108-130::12-35::132 -154::156-178::180-202::...
  Pfam module annotation: Domain location=204-226::228-250::252 -274::276-298::299-322::36-58::60-82::84-106::417-676::417-695
GPHSTGFGKLQDLRGIDFAMNKLHGAIPEDLFRAPKLETVHLYANALTGPVPESVASAPSLSELRLFANRLNGTLPADLGRTTPLVCIDLSDNAISGEIPPXICDRGELQELLMLDNMLSGRIPDALGRCRSLRRVRLSNNRLAGDVPDAVWGLPHMSLLELNDNQLTGQISPVIAGAANLSKLVLSNNRLTGSIPSDIGSVSKLYELSADGNMLSGPLPSSLGGLPELGRLVLRNNSLSGQLLRGIDSWKKLSELNLADNGFTGSIPPELGDLPVLNYLDLSGNQLTGEVPMQLENLKLNQFNVSDNQLRGPLPPQYATEAYRNSFLGNPELCGEIAGLCPDSTQGRSSKYHSGFAWMMRSIFIFAAVILVAGVAWFYCRYRSFNRSKLMRADRSKWTLTSFHKLSFSEYEILDCLDEDNVIGSGASGKVYKVVLSNGEVVAVKKLWSAAVKNRDAENGGSAADDSFEAEVRTLGKIRHKNIVKLWCCCIHKDCKLLVYEYMPNGSLGDVLHGAKAGLLDWATRYKIALDAAEGLSYLHHDCVPAIVHRDVKSNNILLDAEFSARVADFGVAKVVEGTGRAAKSMSVIAGSCGYIAPEYAYTLRVNEKSDTYSFGVVLLELVTGKPPVDPEFGEKDLVKWVCSTMEQKGVEHVLDSRLDMDFKDEIVRVLNIGLVCTSSLPINRPAMRRVVKMLQEVRVEGRPPRMDKDGKLSPYYYEDASDQGSSV

SEQ ID NO: 86000 - protein, 143 aa, Setaria italica
  Transcript Sequence Number=SeqID_20026
  Gene Ontology: Mol. function=ATP binding; Biological process=apoptosis
  Homolog annotation: Hit_ID=Q5ZB86; Match level="QueryCoverage=70%, HitCoverage=18%, E-value=4e-13, Identity=39%"; Hit description=NBS -LRR-like protein
EPGSTTTDDDVVRLQRALLRARVVVEEAEARQVTNRAMLLQLNQLRGEMCRGAYVLDAFTRRAVERSRRRPHATARRSLGLPPGSDATGELSVLVDTLEAALSDMREFIVLLGACPRLNRQPYSFYLFMETCMFELTTTTRST

SEQ ID NO: 86001 - protein, 43 aa, Setaria italica
  Transcript Sequence Number=SeqID_20027
GIRLKFGINTGPPVSKYEGFMFQNYRSPMIRCQHRTCGLAIDA

SEQ ID NO: 86002 - protein, 68 aa, Setaria italica
  Transcript Sequence Number=SeqID_20028
  Subcellular localization annotation: CTP_CleavageSite=46; ConfidenceScore=5.45e-01
VSVHQIHNDLQLIRHSISSKLPSALTTPLRLRAFRPGLLPRPAPVSQATSSARWFREVPLQHKQVIRF

SEQ ID NO: 86003 - protein, 185 aa, Setaria italica
  Transcript Sequence Number=SeqID_20029
  Gene Ontology: Mol. function=nucleotide binding; Cellular component =intracellular; Biological process=small GTPase mediated signal transduction
  Homolog annotation: Hit_ID=UPI0001621F86; Match level="QueryCoverage =100%, HitCoverage=100%, E-value=4e-73, Identity=69%"; Hit description=Arl2-family small GTPase
  Pfam annotation: Domain name=Arf; Domain location=3-177; Score=330.9; E_value=2.5e-96; Accession=PF00025.13; Description=ADP-ribosylation factor family
  Pfam annotation: Domain name=GTP_EFTU; Domain location=14-176; Score=- 95.0; E_value=0.071; Accession=PF00009.19; Description=Elongation factor Tu GTP binding domain
  Pfam annotation: Domain name=MMR_HSR1; Domain location=17-128; Score =13.8; E_value=5.3e-05; Accession=PF01926.15; Description=GTPase of unknown function
  Pfam annotation: Domain name=Miro; Domain location=18-128; Score =24.5; E_value=5.5e-05; Accession=PF08477.5; Description=Miro-like protein
  Pfam annotation: Domain name=Ras; Domain location=18-179; Score= -64.0; E_value=0.00017; Accession=PF00071.14; Description=Ras family
  Pfam annotation: Domain name=SRPRB; Domain location=14-177; Score= -51.9; E_value=0.00097; Accession=PF09439.2; Description=Signal recognition particle receptor beta su
  Pfam module annotation: Pfam domain module=Arf::GTP_EFTU::MMR _HSR1::Miro::Ras::SRPRB; Domain location=3-177::14-176::17-128::18 -128::18-179::14-177
MGLLSIIRKIKRKEKEMRILMVGLDNSGKTTIVLKINGEDTSVISPTLGFNIKTIKYQKYSLNIWDVGGQKTIRSYWRNYFEQTDGLVWVVDSSDIRRLDDCRAELHNLLKEERLAGASLLVFANKQDIQGALKPAEIAKVLDLAAMEKSRHWQIVGCSAFTGDGLLQGFDWLVQDVASRIYVLD

SEQ ID NO: 86004 - protein, 117 aa, Setaria italica
  misc_feature (31)..(31): Xaa can be any naturally occurring amino acid
  Transcript Sequence Number=SeqID_20030
  Gene Ontology: Mol. function=zinc ion binding; Cellular component =nucleus
  Pfam annotation: Domain name=FAR1; Domain location=1-77; Score=82.7; E_value=1.3e-21; Accession=PF03101.7; Description=FAR1 family
RTGFGVCVKKSSFTKAGLCRRLVLVCNKWGXGKEDACYQARPTAKTNCQATVVARLWGDGLLHLTDVNLEHNHALNPSAARFLRCYKTLPSGMSKDLVVRAARGECSATGDIDVPIF

SEQ ID NO: 86005 - protein, 94 aa, Setaria italica
  Transcript Sequence Number=SeqID_20031
  Gene Ontology: Mol. function=nucleic acid binding; Cellular component= nucleus; Biological process=DNA replication
  Homolog annotation: Hit_ID=B6U4N8; Match level="QueryCoverage=94%, HitCoverage=9%, E-value=4e-29, Identity=74%"; Hit description=DNA binding protein
  Pfam annotation: Domain name=Rep-A_N; Domain location=6-94; Score =80.9; E_value=4.7e-21; Accession=PF04057.4; Description=Replication factor-A protein 1, N-terminal domain
MAAPAQLTPGGLVAVSNHADGEGTLQPVLQVVDVRRVTQKNQNPSASERYRMVLSDGVHALQSMLATAENHHIRDGTIQKGSIIHLQEFTCSTI

SEQ ID NO: 86006 - protein, 174 aa, Setaria italica
  misc_feature (2)..(2): Xaa can be any naturally occurring amino acid
  misc_feature (67)..(67): Xaa can be any naturally occurring amino acid
  Transcript Sequence Number=SeqID_20032
  Gene Ontology: Mol. function=methyltransferase activity; Biological process=metabolic process
  Homolog annotation: Hit_ID=B9R806; Match level="QueryCoverage=98%, HitCoverage=48%, E-value=3e-60, Identity=66%"; Hit description =Uroporphyrin-III methyltransferase, putative
  Pfam annotation: Domain name=TP_methylase; Domain location=1-134; Score=0.4; E_value=1.5e-05; Accession=PF00590.12; Description =Tetrapyrrole (CorrinPorphyrin) Methylases
SXLRRLHEGEAVALISDAGTPGISDPGMELARLCAAEKIPVVPIPGPSAAVAALCASGLPSNEFTFXHARSRRDRLEISAREAATQIFYVPPHGIHQFLVDAASSFGDSRSCVIAREITKLHEEFWRGTLGEANEAFATRQLKGEIQLLIEGQSLSVDETPSEDFLEHELRELT

SEQ ID NO: 86007 - protein, 107 aa, Setaria italica
  Transcript Sequence Number=SeqID_20033
  Gene Ontology: Mol. function=binding; Cellular component=chloroplast
  Homolog annotation: Hit_ID=C3SA77; Match level="QueryCoverage=96%, HitCoverage=35%, E-value=3e-55, Identity=95%"; Hit description=PPR protein (Fragment)
  Pfam annotation: Domain name=PPR; Domain location=32-66; Score=36.3; E_value=1.2e-07; Accession=PF01535.12; Description=PPR repeat
  Pfam annotation: Domain name=PPR; Domain location=67-101; Score=48.0; E_value=3.6e-11; Accession=PF01535.12; Description=PPR repeat
  Pfam module annotation: Pfam domain module=PPR::PPR; Domain location =32-66::67-101
GSLQGSGDRGDWQKAFAVLREMHASGVRPDRHFYNVMIDTFGKYNCLGHAMDAFDRMREEGIEPDVVTWNTLIDAHRKGGRHDRAMELFEQMRESNCPPGTTTYNIM

SEQ ID NO: 86008 - protein, 108 aa, Setaria italica
  Transcript Sequence Number=SeqID_20034
ERRLVVPSELVIRRSATARWESSDGDPCATSYAQSLPRPPNSASHGASPSPQARSPLRPSSTTTYTDTLRKIAMLLSAVTYQSPAHRETGSDQISTHVFCYFSASRIE

SEQ ID NO: 86009 - protein, 83 aa, Setaria italica
  Transcript Sequence Number=SeqID_20035
  Gene Ontology: Mol. function=phosphatidylinositol binding; Cellular component=clathrin coat; Biological process=clathrin coat assembly
  Homolog annotation: Hit_ID=B9RP36; Match level="QueryCoverage=75%, HitCoverage=9%, E-value=1e-11, Identity=60%"; Hit description =Clathrin assembly protein, putative
AFPSESDDAPVAITSAWQTPAAEPGKADWELALVETASNLSRQTASLGGGMDPLLLGGMYDQGAVRRQVAAQAVSGSASSVAL

SEQ ID NO: 86010 - protein, 77 aa, Setaria italica
  Transcript Sequence Number=SeqID_20036
FLIALVEIYFSLYYISIKVDLVLLWNMSCFFANRVQLSLVALQQGLTIIISLSMVVQFEMEEAAVKMIFTIYGVLTG

SEQ ID NO: 86011 - protein, 59 aa, Setaria italica
  Transcript Sequence Number=SeqID_20037
FSVHSSQCAQSLGDNFQNHLIAILYLCKKCKSCFPISLQNANDVSVITIRSCYSELVFV

SEQ ID NO: 86012 - protein, 181 aa, Setaria italica
  Transcript Sequence Number=SeqID_20038
  Gene Ontology: Mol. function=iron-sulfur cluster binding
  Homolog annotation: Hit_ID=Q7X7U6; Match level="QueryCoverage=99%, HitCoverage=28%, E-value=4e-36, Identity=48%"; Hit description =OSJNBa0088K19.13 protein
GYIQVLVIAPDSMLGTSAVVRITSVGRWSVVGEVIEGSVVVGEAPKQISIVPQKEHRQNQVEEADCCGADSCGTCACSDVVQNCVPEQCKNTPDAHQTIDDVNRQEAIQSTLVRRNVEGSTKASESSAVTRSVGQEQQVNFVTRRGLNVDTILWCGLALSFAATVALLVLLTSKISSTSSN

SEQ ID NO: 86013 - protein, 419 aa, Setaria italica
  Transcript Sequence Number=SeqID_20039
  Gene Ontology: Mol. function=iron-sulfur cluster binding; Cellular component=integral to membrane; Biological process=metabolic process
  Homolog annotation: Hit_ID=Q7X7U6; Match level="QueryCoverage=97%, HitCoverage=65%, E-value=0.0, Identity=83%"; Hit description =OSJNBa0088K19.13 protein
  Pfam annotation: Domain name=Radical_SAM; Domain location=57-232; Score=72.7; E_value=1.3e-18; Accession=PF04055.13; Description =Radical SAM superfamily
  Pfam annotation: Domain name=TRAM; Domain location=282-343; Score =16.2; E_value=0.016; Accession=PF01938.12; Description=TRAM domain
  Pfam module annotation: Pfam domain module=Radical_SAM::TRAM; Domain location=57-232::282-343
WSRSHSCISIIGVQQIDRVVEVVEETLKGHEVRLLSRKTLPSLDLPKVRKNKFIEILPINVGCLGACTYCKTKHARGHLGSYTIDSLVDRVKIVVSEGVREIWLSSEDTGAYGRDIGTNLPNLLNAIVAELPADRSTMLRIGMTNPPFILEHLKEIAAILCHPCVYSFLHVPVQSGSDAVLTGMNREYTVGEFRKVVDTLCELVPGMQIATDIICGFPGETDEDFAETVNLVKDYQFPQVHISQFYPRPGTPAARMKKVPSNDVKKRSRELTSVFESFSPYQGMEGKVERIWVTMIATDGVHLVGHTKGYIQVLVIAPDSMLGTSAVVRITSVGRWSVFGEVIEGSVVVGEAPKQISIVPQKEHRQNQVEEADCCGADSCGTCACSDVVQNCVPEQCKNTPDAHQTIDDVNRQEANTKY

SEQ ID NO: 86014 - protein, 82 aa, Setaria italica
  Transcript Sequence Number=SeqID_20040
  Gene Ontology: Mol. function=structural constituent of ribosome; Cellular component=ribonucleoprotein complex; Biological process =translation
  Homolog annotation: Hit_ID=P49689; Match level="QueryCoverage=74%, HitCoverage=98%, E-value=5e-19, Identity=80%"; Hit description=40S ribosomal protein S30
  Pfam annotation: Domain name=Ribosomal_S30; Domain location=23-81; Score=123.8; E_value=5.8e-34; Accession=PF04758.6; Description =Ribosomal protein S30
  Subcellular localization annotation: CTP_CleavageSite=66; ConfidenceScore=5.27e-01
SLVATSSPTDALIGVFVSLRAGKVHGSLARAGKVRGQTPKVAKQDKKKKPRGRAHKRMQYNRRFVTAVVGFGKKRGPNSSEK

SEQ ID NO: 86015 - protein, 99 aa, Setaria italica
  Transcript Sequence Number=SeqID_20041
  Gene Ontology: Mol. function=structural constituent of ribosome; Cellular component=ribonucleoprotein complex; Biological process =translation
  Homolog annotation: Hit_ID=P49689; Match level="QueryCoverage=62%, HitCoverage=100%, E-value=2e-19, Identity=80%"; Hit description=40S ribosomal protein S30
  Pfam annotation: Domain name=Ribosomal_S30; Domain location=40-98; Score=123.8; E_value=5.8e-34; Accession=PF04758.6; Description =Ribosomal protein S30
  Subcellular localization annotation: CTP_CleavageSite=83; ConfidenceScore=5.16e-01
MGTGGAERGAREPPPPPHLPASAPAPPSPPPRRRFSAMGKVHGSLARAGKVRGQTPKVAKQDKKKKPRGRAHKRMQYNRRFVTAVVGFGKKRGPNSSEK

SEQ ID NO: 86016 - protein, 62 aa, Setaria italica
  Transcript Sequence Number=SeqID_20042
  Gene Ontology: Mol. function=structural constituent of ribosome; Cellular component=ribonucleoprotein complex; Biological process =translation
  Homolog annotation: Hit_ID=P49689; Match level="QueryCoverage=100%, HitCoverage=100%, E-value=2e-19, Identity=80%"; Hit description=40S ribosomal protein S30
  Pfam annotation: Domain name=Ribosomal_S30; Domain location=3-61; Score=123.8; E_value=5.8e-34; Accession=PF04758.6; Description =Ribosomal protein S30
  Subcellular localization annotation: CTP_CleavageSite=46; ConfidenceScore=5.28e-01
MGKVHGSLARAGKVRGQTPKVAKQDKKKKPRGRAHKRMQYNRRFVTAVVGFGKKRGPNSSEK

SEQ ID NO: 86017 - protein, 62 aa, Setaria italica
  Transcript Sequence Number=SeqID_20043
  Gene Ontology: Mol. function=structural constituent of ribosome; Cellular component=ribonucleoprotein complex; Biological process =translation
  Homolog annotation: Hit_ID=P49689; Match level="QueryCoverage=100%, HitCoverage=100%, E-value=5e-19, Identity=79%"; Hit description=40S ribosomal protein S30
  Pfam annotation: Domain name=Ribosomal_S30; Domain location=3-61; Score=124.5; E_value=3.5e-34; Accession=PF04758.6; Description =Ribosomal protein S30
  Subcellular localization annotation: CTP_CleavageSite=46; ConfidenceScore=5.26e-01
MGKVHGSLARAGKVRGQTPKVAKQDKKKKPRGRAYKRMQYNRRFVTAVVGFGKKRGPNSSEK

SEQ ID NO: 86018 - protein, 123 aa, Setaria italica
  misc_feature (115)..(115): Xaa can be any naturally occurring amino acid
  Transcript Sequence Number=SeqID_20044
  Gene Ontology: Mol. function=signal transducer activity; Cellular component=plasma membrane; Biological process=response to light stimulus
  Homolog annotation: Hit_ID=B9RNV5; Match level="QueryCoverage=99%, HitCoverage=20%, E-value=3e-36, Identity=59%"; Hit description =Protein binding protein, putative
FGRCIDSIATKATVNPSNVMWSYTYNRKSASSDEIVEARKSSHSVPKDWWVEDLCELDVDLYRRVMVAVKSRGRIPSDVVGEALKAYAARWLPECCDMLVDDVYTESYKHLLETXWLLPSDKG

SEQ ID NO: 86019 - protein, 73 aa, Setaria italica
  Transcript Sequence Number=SeqID_20045
LALCARIDQNCALRTRIVAASGSAFMLGPDQKCEEAVVMPRSQLHIQLQWKHHNSQEKGGEGRVIARFLVLLQ

SEQ ID NO: 86020 - protein, 111 aa, Setaria italica
  misc_feature (10)..(10): Xaa can be any naturally occurring amino acid
  misc_feature (39)..(39): Xaa can be any naturally occurring amino acid
  misc_feature (96)..(96): Xaa can be any naturally occurring amino acid
  Transcript Sequence Number=SeqID_20046
PWPPRGGVRXGRDVHRRGELELAAATSFQKICTLSPRRXGGGGSSVTFYRPVGVPEGFSLLGHYCQPNCRPLHGHLLVARAGARPPGAPPQPLPPXRAPRDYSLVWEVTDE

SEQ ID NO: 86021 - protein, 268 aa, Setaria italica
  Transcript Sequence Number=SeqID_20047
  Gene Ontology: Cellular component=plasma membrane
  Homolog annotation: Hit_ID=Q0GPD1; Match level="QueryCoverage=92%, HitCoverage=44%, E-value=9e-34, Identity=40%"; Hit description=BZIP transcription factor bZIP114 (Fragment)
  Pfam annotation: Domain name=DUF630; Domain location=1-37; Score =44.3; E_value=4.6e-10; Accession=PF04783.4; Description=Protein of unknown function (DUF630)
VREALDGRCAFAAAHFAYIQSLRHTGFALRKFIEPEVPTDSSLFTSTSATPEIPTIRQKSMNLSPSLSHHASDSFSPVPSPLSSGRFHVNHMKAGGSSVTTVKEKLLEPVRATLQTSSPVRRQAIHDLDDSSTFEAPPGTPPWDYFGLFQPVENQISFHDEKELAHDFENADDIRRLREKEGIPELEEELEKSPAHSDFMRRLGEEEAPDLKDVDKSPMNGGEDDLALSEDDFDNPTSESLVRMFKNRNDMPVGYTATAQSPVQHPTD

SEQ ID NO: 86022 - protein, 118 aa, Setaria italica
  Transcript Sequence Number=SeqID_20048
  Homolog annotation: Hit_ID=B6TFY0; Match level="QueryCoverage=87%, HitCoverage=45%, E-value=8e-42, Identity=84%"; Hit description =Protein SFT2
  Subcellular localization annotation: CTP_CleavageSite=56; ConfidenceScore=5.31e-01
MHKTAQAWFTGGTAASSATAGESQPSLLADWNSYAATRSDASSSSPLPFDIEAAVRSANDTVSGTFSSVTKGVRELPGSFQSATSSFPSGKALMYFGLFLATGIFFVFIAFALFLPVM

SEQ ID NO: 86023 - protein, 77 aa, Setaria italica
  Transcript Sequence Number=SeqID_20049
VENKKSASPSSHNQDSANSSRGDEVPASRFRGFDIDSSESISLNELKRKQPELEMETPPSHNNPRKISIDGRSSSQS

SEQ ID NO: 86024 - protein, 109 aa, Setaria italica
  Transcript Sequence Number=SeqID_20050
KLNAEARGDCETESASPSSHNQDSANSSRGDEVPASRFRGFDIDSSESISLNELKRKQPELEMETPPSHNNPRKISIDGRSSSQSNGRGSHKSNKREKKLDFNHLRQKK

SEQ ID NO: 86025 - protein, 68 aa, Setaria italica
  Transcript Sequence Number=SeqID_20051
  Gene Ontology: Mol. function=GTPase activity
TEEVPQASYSSASTLEDANNVAVLTREKTKVAGFTKLDEKVVQLIEREKPILSEAVAVIRKAAPMVII

SEQ ID NO: 86026 - protein, 130 aa, Setaria italica
  Transcript Sequence Number=SeqID_20052
  Gene Ontology: Mol. function=GTPase activity; Cellular component =intracellular; Biological process=thiamin biosynthetic process
  Homolog annotation: Hit_ID=Q9SA53; Match level="QueryCoverage=86%, HitCoverage=13%, E-value=1e-17, Identity=41%"; Hit description =F10O3.1 (Fragment)
SGANNYASKLEADSNSWQKQISSLIERAKGRAVTLMKSILQLSNIDLIFTYTVKGKTGSSTRATSFVQNDILTPAFDDAVNILGEYSTWLSSSNTREANLYLECFHKRWAALVAQERKGPVRCKWTWELS

SEQ ID NO: 86027 - protein, 135 aa, Setaria italica
  Transcript Sequence Number=SeqID_20053
  Gene Ontology: Mol. function=GTPase activity; Cellular component =intracellular; Biological process=thiamin biosynthetic process
  Homolog annotation: Hit_ID=Q1KPV0; Match level="QueryCoverage=91%, HitCoverage=13%, E-value=3e-43, Identity=64%"; Hit description=FZL
  Pfam annotation: Domain name=MMR_HSR1; Domain location=68-125; Score=- 18.4; E_value=0.05; Accession=PF01926.15; Description=GTPase of unknown function
EDANNVAVLTREKTKVAGFTKLDEKVVQLIEREKPILSEAVAVIRKAAPMMEEVELLVDAASRLSEPFLLVIVGEFNSGKSTFINALLGRQYLQEGVVPTTNEITLLSYSEIESESFERCERHPDGQFMCYLSVP

SEQ ID NO: 86028 - protein, 154 aa, Setaria italica
  Transcript Sequence Number=SeqID_20054
  Gene Ontology: Mol. function=GTPase activity; Cellular component =intracellular; Biological process=thiamin biosynthetic process
  Homolog annotation: Hit_ID=Q1KPV0; Match level="QueryCoverage=99%, HitCoverage=19%, E-value=3e-14, Identity=29%"; Hit description=FZL
ADSNSWQKQISSLIERAKLRKTGSSTRATSFVQNDILTPAFDDAVNILGEYSTWLSSSNTREANLYLECFHKRWAALVAQEERVLSDPNGLVNEGEKLTVKALDGFDASSTAKVFEEEIREVAFGTFGGLGVAGLSASLLTSVLSTTLEDLLAL

SEQ ID NO: 86029 - protein, 194 aa, Setaria italica
  Transcript Sequence Number=SeqID_20055
  Gene Ontology: Mol. function=GTPase activity; Cellular component =intracellular; Biological process=thiamin biosynthetic process
  Homolog annotation: Hit_ID=Q9SA53; Match level="QueryCoverage=96%, HitCoverage=22%, E-value=6e-38, Identity=48%"; Hit description =F10O3.1 (Fragment)
NTEDVTLFPVSSRSALEAKLSYSKNGGGKHLMEAMFNDPRWRSSKFCELEDYLLSFLDSSTENGKERVRLKLETPIGIADRLLTSCQRLVKLEYEKAVDDLTSIKDLVSGANNYASKLEADSNSWQKQISSLIERAKGRAVTLMKSILQLSNIDLIFTYTVKGKTGSSTRATSFVQNDILTPAFDDAVVCLILY

SEQ ID NO: 86030 - protein, 487 aa, Setaria italica
  misc_feature (278)..(278): Xaa can be any naturally occurring amino acid
  Transcript Sequence Number=SeqID_20056
  Gene Ontology: Mol. function=GTPase activity; Cellular component =intracellular; Biological process=thiamin biosynthetic process
  Homolog annotation: Hit_ID=Q1KPV0; Match level="QueryCoverage=85%, HitCoverage=44%, E-value=1e-112, Identity=51%"; Hit description=FZL
  Pfam annotation: Domain name=AIG1; Domain location=277-459; Score= -103.2; E_value=0.08; Accession=PF04548.8; Description=AIG1 family
  Pfam annotation: Domain name=Dynamin_N; Domain location=279-409; Score=76.2; E_value=1.2e-19; Accession=PF00350.15; Description =Dynamin family
  Pfam annotation: Domain name=GTP_EFTU; Domain location=275-476; Score= -72.4; E_value=0.00099; Accession=PF00009.19; Description=Elongation factor Tu GTP binding domain
  Pfam annotation: Domain name=MMR_HSR1; Domain location=273-410; Score= 45.1; E_value=2.7e-10; Accession=PF01926.15; Description=GTPase of unknown function
  Pfam annotation: Domain name=Miro; Domain location=277-410; Score= -0.3; E_value=0.012; Accession=PF08477.5; Description=Miro-like protein
  Pfam module annotation: Pfam domain module=AIG1::Dynamin_N::GTP _EFTU::MMR_HSR1::Miro; Domain location=277-459::279-409::275-476::273- 410::277-410
VGAEEALRSGDEVAAAVARGVGIVVLEAGEEGGGRAYEAAVKLRAAVGDRAYLLITERVDVASAVGASGVVLADDGIPAIVARSMMMKSNADSIYLPIVARTIRSANSAISASSSEGADFLIANTGSDNIADVMSGGVGQQVKIPIFFTLNESHSGATYSDITSRLLQSGASGVVTSLAGIQHLTDDLIERDFSKVDGTEEVPQASYSSASTLEDANNVAVLTREKTKVAGFTKLDEKVVQLIEREKPILSEAVAVIRKAAPMMEEVELLVDAASRLXGEFNSGKSTFINALLGRQYLQEGVVPTTNEITLLSYSEIESESFERCERHPDGQFMCYLSVPILKEMNLVDTPGTNVILQRQQRLTEEYVPRADLILFVLSSDRPLTESEVGFLQYVQQWKKKVVFVLNKLDLYRNSYELEEATAFVKENAKKLLNTEDVTLFPVSSRSALEAKLSYSKLKEVSIEFLVTVMLIFFPNLRDGCVQYHLF

SEQ ID NO: 86031 - protein, 209 aa, Setaria italica
  misc_feature (21)..(21): Xaa can be any naturally occurring amino acid
  Transcript Sequence Number=SeqID_20057
  Gene Ontology: Mol. function=GTPase activity; Biological process =thiamin biosynthetic process
  Homolog annotation: Hit_ID=Q1KPV0; Match level="QueryCoverage=99%, HitCoverage=22%, E-value=1e-40, Identity=39%"; Hit description=FZL
NILGEYSTWLSSSNTREANLXLECFHKRWAALVAQEERVLSDPNGLVNEGEKLTVKALDGFDASSTAKVFEEEIREVAFGTFGGLGVAGLSASLLTSVLSTTLEDLLALALCSAGGFIVLSSFPGRRKLAIEKVNKAADELSRKVDEAIQKDISQSANNLVRFVEVISKPYQEACQQKIDWLQGVQGELSAVERKLQTLKVEIQNLHGS

SEQ ID NO: 86032 - protein, 145 aa, Setaria italica
  Transcript Sequence Number=SeqID_20058
  Gene Ontology: Mol. function=protein serine/threonine kinase activity; Biological process=protein amino acid phosphorylation
  Homolog annotation: Hit_ID=B6ST24; Match level="QueryCoverage=98%, HitCoverage=28%, E-value=7e-60, Identity=79%"; Hit description =Protein kinase APK1B
NRNPAMECQYSCKGAERAAMVAYKCLSQNPKSRPTMREVVLALEPILKMDDYLQIGPFVFTVIVEDINEKYEGKGEMPDGETVNMRIETTVEEKRQSHQDRHRQKFPNSAVHADVVLHRDGELGTHISALRRHRRTSSYVKERGA

SEQ ID NO: 86033 - protein, 78 aa, Setaria italica
  Transcript Sequence Number=SeqID_20059
NKLLMELKRLGILFHIIVTLLPQYRSSREMSTRLMHSIKQILMLSKMHLSQHQSQSQLNANLTHGSFRSPIRGLSYQN

SEQ ID NO: 86034 - protein, 156 aa, Setaria italica
  misc_feature (8)..(8): Xaa can be any naturally occurring amino acid
  Transcript Sequence Number=SeqID_20060
  Gene Ontology: Mol. function=catalytic activity; Biological process =cellular metabolic process
  Homolog annotation: Hit_ID=B6SUK5; Match level="QueryCoverage=99%, HitCoverage=44%, E-value=6e-65, Identity=77%"; Hit description =Leucoanthocyanidin reductase
PDDMAKNXHLKDLQALGPLTVLRADLNMEGSFDEAVAGCDYAFLVAAPVNLSSGEEDPEKELIEPAVRGTLNVMRSCVKAGTVRRVILTSSVASVYIRPELQGNGHVLDEDSWSDVEYLRAEKPPLWWAYCVSKVLLEKAACRFAEEHGISFVTVW

SEQ ID NO: 86035 - protein, 150 aa, Setaria italica
  Transcript Sequence Number=SeqID_20061
  Gene Ontology: Mol. function=catalytic activity; Biological process =cellular metabolic process
  Homolog annotation: Hit_ID=B6T842; Match level="QueryCoverage=100%, HitCoverage=40%, E-value=2e-45, Identity=64%"; Hit description =Leucoanthocyanidin reductase
SPTARTTRPELPLLSVRLFIPLRRVTIAGDEAEFAVLRGMEKESGTVPLVHVDDVCRAELFVAEEEAAAGRYLCCSLNTTIAELGRFLAQKYPPYGVKTHLLSGDRLEKPRVCLSSAKLLREGFEFKYKTLEHIYDDMVEYGKAVGILPN

SEQ ID NO: 86036 - protein, 67 aa, Setaria italica
  Transcript Sequence Number=SeqID_20062
  Gene Ontology: Mol. function=catalytic activity; Biological process =cellular metabolic process
  Homolog annotation: Hit_ID=B6T842; Match level="QueryCoverage=100%, HitCoverage=19%, E-value=2e-21, Identity=73%"; Hit description =Leucoanthocyanidin reductase
ARFLSANYPQYTVKTKLLSGDLLEKPRARLSSANLVGEGFEYRYKTLDGMYDDMIDYGKALGILPNL

SEQ ID NO: 86037 - protein, 175 aa, Setaria italica
  misc_feature (45)..(45): Xaa can be any naturally occurring amino acid
  Transcript Sequence Number=SeqID_20063
  Gene Ontology: Mol. function=catalytic activity; Biological process =cellular metabolic process
  Homolog annotation: Hit_ID=B6T842; Match level="QueryCoverage=70%, HitCoverage=36%, E-value=3e-40, Identity=67%"; Hit description =Leucoanthocyanidin reductase
TSRQRILRCAVWLRHPLTVSQSPLFCVLPACWLAQFNSICAWQKXLIEAAVRGTLNVMRSCVKAGTVKRVILTSSAASIIMRPELQGDGHVLDEESWSNVEYLRANKTAFWGYPVSKVLSEKAACRFAEEHGISLVTVCPVVTVGAAPAPTARTSVPNCLSLLSGEAVSTSAELS

SEQ ID NO: 86038 - protein, 70 aa, Setaria italica
  Transcript Sequence Number=SeqID_20064
  Gene Ontology: Mol. function=catalytic activity; Biological process =cellular metabolic process
  Homolog annotation: Hit_ID=B6T842; Match level="QueryCoverage=100%, HitCoverage=20%, E-value=2e-23, Identity=75%"; Hit description =Leucoanthocyanidin reductase
AELARFLSANYPQYTVKTKLLSGDLLEKPRARLSSAKLVGEGFEYRYKTLDGMYDDMIDYGKALGILPNL

SEQ ID NO: 86039 - protein, 93 aa, Setaria italica
  Transcript Sequence Number=SeqID_20065
  Gene Ontology: Mol. function=catalytic activity; Biological process =cellular metabolic process
  Homolog annotation: Hit_ID=B6T842; Match level="QueryCoverage=86%, HitCoverage=23%, E-value=5e-33, Identity=80%"; Hit description =Leucoanthocyanidin reductase
RDVAVEVEVAAAGRYICCSLNTTIAELGRFLAQKYPPYGVKTHLLSGDRLEKPRVCLSSAKLLREGFEFKYKTLEHIYDDMVEYGKAVGILPN

SEQ ID NO: 86040 - protein, 55 aa, Setaria italica
  Transcript Sequence Number=SeqID_20066
  Gene Ontology: Mol. function=catalytic activity; Biological process =cellular metabolic process
  Homolog annotation: Hit_ID=B6SUK5; Match level="QueryCoverage=100%, HitCoverage=16%, E-value=2e-16, Identity=75%"; Hit description =Leucoanthocyanidin reductase
MKTDFTDDDQLLEKPRVSVSSAKLVREGFEFKYRTLDEIYDDVVEYGRALGILPY

SEQ ID NO: 86041 - protein, 83 aa, Setaria italica
  Transcript Sequence Number=SeqID_20067
  Gene Ontology: Mol. function=catalytic activity; Biological process =cellular metabolic process
  Homolog annotation: Hit_ID=B6T842; Match level="QueryCoverage=92%, HitCoverage=22%, E-value=1e-33, Identity=85%"; Hit description =Leucoanthocyanidin reductase
GVVAGCDYAFLVAAPVNLKSENPEKELIEPAVRGTLNVMRSCVKAGTVKRVILTSSAASITRRPELQGDGHVLDEESWSKRTK

SEQ ID NO: 86042 - protein, 136 aa, Setaria italica
  Transcript Sequence Number=SeqID_20068
  Gene Ontology: Mol. function=catalytic activity; Biological process =cellular metabolic process
  Homolog annotation: Hit_ID=B6T842; Match level="QueryCoverage=100%, HitCoverage=39%, E-value=2e-47, Identity=71%"; Hit description =Leucoanthocyanidin reductase
ARTSVPSCLSLLSGDEAEFAVLRGMAKASGTVPLVHVDDVCRAELFVAEEEAAAGRYLCCSLNTTIAELARFLSANYPQYTVKTKLLSGDLLEKPRARLSSAKLVGEGFEYRYKTLDGMYDDMIDYGKALGILPNL

SEQ ID NO: 86043 - protein, 352 aa, Setaria italica
  Transcript Sequence Number=SeqID_20069
  Gene Ontology: Mol. function=catalytic activity; Biological process =cellular metabolic process
  Homolog annotation: Hit_ID=B6T842; Match level="QueryCoverage=95%, HitCoverage=97%, E-value=1e-138, Identity=74%"; Hit description =Leucoanthocyanidin reductase
  Pfam annotation: Domain name=3Beta_HSD; Domain location=23-279; Score= -87.4; E_value=0.00012; Accession=PF01073.11; Description=3-beta hydroxysteroid dehydrogenaseisomerase family
  Pfam annotation: Domain name=Epimerase; Domain location=22-277; Score= 46.8; E_value=8.5e-11; Accession=PF01370.13; Description=NAD dependent epimerasedehydratase family
  Pfam annotation: Domain name=KR; Domain location=24-166; Score=-85.0; E_value=0.037; Accession=PF08659.2; Description=KR domain
  Pfam annotation: Domain name=NAD_binding_4; Domain location=24-261; Score=-30.8; E_value=3.4e-07; Accession=PF07993.4; Description=Male sterility protein
  Pfam annotation: Domain name=NmrA; Domain location=24-333; Score= -79.2; E_value=0.0011; Accession=PF05368.5; Description=NmrA-like family
  Pfam annotation: Domain name=RmlD_sub_bind; Domain location=20-343; Score=-188.1; E_value=0.096; Accession=PF04321.9; Description=RmlD substrate binding domain
  Pfam annotation: Domain name=adh_short; Domain location=20-152; Score= -32.5; E_value=0.0019; Accession=PF00106.17; Description=short chain dehydrogenase
  Pfam module annotation: Pfam domain module=3Beta_HSD::Epimerase::KR::N AD_binding_4::NmrA::RmlD_sub_bind::adh_short; Domain location=23 -279::22-277::24-166::24-261::24-333::20-343::20-152
SRASQPVNPQRLSAAGEKKKTACVTGGNGYIASALIKMLLEKGYAVKTTVRNPDDMAKNSHLKDLQALGPLTVLRADLDEEGSFDEAVAGCDYAFLVAAPVNLSSENPEKELIEPAVRGTLNVMRSCVKAGTVKRVILTSSAASITRRPELQGDGHVLDEESWSNVEYLRANKTAFWGYPVSKVLSEKAACRFAEEHGISLVTVCPVVTVGAAPAPTARTSVPNCLSLLSGDEAEFAVLRGMEKASGTVPLVHVDDVCRAELFVAEEEAAAGRYLCCSLNTTIAELARFLAHKYPQYGVKTDFTDDDQLLEKPRVSVSSAKLVREGFEFKYRTLDEIYDDVVEYGKARRNSG

SEQ ID NO: 86044 - protein, 329 aa, Setaria italica
  Transcript Sequence Number=SeqID_20070
  Gene Ontology: Mol. function=protein tyrosine kinase activity; Cellular component=plasma membrane; Biological process=protein amino acid phosphorylation
  Homolog annotation: Hit_ID=B9T805; Match level="QueryCoverage=95%, HitCoverage=85%, E-value=1e-131, Identity=71%"; Hit description =Serine/threonine-protein kinase PBS1, putative
  Pfam annotation: Domain name=Pkinase; Domain location=34-312; Score =64.4; E_value=4.1e-16; Accession=PF00069.17; Description=Protein kinase domain
  Pfam annotation: Domain name=Pkinase_Tyr; Domain location=34-312; Score=93.3; E_value=8.5e-25; Accession=PF07714.9; Description =Protein tyrosine kinase
  Pfam module annotation: Pfam domain module=Pkinase::Pkinase_Tyr; Domain location=34-312::34-312
EGAGPKDPGDPAKPVSIDVPAIPFDELKKITNNFSDRALIGEGSYGRVYNATLSDGRAAVIKKLDTSASQDSDSDFAAQIAMVSKLKNEYFLELVGYCLEDGNRMLAYQFATMGSLHNILHGKKGVQGAEPGPVLNWLQRVKIAYGAARGLEYLHEKVQPSIVHRDIRSSNVLIFDDFSSKIADFNLTNQGTDTAARLHSTRVLGTFGYHAPEYAMTGQINQKSDVYSFGVILLELLTGRKPVDHTMPKGQQSLVTWATPRLSEDKVKQCVDPKLNNDYPPKAVAKLAAVAALCVQYESDFRPNMTIVVKAIQPLLNAPKPAAPAAPQS

SEQ ID NO: 86045 - protein, 237 aa, Setaria italica
  Transcript Sequence Number=SeqID_20071
  Gene Ontology: Mol. function=transferase activity
  Homolog annotation: Hit_ID=Q9FQ99; Match level="QueryCoverage=94%, HitCoverage=94%, E-value=2e-84, Identity=72%"; Hit description =Glutathione S-transferase GST 40
  Pfam annotation: Domain name=GST_C; Domain location=102-205; Score =6.9; E_value=0.022; Accession=PF00043.17; Description=Glutathione S -transferase, C-terminal domain
  Pfam annotation: Domain name=GST_N; Domain location=6-80; Score=77.7; E_value=4.1e-20; Accession=PF02798.12; Description=Glutathione S -transferase, N-terminal domain
  Pfam module annotation: Pfam domain module=GST_C::GST_N; Domain location=102-205::6-80
MAGGSDELKLLGMWASPFVMRVKLALGFKGLSYEDVEEDLFGNKSELLLKSNPVHKKVPVLLHNGKPVCESQIIVQYIDEAFAGTGPLLLPSDPYERAIARFWGAYIDDKLLASFLQSAKGKTEEEKAEGLKQTLVAVENMEGAFKEISKGKPFFGGDTVGYLDVTLGALVSWIHAAEKIYGMRLFDATRSPLLNAWLEQFGALDVAKAALADVDRLVEYAKKRQADQAAAEASSNN

SEQ ID NO: 86046 - protein, 229 aa, Setaria italica
  Transcript Sequence Number=SeqID_20072
  Gene Ontology: Mol. function=glutathione transferase activity; Biological process=response to stress
  Homolog annotation: Hit_ID=Q9FQA6; Match level="QueryCoverage=96%, HitCoverage=95%, E-value=8e-93, Identity=76%"; Hit description =Glutathione S-transferase GST 33
  Pfam annotation: Domain name=GST_C; Domain location=102-202; Score =29.4; E_value=1.5e-05; Accession=PF00043.17; Description=Glutathione S-transferase, C-terminal domain
  Pfam annotation: Domain name=GST_N; Domain location=5-78; Score=79.4; E_value=1.3e-20; Accession=PF02798.12; Description=Glutathione S -transferase, N-terminal domain
  Pfam module annotation: Pfam domain module=GST_C::GST_N; Domain location=102-202::5-78
MAGKEDLKLLGLLVSPFVIRVRMALSTKGVSYEYVEQDLFNKSELLLKSNPVHKKVPVLIHNGKPLCESLVIVQYVDELFPGPSILPTDPYARATARFWAAFIDDKLFPAWYGGIVKAKTEDERAEKVTETLAAIAQIEEAFAKCNEGKAFFGGDSIGYLDIVLGSFLFWFEAVRRMYGVEIISASKTPLLAAWAERFRESAEAKEVVPGADEALQFVNKFAAAAAAAK

SEQ ID NO: 86047 - protein, 177 aa, Setaria italica
  Transcript Sequence Number=SeqID_20073
  Homolog annotation: Hit_ID=B6T038; Match level="QueryCoverage=85%, HitCoverage=73%, E-value=4e-23, Identity=42%"; Hit description=PnFL-2
  Pfam annotation: Domain name=CCT_2; Domain location=136-162; Score =56.8; E_value=8.3e-14; Accession=PF09425.2; Description=Divergent CCT motif
  Pfam annotation: Domain name=tify; Domain location=71-106; Score =64.7; E_value=3.5e-16; Accession=PF06200.6; Description=tify domain
  Pfam module annotation: Pfam domain module=CCT_2::tify; Domain location=136-162::71-106
MAAAGNTRFAVTCGLLRQYMREQQLGALDGAFRLPPLVETTTEKDEDTDGRTMQLFPTRAGTLQPSQERPEAQAKAPLTIVYEGRVLVFEDFPADKAEELMQLAGSGSAATPQTKAAPAAAEKLASNPPAALPDLPIARKASLQRFLQKRKHRINAAEPYNKVTASPVPEKDITGSG

SEQ ID NO: 86048 - protein, 63 aa, Setaria italica
  Transcript Sequence Number=SeqID_20074
  Pfam annotation: Domain name=CCT_2; Domain location=7-33; Score=34.4; E_value=4.6e-07; Accession=PF09425.2; Description=Divergent CCT motif
NENKEVPSASNDSPQRFLQKRKHRINAAEPYNKVTASPVPEKDITGSGKPATDEPAAASWLGL

SEQ ID NO: 86049 - protein, 100 aa, Setaria italica
  Transcript Sequence Number=SeqID_20075
  Homolog annotation: Hit_ID=B6TC50; Match level="QueryCoverage=100%, HitCoverage=29%, E-value=1e-21, Identity=61%"; Hit description=ZCW7
MPAAAALRPTEPLPLPSGLSLTPRLKLILTFFRADLTVRPLDEWQLKSALLTFLRDPPLSLPLLPDSDLSVRRLPNLQKRRREEPVASGALHVRDLSLLR

SEQ ID NO: 86050 - protein, 124 aa, Setaria italica
  Transcript Sequence Number=SeqID_20076
  Gene Ontology: Mol. function=microtubule motor activity; Cellular component=microtubule associated complex; Biological process=actin filament polymerization
  Homolog annotation: Hit_ID=B6SI71; Match level="QueryCoverage=100%, HitCoverage=100%, E-value=1e-58, Identity=90%"; Hit description =Kinesin like protein
  Subcellular localization annotation: CTP_CleavageSite=13; ConfidenceScore=5.10e-01
MTMSTTQKINPVESSAKVFKQASQFKRLGRKHPFVRYGLPLISLTVFGAVGLAHLIQGSKEVTKEKEDIEWEVVETTKALSRTGPVEGAYKPKKLSLEDELKALQQKVDINSYDYKPIPRPTEK

SEQ ID NO: 86051 - protein, 134 aa, Setaria italica
  Transcript Sequence Number=SeqID_20077
  Gene Ontology: Mol. function=DNA-directed RNA polymerase activity; Cellular component=nucleus; Biological process=transcription
  Homolog annotation: Hit_ID=B9R9A5; Match level="QueryCoverage=97%, HitCoverage=26%, E-value=4e-34, Identity=56%"; Hit description=DNA -directed RNA polymerase III 62 kDa polypeptide, putative
  Pfam annotation: Domain name=HTH_9; Domain location=8-69; Score=97.4; E_value=5e-26; Accession=PF08221.3; Description=N-terminal HTH domain of molybdenum-binding protein
MVSQHGILLAVSIISDHFGPLVSKVCGCLLRHGALSLQEIVRRLGLSSGQVKNSLLVLIQHNCVQAYSTPRGSGDKTVTVYLAIFDNVLHRLRFSKFLSVVRVDIPESEVLLEGLLQNGRLTFDQLVERAISKI

SEQ ID NO: 86052 - protein, 479 aa, Setaria italica
  Transcript Sequence Number=SeqID_20078
  Gene Ontology: Mol. function=protein serine/threonine kinase activity; Cellular component=plasma membrane; Biological process =protein amino acid phosphorylation
  Homolog annotation: Hit_ID=C4P7U6; Match level="QueryCoverage=98%, HitCoverage=100%, E-value=0.0, Identity=73%"; Hit description=CBL -interacting protein kinase 32
  Pfam annotation: Domain name=APH; Domain location=14-187; Score= -20.2; E_value=0.069; Accession=PF01636.15; Description =Phosphotransferase enzyme family
  Pfam annotation: Domain name=NAF; Domain location=346-403; Score =70.0; E_value=8.6e-18; Accession=PF03822.6; Description=NAF domain
  Pfam annotation: Domain name=Pkinase; Domain location=12-269; Score =307.9; E_value=2.1e-89; Accession=PF00069.17; Description=Protein kinase domain
  Pfam annotation: Domain name=Pkinase_Tyr; Domain location=12-267; Score=61.2; E_value=8.5e-18; Accession=PF07714.9; Description =Protein tyrosine kinase
  Pfam annotation: Domain name=RIO1; Domain location=25-178; Score= -84.2; E_value=0.039; Accession=PF01163.14; Description=RIO1 family
  Pfam module annotation: Pfam domain module=APH::NAF::Pkinase::Pkinase_ Tyr::RIO1; Domain location=14-187::346-403::12-269::12-267::25-178
MGRIPTLLMGRYELGKLLGKGSFAKVYRARNMETGEEAAIKIMDKDHLAKSGAVQRQVMREIDIMRRVRHPNIVRIQEVMATKRSIFVVMEFVGGGSLDVYLAHRAGRGVGEAPARRVFQQLVSALDYCHSLGVFHRDIKPENILVDGAGNIKVADFGLSALAEDERREALLHTVCGTPMFIAPEVFLRCGYDGAKADVWACGVVLFALAAGRYPFNQRDTSLYHMIRRADYHCPPWFSTGLARLVRRLLCPDPARRIAMAQIKENVWFKKGFKEVPRSLSEPEERDSDSDDDSTVSLASSEDPSSPVVRAQHRSYSSGMHTSVSAPSLTTLENTGSAAEPPRIRRLKSLNAFDIIASSPSLNLTGLFEEPGEQMRFVSAAPVSKIISKLEEIAGHVSFTARTKEYQVSIGGNGSRGALLVSAKIFELTPELVMVKVCKKAGDTAEYRQFCYNELKPGLRGLVDGLPEDGGEPIASNSG

SEQ ID NO: 86053 - protein, 110 aa, Setaria italica
  Transcript Sequence Number=SeqID_20079
  Homolog annotation: Hit_ID=B6T558; Match level="QueryCoverage=82%, HitCoverage=23%, E-value=3e-18, Identity=53%"; Hit description =Choline/ethanolamine kinase
MGSEGRGWNGAAAGSGDGVGGREEKPTTTAAVAAGAPADVPTSAASVDITLPLPEMTPRIIGLCKELVKGWSSLDSSCFSIETVSGGITNLCEFPARYPDSCTACRTTQI

SEQ ID NO: 86054 - protein, 89 aa, Setaria italica
  Transcript Sequence Number=SeqID_20080
  Gene Ontology: Mol. function=electron carrier activity; Cellular component=integral to membrane; Biological process=oxidation reduction
  Homolog annotation: Hit_ID=B6T0I8; Match level="QueryCoverage=85%, HitCoverage=14%, E-value=2e-31, Identity=89%"; Hit description =Cytochrome P450 CYP90D10.b
VEARTRTVSRAVLQADASAFVPWYPRSLMELMGQSSILVLGGALQRRLHGLAGAFLKSPQLKARVTAGMQRRVGRAMDAWRRRSNGGGG

SEQ ID NO: 86055 - protein, 146 aa, Setaria italica
  misc_feature (132)..(132): Xaa can be any naturally occurring amino acid
  Transcript Sequence Number=SeqID_20081
  Gene Ontology: Mol. function=protein binding
  Homolog annotation: Hit_ID=Q5ZBC5; Match level="QueryCoverage=97%, HitCoverage=30%, E-value=2e-39, Identity=59%"; Hit description =HcrVf1 protein-like
  Pfam annotation: Domain name=LRR_1; Domain location=24-46; Score=9.7; E_value=4.3; Accession=PF00560.25; Description=Leucine Rich Repeat
  Pfam annotation: Domain name=LRR_1; Domain location=48-70; Score =12.9; E_value=1; Accession=PF00560.25; Description=Leucine Rich Repeat
  Pfam annotation: Domain name=LRR_1; Domain location=72-94; Score =18.1; E_value=0.038; Accession=PF00560.25; Description=Leucine Rich Repeat
  Pfam annotation: Domain name=LRR_1; Domain location=96-117; Score =13.2; E_value=0.89; Accession=PF00560.25; Description=Leucine Rich Repeat
  Pfam module annotation: Pfam domain module=LRR_1::LRR_1::LRR_1::LRR _1; Domain location=24-46::48-70::72-94::96-117
IEYDDNFTVVTKGQEQLYTGEIIYMVNLDLSCNNFIGNIPEEIGSLVALKSLNVSWNSFTGKIPEKIGALVQVESLDLSHNELSGEIPTSLSALTSLSHLNMSYNNLTGKIPSGNQLQVLDDQASIYIGNPXLCGPPLSNKCPETG

SEQ ID NO: 86056 - protein, 70 aa, Setaria italica
  Transcript Sequence Number=SeqID_20082
KSVFIFCASHDGQSGTYSCSTSIAISHAHHSEFIYCHSYKAQSNGMLANYAGYIIKYRFLASKVSNMLNM

SEQ ID NO: 86057 - protein, 120 aa, Setaria italica
  misc_feature (9)..(9): Xaa can be any naturally occurring amino acid
  misc_feature (70)..(70): Xaa can be any naturally occurring amino acid
  Transcript Sequence Number=SeqID_20083
  Gene Ontology: Mol. function=binding
  Homolog annotation: Hit_ID=Q10D20; Match level="QueryCoverage=96%, HitCoverage=3%, E-value=5e-57, Identity=90%"; Hit description=WD-40 repeat family protein, putative, expressed
SNVCFCIIXLALLQDKRLTAQNLAVDLLKYLVVHRRQSLEDLLVCKPNQGQQLDILHGGLDKLLTGSTSXFFEWLQSSQQTISKVLDQCALIMWVQYITGSAKFPGVRIKGMEVRRRKEE

SEQ ID NO: 86058 - protein, 86 aa, Setaria italica
  Transcript Sequence Number=SeqID_20084
  Gene Ontology: Mol. function=RNA polymerase II transcription factor activity; Cellular component=transcription factor TFIIF complex; Biological process=transcription initiation from RNA polymerase II promoter
MGEEAKYLETARADRSVWLMKCPPVVSRAWQAASASSSSDAANPNPVVAKVVLSLDLLSTEEPSLPGPAQHRRAFPPGNRRAFPPS

SEQ ID NO: 86059 - protein, 269 aa, Setaria italica
  Transcript Sequence Number=SeqID_20085
  Gene Ontology: Mol. function=RNA polymerase II transcription factor activity; Cellular component=transcription factor TFIIF complex; Biological process=transcription initiation from RNA polymerase II promoter
  Homolog annotation: Hit_ID=B6TIE2; Match level="QueryCoverage=100%, HitCoverage=100%, E-value=1e-113, Identity=78%"; Hit description=ATP binding protein
  Pfam annotation: Domain name=TFIIF_beta; Domain location=5-269; Score= 34.3; E_value=3.9e-12; Accession=PF02270.7; Description=Transcription initiation factor IIF, beta subunit
MGEEAKYLETARADRSVWLMKCPPVVSRAWQAASASSSSDAANPNPVVAKVVLSLDLLSTEEPSLQATEEPSLQFKMELAQTNNAGNTPKSYSLNMFQDFVPMCVFSESNQGKLSCEGKVEHKFDMEPHSDNLVNYGKLCRERTQKYMVKSRQVQVLDNDHGMSMRPLPGMVGLIPSGSKEKKKPTPTKPSDVKRTRRDRTEMENIIFKLFERQPNWALKALVQETDQPEQFLKEILNDLCVYNKRGPNQGTHELKPEYKKSTGDTDAA

SEQ ID NO: 86060 - protein, 86 aa, Setaria italica
  Transcript Sequence Number=SeqID_20086
  Gene Ontology: Mol. function=oligosaccharyl transferase activity; Cellular component=membrane; Biological process=protein amino acid glycosylation
  Homolog annotation: Hit_ID=B7QE89; Match level="QueryCoverage=73%, HitCoverage=8%, E-value=1e-18, Identity=69%"; Hit description =Oligosaccharyl transferase, putative (Fragment)
MQVPSYISRSVAGSYDNEAVAIFALIFTFYLYVKTLNTGSRYYATLNALSYFYMVCSWGGYTFILLYIMYPNYATVFSFQVCSWGG

SEQ ID NO: 86061 - protein, 150 aa, Setaria italica
  Transcript Sequence Number=SeqID_20087
  Gene Ontology: Mol. function=ubiquitin-protein ligase activity; Cellular component=ubiquitin ligase complex; Biological process =ubiquitin-dependent protein catabolic process
  Homolog annotation: Hit_ID=B6SV52; Match level="QueryCoverage=94%, HitCoverage=18%, E-value=1e-42, Identity=63%"; Hit description =Ubiquitin-protein ligase
SSLKILRNLSEVKEATEFIIRTDNCLSSISDHLDTGSHREQEHAVVILLAVCSDSAEVCSLAMKEGIIPALVDLSVNGTELARDCSIQLLQLLRDFRRCDQFNSSCSREVAADHVAENPPSDSICKQPISKSARYISRKSSNVFLRKPTV

SEQ ID NO: 86062 - protein, 180 aa, Setaria italica
  Transcript Sequence Number=SeqID_20088
  Gene Ontology: Mol. function=homoserine dehydrogenase activity; Cellular component=chloroplast; Biological process=methionine biosynthetic process
  Homolog annotation: Hit_ID=P49079; Match level="QueryCoverage=81%, HitCoverage=15%, E-value=4e-81, Identity=95%"; Hit description =Homoserine dehydrogenase
  Pfam annotation: Domain name=NAD_binding_3; Domain location=41-170; Score=111.8; E_value=2.3e-30; Accession=PF03447.8; Description =Homoserine dehydrogenase, NAD binding domain
GLSVEYNITVVLKQEDCVRALRAAHSRFFLSKTTLAVGIVGPGLIGRTLLNQLKDQAAVLKENMNIDLRVMGITGSRTMLLSDIGIDLTQWKEKLQTEAEPADLDKFVHHLSENHFFPNRVLVDCTADTSVASHYYDWLKRGIHVITPNKEKTKLQGTNLEEGNTRKELKEKLNLNKKRK

SEQ ID NO: 86063 - protein, 111 aa, Setaria italica
  misc_feature (29)..(29): Xaa can be any naturally occurring amino acid
  Transcript Sequence Number=SeqID_20089
  Gene Ontology: Mol. function=structural constituent of ribosome; Cellular component=ribonucleoprotein complex; Biological process =translation
  Homolog annotation: Hit_ID=P29766; Match level="QueryCoverage=70%, HitCoverage=29%, E-value=2e-36, Identity=93%"; Hit description=60S ribosomal protein L8
  Pfam annotation: Domain name=Ribosomal_L2_C; Domain location=5-95; Score=35.3; E_value=4.8e-09; Accession=PF03947.10; Description =Ribosomal Proteins L2, C-terminal domain
SHNPDNGTSRIKLPSGAKKIVPSSCRAMXLGQVAGGGRTEKPMLKAGNAYHKYRVKRNCWPKVRGVAMNPVEHPHGGGPVVSGARLQPLLPSPTRPLRVTVVVSLFIYLRC

SEQ ID NO: 86064 - protein, 124 aa, Setaria italica
  misc_feature (116)..(116): Xaa can be any naturally occurring amino acid
  Transcript Sequence Number=SeqID_20090
  Gene Ontology: Mol. function=structural constituent of ribosome; Cellular component=ribonucleoprotein complex; Biological process =translation
  Homolog annotation: Hit_ID=P29766; Match level="QueryCoverage=97%, HitCoverage=46%, E-value=2e-61, Identity=95%"; Hit description=60S ribosomal protein L8
  Pfam annotation: Domain name=Ribosomal_L2_C; Domain location=1-115; Score=133.0; E_value=9.2e-37; Accession=PF03947.10; Description =Ribosomal Proteins L2, C-terminal domain
STYVGDRGVFARASGDYAIVISHNPDNGTSRIKLPSGAKKIVPSSCRAMIGQVAGGGRTEKPMLKAGNAYHKYRVKRNCWPKVRGVAMNPVEHPHGGGNHQHIGHASTVRRDAPPXKVGLIAAR

SEQ ID NO: 86065 - protein, 84 aa, Setaria italica
  Transcript Sequence Number=SeqID_20091
  Gene Ontology: Mol. function=structural constituent of ribosome; Cellular component=ribonucleoprotein complex; Biological process =translation
  Homolog annotation: Hit_ID=P29766; Match level="QueryCoverage=83%, HitCoverage=27%, E-value=5e-31, Identity=93%"; Hit description=60S ribosomal protein L8
  Pfam annotation: Domain name=Ribosomal_L2_C; Domain location=5-54; Score=-40.9; E_value=0.0023; Accession=PF03947.10; Description =Ribosomal Proteins L2, C-terminal domain
ALPALSIGYHKYRVKRNCWPKVRGVAMNPVEHPHGGGNHQHIGHASTVRRDAPPGQKVGLIAARRTGRLRGQAAATAAKSDKAT

SEQ ID NO: 86066 - protein, 170 aa, Setaria italica
  misc_feature (99)..(99): Xaa can be any naturally occurring amino acid
  misc_feature (131)..(131): Xaa can be any naturally occurring amino acid
  misc_feature (163)..(163): Xaa can be any naturally occurring amino acid
  Transcript Sequence Number=SeqID_20092
  Gene Ontology: Mol. function=structural constituent of ribosome; Cellular component=ribonucleoprotein complex; Biological process =translation
  Homolog annotation: Hit_ID=P46286; Match level="QueryCoverage=100%, HitCoverage=65%, E-value=4e-67, Identity=73%"; Hit description=60S ribosomal protein L8-1
  Pfam annotation: Domain name=Ribosomal_L2; Domain location=11-90; Score=68.1; E_value=3.3e-17; Accession=PF00181.15; Description =Ribosomal Proteins L2, RNA binding domain
MGRVIRAQRKGAGSVFKSHTHHRKGPARFRSLDFGERNGYLKGVVTDVIHDPGRGAPLAKVTFRHPSGTSTRRSLFVAAEGIYTGQFIYCGPSVVHALXATLSCPLRGIPEGAVVCNVEHHVGDRGVFARXSGDYAIVISHNPTTEPPGSSSPPGAKKIVPTXCRAMIGQ

SEQ ID NO: 86067 - protein, 98 aa, Setaria italica
  Transcript Sequence Number=SeqID_20093
  Subcellular localization annotation: CTP_CleavageSite=90; ConfidenceScore=5.37e-01
FIPRRRSPRPPPPPPLPLPPLRHPPPRPLRRHPRHRLPPHRLPPPRLPPQPPPSPPPHQPPPQPSWPPPPPPPSCGQSRPPARPPPPPPPASSRLSSL

SEQ ID NO: 86068 - protein, 125 aa, Setaria italica
  Transcript Sequence Number=SeqID_20094
  Gene Ontology: Mol. function=structural constituent of ribosome; Cellular component=ribonucleoprotein complex; Biological process =translation
  Homolog annotation: Hit_ID=P29766; Match level="QueryCoverage=84%, HitCoverage=40%, E-value=5e-53, Identity=96%"; Hit description=60S ribosomal protein L8
  Pfam annotation: Domain name=Ribosomal_L2_C; Domain location=2-95; Score=83.0; E_value=1e-21; Accession=PF03947.10; Description =Ribosomal Proteins L2, C-terminal domain
MQLLICLCSCRIKLPSGAKKIVPSSCRAMIGQVAGGGRTEKPMLKAGNAYHKYRVKRNCWPKVRGVAMNPVEHPHGGGNHQHIGHASTVRRDAPPGQKVGLIAARRTGRLRGQAAATAAKSDKAT

SEQ ID NO: 86069 - protein, 262 aa, Setaria italica
  misc_feature (82)..(82): Xaa can be any naturally occurring amino acid
  misc_feature (110)..(110): Xaa can be any naturally occurring amino acid
  Transcript Sequence Number=SeqID_20095
  Gene Ontology: Mol. function=structural constituent of ribosome; Cellular component=ribonucleoprotein complex; Biological process =translation
  Homolog annotation: Hit_ID=P29766; Match level="QueryCoverage=95%, HitCoverage=95%, E-value=1e-133, Identity=92%"; Hit description=60S ribosomal protein L8
  Pfam annotation: Domain name=Ribosomal_L2; Domain location=11-91; Score=51.5; E_value=3.2e-12; Accession=PF00181.15; Description =Ribosomal Proteins L2, RNA binding domain
  Pfam annotation: Domain name=Ribosomal_L2_C; Domain location=97-232; Score=205.2; E_value=1.8e-58; Accession=PF03947.10; Description =Ribosomal Proteins L2, C-terminal domain
  Pfam module annotation: Pfam domain module=Ribosomal_L2::Ribosomal_L2_ C; Domain location=11-91::97-232
MGRVIRAQRKGAGSVFKSHTHHRKGPARFRSLDFGERNGYLKGVVTDVIHDPGRGAPLAKVTFRHPFRYKHQKELFVAADGXIYTGQFIYCGRRATLSIGNVLPLRGIPXGAVVCNVEHHVGDRGVFARASGDYAIVISHNPDNGTSRIKLPSGAKKIVPSSCRAMIGQVAGGGRTEKPMLKAGNAYHKYRVKRNCWPKVRGVAMNPVEHPHGGGNHQHIGHASTVRRDAPPGQKVGLIAARRTGRLRGQAAATAAKSDKAT

SEQ ID NO: 86070 - protein, 264 aa, Setaria italica
  misc_feature (82)..(82): Xaa can be any naturally occurring amino acid
  misc_feature (93)..(93): Xaa can be any naturally occurring amino acid
  misc_feature (109)..(109): Xaa can be any naturally occurring amino acid
  misc_feature (130)..(130): Xaa can be any naturally occurring amino acid
  misc_feature (211)..(211): Xaa can be any naturally occurring amino acid
  misc_feature (232)..(232): Xaa can be any naturally occurring amino acid
  Transcript Sequence Number=SeqID_20096
  Gene Ontology: Mol. function=structural constituent of ribosome; Cellular component=ribonucleoprotein complex; Biological process =translation
  Homolog annotation: Hit_ID=P29766; Match level="QueryCoverage=95%, HitCoverage=95%, E-value=1e-130, Identity=92%"; Hit description=60S ribosomal protein L8
  Pfam annotation: Domain name=Ribosomal_L2; Domain location=11-90; Score=62.8; E_value=1.3e-15; Accession=PF00181.15; Description =Ribosomal Proteins L2, RNA binding domain
  Pfam annotation: Domain name=Ribosomal_L2_C; Domain location=96-233; Score=177.9; E_value=3e-50; Accession=PF03947.10; Description =Ribosomal Proteins L2, C-terminal domain
  Pfam module annotation: Pfam domain module=Ribosomal_L2::Ribosomal_L2_ C; Domain location=11-90::96-233
MGRVIRAQRKGAGSVFKSHTHHRKGPARFRSLDFGERNGYLKGVVTDVIHDPGRGAPLAKVTFRHPFRYKHQKELFVAAEGXYTGQFIYCGRXATLSIGNVLPLRGIPXTGAVVCNVEHHVGDRGVFARXSGDYAIVISHNPDNGTSRIKLPSGAKKIVPSSCRAMIGQVAGGGRTEKPMLKAGNAYHKYRVKRNCWPKVRGVAMNPVEHXPHGGGNHQHIGHASTVRRDAXPPGQKVGLIAARRTGRLRGQAAATAAKSDKAT

SEQ ID NO: 86071 - protein, 103 aa, Setaria italica
  Transcript Sequence Number=SeqID_20097
  Homolog annotation: Hit_ID=Q6AV56; Match level="QueryCoverage=80%, HitCoverage=5%, E-value=1e-11, Identity=44%"; Hit description=BHLH family protein, putative, expressed
KKEEEQLGVLKSRTTDLSNVVLQERNELVDELTGLTNTIGEVIYGGENLMSNLRRITQKVNEEEPYNDTPSSEKTNGRTSAPLIKNKSGHVLDRRSPLKEHNY

SEQ ID NO: 86072 - protein, 113 aa, Setaria italica
  Transcript Sequence Number=SeqID_20098
  Gene Ontology: Mol. function=zinc ion binding; Cellular component =intracellular; Biological process=regulation of transcription, DNA -dependent
  Homolog annotation: Hit_ID=B1B534; Match level="QueryCoverage=94%, HitCoverage=22%, E-value=2e-56, Identity=95%"; Hit description =Cys2/His2-type zinc finger transcription factor
  Pfam annotation: Domain name=zf-C2H2; Domain location=48-70; Score =21.6; E_value=0.0032; Accession=PF00096.18; Description=Zinc finger, C2H2 type
  Pfam annotation: Domain name=zf-C2H2; Domain location=75-96; Score =16.6; E_value=0.1; Accession=PF00096.18; Description=Zinc finger, C2H2 type
  Pfam module annotation: Pfam domain module=zf-C2H2::zf-C2H2; Domain location=48-70::75-96
GRRRGGAPRKRVYVCPEPTCVHHDPARALGDLTGIKKHFSRKHGEKRWRCERCGKRYAVQSDWKAHVKGCGTREYRCDCGILFTRKDSLLTHRAFCDALAEESARILAAANNG

SEQ ID NO: 86073 - protein, 202 aa, Setaria italica
  Transcript Sequence Number=SeqID_20099
  Gene Ontology: Mol. function=transferase activity, transferring glycosyl groups
  Homolog annotation: Hit_ID=Q75J72; Match level="QueryCoverage=100%, HitCoverage=36%, E-value=3e-64, Identity=56%"; Hit description =Putative glycosyltransferase
FFSVVVPLAVLLGLHARFPSMYLVDESVVSVYDGSEGGSWEPIPSKGNDSLQVNNTVKELVPPPSKERTETNGSQSDTVIGNISIRPAPPIRQATVLENSSLPYVTDTDLGSFEQGLPGDENGKSCQLQFGSYCLWSVEHKEVMKDFIVKRLKDQLFVARAYYPSIVKLDGMEKLSLEMKQNIQEHGHMLSEAISDADLPEL

SEQ ID NO: 86074 - protein, 67 aa, Setaria italica
  Transcript Sequence Number=SeqID_20100
  Gene Ontology: Mol. function=nucleoside-triphosphatase activity; Cellular component=protein complex; Biological process=proteolysis
  Homolog annotation: Hit_ID=Q9LIM2; Match level="QueryCoverage=92%, HitCoverage=3%, E-value=6e-23, Identity=77%"; Hit description =Similarity to 26S proteasome subunit 4
VAGLNDVIQSMKEVVILPLLYPEFFSSLGLTPPRGVLLHGHPGTGNTLVVRALIGACSQGNRFPTTI

SEQ ID NO: 86075 - protein, 430 aa, Setaria italica
  misc_feature (6)..(6): Xaa can be any naturally occurring amino acid
  Transcript Sequence Number=SeqID_20101
  Gene Ontology: Mol. function=nucleoside-triphosphatase activity; Cellular component=protein complex; Biological process=proteolysis
  Homolog annotation: Hit_ID=Q9LIM2; Match level="QueryCoverage=97%, HitCoverage=21%, E-value=0.0, Identity=75%"; Hit description =Similarity to 26S proteasome subunit 4
  Pfam annotation: Domain name=AAA; Domain location=217-407; Score =262.3; E_value=1.2e-75; Accession=PF00004.21; Description=ATPase family associated with various cellular activities (AAA)
  Pfam annotation: Domain name=AAA_5; Domain location=217-353; Score= -3.2; E_value=0.0018; Accession=PF07728.6; Description=ATPase family associated with various
  Pfam annotation: Domain name=NACHT; Domain location=216-359; Score= -39.8; E_value=0.096; Accession=PF05729.4; Description=NACHT domain
  Pfam annotation: Domain name=PHD; Domain location=46-81; Score=-1.1; E_value=0.034; Accession=PF00628.21; Description=PHD-finger
  Pfam module annotation: Pfam domain module=AAA::AAA_5::NACHT::PHD; Domain location=217-407::217-353::216-359::46-81
PIHDRXGIARVWVHQNCAVWSPEVYFAGLGCLRNVRAALCRGRLLKCSRCGRPGATIGCRVDRCPKTYHLPCSRSEACIFDHRNFLIACNDHRHLFQPQGDKYVELLRKLKVKKMKADVRKLSQDAWRKDREAEEKWLENCGEDEEFLKREGKRLNRDLLRIAPVYIGGSSENEKSYRGWESVAGLNDVIQSMKEVVILPLLYPEFFSSLGLTPPRGVLLHGHPGTGKTLVVRALIGACSQGNRRIAYFARKGADCLGKYVGDAERQLRLLFQVAERCQPSIIFFDEIDGLAPCRSRQQDQTHNSVVATLLSLLDGLKSRGSVIVIGATNRPDAIDPALRRPGRFDREIYFPLPTFEDRSAILSLHTKNWPSPISGAFLSLIASQTVGYAGADLQAICTQAAINALKRTCPLHEILLSAEKELSRGRSYL

SEQ ID NO: 86076 - protein, 119 aa, Setaria italica
  Transcript Sequence Number=SeqID_20102
  Gene Ontology: Mol. function=3-beta-hydroxy-delta5-steroid dehydrogenase activity; Cellular component=endoplasmic reticulum; Biological process=steroid biosynthetic process
  Homolog annotation: Hit_ID=B6TKP9; Match level="QueryCoverage=100%, HitCoverage=21%, E-value=2e-60, Identity=92%"; Hit description =Sterol-4-alpha-carboxylate 3-dehydrogenase, decarboxylating
  Pfam annotation: Domain name=3Beta_HSD; Domain location=3-119; Score=- 135.4; E_value=0.071; Accession=PF01073.11; Description=3-beta hydroxysteroid dehydrogenaseisomerase family
WCVVTGGRGFAARHLVTMLLRSGEWRVRVADLAPAITLDRDEEEGFLGAAFREGQAAYASADLRDKAQVARAFEGAEVVFHMAAPDSSINSFQLHYSVNVEGTKNVIDACIRCKVKRLI

SEQ ID NO: 86077 - protein, 39 aa, Setaria italica
  Transcript Sequence Number=SeqID_20103
  Homolog annotation: Hit_ID=Q6K4F9; Match level="QueryCoverage=84%, HitCoverage=12%, E-value=2e-09, Identity=93%"; Hit description=GEKO1- like protein
WQEATGEPVSEVIFLSKHTAVSNRPALTVHPIGPFFFHV

SEQ ID NO: 86078 - protein, 115 aa, Setaria italica
  Transcript Sequence Number=SeqID_20104
  Homolog annotation: Hit_ID=B6TBC4; Match level="QueryCoverage=58%, HitCoverage=23%, E-value=6e-27, Identity=86%"; Hit description =Ethanol tolerance protein GEKO1
KYFSKDGVWVGHLLSGYSLPMETPSQINGKTSGEVAGMWKHSIKVSYEATKAAFPGGEVIAHLDHKVNSGWVVKQMTTSDKNKKMSQDFHNENVRRASKRASYIQPKDAVPSSEV

SEQ ID NO: 86079 - protein, 127 aa, Setaria italica
  misc_feature (11)..(11): Xaa can be any naturally occurring amino acid
  misc_feature (21)..(21): Xaa can be any naturally occurring amino acid
  Transcript Sequence Number=SeqID_20105
  Gene Ontology: Mol. function=DNA topoisomerase type I activity; Cellular component=chromosome; Biological process=DNA unwinding during replication
  Homolog annotation: Hit_ID=B9FBH7; Match level="QueryCoverage=99%, HitCoverage=12%, E-value=6e-66, Identity=90%"; Hit description=DNA topoisomerase
FVIDVTGDDRXLVLSYGPCQXPTLGFIVERFWEIQAHEPEEFWTINCTHTSDEGTASFGWIRGHLFDYPSAVILYEMCVEEPMATVQNVRNQEKLKYPPYPLSTLELQKRASRYFRMSSEHTMKVGL

SEQ ID NO: 86080 - protein, 236 aa, Setaria italica
  misc_feature (57)..(57): Xaa can be any naturally occurring amino acid
  misc_feature (71)..(71): Xaa can be any naturally occurring amino acid
  misc_feature (111)..(111): Xaa can be any naturally occurring amino acid
  Transcript Sequence Number=SeqID_20106
  Homolog annotation: Hit_ID=B6TBC4; Match level="QueryCoverage=91%, HitCoverage=65%, E-value=4e-76, Identity=71%"; Hit description =Ethanol tolerance protein GEKO1
  Pfam annotation: Domain name=tRNA_deacylase; Domain location=2-236; Score=28.3; E_value=9.1e-11; Accession=PF04414.4; Description=D -aminoacyl-tRNA deacylase
CTCVLTGKHTYKGVPHLRDDETPPHGGTPGWAAIPNPRIGPLLRLMQKIAAEQDHAXEFEVVCSSSVTHIXFQSTDFNYDCCLRLRLRLLTITSTPTMFVEIDCYKYPGSXGGRQDAAQAIALVLRKGLGLEDGNAVGSWQGNSEKVLLGIGGGHYAPRHMDIVNKDGVWVGHLLSGYSLPMETPSQINGKTSGEVAGMWKHSIKVSYEATKAAFPVGEVIAHLDHKYVSSPVWYI

SEQ ID NO: 86081 - protein, 197 aa, Setaria italica
  Transcript Sequence Number=SeqID_20107
  Gene Ontology: Mol. function=double-stranded RNA binding; Cellular component=intracellular
  Homolog annotation: Hit_ID=Q5N8Z0; Match level="QueryCoverage=61%, HitCoverage=27%, E-value=3e-19, Identity=47%"; Hit description =Putative dsRNA-binding protein ODB1
MNSSPEVNKLPLSEPSMGIEVMDSSSEVDKLSLPEQIMDVKVTDSSLKVDKLPLPEPSTELELMYSSLQEYEPPIPEPSTEVEVMDSSLKVSEPPIPKASSEVEATDSSLEHTPTVNGHSPLVAPTSTSSLTVPTATMPVSSDGCGCYMLTNRIQVYPRNTDMAIPEGATMLPFSDDMWVAVSLPYRNNNEDGEAAA

SEQ ID NO: 86082 - protein, 197 aa, Setaria italica
  Transcript Sequence Number=SeqID_20108
  Homolog annotation: Hit_ID=B9RNU1; Match level="QueryCoverage=95%, HitCoverage=37%, E-value=8e-48, Identity=49%"; Hit description =Transporter, putative
PTGLPVSSAVLCLVGISTAVAIADVTIDACIAKNSIDKPALAPDMQSLCAFSSSLGALIGYATSGMFVHHLGAQGALGVMAIPPATVVFLGFFIYELKTYQHNAKEKVLNKVSGAVKGMVRTIKYPVVWKPSLYMFLSLALSISTHEGQFYWYTNKTPPNPGFLQEFVGLVHAIGAVASMVGVLIYHKCLKDYPFRS

SEQ ID NO: 86083 - protein, 103 aa, Setaria italica
  Transcript Sequence Number=SeqID_20109
RPCTTVPLPPSHFAAVLPDRALAVADLPIPSLLPPIPTGSRAAAIFARAHLAAAARGPVRSRARLGDPAAALDLTPRGLDGQGEIGGRRAGGVAQRCPCHAAP

SEQ ID NO: 86084 - protein, 71 aa, Setaria italica
  Transcript Sequence Number=SeqID_20110
LSLIKDQPYQVISTTYLQKLKLAMDLGLYQFTEEVQGAHRWDLNYSIKKPVGLDDREEANSSADRSLSNQL

SEQ ID NO: 86085 - protein, 168 aa, Setaria italica
  Transcript Sequence Number=SeqID_20111
  Gene Ontology: Mol. function=kinase activity; Cellular component =plasma membrane
  Homolog annotation: Hit_ID=UPI0001A88FE0; Match level="QueryCoverage =100%, HitCoverage=30%, E-value=4e-83, Identity=89%"; Hit description= plant synaptotagmin
  Pfam annotation: Domain name=C2; Domain location=16-100; Score=99.6; E_value=1.1e-26; Accession=PF00168.22; Description=C2 domain
ILDGASGATKKPVGILHVKVIRAMNLLKMDLLGKSDPYVKMRLSGERLPSKKTTVKMSNLNPEWNEHFKFIVKDPGTQLLELHMFDWEKVKMHDKLGMQVIPLRLLTPYESKLFTLDLVRSMNPNDPHNKKNRGKLVVELTFDPFREDSTASVASDGEGTASARREAD

SEQ ID NO: 86086 - protein, 123 aa, Setaria italica
  misc_feature (46)..(46): Xaa can be any naturally occurring amino acid
  Transcript Sequence Number=SeqID_20112
  Gene Ontology: Mol. function=metal ion binding; Cellular component =nucleus; Biological process=multicellular organismal development
  Homolog annotation: Hit_ID=O04003; Match level="QueryCoverage=89%, HitCoverage=25%, E-value=7e-42, Identity=80%"; Hit description =Protein LIGULELESS 1
GSSRQEQWTSWRTGLGTQMLGSALLSKEQDQAMDLGEVVKEAVDPXKASMQQHHGIHQQNHHGFPFHSSSAGSCFPQTQSVSGDTTSNIAQVQEPSLAFHHQHHQHSNILQLGQAMFDLDFDH

SEQ ID NO: 86087 - protein, 135 aa, Setaria italica
  misc_feature (23)..(23): Xaa can be any naturally occurring amino acid
  Transcript Sequence Number=SeqID_20113
  Gene Ontology: Mol. function=metal ion binding; Cellular component =nucleus; Biological process=multicellular organismal development
  Homolog annotation: Hit_ID=O04003; Match level="QueryCoverage=82%, HitCoverage=25%, E-value=9e-44, Identity=81%"; Hit description =Protein LIGULELESS 1
SKNMDIGDGLGTQMLGSALLSKXQDQAMDLGEVVKEAVDPKGKASMQQHHGIHQQNHHGFPFHSSSAGSCFPQTQSVSGDTTSNIAQVQEPSLAFHHQHHQHSNILQLGQANVTNTTNLRIQLRPNNSRITKLTN

SEQ ID NO: 86088 - protein, 272 aa, Setaria italica
  Transcript Sequence Number=SeqID_20114
  Gene Ontology: Mol. function=binding; Cellular component=ubiquitin ligase complex; Biological process=ubiquitin-dependent protein catabolic process
  Homolog annotation: Hit_ID=B6TSD3; Match level="QueryCoverage=98%, HitCoverage=61%, E-value=1e-136, Identity=93%"; Hit description =Spotted leaf protein 11
  Pfam annotation: Domain name=Arm; Domain location=130-170; Score =13.2; E_value=0.26; Accession=PF00514.15; Description=Armadillobeta -catenin-like repeat
  Pfam annotation: Domain name=Arm; Domain location=171-211; Score =19.6; E_value=0.013; Accession=PF00514.15; Description=Armadillobeta- catenin-like repeat
  Pfam annotation: Domain name=Arm; Domain location=213-253; Score =25.2; E_value=0.00027; Accession=PF00514.15; Description =Armadillobeta-catenin-like repeat
  Pfam annotation: Domain name=Arm; Domain location=48-88; Score=21.3; E_value=0.004; Accession=PF00514.15; Description=Armadillobeta -catenin-like repeat
  Pfam annotation: Domain name=Arm; Domain location=7-47; Score=40.8; E_ value=5.5e-09; Accession=PF00514.15; Description=Armadillobeta -catenin-like repeat
  Pfam annotation: Domain name=Arm; Domain location=89-129; Score=36.0; E_value=1.5e-07; Accession=PF00514.15; Description=Armadillobeta -catenin-like repeat
  Pfam module annotation: Pfam domain module=Arm::Arm::Arm::Arm::Arm::Ar m; Domain location=130-170::171-211::213-253::48-88::7-47::89-129
ADYAKHRSDIRELIGVSGAIPALVPLLRSTDPVAQENAVTALLNLSLEERNRSAITAAGAIKPLVYALRTGTAAAKQNAACALLSLSGIEENRATIGACGAIPPLVALLSAGSTRGKKDALTTLYRLCSARRNKERAVSAGAIVPLVHLIGERGSGTCEKAMVVLGSLAGIAEGREAVVEAGGIPALVEAIEDGPAKEKEFAVVALLQLCSDSPHNRALLVREGAIPPLVALSQSGSARAKHKAETLLGYLREQRQGVGCRAGSVAATSLAR

SEQ ID NO: 86089 - protein, 342 aa, Setaria italica
  Transcript Sequence Number=SeqID_20115
  Gene Ontology: Mol. function=electron carrier activity; Cellular component=endoplasmic reticulum membrane; Biological process =oxidation reduction
  Homolog annotation: Hit_ID=A5LFV4; Match level="QueryCoverage=100%, HitCoverage=66%, E-value=1e-122, Identity=64%"; Hit description =Cytochrome P450
  Pfam annotation: Domain name=p450; Domain location=1-342; Score=35.5; E_value=2.3e-13; Accession=PF00067.14; Description=Cytochrome P450
EEVLKNQDHVFCGRPQQHTARGILYDCRDVGFSPYGERWRQLRRIAVVHLLSVKRVDSMRVLREEEVASLVARISAAGALEGDRGKLRAVNMSELIVSLTYTVISKAAFGNKLGGMDPGSFRAMMKEVTGLLEMIAVSDMFPRLRWVDWAMGLDARIKRTASKLDDVLERTLQEHEKKPKNDDEAADLLDDLLSVVKEGGERLNLDRIDVKGLILDLFIGGIDTTSKAIEWAMVYLIKNPREMAKVQAEVRQIAGAQGVLEEQLLRMSRLQAALKEAMRLHPPVPLLIPRETIQDTKLHGYDIPAKTRVIINAWAIGRDKESWENPEQFLPDRFMHTSIDYN

SEQ ID NO: 86090 - protein, 72 aa, Setaria italica
  Transcript Sequence Number=SeqID_20116
LTDGSEIWSWNCIAGGNWPRNMKAKKSKNGFWRCWSSPRSSGRQHCCWTGTGNDARKAITEWLKAKQTLRKK

SEQ ID NO: 86091 - protein, 174 aa, Setaria italica
  Transcript Sequence Number=SeqID_20117
  Homolog annotation: Hit_ID=B6TQZ4; Match level="QueryCoverage=100%, HitCoverage=89%, E-value=1e-62, Identity=71%"; Hit description =Harpin-induced 1
  Pfam annotation: Domain name=Hin1; Domain location=33-172; Score =108.8; E_value=1.9e-29; Accession=PF07320.5; Description=Harpin -induced protein 1 (Hin1)
MAEPRRTRPSTFRCAAATLLAVAVVVVIVVLLWLFLHPSKLVLSVDHASTTGFNFTAAGGLAGAFDLTLRAFNPNERAGVSYRWLNVGVWYNGTYLAGAHAPGFTQSPEDETRVDVAARAAPDAWTLPRDVQEGIKRERTAGKLTVDVHVVAKVRFRYGVVRTRKYTVRASCPA

SEQ ID NO: 86092 - protein, 145 aa, Setaria italica
  misc_feature (26)..(26): Xaa can be any naturally occurring amino acid
  misc_feature (32)..(32): Xaa can be any naturally occurring amino acid
  Transcript Sequence Number=SeqID_20118
  Gene Ontology: Cellular component=nucleus; Biological process =nucleosome assembly
  Homolog annotation: Hit_ID=Q8L8G5; Match level="QueryCoverage=79%, HitCoverage=30%, E-value=8e-46, Identity=83%"; Hit description =Nucleosome/chromatin assembly factor group A
  Pfam annotation: Domain name=NAP; Domain location=2-117; Score=-4.0; E_value=1.3e-10; Accession=PF00956.10; Description=Nucleosome assembly protein (NAP)
VRQKLNHMIDEDEPILEKAIGTEIEXWYPGKXCLTQKVLQKKPKKGSKHTEPIIKTEDCESFFNFFNPPQVPDDDFIDEDTAEQLQDQMEQDYDIGSTIRDKIIPHAVSWFTGEAQDEDYDDTILEDDENNSDDDEGDEEEEDNE

SEQ ID NO: 86093 - protein, 162 aa, Setaria italica
  misc_feature (40)..(40): Xaa can be any naturally occurring amino acid
  misc_feature (84)..(84): Xaa can be any naturally occurring amino acid
  misc_feature (94)..(94): Xaa can be any naturally occurring amino acid
  Transcript Sequence Number=SeqID_20119
  Gene Ontology: Cellular component=nucleus; Biological process =nucleosome assembly
  Homolog annotation: Hit_ID=Q8L8G5; Match level="QueryCoverage=94%, HitCoverage=40%, E-value=4e-64, Identity=83%"; Hit description =Nucleosome/chromatin assembly factor group A
  Pfam annotation: Domain name=NAP; Domain location=1-161; Score=129.5; E_value=1.1e-35; Accession=PF00956.10; Description=Nucleosome assembly protein (NAP)
IQMRDEEALKYLKNIKWCRIDDPKGFKIEFSFDTNPFFKXNSVLTKTYHMIDEDEPILEKAIGTEIEWYPGKCLTQKVLQKKPXKGSKHTEPIXKTEDCESFFNFFNPPQVPDDDFIDEDTAEQLQDQMEQDYDIGSTIRDKIIPHCLVFYWFLPVVGLLSI

SEQ ID NO: 86094 - protein, 110 aa, Setaria italica
  Transcript Sequence Number=SeqID_20120
  Gene Ontology: Mol. function=transferase activity
  Homolog annotation: Hit_ID=B9RXS8; Match level="QueryCoverage=78%, HitCoverage=34%, E-value=2e-16, Identity=46%"; Hit description=UDP-3- O-[3-hydroxymyristoyl] glucosamine N-acyltransferase, putative
  Pfam annotation: Domain name=Hexapep; Domain location=33-50; Score =11.9; E_value=2.7; Accession=PF00132.16; Description=Bacterial transferase hexapeptide (th
  Pfam annotation: Domain name=Hexapep; Domain location=51-68; Score =15.0; E_value=0.31; Accession=PF00132.16; Description=Bacterial transferase hexapeptide (th
  Pfam annotation: Domain name=Hexapep; Domain location=80-97; Score =5.2; E_value=38; Accession=PF00132.16; Description=Bacterial transferase hexapeptide (th
  Pfam module annotation: Pfam domain module=Hexapep::Hexapep::Hexapep; Domain location=33-50::51-68::80-97
LAECSEAGAASVEFVPWHNGGGILHRAASVDPTAVVEAGAVVHSGAVLGKEVVVGSGAVVGPSVSIGNSTRIGYNVVLSNCSVGEFCTIHNGAPASEHSASHRPHKYESE

SEQ ID NO: 86095 - protein, 41 aa, Setaria italica
  Transcript Sequence Number=SeqID_20121
PKMWAELAEAMLMAPPVWEGNAADNDEWAQGNLWDLPVWHC

SEQ ID NO: 86096 - protein, 122 aa, Setaria italica
  Transcript Sequence Number=SeqID_20122
  Gene Ontology: Mol. function=structural constituent of ribosome; Cellular component=ribonucleoprotein complex; Biological process =translation
  Homolog annotation: Hit_ID=Q65XC7; Match level="QueryCoverage=100%, HitCoverage=100%, E-value=6e-62, Identity=96%"; Hit description=50S ribosomal protein L20
  Pfam annotation: Domain name=Ribosomal_L20; Domain location=5-98; Score=117.8; E_value=3.6e-32; Accession=PF00453.10; Description =Ribosomal protein L20
MNKGKIFKLAKGFRGRAKNCIRIARERVEKALQYSYRDRRNKKRDMRSLWIERINAGTRLHGVNYGNFMHGLMKENIQLNRKVLSELSMHEPYSFKALVDVSRNAFPGNRPVPAKEGLASIL

SEQ ID NO: 86097 - protein, 106 aa, Setaria italica
  Transcript Sequence Number=SeqID_20123
  Gene Ontology: Cellular component=membrane
  Subcellular localization annotation: CTP_CleavageSite=31; ConfidenceScore=5.48e-01
PPRAPTSVSASRELRVSFQNPHKRFSPSTSSASSSSYDGGDNRNQSGIDGDTAEVLRCTSTSTGSSLLARSKTRSRLMDPPPPSSAPANEPDPRKSFVSKGLPPKV

SEQ ID NO: 86098 - protein, 212 aa, Setaria italica
  Transcript Sequence Number=SeqID_20124
  Gene Ontology: Mol. function=iron-sulfur cluster binding; Cellular component=chloroplast; Biological process=iron-sulfur cluster assembly
  Homolog annotation: Hit_ID=B6TTI4; Match level="QueryCoverage=100%, HitCoverage=100%, E-value=1e-95, Identity=84%"; Hit description=NFU3
  Pfam annotation: Domain name=NifU; Domain location=147-211; Score =14.0; E_value=1.2e-05; Accession=PF01106.9; Description=NifU-like domain
  Pfam annotation: Domain name=NifU; Domain location=66-133; Score =116.6; E_value=8e-32; Accession=PF01106.9; Description=NifU-like domain
  Pfam module annotation: Pfam domain module=NifU::NifU; Domain location=147-211::66-133
  Subcellular localization annotation: CTP_CleavageSite=76; ConfidenceScore=5.72e-01
MRLCLRQAAAAATSSPLAATIRKNSPSSLTHGRLSFSHTSLQTTPNHRGNRAGWAVRVLPLTEENVEMVLDEVRPSLMADGGNVALHEIDGLVVVLKLQGACGSCPSSTMTLKMGIETRLRDKIPDILEVEQIVDTETGLELNTDNVEKVLDEIRPYLSGTGGGSIELLQIDGYVVKIRIGGPAAGVMTVRVAVTQKLREKIPSILAVQLTE

SEQ ID NO: 86099 - protein, 261 aa, Setaria italica
  misc_feature (41)..(41): Xaa can be any naturally occurring amino acid
  Transcript Sequence Number=SeqID_20125
  Gene Ontology: Mol. function=metal ion binding; Cellular component =intracellular; Biological process=negative regulation of protein export from nucleus
  Homolog annotation: Hit_ID=B6SXM0; Match level="QueryCoverage=82%, HitCoverage=32%, E-value=6e-28, Identity=35%"; Hit description =ATBRCA1
  Pfam annotation: Domain name=BRCT; Domain location=151-251; Score =18.2; E_value=0.035; Accession=PF00533.18; Description=BRCA1 C Terminus (BRCT) domain
  Pfam annotation: Domain name=BRCT; Domain location=39-115; Score =49.1; E_value=1.7e-11; Accession=PF00533.18; Description=BRCA1 C Terminus (BRCT) domain
  Pfam module annotation: Pfam domain module=BRCT::BRCT; Domain location=151-251::39-115
HLKFPSLPKSCHPDEEGISNVYKREEIKAYRADTSSCPSDXWFLLGLSLCASEKDSLQEFVRWSNGKLTKEWDKNVTHVIVGKGPGSSWNRSIEVLMAVLLGKWVIHFEWIMDCSSEMRPRPEASYEVTSSMDSLKTMDGPKKGRIRAATGAPNLFSGLRFCLSAYMNPDGRHRVRDLIAAAGGKVLEGGFLDPPLECFDGSSSVKPYFVFDGDVPGEFALGTLLKEVEEARKHAAAGARVISHQRVLDAVAAYDAEILNR

SEQ ID NO: 86100 - protein, 123 aa, Setaria italica
  Transcript Sequence Number=SeqID_20126
MAGRLTAAGSRILGGGGARAAAAALRHRAGMGLPVGRHIVPDKPLPTNDELLWDNGTPFPEPCIDRLAPHIGKYEALAWLCGGLGFFATLGVAAAVNDKASKIPYTPKVYPYDNLRVELGDRP

SEQ ID NO: 86101 - protein, 169 aa, Setaria italica
  Transcript Sequence Number=SeqID_20127
  Subcellular localization annotation: CTP_CleavageSite=42; ConfidenceScore=5.12e-01
SDDVASHGTDDVASASRGADATSSRRQGTDTTSRRESGDLVSARDRVSGQEAVIEKREHDQSVANQEVFDNSEGRRPRDGGVAERTATSPGVSVHFPGGNKDATSELQDDTEKRMTRQAESPDAARKKHSGEAAVQPQYHHHHEELAPKSAQAPAVQSARDVLAKEDDT

SEQ ID NO: 86102 - protein, 121 aa, Setaria italica
  Transcript Sequence Number=SeqID_20128
MGEKQDNSSIEKLCEIFSKIIEQPKVTSEIFKYALEPNPVKLSGPENYVSWARQAKLILGSHGYEKLLIATDREEDKGKIKGSGTDAKQINDRVLVWLLGSMESAIREQVETMETGLLWKH

SEQ ID NO: 86103 - protein, 380 aa, Setaria italica
  Transcript Sequence Number=SeqID_20129
  Gene Ontology: Mol. function=DNA binding; Cellular component=nucleus
RAHIIITAGNYIHSNLRPARPKLCKHHLPAVKAAIQLKKSVFQTNFVDREKERPAIAPSDLISLVQSKGDESGENTRDRSRKQTKENLVASNIVNSSAAPDCVAANTVSNTSSRRPSRKSTGRRSKKQNEENVAVPDGLNDLSSSRSRSRKRKSTSGSNAAVQKRMRGSIPVGNEAVPIELRGTVSADNEVGTNRIMDPLSVGVEGVVKKRTRGSKPAGNNAASQKRMRGSIPVGNEAVPIEVSANDEVGTNRMMDPASVGEEGVVKKRTRRSKPAGSEGAARKRRCTISADNEAGTNTRDPVSGEEEVVKKRKRRSKPVGNEGAARKRMRGSVSVGDEGVVEKRTGSVATENHGDVTKRKRAPSRRKSAEDNLTTEGPA

SEQ ID NO: 86104 - protein, 358 aa, Setaria italica
  misc_feature (312)..(312): Xaa can be any naturally occurring amino acid
  misc_feature (327)..(327): Xaa can be any naturally occurring amino acid
  Transcript Sequence Number=SeqID_20130
  Gene Ontology: Mol. function=DNA binding; Cellular component=nucleus; Biological process=regulation of transcription
  Homolog annotation: Hit_ID=B9SU87; Match level="QueryCoverage=99%, HitCoverage=34%, E-value=1e-100, Identity=49%"; Hit description =Transcription factor, putative
  Pfam annotation: Domain name=Myb_DNA-binding; Domain location=144 -189; Score=48.3; E_value=3e-11; Accession=PF00249.23; Description =Myb-like DNA-binding domain
  Pfam annotation: Domain name=Myb_DNA-binding; Domain location=196 -242; Score=27.4; E_value=5.6e-05; Accession=PF00249.23; Description =Myb-like DNA-binding domain
  Pfam annotation: Domain name=Myb_DNA-binding; Domain location=248 -294; Score=33.3; E_value=9.7e-07; Accession=PF00249.23; Description =Myb-like DNA-binding domain
  Pfam annotation: Domain name=Myb_DNA-binding; Domain location=91-138; Score=13.6; E_value=0.14; Accession=PF00249.23; Description=Myb-like DNA-binding domain
  Pfam module annotation: Pfam domain module=Myb_DNA-binding::Myb_DNA -binding::Myb_DNA-binding::Myb_DNA-binding; Domain location=144 -189::196-242::248-294::91-138
INLARGIKQQYQETLILDSLNNGSAIGDFSAVDMAYALTNGVGNFEVTPESLRSVLPLINWDKISAMYLPGRSGAECESRWLNCDDPLINLEAWTAQEETKLLLIVQEKGLYNWINIAATLGTYRTPFQCLVRYQRSLNPHIINKAWTKEEDLQLRAAVHTFGEKWQLVSASLDGRTGSQCSNRWRKTLHPTRTRVGRWHLDEDKRLMVSVKLIGSGSWSKIAPFIPGRTQTQCHERWCNILDPSIDLGKWRPEEDTKLLAAVSEFGPCWSKIAMNIIPGRNDNMCSRRWNKLCKHHLPAVKAAIQLKKSVXQTNFVDREKERPAIXPSDLISLVQSKGDESGENTRDRSRNAKPKKT

SEQ ID NO: 86105 - protein, 41 aa, Setaria italica
  Transcript Sequence Number=SeqID_20131
  Gene Ontology: Mol. function=hydrolase activity
  Homolog annotation: Hit_ID=B9RL97; Match level="QueryCoverage=85%, HitCoverage=7%, E-value=3e-10, Identity=77%"; Hit description =Catalytic, putative
MIITLYRLDLYIPEDNSRPCPVVAFVTGGAWIIGYKAWGAL

SEQ ID NO: 86106 - protein, 234 aa, Setaria italica
  misc_feature (178)..(178): Xaa can be any naturally occurring amino acid
  misc_feature (225)..(225): Xaa can be any naturally occurring amino acid
  misc_feature (228)..(228): Xaa can be any naturally occurring amino acid
  Transcript Sequence Number=SeqID_20132
  Gene Ontology: Mol. function=hydrolase activity
  Homolog annotation: Hit_ID=B9RL97; Match level="QueryCoverage=95%, HitCoverage=45%, E-value=1e-76, Identity=61%"; Hit description =Catalytic, putative
  Subcellular localization annotation: CTP_CleavageSite=56; ConfidenceScore=5.28e-01
MRASVEEAGALLARSDSFGGRRRHRSASPVQSASPRPGSLRRQSSSFREDVGHAASETYLVSRLTFTLLQYLGIGYRWMSQLLALTIYAILLMPGFIQVGYYYFFSSQVRRSIVYGEQPRNRLDLYIPEDNSRPCPVVAFVTGGAWIIGYKAWVLVLGRRLAERGIIVACIDYRNFPXGTIGDMVNDASQGISFVCNNIANLWGETLNQIYLMGQSAGAHIAACXLMXQAVKES

SEQ ID NO: 86107 - protein, 87 aa, Setaria italica
  Transcript Sequence Number=SeqID_20133
  Gene Ontology: Mol. function=transcription regulator activity; Cellular component=nucleus; Biological process=regulation of transcription
  Homolog annotation: Hit_ID=B6T6H6; Match level="QueryCoverage=96%, HitCoverage=22%, E-value=3e-29, Identity=73%"; Hit description=DNA binding protein
MYGSPVSKDLNLPVQPPMTSSGLLRYRSAPSTLLGEVCEDFLQPGPRAGSPDAGAADVFSRFLADHQIRDKPPAPAPAPHTHFPDTG

SEQ ID NO: 86108 - protein, 51 aa, Setaria italica
  Transcript Sequence Number=SeqID_20134
RAIHHLNATKQNILAQRTTEAHCQIRIISKTKSGTATYSKNPETTSKSSGD

SEQ ID NO: 86109 - protein, 73 aa, Setaria italica
  misc_feature (8)..(8): Xaa can be any naturally occurring amino acid
  Transcript Sequence Number=SeqID_20135
  Gene Ontology: Mol. function=oxidoreductase activity; Cellular component=mitochondrial respiratory chain; Biological process =respiratory gaseous exchange
  Homolog annotation: Hit_ID=Q66PX2; Match level="QueryCoverage=100%, HitCoverage=22%, E-value=9e-33, Identity=89%"; Hit description =Alternative oxidase
  Pfam annotation: Domain name=AOX; Domain location=1-73; Score=-126.1; E_value=8.5e-05; Accession=PF01786.9; Description=Alternative oxidase
FRPWRRTXADTSIDLTRHHEPKTMLDKIAYWTVKSLRFPTDVFFQRRYGCRAMMLETVAAVPGMVGGMLLHLR

SEQ ID NO: 86110 - protein, 137 aa, Setaria italica
  misc_feature (78)..(78): Xaa can be any naturally occurring amino acid
  Transcript Sequence Number=SeqID_20136
  Gene Ontology: Mol. function=metal ion binding
WASSDLQTIKTKKKMEKALELSGEKKSSEQVPGILSKDDKKVPLKLELLSGVRATSSVVEQEVHRIIRICRGRGYCAXQQSEGDHNAGLRSGITSSGAIKMQDMQDLQKQSNQTSNMQDVAGAPDLQIGQSKSQIMK

SEQ ID NO: 86111 - protein, 82 aa, Setaria italica
  Transcript Sequence Number=SeqID_20137
  Subcellular localization annotation: CTP_CleavageSite=47; ConfidenceScore=5.34e-01
MASQLGAYTGGNRRRGHCRRSAAAAAAKQLLSRLRSTWRQRSTARPRRAAVRSFGYDLHSYSQNFDDGLGSSCHMLSVIPTN

SEQ ID NO: 86112 - protein, 112 aa, Setaria italica
  Transcript Sequence Number=SeqID_20138
  Gene Ontology: Mol. function=acid phosphatase activity; Cellular component=plasma membrane
  Homolog annotation: Hit_ID=B6TV54; Match level="QueryCoverage=100%, HitCoverage=37%, E-value=3e-42, Identity=75%"; Hit description=Acid phosphatase 1
  Pfam annotation: Domain name=Acid_phosphat_B; Domain location=3-112; Score=-29.2; E_value=3.8e-05; Accession=PF03767.6; Description=HAD superfamily, subfamily IIIB (Acid
EPAVDDVPADVRCASWRLAAEANNLAPWKAVPAGCAAHVRDYIAGAAYRSDLDLIARESTTYARAAPLRGDGRDAWVFDIDETLLSNLPYYAEHGYGLELFDHQKFDRWVER

SEQ ID NO: 86113 - protein, 60 aa, Setaria italica
  Transcript Sequence Number=SeqID_20139
FLYLPAMLTFELSTTKAAKFQICHVELEPYRATRSQDFALLLSYHTLSAHVDFFGDCVNV

SEQ ID NO: 86114 - protein, 129 aa, Setaria italica
  Transcript Sequence Number=SeqID_20140
  Gene Ontology: Mol. function=two-component response regulator activity; Cellular component=endoplasmic reticulum membrane; Biological process=two-component signal transduction system (phosphorelay)
  Homolog annotation: Hit_ID=B9I5L7; Match level="QueryCoverage=96%, HitCoverage=16%, E-value=5e-38, Identity=58%"; Hit description =Ethylene receptor 6
ILGLVSVVQEEGLTSEQKLVIDTMARTATVVSTLINDVMEMSAVNQERFPLETRPFHLHSMIRDAACVARCLCDFRGFGFTVHVENTLPDLVIGDERRIFHVLLHMVGNLIGRINAGNVTFRSSLASMD

SEQ ID NO: 86115 - protein, 134 aa, Setaria italica
  Transcript Sequence Number=SeqID_20141
  Gene Ontology: Mol. function=hydrolase activity, hydrolyzing O -glycosyl compounds; Cellular component=extracellular region; Biological process=carbohydrate metabolic process
  Homolog annotation: Hit_ID=B4FYP4; Match level="QueryCoverage=96%, HitCoverage=31%, E-value=9e-34, Identity=66%"; Hit description =Glucan endo-1,3-beta-glucosidase 7
MGSGRMGIRRWLVSAATILVLLHVFLFHPATSQSFIGFNYGTIADNLPPAASTASLLMSTSIGKLHHYEPQPDLIAALAGSNISILLGIPNGDVPNLASSPAAANIPTMVTVSAISVGNELLKSGDPTLAPQLL

SEQ ID NO: 86116 - protein, 120 aa, Setaria italica
  Transcript Sequence Number=SeqID_20142
  Gene Ontology: Mol. function=hydrolase activity, hydrolyzing O -glycosyl compounds; Cellular component=extracellular region; Biological process=carbohydrate metabolic process
  Homolog annotation: Hit_ID=B4FYP4; Match level="QueryCoverage=95%, HitCoverage=26%, E-value=1e-33, Identity=70%"; Hit description =Glucan endo-1,3-beta-glucosidase 7
MHARSLFAASQSFIGVNYGTIADNLPPAASTASLLMSTSIGKLRLYEPQPDLVAALAGSNISILLGIPNGDVPNLASSPAAAASWAAANIPTTVTVSAISVGNELLNSGDPTLAPQLLPA

SEQ ID NO: 86117 - protein, 279 aa, Setaria italica
  Transcript Sequence Number=SeqID_20143
  Gene Ontology: Mol. function=pectinesterase activity; Cellular component=cell wall; Biological process=cell wall modification
  Homolog annotation: Hit_ID=Q53LI7; Match level="QueryCoverage=78%, HitCoverage=25%, E-value=2e-45, Identity=41%"; Hit description =Retrotransposon protein, putative, unclassified
NYYINSVLASIPINYMQNILFSRSFTEKINSILRRFWWQGVQVKDSSKPFYFRSWDDIYQPKCVGGLGIRNLYTVNKSLVLHSAWLIVSNKDPFLSSVLKAKYFPNTSFWRAACHGTRSAFWSSVMQVKYHLQEQCVVQIHQGNSNIWTDPWCENWENIHTHLKNPHIHRQLPNLVSDLWNQKQSSWNRILINSTFQHQAVDSILQVHKVSSSSVDQLCWKHSIQGTCSTKEVYKYLSIQNTHSLPSHGPSSISSAALSILIGSGIIKLCLASKLSVGD

SEQ ID NO: 86118 - protein, 75 aa, Setaria italica
  Transcript Sequence Number=SeqID_20144
  Subcellular localization annotation: CTP_CleavageSite=41; ConfidenceScore=5.03e-01
APMLLLIGVKAQPRSPRAMSHWRSWSGPVGNWDRGRRRRANETHKAEYNTGPVPSIRSTNSDVGYIQQFLQLKSP

SEQ ID NO: 86119 - protein, 64 aa, Setaria italica
  Transcript Sequence Number=SeqID_20145
FLHVRILIRCALPTNNGGYIIITTTRIFDVAKQVGGAYYKMPNLCLQNSRILLHRRIFGIEDKK

SEQ ID NO: 86120 - protein, 206 aa, Setaria italica
  misc_feature (124)..(124): Xaa can be any naturally occurring amino acid
  misc_feature (188)..(188): Xaa can be any naturally occurring amino acid
  Transcript Sequence Number=SeqID_20146
  Gene Ontology: Mol. function=chlorophyllase activity; Biological process=chlorophyll catabolic process
  Homolog annotation: Hit_ID=Q8LJZ8; Match level="QueryCoverage=97%, HitCoverage=22%, E-value=3e-45, Identity=50%"; Hit description =Putative Mla1
  Pfam annotation: Domain name=NB-ARC; Domain location=1-205; Score= -51.2; E_value=3.8e-06; Accession=PF00931.14; Description=NB-ARC domain
MLYQLGKKSNANIHESILDERLLVYELIEFLQKRRYFIVVDGIWDISVWKMIRCALPTNNGGYIIITTTRIFDVAKQVGGAYYKMPNLCLQNSRILLHRRIFGIEDKNKYIDEELIKVSEKIYXKCGGVPFAIIMISGLLATKGGNKKEWYKVCNSIGTTTKDSQDDENMKRILSLSYDDLPSHLRLXLLYLSVFPEGYENWQKIV

SEQ ID NO: 86121 - protein, 172 aa, Setaria italica
  Transcript Sequence Number=SeqID_20147
  Gene Ontology: Mol. function=calcium ion binding
  Homolog annotation: Hit_ID=B6T381; Match level="QueryCoverage=100%, HitCoverage=100%, E-value=4e-81, Identity=85%"; Hit description=EF hand family protein
  Pfam annotation: Domain name=efhand; Domain location=77-105; Score =29.8; E_value=1.1e-05; Accession=PF00036.24; Description=EF hand
MGQAWGSLHDKLQGRRWKERQVRKITDKVFDRLTEDAQKREKEALTFEEVYIAVLCVYNDINKYLPGPHHDPPSKEKLKAMMDEYDVNLDGLLDREEFAEFIRKLTADSLCSISLKLAITLVAAPALAMATKRATEGVPGVGKVVRKVPNALYASAITLGVVLVQKSTEGVE

SEQ ID NO: 86122 - protein, 120 aa, Setaria italica
  misc_feature (27)..(27): Xaa can be any naturally occurring amino acid
  Transcript Sequence Number=SeqID_20148
  Gene Ontology: Mol. function=phosphoinositide binding; Biological process=cell communication
  Homolog annotation: Hit_ID=Q2RAA5; Match level="QueryCoverage=71%, HitCoverage=9%, E-value=9e-13, Identity=41%"; Hit description=Phox domain-containing protein, putative, expressed
  Pfam annotation: Domain name=Nexin_C; Domain location=1-83; Score= -14.6; E_value=0.025; Accession=PF08628.4; Description=Sorting nexin C terminal
WPDGIFMTKHPNRKTSPPPSGEQNNGXGNYLSDEQRLEAARRANFVRELIIDKAPSPLVSLVGRKDYEKCAQDIYFFLQSPVCLKQLAFELLELLVLAAFPELDGTVRKWHEDKQRFGAQ

SEQ ID NO: 86123 - protein, 74 aa, Setaria italica
  misc_feature (63)..(63): Xaa can be any naturally occurring amino acid
  Transcript Sequence Number=SeqID_20149
NDLQLGTEGVKEKQHQLSDPCLTFIFVFFSIQSPVCLKQLAFELLELLVLAAFPELDGTVRKXWHEDKQRFGAQ

SEQ ID NO: 86124 - protein, 113 aa, Setaria italica
  Transcript Sequence Number=SeqID_20150
  Gene Ontology: Mol. function=catalytic activity
  Homolog annotation: Hit_ID=B9T359; Match level="QueryCoverage=99%, HitCoverage=23%, E-value=2e-25, Identity=50%"; Hit description =Carboxyphosphonoenolpyruvate mutase, putative
DARSTTEKPQEPVIDILPQLYDIGSSGRRGPSTGIWSRTLRLKITGRDGVQKIDTRIPAGFLEGMTRIIPGLAGANIMERLRNAPIDADNPQNGQILLDFEDAMGDRIQVFIA

SEQ ID NO: 86125 - protein, 75 aa, Setaria italica
  Transcript Sequence Number=SeqID_20151
KMQTTGGYACMSQILLGRRILGNKISYHLFNKHCSETCKLVNTSKTSCPQDPELKLFFLACTARTRKDADTHLVF

SEQ ID NO: 86126 - protein, 106 aa, Setaria italica
  Transcript Sequence Number=SeqID_20152
  Gene Ontology: Mol. function=calmodulin binding; Cellular component =integral to membrane; Biological process=cell death
  Homolog annotation: Hit_ID=Q6PT62; Match level="QueryCoverage=100%, HitCoverage=20%, E-value=6e-23, Identity=61%"; Hit description=Mlo3
MLNVVQGTMQKICVRRSVMHHLLPCPLPPSKLAKTTEHYGATVFTGVLGSTRRLLAGGGKNSDYCLNKGKVPILSTEAIHQLHIFIFVLAVTHVVLSAVTVILGAA

SEQ ID NO: 86127 - protein, 47 aa, Setaria italica
  Transcript Sequence Number=SeqID_20153
MKQNTEAITSYEMFDAVRVALGILLQMVVIATTTRLLQNMSPPRRAS

SEQ ID NO: 86128 - protein, 147 aa, Setaria italica
  Transcript Sequence Number=SeqID_20154
SYRHGRRLPGTRGVAEGRSRLARLILVQALHQVAGDALLLLSLSKGKEVNKFAALSAAAGLLAIVVGELGRRRTMAVLLRLYTSLSSIAVAFSVTCIIRSELFLKFMKQNTEAITSYEMFDAVRVALGILLQMVVIATTTRLLQNMS

SEQ ID NO: 86129 - protein, 154 aa, Setaria italica
  Transcript Sequence Number=SeqID_20155
  Pfam annotation: Domain name=DUF1352; Domain location=23-153; Score= -54.2; E_value=0.06; Accession=PF07086.4; Description=Protein of unknown function (DUF1352)
KYEDARVTERQRTRLSSLSPRRMATQRRGASGRPSGTDGSDFSYRMVVDSRYQRVAEGRSRLARLILVQALHQVAGDALLLLSLSKGKEVNKFAALSAAAGLLAIVVGELGRRRTMAVLLRLYTSLSSIAVAFSVTCIIRSELFLKVWAMKFKT

SEQ ID NO: 86130 - protein, 115 aa, Setaria italica
  misc_feature (99)..(99): Xaa can be any naturally occurring amino acid
  Transcript Sequence Number=SeqID_20156
  Gene Ontology: Mol. function=transporter activity; Cellular component= membrane; Biological process=transport
  Homolog annotation: Hit_ID=A8QP51; Match level="QueryCoverage=95%, HitCoverage=72%, E-value=1e-49, Identity=85%"; Hit description =Xanthine/uracil/vitamin C permease (Fragment)
SNLRFGAEFASIPDPIFAALYCIFFAYAGSAGLGFLQFCNLNSFRTKFILGFSVFMGLSVPQYFNEYTSVAGYGPVHTHSRWFNDIVNVLFSSKAFVAXFVAYLLDNTIHRHETL

SEQ ID NO: 86131 - protein, 360 aa, Setaria italica
  misc_feature (56)..(56): Xaa can be any naturally occurring amino acid
  misc_feature (65)..(65): Xaa can be any naturally occurring amino acid
  Transcript Sequence Number=SeqID_20157
  Gene Ontology: Mol. function=transporter activity; Cellular component= membrane; Biological process=transport
  Homolog annotation: Hit_ID=Q10BC0; Match level="QueryCoverage=84%, HitCoverage=79%, E-value=1e-134, Identity=77%"; Hit description =Permease I, putative, expressed
  Pfam annotation: Domain name=Xan_ur_permease; Domain location=83-360; Score=-80.0; E_value=4.6e-05; Accession=PF00860.12; Description =Permease family
RPHHHHSRTTPPPPPPLPPRARIAGRRERCPVWCDLGGAAGWPGGGGGGGGAAPEXDDLTPHPVXKDQLPGVSYCITSPPPWPEAVLLGFQHYLVMLGTTVIIPTALVPQMGGNNEDKAVVIQTLLFVAGINTLLQSFFGTRLPAVIGGSYTFVVPTISIILAGRYANEPNPHTKFLRIMRGTQGALIVASALQIIVGFSGLWRNVARYLSPLSAAPLVALVGFGLYELGFPSVAKCVEIGLPELILLVIFAMYLPHTVHMLKSIFDRFAVLFTIPIVWLYAYLLTVGGAYRNAPPKTQFHCRTDRSGLIGGAPWIRVPYPFQWGAPTFDAGEAFAMMAASFVALVESTGAFIAVSRYAR

SEQ ID NO: 86132 - protein, 62 aa, Setaria italica
  Transcript Sequence Number=SeqID_20158
  Subcellular localization annotation: CTP_CleavageSite=46; ConfidenceScore=5.04e-01
MSCFGAVAGTIPAAYYYSSSSGINGGGARGSRRPWRWWRTKCAGIAAAVGSRIRKSIKRIGP

SEQ ID NO: 86133 - protein, 96 aa, Setaria italica
  Transcript Sequence Number=SeqID_20159
KAESSAGGEIQIHGQLLFCIEASRLPRISLHAPLPALPFPSVLPRLVASLRPSPTSSSRAWAGSFRVNRCLTDRGQGQQGPEVSWFYSSFVSLKSP

SEQ ID NO: 86134 - protein, 260 aa, Setaria italica
  Transcript Sequence Number=SeqID_20160
  Gene Ontology: Mol. function=transcription regulator activity; Cellular component=nucleus; Biological process=regulation of transcription
  Homolog annotation: Hit_ID=B6SVP6; Match level="QueryCoverage=94%, HitCoverage=47%, E-value=1e-129, Identity=90%"; Hit description =Transcription factor BIM2
  Pfam annotation: Domain name=HLH; Domain location=36-86; Score=66.4; E_value=1.1e-16; Accession=PF00010.18; Description=Helix-loop-helix DNA-binding domain
MDGVCVNIISSSLTVRMDRKGGSCSDGGTDQRPNTPRSKHSATEQRRRSKINDRFQILRELLPHSDQKRDKATFLLEVIEYIRFLQEKVTKYEATFPEWNQENAKMLPWSNMYFRSFWKNEQSKGQIPGESLPDPSHFMRNGSSPGSNFTGKLDDNHNMVTSAAASGAQDQTETDPMASMCFRSAETPANITNNTLSQSQPQWTGPSPVDDCAVNSEMLNNQPLAINEGTISVSSQYSQELLNSLTHALQSSGIDLSLSP

SEQ ID NO: 86135 - protein, 161 aa, Setaria italica
  misc_feature (119)..(119): Xaa can be any naturally occurring amino acid
  Transcript Sequence Number=SeqID_20161
  Gene Ontology: Mol. function=transcription regulator activity; Cellular component=nucleus; Biological process=regulation of transcription
  Homolog annotation: Hit_ID=B6SVP6; Match level="QueryCoverage=96%, HitCoverage=32%, E-value=2e-62, Identity=74%"; Hit description =Transcription factor BIM2
RDKATFLLEVIEYIRFLQEKVTKYEATFPEWNQENAKMLPWSKGQIPGESLPDPSHFMRNGSSPGSNFTGKLDDNHNMVTSAAASGAQDQTETDPMASMCFRSAETPANITSMVNDPLXSCIILRGPSPVDDCAVNSEMLNNQPLAINEGTISVSSQGFPR

SEQ ID NO: 86136 - protein, 350 aa, Setaria italica
  misc_feature (195)..(195): Xaa can be any naturally occurring amino acid
  Transcript Sequence Number=SeqID_20162
  Gene Ontology: Mol. function=transcription regulator activity; Cellular component=nucleus; Biological process=regulation of transcription
  Homolog annotation: Hit_ID=B6SVP6; Match level="QueryCoverage=95%, HitCoverage=62%, E-value=1e-139, Identity=73%"; Hit description =Transcription factor BIM2
  Pfam annotation: Domain name=HLH; Domain location=47-97; Score=66.4; E_value=1.1e-16; Accession=PF00010.18; Description=Helix-loop-helix DNA-binding domain
RSSGGAGFDDDDGLAARREVSSSLKVRMDRKGGSCSDGGTDQRPNTPRSKHSATEQRRRSKINDRFQILRELLPHSDQKRDKATFLLEVIEYIRFLQEKVTKYEATFPEWNQENAKMLPWSKGQIPGESLPDPSHFMRNGSSPGSNFTGKLDDNHNMVTSAAASGAQDQTETDPMASMCFRSAETPANINKYGQXSTSDPALSPRCFLRLEAARVTDESAKNTNNTLSQSQPQWTGPSPVDDCAVNSEMLNNQPLAINEGTISVSSQYSQELLNSLTHALQSSGVDLSQASISVQINLGKRAVKRPAAGVSCKEPTDPASSDEIGQQLAMLGGGAEDLSQAAKRHKPGNS

SEQ ID NO: 86137 - protein, 165 aa, Setaria italica
  misc_feature (131)..(131): Xaa can be any naturally occurring amino acid
  misc_feature (138)..(138): Xaa can be any naturally occurring amino acid
  Transcript Sequence Number=SeqID_20163
  Gene Ontology: Mol. function=diacylglycerol kinase activity; Biological process=activation of protein kinase C activity
  Homolog annotation: Hit_ID=B9R9I2; Match level="QueryCoverage=98%, HitCoverage=61%, E-value=3e-45, Identity=36%"; Hit description =Pentatricopeptide repeat-containing protein, putative
  Pfam annotation: Domain name=PPR; Domain location=16-50; Score=39.4; E_value=1.4e-08; Accession=PF01535.12; Description=PPR repeat
  Pfam annotation: Domain name=PPR; Domain location=51-85; Score=1.1; E_ value=6.6; Accession=PF01535.12; Description=PPR repeat
  Pfam annotation: Domain name=PPR; Domain location=87-121; Score=8.8; E_value=0.82; Accession=PF01535.12; Description=PPR repeat
  Pfam module annotation: Pfam domain module=PPR::PPR::PPR; Domain location=16-50::51-85::87-121
DSAVEAFESMPVKNSWTWTALIKGMASNGRGREALELFSSMRKASIEPTYVTFIGVLMACSHNCLVEEGCQHFDSMTQDYGIQPRIEHYGCVVDLLGRAGLIDEAYQFIRAMPIEPNTVIWRALLSSCALXKNVEVGXEALKQIISLDPSHSGDYILLSNIYASV

SEQ ID NO: 86138 - protein, 77 aa, Setaria italica
  Transcript Sequence Number=SeqID_20164
LSLVESCIDFSCLDCKNTDCIIALKILLVVGMGVILSNNALCNQARSHLWLWISDIVSSIGSVMYGRAMYLFGSRIA

SEQ ID NO: 86139 - protein, 201 aa, Setaria italica
  Transcript Sequence Number=SeqID_20165
  Homolog annotation: Hit_ID=O04546; Match level="QueryCoverage=59%, HitCoverage=35%, E-value=3e-19, Identity=41%"; Hit description =F20P5.28 protein
MANKATAATSWRWRLLLLLLVTVAALCWIPPAIAAAAAAAAASTANGARRSLLGFVEAQGNASYQCTPSGPCIPCQYSEKNDEKYSCSETGYRLPLKCVQAQNVTKEGNKGKQRKILDDASTSGGTKSTSGGTKSTSGGPKYYITYRSCVPLEGEEKLSVLGFEVIMAGMLLVSGPFVYYRKRRTNIMQGAARIPTSPPRF

SEQ ID NO: 86140 - protein, 96 aa, Setaria italica
  Transcript Sequence Number=SeqID_20166
  Subcellular localization annotation: CTP_CleavageSite=63; ConfidenceScore=5.85e-01
QRTTRPPAAPRPTTTRTTRRCRRRRWTPTPRTSARPSRLRPWRERRTSTKSSSSSSRPASTSRLDSDRSRPWPQRARRRHPPSPAGAPPTSQGSWA

SEQ ID NO: 86141 - protein, 176 aa, Setaria italica
  Transcript Sequence Number=SeqID_20167
  Gene Ontology: Mol. function=translation initiation factor activity; Cellular component=eukaryotic translation initiation factor 3 complex; Biological process=translational initiation
  Homolog annotation: Hit_ID=A8WDL4; Match level="QueryCoverage=100%, HitCoverage=50%, E-value=6e-56, Identity=62%"; Hit description =Eukaryotic translation initiation factor 3c (Fragment)
  Pfam annotation: Domain name=eIF-3c_N; Domain location=1-176; Score= -330.1; E_value=0.00096; Accession=PF05470.4; Description=Eukaryotic translation initiation factor 3 s
EKETCNGADYGGTIHVSGDLAAFLERLDSEYFKSLQYTEPHTKDYVQRLQDEPLFMVVSQNVQGYLERVGNFRASAKVALHQVELIYYKPQEVYDAMRNLAEQAENEDRDAKAIDGCIRPTPFVVIPEVVPRRPIFPPSSRTLMDGLTSIIYKYGDERTKARAMLCDVYHHAISDE

SEQ ID NO: 86142 - protein, 90 aa, Setaria italica
  Transcript Sequence Number=SeqID_20168
WELQFRNKLVSVAEQLKAPVSFAWVSLVCTVCPGCLEPPIGKRAAREGRGPVLSKCRLVVRSCVVTHRRIRLFVTFGSSVCYLWVIKGCS

SEQ ID NO: 86143 - protein, 307 aa, Setaria italica
  Transcript Sequence Number=SeqID_20169
  Gene Ontology: Mol. function=1-(5-phosphoribosyl)-5-[(5 -phosphoribosylamino)methylideneamino]imidazole-4-carboxamide isomerase activity; Cellular component=chloroplast; Biological process=amino acid biosynthetic process
  Homolog annotation: Hit_ID=B6TRF8; Match level="QueryCoverage=94%, HitCoverage=94%, E-value=1e-151, Identity=89%"; Hit description=1-(5- phosphoribosyl)-5-[(5- phosphoribosylamino)methylideneamino]imi dazole-4-carboxamide isomerase
  Pfam annotation: Domain name=His_biosynth; Domain location=49-290; Score=45.0; E_value=7.7e-13; Accession=PF00977.13; Description =Histidine biosynthesis protein
  Subcellular localization annotation: CTP_CleavageSite=33; ConfidenceScore=5.33e-01
MASRCPARVPSPRSAPRHGWAGSRVSARPSKCRASGGRSVICAAVSFRPCIDIHKGKVKQIVGSTLRDSSNDGTALVTNFESDKSAAEFAKLYKEDELVGGHVIMLGADPASQASSLEALRAYPGGLQVGGGINLENAMLYLNEGASHVIVTSYVFSDGKMNIERLRKLVELVGKQRLVLDLSCRKKDGRYTIVTDRWQKFSDVFVDEPTLEYLAAYADEFLVHGVDVEGKRLGIDEELVELLGRHSPIPVTYAGGVSTMDDLERIKKAGKSRVDVTVGSALDIFGGDLPYKDVVLWHKKQSLVGQL

SEQ ID NO: 86144 - protein, 257 aa, Setaria italica
  misc_feature (151)..(151): Xaa can be any naturally occurring amino acid
  misc_feature (232)..(232): Xaa can be any naturally occurring amino acid
  misc_feature (249)..(249): Xaa can be any naturally occurring amino acid
  Transcript Sequence Number=SeqID_20170
  Gene Ontology: Mol. function=nucleic acid binding; Cellular component= ribonucleoprotein complex
  Homolog annotation: Hit_ID=Q9LPP3; Match level="QueryCoverage=91%, HitCoverage=43%, E-value=1e-79, Identity=61%"; Hit description =F18K10.11 protein
EKYSRGKGADLKALKDKKLKGQLVVKEKLYGQSAKAAAKAEQWLMPSEEGFLEPDDGLEKTYRFPQESIVKEVDLLSSRKPFDMILPVLGPYTIEYTSNGRYMLVGGRKGHLAMMDMLHIDLIKEFQVRETVRDVAFLHNEQLYAVAQKKXYPYIYNRHGTEIHCLKEHGKALKLQFLTKQFLLASINSFGQLHYQDVSTGEMVANYRTGLGRTDVMRVNSYNAVIGLGHAXGGKVTMWKPTSVKPLVXTMLCHHGP

SEQ ID NO: 86145 - protein, 215 aa, Setaria italica
  misc_feature (147)..(147): Xaa can be any naturally occurring amino acid
  Transcript Sequence Number=SeqID_20171
  Gene Ontology: Mol. function=phosphoprotein phosphatase activity; Biological process=actin cytoskeleton organization and biogenesis
  Homolog annotation: Hit_ID=Q6ZCX3; Match level="QueryCoverage=93%, HitCoverage=12%, E-value=4e-71, Identity=73%"; Hit description =Formin-like protein 6
SEKLPKLLDFPKDLASLELAAKIQLKSLAEEMQAVNKGLEKVEQELTTSENDGPVSEIFCKTLKDFLIGAEAEVRSLTSLYSNVGRNADALALSFGEDPARCPFEQVVTTLQNFVRLFTRSHEENCKQLDLEKKKALKEAEENSKQXGPGKEKAQKEAETDKTKNKSDNVEGCKKESENDKASIKESADEKAKLNNSIKELDISLQSPAQTASAK

SEQ ID NO: 86146 - protein, 208 aa, Setaria italica
  Transcript Sequence Number=SeqID_20172
  Gene Ontology: Mol. function=glycolipid transporter activity; Cellular component=cytoplasm; Biological process=glycolipid transport
  Homolog annotation: Hit_ID=Q01LK5; Match level="QueryCoverage=94%, HitCoverage=96%, E-value=7e-21, Identity=28%"; Hit description =OSIGBa0130K07.2 protein
  Pfam annotation: Domain name=GLTP; Domain location=32-174; Score =119.5; E_value=1.1e-32; Accession=PF08718.3; Description=Glycolipid transfer protein (GLTP)
AVVAARQGMETPLKEVAEAFEELARGMDADAGELRLAPFGDTCALVSVLFSSLGMAFRFAEIEYVTKVNDLIGAGKSYRTLSDILDKDIENDSVKKQGSHSRNLRRVRLGLGLIKALFEQFLTTEGCSLYDAATTAYGQVCAPFHSWAIRKAVGAGMYTLPSREQLIVRLNETDCSVQKEMRRYIDASSPIIEYIDNLFLSRNISLDW

SEQ ID NO: 86147 - protein, 115 aa, Setaria italica
  Transcript Sequence Number=SeqID_20173
  Gene Ontology: Mol. function=protein dimerization activity; Cellular component=nucleus; Biological process=regulation of transcription, DNA-dependent
  Homolog annotation: Hit_ID=B6TDX3; Match level="QueryCoverage=86%, HitCoverage=26%, E-value=2e-35, Identity=80%"; Hit description =Transcription factor HBP-1a
  Pfam annotation: Domain name=bZIP_1; Domain location=18-81; Score =91.0; E_value=4.3e-24; Accession=PF00170.13; Description=bZIP transcription factor
  Pfam annotation: Domain name=bZIP_2; Domain location=18-72; Score =32.9; E_value=1.3e-06; Accession=PF07716.7; Description=Basic region leucine zipper
  Pfam module annotation: Pfam domain module=bZIP_1::bZIP_2; Domain location=18-81::18-72
MGSKFETSYVDYLLVQDERELKRQRRKQSNRESARRSRLRKQAECEELAQRADVLKQENSSLRDEVNRIRKEYEELLSKNNSLKEKLEGKQHKTDEAGFNNKLQHSGDDSQKKGN

SEQ ID NO: 86148 - protein, 384 aa, Setaria italica
  Transcript Sequence Number=SeqID_20174
  Gene Ontology: Mol. function=protein dimerization activity; Cellular component=nucleus; Biological process=regulation of transcription, DNA-dependent
  Homolog annotation: Hit_ID=B6TDX3; Match level="QueryCoverage=100%, HitCoverage=100%, E-value=1e-127, Identity=64%"; Hit description =Transcription factor HBP-1a
  Pfam annotation: Domain name=MFMR; Domain location=1-197; Score =338.9; E_value=1e-98; Accession=PF07777.3; Description=G-box binding protein MFMR
  Pfam annotation: Domain name=bZIP_1; Domain location=287-350; Score =91.0; E_value=4.3e-24; Accession=PF00170.13; Description=bZIP transcription factor
  Pfam annotation: Domain name=bZIP_2; Domain location=287-341; Score =32.9; E_value=1.3e-06; Accession=PF07716.7; Description=Basic region leucine zipper
  Pfam module annotation: Pfam domain module=MFMR::bZIP_1::bZIP_2; Domain location=1-197::287-350::287-341
  Subcellular localization annotation: CTP_CleavageSite=57; ConfidenceScore=5.21e-01
MGSSGADTPSKTTKASAPQEQQPPATSGAATPAVYPDWSSFQAYPPIPPHGFFPSPVASSPQGHPYMWGAQPMIPPYGTPPPPYVMYPPGVYAHPSMPPGAHPFTPYALTSPNGNADAPGTAAAAGDTDGKPSEGKDKSPTKRSKGSLGSLNMLTGKNPTEHGKTSGASANGATSQSGDSGSESTSEGSEGNSQNDSHHKESGQEQDGDVRSSQNGASRSPSEGKLNQTMAIMPMPSSGPVGPTTNLNIGMDYWANTASSTPAIHGKVTPTTGTGAVVPAEQWIQDERELKRQRRKQSNRESARRSRLRKQAECEELAQRADVLKQENSSLRDEVNRIRKEYEELLSKNNSLKEKLEGKQHKTDEAGFNNKLQHSGDDSQKKGN

SEQ ID NO: 86149 - protein, 98 aa, Setaria italica
  misc_feature (30)..(30): Xaa can be any naturally occurring amino acid
  Transcript Sequence Number=SeqID_20175
LCAAIRLLERAGAEVVECACLIGLPKFKVXYCWTHNYLEYRQAKSPVYCSILLMKRFSQWHCNVFPPTQITIRFGFSRCVAFIMHLDMYLSQNESNLG

SEQ ID NO: 86150 - protein, 172 aa, Setaria italica
  Transcript Sequence Number=SeqID_20176
  Gene Ontology: Mol. function=transferase activity, transferring glycosyl groups; Cellular component=cytoplasm; Biological process =nucleoside metabolic process
  Homolog annotation: Hit_ID=Q7X723; Match level="QueryCoverage=65%, HitCoverage=26%, E-value=7e-46, Identity=79%"; Hit description =OSJNBa0014K14.11 protein
  Pfam annotation: Domain name=Pribosyltran; Domain location=3-109; Score=109.4; E_value=1.2e-29; Accession=PF00156.19; Description =Phosphoribosyl transferase domain
PNLGPQSPTTCRARSSTTRGFIFGPAIALAIGAKFIPLRKPRKLPGEVISEKYVLEYGTDCLEMHVGAIEPAEHVIIVDDLVATGGTLCAAIRLLERAGAEVVECACLIGLPKFKVLLLDSQLSGVQTGKITCLLQYFAYETFQSVALISTSSMESLSMYWWSPVNLINKNE

SEQ ID NO: 86151 - protein, 69 aa, Setaria italica
  Transcript Sequence Number=SeqID_20177
NLKQQKCMFYCKLLMSPVTEIELDQLTSRSEWLLLLACYSLQMSQLLFILKPYRIAILKPWYKMQDCRQ

SEQ ID NO: 86152 - protein, 176 aa, Setaria italica
  Transcript Sequence Number=SeqID_20178
  Gene Ontology: Mol. function=transferase activity, transferring glycosyl groups; Cellular component=cytoplasm; Biological process =nucleoside metabolic process
  Homolog annotation: Hit_ID=B6TGM2; Match level="QueryCoverage=100%, HitCoverage=80%, E-value=2e-88, Identity=93%"; Hit description =Adenine phosphoribosyltransferase 2
  Pfam annotation: Domain name=Pribosyltran; Domain location=25-149; Score=161.1; E_value=3.2e-45; Accession=PF00156.19; Description =Phosphoribosyl transferase domain
LQGISDAIRVVPHFPKEGIMFNDITTLLLRPGVFKDAVDLFVERYRGMGIDAVAGIEARGFIFGPAIALAIGAKFIPLRKPRKLPGEVISEKYVLEYGTDCLEMHVGAIEPAEHVIIVDDLVATGGTLCAAIRLLERAGAEVVECACLIGLPKFKNFYKLNGKPVYVLVESRESDK

SEQ ID NO: 86153 - protein, 226 aa, Setaria italica
  Transcript Sequence Number=SeqID_20179
  Gene Ontology: Mol. function=structural constituent of ribosome; Cellular component=ribonucleoprotein complex; Biological process =translation
  Homolog annotation: Hit_ID=B6T4J1; Match level="QueryCoverage=100%, HitCoverage=100%, E-value=1e-120, Identity=93%"; Hit description=50S ribosomal protein L6
  Pfam annotation: Domain name=Ribosomal_L6; Domain location=136-211; Score=112.7; E_value=1.2e-30; Accession=PF00347.15; Description =Ribosomal protein L6
  Pfam annotation: Domain name=Ribosomal_L6; Domain location=56-128; Score=67.7; E_value=4.2e-17; Accession=PF00347.15; Description =Ribosomal protein L6
  Pfam module annotation: Pfam domain module=Ribosomal_L6::Ribosomal _L6; Domain location=136-211::56-128
  Subcellular localization annotation: CTP_CleavageSite=45; ConfidenceScore=5.31e-01
MASLSPSLHLPCNSRTGFLGKTQGIRPRVIPAGRVGFVRTVVECKESRIGKKPIDVPSNVTLTLEEQFVKAKGPLGELSLSYPGEVKVVKEESGKLRLYKTAETKRANQMHGLFRTLTDNIIIGVSKGFDKKLQLVGVGYRAAVEGNDLVMNLGFSHPVRMAVPEGLQVKVEENTRIIVSGYDKSAIGQFAATIKKWRPPEPYKGKGIRYADEVVRRKEGKAGKKK

SEQ ID NO: 86154 - protein, 372 aa, Setaria italica
  Transcript Sequence Number=SeqID_20180
  Gene Ontology: Mol. function=sugar binding
  Homolog annotation: Hit_ID=B6STP1; Match level="QueryCoverage=84%, HitCoverage=80%, E-value=4e-41, Identity=48%"; Hit description =Stress responsive protein
MSNFWWHRGWSPLGGPCGEQQPTFKVFCKAYEGRCLAVRDGALALLPADPADEQQHWFKDTRFSLGVKDKEGKPVFSLVNKATGLAVQHSLGPYRPVRLVKFNPEDFDESVLWTESGHLGRDFGCIRMMHDVCFRLDAFTIDDEGEYHDGTTLVLSDLAGGDTRSWKILYWNDEANTTLAGLEAEPTCRIYCKADESFSVTICDGAVCLAPTDPNDVYQHWIQDKRPGNMIKDQDGYPVFALVNRVTGDAIRGSERDGRSTKLVPYNPFYFDVSVLWTTSWDMGQGFRCIQMVDNIFLKFDTFHGDDTSVVLSHWREGDNLQWKIVPWCLVVEDLESQSWRSSCPKDQRSRMEKRSRRLRRKRMEQSCHWTC

SEQ ID NO: 86155 - protein, 72 aa, Setaria italica
  Transcript Sequence Number=SeqID_20181
GYAAPGHGHRLLPRLPAQRREWKYVTSGQQVDGQRSWSSVPEWLASTVAVVNRAGVQPPLRRPAAGGGLKKF

SEQ ID NO: 86156 - protein, 71 aa, Setaria italica
  Transcript Sequence Number=SeqID_20182
METKTSSSSGGGGAAAGTEQRRAGLVEVQAAAAALRRSEVFHVVKELVGFVLYMHHQIPSVLQSLEDEFDK

SEQ ID NO: 86157 - protein, 251 aa, Setaria italica
  Transcript Sequence Number=SeqID_20183
  Homolog annotation: Hit_ID=Q9ZVS0; Match level="QueryCoverage=82%, HitCoverage=76%, E-value=4e-48, Identity=49%"; Hit description =F15k9.21
NFFIIHVVKELVGFVLYMHHQIPSVLQSLEDEFASLKEEMTEMTLQPAELKPSDQRKYNTRKREVRRRIKKHEKLMKGISILLCALQQALDEVSSIEGVVLILGGSLVRPLFVYDITISHGTFDSGSAKDHALTKLAQSVSRKAIRALVSCGAGSLSYTGPSKLFLLVRCPSTLNLPLDFLPKRDFRYSKKVVPLQMHIKCSKADCQGNNQHRMSIADAPCSTSESFLSDSIWFQCKHTIRGLPGKASLEG

SEQ ID NO: 86158 - protein, 68 aa, Setaria italica
  Transcript Sequence Number=SeqID_20184
  Pfam annotation: Domain name=PPI_Ypi1; Domain location=1-31; Score =15.9; E_value=3.9e-05; Accession=PF07491.3; Description=Protein phosphatase inhibitor
VDNEGLGRKSSKKCCIFHKEVPFDEDCSDDEFPGGGGGHRCPQGDAGEGTSGSGRCSSSSHDHSHHHH

SEQ ID NO: 86159 - protein, 118 aa, Setaria italica
  Transcript Sequence Number=SeqID_20185
  Gene Ontology: Mol. function=nucleic acid binding; Biological process= metabolic process
  Homolog annotation: Hit_ID=Q2QY22; Match level="QueryCoverage=77%, HitCoverage=36%, E-value=4e-22, Identity=58%"; Hit description =Phosphoglycerate mutase family protein
MMYFTLKSLSTLVFMFQGGGESLNQLTERCVSYLNKIAQEHIGERVVVVSHGAAILEMSWHTDPPNSPIRRNIPNTSLNVFRVSSVTGHWILERCGDVSHLNGNGFLENSFGGNGASA

SEQ ID NO: 86160 - protein, 309 aa, Setaria italica
  Transcript Sequence Number=SeqID_20186
  Gene Ontology: Mol. function=nucleic acid binding; Biological process= metabolic process
  Homolog annotation: Hit_ID=Q2QY23; Match level="QueryCoverage=64%, HitCoverage=12%, E-value=1e-91, Identity=80%"; Hit description =Cytochrome P450 family protein
  Pfam annotation: Domain name=PGAM; Domain location=83-249; Score =142.3; E_value=1.5e-39; Accession=PF00300.14; Description =Phosphoglycerate mutase family
  Subcellular localization annotation: CTP_CleavageSite=18; ConfidenceScore=5.30e-01
MLVVVNPSVPPQHPTRPPASGRRSGQRQRGRAGFLEAAVDPGGISGRYPPYPLRLRLAGAGAATTYGAMSPTPAPGGGEEFTEVVVVRHGETSWNASRIVQGQMDPELNEIGRQQAVVVARRLSKEAKPAAIYSSDLKRASETAEIIAKVCDVSNLVLNEALRERHMGYLQGLKWDDAVNKNPDVFRGFDIFKITEGSDPDSRNQEIPGGGESLNQLTERCVSYLNKVAQEHKGERVVVVSHGAAILELCRHTDPPNSSIRRNIPNTSLNVFRVSGVTGRWILERCGDVSHLNGNGFLENSFGGDGASA

SEQ ID NO: 86161 - protein, 158 aa, Setaria italica
  Transcript Sequence Number=SeqID_20187
VGALPQLLVEGHVAEGPAKVHTTIMATHGANEAREIGALRHHSTTRILVSTITPLLSLLPNTAPWKPGDWLPLALPGHALRSAAANRSRPGREPRGSGDPEVARSGEKDAQGEQVPTRRRDDGEAPLAAGPSRQAGAGAGARRPVGGGGLAGAGSGRG

SEQ ID NO: 86162 - protein, 95 aa, Setaria italica
  Transcript Sequence Number=SeqID_20188
  Gene Ontology: Mol. function=ion channel activity; Cellular component= voltage-gated potassium channel complex; Biological process=potassium ion transport
  Homolog annotation: Hit_ID=B9SZD2; Match level="QueryCoverage=98%, HitCoverage=18%, E-value=6e-17, Identity=47%"; Hit description =Protein binding protein, putative
LRGFSVSLASTLSPASEPFPTAFAPHHDGSLCLAHGAGQVTYYSPALDHLSTFRTHLHRITSLQQLPPGLVVLGSASAPGLHVYDYLEGRHVASV

SEQ ID NO: 86163 - protein, 137 aa, Setaria italica
  misc_feature (20)..(20): Xaa can be any naturally occurring amino acid
  Transcript Sequence Number=SeqID_20189
MAAVAEAEADLGPQLGRSPXTPDIVRKPAQASWTSGADGSCCTALFTSAATALAAGPGKAESDGFTSVPSPVQEQSQSVPKDLGEVDCAQVSTQESSTLPPLVGKFSDKIAQQEQQQQQEEGVASGSDAGGAAPVPI

SEQ ID NO: 86164 - protein, 174 aa, Setaria italica
  misc_feature (94)..(94): Xaa can be any naturally occurring amino acid
  Transcript Sequence Number=SeqID_20190
  Gene Ontology: Mol. function=nucleotide binding; Cellular component =chromatin; Biological process=defense response
  Homolog annotation: Hit_ID=Q84KC4; Match level="QueryCoverage=91%, HitCoverage=16%, E-value=3e-20, Identity=38%"; Hit description=NBS -LRR disease resistance protein homologue (Fragment)
WATSSGDIGYTGPLSQLPHDIVHLPALSYLKVVMSIAYPDGISKMKSLRTLKQFDASKQSVDNLRALGELLNLRELHMCITDPQMETQNDALFXSIQKLINGNLRHFTVNAHHEADGHYDEFHDGWNSLCWSDCRLEQLHLKFQFPRLPMWVGQLSTVSNLDIRVDKLSKDDIS

SEQ ID NO: 86165 - protein, 136 aa, Setaria italica
  Transcript Sequence Number=SeqID_20191
  Gene Ontology: Mol. function=nucleotide binding; Biological process =defense response
  Homolog annotation: Hit_ID=Q84KC4; Match level="QueryCoverage=100%, HitCoverage=13%, E-value=2e-39, Identity=57%"; Hit description=NBS -LRR disease resistance protein homologue (Fragment)
VGIDGPKEEVINLLEKQVDNASVQELRVVSIVGFGGLGKTTLANEVYNKLGKSFACKAFVSVSQRPDMVVLLKSLVTQILGPGTDICEVNGLIDNLRKYLQDKRYLVVVDDLWDASAWEIIKCAFPEGHYGSKVLT

SEQ ID NO: 86166 - protein, 891 aa, Setaria italica
  misc_feature (603)..(603): Xaa can be any naturally occurring amino acid
  Transcript Sequence Number=SeqID_20192
  Gene Ontology: Mol. function=nucleotide binding; Biological process =defense response
  Homolog annotation: Hit_ID=Q84KC4; Match level="QueryCoverage=99%, HitCoverage=90%, E-value=0.0, Identity=46%"; Hit description=NBS-LRR disease resistance protein homologue (Fragment)
  Pfam annotation: Domain name=NB-ARC; Domain location=165-455; Score =199.4; E_value=9.5e-57; Accession=PF00931.14; Description=NB-ARC domain
MAEKILVSASVGVMNSLLGKLATLMGEKYAKLKDVRKQVAFLHEELSSMAALLEDLADMEDLDNQTMQWRNKVREMSYDIEDCIDEFMHRVGGSCDGKGLLRRLKTLRARHQLANQIQELKIRVQEASARRMRYKLDDCKTRSGGVAVDPRISALYVESSRLVGIDGPKEEVINLLEKQVDDASVQELRVVSIVGFGGLGKTTLANEVYNKLGKSFACKAFVSVSQRPDMVVLLKSLVSQILGRGTDICEVNGLIDSLRKYLQDKRHALVVVDDLWDASAWEIIKCAFPEGHYGSKVLTTTRIKRVAVTCCNFQWEFVYRMKHLDDHSSRQLFYGRVFGLENTCPHPFEEPSEKILQKCGGLPLAIISVASLLASQSNRSVSQWNCVLNSLRSDLRSNPTLQGMRQILNLSYTHLPHHLRTCLLYIGMYPEDHDIEKDHLVMQWVAEGFVCGIDGRDALEIAGSYFNELVNRSMIIQVVEYRALNTERIYHKVHDMVLDLIVSKSAEENFLCVVENIETITSRQHCKTRRLSLQLGEAELDKIAPRMSLTHVRSLCIFGSRHRSIELLELKFIRVLFVCKVDGLDLTPIGKLFQLRYLNVQSXTALYRAWKQLPKQICGLHHLETLVINGWLSQLPHDIVHLPALSYLKVSARKAYPDGISKMKSLHTLDGFDVSMQSVNNLRALGELLNLRKLYMRLISGNLLTMETQMDALFYSIQKLLNGNLRHFTVSTCLTTSPGSFYDWWNSLCWSDCRLEQLHLQYQFPRLPMWVGQLSTVSNLEIDVAELCKDDISVLAGLPALARLVLWAGYVPDEGIVFSSSAAFRSLYYFESRRPGHSFHFQAGAVPRVETLRFGLRVLEVKTSGIRLAGVEHLTNLKRVAICLWCNRSEE

SEQ ID NO: 86167 - protein, 55 aa, Setaria italica
  Transcript Sequence Number=SeqID_20193
  Gene Ontology: Mol. function=translation initiation factor activity
  Homolog annotation: Hit_ID=B6SN22; Match level="QueryCoverage=96%, HitCoverage=29%, E-value=5e-12, Identity=62%"; Hit description=GTP binding protein
MTAKVHPNVAVPTLGQQPAAAPADEEPVTLTVWRKSLLFNCRGFTVFDASGNLVY

SEQ ID NO: 86168 - protein, 91 aa, Setaria italica
  Transcript Sequence Number=SeqID_20194
  Homolog annotation: Hit_ID=B6TD00; Match level="QueryCoverage=80%, HitCoverage=15%, E-value=8e-16, Identity=60%"; Hit description=Fas -associated factor 1-like protein
MAETVDDKVSYFQAVTGISDPDLCTEILAAHNWDLQVAVSSITANPSSPSASASTSSREPAPSAPLADAEFVAPPPPMPPPPQQQQQQQQH

SEQ ID NO: 86169 - protein, 65 aa, Setaria italica
  Transcript Sequence Number=SeqID_20195
  Gene Ontology: Mol. function=peptidase activity; Biological process =lipid transport
  Homolog annotation: Hit_ID=B6TKN6; Match level="QueryCoverage=72%, HitCoverage=49%, E-value=2e-12, Identity=74%"; Hit description =Nonspecific lipid-transfer protein
  Pfam annotation: Domain name=Tryp_alpha_amyl; Domain location=1-65; Score=28.2; E_value=3.3e-05; Accession=PF00234.14; Description =Protease inhibitorseed storageLTP f
CRRPVVFYSVAIIGPYGRTAPCCASLRSQEPCFCQYAHNPAYSRYINSPAARSALTSCGITIPSC

SEQ ID NO: 86170 - protein, 162 aa, Setaria italica
  Transcript Sequence Number=SeqID_20196
AVATAATKPLELDPAPADEAPTAPSCASEPAAAPSPKERYTAYYRDPCRVGCCDDAGDEYARGDDDREDEAEEHDDDDDAGAYRTRSKTTTGPFGWDEVVRSLPLSLSPSAAKVEMGLGPYRSPTALGGSVVQLWDQVAGGGLTPTSSPRWRNRVAAAAPGF

SEQ ID NO: 86171 - protein, 69 aa, Setaria italica
  Transcript Sequence Number=SeqID_20197
  Gene Ontology: Mol. function=protein serine/threonine kinase activity; Cellular component=cytoplasm; Biological process=protein amino acid phosphorylation
  Homolog annotation: Hit_ID=B9SDF7; Match level="QueryCoverage=97%, HitCoverage=7%, E-value=4e-22, Identity=67%"; Hit description=ATP binding protein, putative
DTETNDYVAVKVIKNQPAFYHQAIMEVSLLRTLNQKFDPDDKHNIVRMLDYLSFQNHLCIAFEMLGQNL

SEQ ID NO: 86172 - protein, 82 aa, Setaria italica
  Transcript Sequence Number=SeqID_20198
  Gene Ontology: Mol. function=protein serine/threonine kinase activity; Cellular component=cytosol; Biological process=protein amino acid phosphorylation
  Homolog annotation: Hit_ID=Q9FGC1; Match level="QueryCoverage=98%, HitCoverage=10%, E-value=3e-18, Identity=55%"; Hit description =Protein kinase-like
YFPRLKLDRLIYTYPWNNSELTETEKTDRLALVDFLKGLLEFDPNKRWSPVQALFHPFITGEPFTGPYEPVPETARIPVARA

SEQ ID NO: 86173 - protein, 61 aa, Setaria italica
  misc_feature (43)..(43): Xaa can be any naturally occurring amino acid
  Transcript Sequence Number=SeqID_20199
  Gene Ontology: Mol. function=protein serine/threonine kinase activity; Cellular component=cytoplasm; Biological process=protein amino acid phosphorylation
  Homolog annotation: Hit_ID=B9SDF7; Match level="QueryCoverage=91%, HitCoverage=6%, E-value=8e-20, Identity=78%"; Hit description=ATP binding protein, putative
TLTLTRYTTAIDMWSFGCIVAELFIGLPLFPGASEYDVLQRMXRFLGKGQPPDDLLREAKN

SEQ ID NO: 86174 - protein, 926 aa, Setaria italica
  Transcript Sequence Number=SeqID_20200
  Gene Ontology: Mol. function=protein serine/threonine kinase activity; Cellular component=cytosol; Biological process=protein amino acid phosphorylation
  Homolog annotation: Hit_ID=Q9FGC1; Match level="QueryCoverage=77%, HitCoverage=93%, E-value=0.0, Identity=49%"; Hit description=Protein kinase-like
  Pfam annotation: Domain name=Pkinase; Domain location=129-467; Score =211.0; E_value=3.2e-60; Accession=PF00069.17; Description=Protein kinase domain
  Pfam annotation: Domain name=Pkinase_Tyr; Domain location=129-374; Score=-59.5; E_value=9e-10; Accession=PF07714.9; Description=Protein tyrosine kinase
  Pfam module annotation: Pfam domain module=Pkinase::Pkinase_Tyr; Domain location=129-467::129-374
  Subcellular localization annotation: CTP_CleavageSite=41; ConfidenceScore=5.18e-01
MEESGGRQEDAAPPWAPSEATAFRRFAAATASGRSQEATPSASGNGAASRVSSLHGVRRKPFVARLTAGIIQTYQQCDPTFKYSDENIPKRFLTSPSIPAHNDGLDNANWDLILYVNLELVNKMSNRRFIVKEMLGQGTFGQVVKCWDTETNDYVAVKVIKNQPAFYHQAIMEVSLLRTLNQKFDPDDKHNIVRMLDYLSFQNHLCIAFEMLGQNLYELLKRNHLRGLKVKYVRAFSKQILDAMVVMRDAGIIHCDLKPENILLAPSVATAAAVKVIDFGSACLEGKTVYSYIQSRYYRSPEVLLGYPYTTAIDMWSFGCIVAELFIGLPLFPGASEYDVLQRMTTILGGQPPDDLLREAKNTGRFFKHVGSIFPGSEAHDGISSAYRFLSEEEVEARESKRPKVGKWYFPRLKLDRLIYTYPWNNSELTETEKTDRLALVDFLKGLLEFDPNKRWSPVQALFHPFITGEPFTGPYEPVPETARIPVARAAAIDHNPGGGHWLHSGLSPQVGSVNRCLPLNNAYPPKMPFSYGSSYGSFGSHGSYTGNAGFANSYGSIGDVNTSNMYYSPLGSSGFTQIGSSPDIRLRPRLPHDRGIRLSPGSLGPMSLGASPSQFTPPNYQMQIPANSTGKHGSGSPASGSIHGSPLGKAATAGPYNMRRNVPMPPHDYVSQHGQVRYGDGVSFSHPDGYVRGHTGHSQNAGPSSGHSSWRPQISSRSGFSLDASSSHGPSQALHSQAPSNSFDFSPNTSASSALDPADWDPNYSDESLLQEDSSLSADLSSSLHLEDATRQASGSIRSANFQGHVFATSNPVPTNQRGDQLFRASYQGGSSHSSVPVNYGGYNPPSYPQQSLRPRPGQPILQQRYNQPTSGPMRLMGSHHSGQPVWPSTYGMGEGVPWGGTGGHSFTSSGLPPSLARKDYGSIF

SEQ ID NO: 86175 - protein, 436 aa, Setaria italica
  Transcript Sequence Number=SeqID_20201
  Gene Ontology: Mol. function=zinc ion binding
  Homolog annotation: Hit_ID=Q9SRZ1; Match level="QueryCoverage=49%, HitCoverage=15%, E-value=1e-12, Identity=28%"; Hit description =F22D16.1 protein
EEGEAALGGADGYGNGELVDPDALTYIDKKIQNLLGHFCKKFEGAITPENLGSLYGGHGSFLPAHPHSPLAFPQCRIPADPPNHSSASRSPYLPTETAQKNHFIKTELDSSRKNDYYQISDECNGSLSQQMLNGAVSGSEQKALKIRIKVNNNGSLARNTAAIYSGLGLDISPSSSTEDNLDGTDGAPVPEVLPDESPHTIFEIMTCHFIPGGHLLSPLTGNVLELRQKPKAMVKHEAPEFHDDKAELHRDRGHTTSATPDINDKSGKEIKSDEKKDRVPNFKSSKCRVNKPSAVNKGTKPQLQYVSHDTASNFLPTIIKTQHSVEESENFTGEISSDQMQGLKKGPLKGHISDKNKDSKKKPSLDHGFSCKISYDSEEYNNQPSTSSSHLKDIPSKTSLLERDKEKVVHIKEELSQYKSKEIGSLFSAESMNIID

SEQ ID NO: 86176 - protein, 113 aa, Setaria italica
  Transcript Sequence Number=SeqID_20202
IGVPLEPLWPISSPAASGMGVPLNPQNFRGIRHHEALWRQPLPPADLQRPKSNHRREQERSDPTRLPPPGGRISGQAPRRGPGEEARRAEDPAASSGNVGGGERGEGTGGLAT

SEQ ID NO: 86177 - protein, 58 aa, Setaria italica
  Transcript Sequence Number=SeqID_20203
  Gene Ontology: Mol. function=tropinone reductase activity; Biological process=oxidation reduction
  Homolog annotation: Hit_ID=B6SZL1; Match level="QueryCoverage=87%, HitCoverage=19%, E-value=1e-14, Identity=74%"; Hit description =Tropinone reductase 2
MSKGVGKETLEKYEQKIPLRRRGQPAEVASVVSFLCTPAASYVTGQVVYVDGGGTISA

SEQ ID NO: 86178 - protein, 80 aa, Setaria italica
  Transcript Sequence Number=SeqID_20204
  Gene Ontology: Mol. function=binding
  Homolog annotation: Hit_ID=Q6ESP7; Match level="QueryCoverage=96%, HitCoverage=11%, E-value=9e-23, Identity=67%"; Hit description =Pentatricopeptide (PPR) repeat-containing protein-like
AVLKNSMQSVASWNAMLAGLARTGQSGSAIHHFSVMLHEHKVIPDSVTYANVISACAELRNSGCAASVHAYLIRRSISSR

SEQ ID NO: 86179 - protein, 106 aa, Setaria italica
  Transcript Sequence Number=SeqID_20205
  Gene Ontology: Mol. function=transcription regulator activity; Cellular component=nucleus; Biological process=regulation of transcription
  Homolog annotation: Hit_ID=B6SVP6; Match level="QueryCoverage=100%, HitCoverage=20%, E-value=7e-22, Identity=65%"; Hit description =Transcription factor BIM2
MGIQGNKAATHEHDFLSLYTAAAAKDSPLQLHDSKSPPPSQGNFFLKTHDFLQPLEKPEAPPPEPSPTLPASGADSRHHHQPVAAKQHALPLPVGVGTFTICPAPV

SEQ ID NO: 86180 - protein, 66 aa, Setaria italica
  Transcript Sequence Number=SeqID_20206
  Gene Ontology: Mol. function=galactosylgalactosylxylosylprotein 3 -beta-glucuronosyltransferase activity; Cellular component=membrane
  Homolog annotation: Hit_ID=B6STW3; Match level="QueryCoverage=75%, HitCoverage=13%, E-value=2e-12, Identity=76%"; Hit description=Beta3- glucuronyltransferase
  Subcellular localization annotation: CTP_CleavageSite=51; ConfidenceScore=5.27e-01
MGSSTDHGGAGGRGKKQGSQLWKKALLHSCLCFVMGFFTGFAPSSVSDWTSAAVSAGGMGSSHVVR

SEQ ID NO: 86181 - protein, 86 aa, Setaria italica
  Transcript Sequence Number=SeqID_20207
TVLGIHSFPDSNVIASMDRQSAKSDQRKLLSHDSQKMINTTRYKPSGRTHPKTIVPKYRIQYVWRGCFHFYGDKELPAASGNHISL

SEQ ID NO: 86182 - protein, 188 aa, Setaria italica
  Transcript Sequence Number=SeqID_20208
  Gene Ontology: Mol. function=ligase activity; Cellular component =chloroplast envelope; Biological process=response to auxin stimulus
  Homolog annotation: Hit_ID=Q8LQM5; Match level="QueryCoverage=97%, HitCoverage=30%, E-value=2e-93, Identity=91%"; Hit description =Probable indole-3-acetic acid-amido synthetase GH3.1
  Pfam annotation: Domain name=GH3; Domain location=2-188; Score= -132.7; E_value=9.3e-11; Accession=PF03321.5; Description=GH3 auxin -responsive promoter
TPHCNGDTSPILSSKPISEFLTSSGTSGGERKLMPTIADELDRRSLLYSLQMPVMSQSVPGLDKGKAMYLLFVKAESRTPGGLVARPVLTSYYRSRQFLERPHDPYTDYTSPNEAILCVDSYQSMYAQLLCGLVHRADVLRVGAVFASGFLRAIRFLEKHWPRLCRDIRTGALDPEITDRAVRDAVGR

SEQ ID NO: 86183 - protein, 308 aa, Setaria italica
  misc_feature (285)..(285): Xaa can be any naturally occurring amino acid
  Transcript Sequence Number=SeqID_20209
  Gene Ontology: Mol. function=nucleic acid binding; Cellular component= mitochondrial matrix; Biological process=DNA duplex unwinding
  Homolog annotation: Hit_ID=B6U1E5; Match level="QueryCoverage=100%, HitCoverage=42%, E-value=1e-161, Identity=88%"; Hit description=ATP -dependent RNA helicase SUV3
AVGMGLNLNIRRVVFYNLAKYNGERMVPVPASQVKQIAGRAGRRGSVYPDGLTTTFLKDDLDYLIQCLQQPFEEAQKVGLFPCFEQVEMFASQFPDLSFNDLLDKFRDNCRIDKTYFMCQQDSIKKVANMLERVQGLSLKDRYNFIFAPVNIRDPKAMYHLLRFATHYSQSRRVSIAMGVPRASAKNDTELLDLETKHQVLSMYLWLSHHFEEDNFPQVQQAEEMAISIADLLGKSLAKACWKPESRKQPRQQREDNNECNEEQASNDSAKDVSKDGYERPRALXKTIVRKWQDKVNQNSPPPLNFAA

SEQ ID NO: 86184 - protein, 93 aa, Setaria italica
  Transcript Sequence Number=SeqID_20210
  Gene Ontology: Mol. function=phosphatidylcholine-sterol O -acyltransferase activity; Cellular component=integral to membrane
  Homolog annotation: Hit_ID=B6SNA7; Match level="QueryCoverage=50%, HitCoverage=20%, E-value=4e-16, Identity=80%"; Hit description =Hemolysin-III related family protein
SRPGAAEAEAAARRRRPRPRLVGYEELPDYLQDNEFIRGHYRAEWPIRDALLSAFAWHNETLNVWTHLGGFLLFLALAVAGGAREAADEAAPG

SEQ ID NO: 86185 - protein, 146 aa, Setaria italica
  Transcript Sequence Number=SeqID_20211
  Gene Ontology: Cellular component=chloroplast
  Subcellular localization annotation: CTP_CleavageSite=59; ConfidenceScore=5.35e-01
METAAATVARPPECGSTGGLLSGRRRSLLPHRRSGAVSFSTASLKRPPRIQHHGSQVCVARRRRADIQSDTYVLIEPGMEEEFVSREELEARLKGWLEKWPRDALPPDLAKFNTVDDAVSYLVRAVCVLEIDGEVGSVQWYQVELE

SEQ ID NO: 86186 - protein, 51 aa, Setaria italica
  Transcript Sequence Number=SeqID_20212
AIEMFNHISLVVDLAVSMFLVLLLPMYSILVQNVADQIGPSHNGSRQLFKY

SEQ ID NO: 86187 - protein, 84 aa, Setaria italica
  Transcript Sequence Number=SeqID_20213
  Gene Ontology: Mol. function=protein serine/threonine kinase activity; Biological process=protein amino acid phosphorylation
  Homolog annotation: Hit_ID=Q6K2G4; Match level="QueryCoverage=100%, HitCoverage=51%, E-value=8e-26, Identity=59%"; Hit description =Putative leucine rich repeat containing protein kinase
  Pfam annotation: Domain name=LRR_1; Domain location=22-44; Score =19.2; E_value=0.017; Accession=PF00560.25; Description=Leucine Rich Repeat
  Pfam annotation: Domain name=LRR_1; Domain location=46-69; Score=9.1; E_value=5.6; Accession=PF00560.25; Description=Leucine Rich Repeat
  Pfam module annotation: Pfam domain module=LRR_1::LRR_1; Domain location=22-44::46-69
  Subcellular localization annotation: CTP_CleavageSite=72; ConfidenceScore=5.17e-01
YLNLSKNSLQDQVPNAIGKLRSIKTLDLSYNALSGTIPKSFANLSYLTSLNLSFNRLYGQIPESGVFSNMTLQSLEGNTALCGL

SEQ ID NO: 86188 - protein, 75 aa, Setaria italica
  Transcript Sequence Number=SeqID_20214
  Gene Ontology: Mol. function=transferase activity, transferring glycosyl groups; Cellular component=transcription factor TFIID complex; Biological process=queuosine biosynthetic process
  Homolog annotation: Hit_ID=B4FSA6; Match level="QueryCoverage=100%, HitCoverage=22%, E-value=4e-35, Identity=94%"; Hit description =Queuine tRNA-ribosyltransferase
MALRFQILGRFNRARAARLTLPHFTCQTPLFMPVGTQGTIKGLTTDQLEDIGCQIILGNTYHLELRPGSRLIDEL

SEQ ID NO: 86189 - protein, 195 aa, Setaria italica
  misc_feature (6)..(6): Xaa can be any naturally occurring amino acid
  misc_feature (183)..(183): Xaa can be any naturally occurring amino acid
  misc_feature (190)..(190): Xaa can be any naturally occurring amino acid
  Transcript Sequence Number=SeqID_20215
  Homolog annotation: Hit_ID=B6SXJ8; Match level="QueryCoverage=98%, HitCoverage=32%, E-value=4e-50, Identity=50%"; Hit description =Selenium-binding protein-like
  Pfam annotation: Domain name=PPR; Domain location=140-174; Score=2.1; E_value=5; Accession=PF01535.12; Description=PPR repeat
  Pfam annotation: Domain name=PPR; Domain location=3-37; Score=18.1; E_ value=0.036; Accession=PF01535.12; Description=PPR repeat
  Pfam annotation: Domain name=PPR; Domain location=38-72; Score=8.3; E_ value=0.93; Accession=PF01535.12; Description=PPR repeat
  Pfam annotation: Domain name=PPR; Domain location=74-108; Score=2.8; E_value=4.1; Accession=PF01535.12; Description=PPR repeat
  Pfam module annotation: Pfam domain module=PPR::PPR::PPR::PPR; Domain location=140-174::3-37::38-72::74-108
VVSWTXSLIVGLAVNGFGKEALELFSVMEREKLVPTEITMVGVLYACSHCGLVDDGFMYFDRMKEEYGITPRIEHLGCMVDLLGRAGKIEEAYDYIVTMPLEPNAVVWRTLLGACAMHKKLELGEAAWARLIELDPGHSGDYVLLSNLYAAVGRWADVHVLRKTMVKDGVRKNPGRSLVELRXNSVYEFXMGDRS

SEQ ID NO: 86190 - protein, 197 aa, Setaria italica
  Transcript Sequence Number=SeqID_20216
  Gene Ontology: Mol. function=metalloendopeptidase activity; Cellular component=proteinaceous extracellular matrix; Biological process =metabolic process
  Homolog annotation: Hit_ID=B6U4D1; Match level="QueryCoverage=100%, HitCoverage=53%, E-value=6e-88, Identity=83%"; Hit description =Metalloendoproteinase 1
  Pfam annotation: Domain name=Peptidase_M10; Domain location=15-178; Score=266.9; E_value=4.6e-77; Accession=PF00413.16; Description =Matrixin
AHGRHLYAYFPGGPRWPPFRRDLKYAITATSATSIDRSTLSDVFARAFAQWAAATNLRFAETASESDADITIGFYTGSHGDGEPFDGPLGTLAHAFSPTDGRFHLDAAEAWVAGGDVSRASSPGVVDLESVAVHEIGHLLGLGHSSVPEAIMYPTIRTGTRKVELEADDVQGIQSLYGSNPNYRGVTPTSPATSSRE

SEQ ID NO: 86191 - protein, 152 aa, Setaria italica
  Transcript Sequence Number=SeqID_20217
  Gene Ontology: Mol. function=binding
  Homolog annotation: Hit_ID=B6U810; Match level="QueryCoverage=87%, HitCoverage=51%, E-value=2e-46, Identity=73%"; Hit description=TPR domain protein
  Pfam annotation: Domain name=TPR_2; Domain location=37-71; Score=6.3; E_value=5.5; Accession=PF07719.9; Description=Tetratricopeptide repeat
  Pfam annotation: Domain name=TPR_2; Domain location=72-106; Score =13.5; E_value=0.72; Accession=PF07719.9; Description=Tetratricopeptid e repeat
  Pfam module annotation: Pfam domain module=TPR_2::TPR_2; Domain location=37-71::72-106
NSPGDGSGGRGGSGGQGSGCDMGEYYRRVLLLDPENPLLLRNYGKYLHEVEGDLAGAEGCYARALLACPGDADLLSLYGRVIWEANQEKDRAEAYFERAVQAAPDDCYVLGSYASFLWDAEEDDEEAAPAATTEISTVVAASCDSPALVPAC

SEQ ID NO: 86192 - protein, 67 aa, Setaria italica
  Transcript Sequence Number=SeqID_20218
LSPVCLESQGLVVLGRRMYRMKRKARGLPQIKIAFDDKVGSVHLLSTSVAILEYGSDSDCGWHKLHV

SEQ ID NO: 86193 - protein, 371 aa, Setaria italica
  Transcript Sequence Number=SeqID_20219
MAEPGAATAMDDAASEISDWEVLSAASGCGGGAADDDDSEVVVVSGGGGDVLHVHDHFALAPAGPDPRFPGEGPWTETGDPWQGLELLDDENPRASFDLAAGVWSEQQVPAGGVDEAREGPILEATVARGVTWGEDGSQAEVVDGLIEQESNVVIDHGELGSVLQPAHHGLGETLDSDAATPTGASLQIEGSETESSPVQLDGGEIDAGVESSCLEDAVASDGIRGEQEEQEQGGNASAASGSDEPDGEAKDGDLPLAHTPGAEEGDKQVVVWWKLPFRLLHYCAWKVKPVWSFSIAAALLGLVVLGRRMYRMKRKARGLPQIKIAFYDKRTSQFADRAARLNEAFLVARRVPLLRTSSGAVLPWSMVQER

SEQ ID NO: 86194 - protein, 61 aa, Setaria italica
  Transcript Sequence Number=SeqID_20220
SGSDPNHETPRSEDIIFLRERTRGTTAYTELTRGTNYYAEREYNEYLRPRTTNTRKIKEKN

SEQ ID NO: 86195 - protein, 57 aa, Setaria italica
  Transcript Sequence Number=SeqID_20221
  Gene Ontology: Mol. function=electron carrier activity; Biological process=oxidation reduction
  Homolog annotation: Hit_ID=Q8LL72; Match level="QueryCoverage=100%, HitCoverage=13%, E-value=2e-18, Identity=75%"; Hit description =Cytochrome P450 monooxygenase CYP72A28 (Fragment)
PRTCVGQSFALLEAKMGLAMILRGFALELSPSYSHAPFPAPLLKPEHGAQVMLTKLP

SEQ ID NO: 86196 - protein, 531 aa, Setaria italica
  misc_feature (508)..(508): Xaa can be any naturally occurring amino acid
  Transcript Sequence Number=SeqID_20222
  Gene Ontology: Mol. function=ATP-dependent helicase activity
  Pfam annotation: Domain name=BAT2_N; Domain location=1-152; Score= -33.1; E_value=0.0054; Accession=PF07001.3; Description=BAT2 N -terminus
MASTLSTDRRWGAAPARKSGMTVLGKVPKPINLPSVRSENNGLDPNLEIVPKGTLTWGSKAPSATPNAWGSSSIMSTKNDGSSSSSSHFNGRPSSGGGSRPSTAGSESLGSPNAWGPNSRPSSASGTFPSSHVPVATNRPRSAETRPGSSQLSRFADSAPDNMKASIRTIDRSGSSSHGHGFTLSTGDFPTLGSEVNSQRGHSSKGRPTSSSGKEAPQVEQVKSLTAGNAEVISSSNNHAVDIMKTEQHAHTGGAPAPVTSLPTEGLQPQPYPQNFHMPPPQFDSWRAPHGQPPEGMWHRGAAPGGPYRPVGPPGSFPVEPFGYYGQFPPNSEAAARQGSGHGGYHPKNGDVYHPMPPNSYIMNQPVIPVRTVYQGPVPYDGYYGPRANFNNANVRDPNFVGGPRQPGVLNHFPNQNDKFHPGHSQSRPDKHETVLREQLEPDKVNVFRRGQPGSLHDNPDRLGGSHEFERNVKPAPPLLPHPDGNRTDMNMRTDTRDTYGERNRVLXKSVPNQRGPVGTDHSSCFYKIEQ

SEQ ID NO: 86197 - protein, 193 aa, Setaria italica
  misc_feature (75)..(75): Xaa can be any naturally occurring amino acid
  misc_feature (167)..(167): Xaa can be any naturally occurring amino acid
  Transcript Sequence Number=SeqID_20223
  Gene Ontology: Mol. function=protein serine/threonine kinase activity; Biological process=regulation of transcription, DNA -dependent
  Homolog annotation: Hit_ID=Q2QNK0; Match level="QueryCoverage=86%, HitCoverage=21%, E-value=2e-81, Identity=86%"; Hit description =Protein kinase family protein, putative, expressed
  Pfam annotation: Domain name=Pkinase; Domain location=43-193; Score =14.4; E_value=2.4e-09; Accession=PF00069.17; Description=Protein kinase domain
  Pfam annotation: Domain name=Pkinase_Tyr; Domain location=43-193; Score=1.4; E_value=8.1e-14; Accession=PF07714.9; Description=Protein tyrosine kinase
  Pfam module annotation: Pfam domain module=Pkinase::Pkinase_Tyr; Domain location=43-193::43-193
SWWCFNNDSLSSMDSSISTNSSAIERVDHEADCLDYEILWEDLVLGEQVGHGSCGTVYHAQWYASDVAVKVFSKXKEYSEEMIDTFRQEVSLMKKLRHPNIILFMGAVASPERLCIVTEFLPRGSLFRLLQKNTGKLDPRRRVHMAIDIARGMNYLHHCSPPIVHRXLKSSNLLVDKNWTVKVADFGLSRLKL

SEQ ID NO: 86198 - protein, 105 aa, Setaria italica
  Transcript Sequence Number=SeqID_20224
  Gene Ontology: Mol. function=actin binding; Cellular component =cytoskeleton; Biological process=cytoskeleton organization and biogenesis
  Homolog annotation: Hit_ID=A2Q391; Match level="QueryCoverage=47%, HitCoverage=5%, E-value=5e-17, Identity=78%"; Hit description=Villin headpiece; Gelsolin region
  Subcellular localization annotation: CTP_CleavageSite=53; ConfidenceScore=5.41e-01
RQPGSALTAAATATRWLASLPHDWTPPPSTPAEHTFSSLVKQKPPRTSPTKSRGTMAVSMREVDPVFQGAGQKDGLEIWRIEKLQAVPVPKETYGKFFTGDSYII

SEQ ID NO: 86199 - protein, 88 aa, Setaria italica
  Transcript Sequence Number=SeqID_20225
  Gene Ontology: Mol. function=electron carrier activity
RRHRVGGRLATVAVAGDHFEAGGSIIHPRNLHARRFADLLGLAVKAGGDDDWLGIWDGKRFVFQTLRPLPPGSSWWRRKLHGLLNSLL

SEQ ID NO: 86200 - protein, 118 aa, Setaria italica
  Transcript Sequence Number=SeqID_20226
  Gene Ontology: Mol. function=protein dimerization activity; Cellular component=nucleus; Biological process=regulation of transcription, DNA-dependent
  Homolog annotation: Hit_ID=Q8LQ74; Match level="QueryCoverage=97%, HitCoverage=34%, E-value=1e-23, Identity=54%"; Hit description=Auxin- responsive protein IAA6
MGDSEGRETLPRLLDLIPDGKEWKVREAQGEGRSRNTGFVSEEDRKLELKLSLPGLVEEETATVSRHEGIQRERPALSLCCFHEPSKPTTNTTTTGTKRVFLDTIEVKTEGCDEQKQQ

SEQ ID NO: 86201 - protein, 182 aa, Setaria italica
  Transcript Sequence Number=SeqID_20227
  Gene Ontology: Mol. function=sequence-specific DNA binding; Cellular component=nucleus; Biological process=regulation of transcription, DNA-dependent
  Homolog annotation: Hit_ID=B6TID5; Match level="QueryCoverage=86%, HitCoverage=51%, E-value=4e-39, Identity=58%"; Hit description =Homeodomain-leucine zipper transcription factor TaHDZipI-1
  Pfam annotation: Domain name=HALZ; Domain location=1-36; Score=9.6; E_ value=0.029; Accession=PF02183.10; Description=Homeobox associated leucine zipper
LRARHDALRADCDALRRDKDALAAEIRELRQKLSSRPETAVKLEEAVANEAAEERQATVGAAVCKDGSSDSDSSVVFNDVEASPYSGAAFEQPGLLGFGAPFLDTAAATTGCSPLPMFETKWQQGPTYPYDSYKAGGGYGFTEEWLASSDVIGSDGAVSFFSEEHASSLNFGWCASGTEAWE

SEQ ID NO: 86202 - protein, 67 aa, Setaria italica
  Transcript Sequence Number=SeqID_20228
  Gene Ontology: Mol. function=protein serine/threonine kinase activity
  Homolog annotation: Hit_ID=Q2R2M7; Match level="QueryCoverage=79%, HitCoverage=8%, E-value=3e-10, Identity=60%"; Hit description =Protein kinase domain containing protein
MTGNIARCDDKLKFEVDIHQNIKVFAEDEIKWITRNFSIQIGKGGFGEVYRGILDDDYDVVAVKRYI

SEQ ID NO: 86203 - protein, 97 aa, Setaria italica
  misc_feature (52)..(52): Xaa can be any naturally occurring amino acid
  Transcript Sequence Number=SeqID_20229
  Gene Ontology: Mol. function=isomerase activity; Biological process =cell redox homeostasis
  Homolog annotation: Hit_ID=Q5DJV7; Match level="QueryCoverage=98%, HitCoverage=35%, E-value=9e-41, Identity=85%"; Hit description =Adenosine 5'-phosphosulfate reductase-like
  Subcellular localization annotation: CTP_CleavageSite=40; ConfidenceScore=5.16e-01
LSRYGVRAFPTLFLVNSTMRVRYHGSRTMNSLAMFYKDVTGMNPVSLDALSXLERVEDTVTTIDNDKKSEMEDSLLSWARSPDRLLHQDTCLALASY

SEQ ID NO: 86204 - protein, 215 aa, Setaria italica
  Transcript Sequence Number=SeqID_20230
  Gene Ontology: Mol. function=isomerase activity; Biological process =cell redox homeostasis
  Homolog annotation: Hit_ID=Q5DJV7; Match level="QueryCoverage=96%, HitCoverage=78%, E-value=8e-99, Identity=83%"; Hit description =Adenosine 5'-phosphosulfate reductase-like
  Pfam annotation: Domain name=Thioredoxin; Domain location=15-121; Score=-11.2; E_value=0.0017; Accession=PF00085.12; Description =Thioredoxin
GRTERPRGPRVRHAGVVEGDDGALQKAIALVLHNREDFVAILFYASWCPFSKIFRTDFQKLSSFFPTIAHFSFEESHIKPRILSRYGVRAFPTLFLVNSTMRVRYHGSRTMNSLAMFYKDVTGMNPVSLDALSLERVEDTVTTIDNDKKSEMEDSLLSWARSPDRLLHQDTCLALASSFVLLRLLHFILPKLNACMKQAWRMRLYELNRLFPSLS

SEQ ID NO: 86205 - protein, 99 aa, Setaria italica
  misc_feature (57)..(57): Xaa can be any naturally occurring amino acid
  Transcript Sequence Number=SeqID_20231
  Gene Ontology: Mol. function=microtubule motor activity; Cellular component=microtubule associated complex; Biological process =microtubule-based movement
  Homolog annotation: Hit_ID=Q2QP07; Match level="QueryCoverage=80%, HitCoverage=9%, E-value=8e-27, Identity=72%"; Hit description =Kinesin motor protein, putative, expressed
ARCSKRRIKKDSEVRELKEQIACLKAALAKKEGEPENILSTQSSPSIYRIRKRNATXVFPKDRQPMEEVGNLEVRNIFTPTQTRSKLQFSGILTENNSS

SEQ ID NO: 86206 - protein, 73 aa, Setaria italica
  misc_feature (21)..(21): Xaa can be any naturally occurring amino acid
  Transcript Sequence Number=SeqID_20232
  Gene Ontology: Mol. function=molecular_function; Cellular component =cellular_component; Biological process=biological_process
  Homolog annotation: Hit_ID=B6T3I5; Match level="QueryCoverage=100%, HitCoverage=16%, E-value=4e-24, Identity=79%"; Hit description =Glioma tumor suppressor-like protein
RLKSGPPRLGRHNNLKTPNLXRFEPAPVQVLLTEEISGSLRKLKGCSNLTRDRYKSIEKRGLLAPSRRISKRR

SEQ ID NO: 86207 - protein, 53 aa, Setaria italica
  Transcript Sequence Number=SeqID_20233
SRRSQLALGNQPPCRLGDKACTDFQGRLITFKTLLWIMPQCTLIIYCHIIKCN

SEQ ID NO: 86208 - protein, 100 aa, Setaria italica
  misc_feature (18)..(18): Xaa can be any naturally occurring amino acid
  Transcript Sequence Number=SeqID_20234
  Gene Ontology: Mol. function=heat shock protein binding; Cellular component=membrane; Biological process=protein folding
  Homolog annotation: Hit_ID=B0FFN7; Match level="QueryCoverage=100%, HitCoverage=24%, E-value=4e-38, Identity=75%"; Hit description=DnaJ family heat shock protein
IKPGQHKAINDEGVPQRXRPFMKGRLFVEFNVEFPESGTLSPDQCRALEKVLPQLPRGRLSDMEVDQCEETIMHDVNIEEEMRRRKYQRQREAYEDVDED

SEQ ID NO: 86209 - protein, 138 aa, Setaria italica
  Transcript Sequence Number=SeqID_20235
  Gene Ontology: Mol. function=heat shock protein binding; Cellular component=membrane; Biological process=protein folding
  Homolog annotation: Hit_ID=B0FFN7; Match level="QueryCoverage=99%, HitCoverage=30%, E-value=2e-55, Identity=78%"; Hit description=DnaJ family heat shock protein
  Pfam annotation: Domain name=DnaJ_C; Domain location=1-111; Score= -28.0; E_value=0.00042; Accession=PF01556.10; Description=DnaJ C terminal region
EHPRFKRKYDDLFIEHTVSLTEALCGFQFILTHLDGRQLLIKSNPGEIIKPGQHKAINDEGVPQYGRPFMKGRPYCGTPFMKGRLFVEFNVEFPESGTLSPDQCRALEKVLPQLPRGRLSDMEVDQCEETIMHDVNIE

SEQ ID NO: 86210 - protein, 175 aa, Setaria italica
  misc_feature (31)..(31): Xaa can be any naturally occurring amino acid
  misc_feature (36)..(36): Xaa can be any naturally occurring amino acid
  misc_feature (102)..(102): Xaa can be any naturally occurring amino acid
  Transcript Sequence Number=SeqID_20236
  Gene Ontology: Mol. function=heat shock protein binding; Cellular component=plasma membrane; Biological process=protein folding
  Homolog annotation: Hit_ID=B0FFN7; Match level="QueryCoverage=97%, HitCoverage=40%, E-value=1e-49, Identity=67%"; Hit description=DnaJ family heat shock protein
  Pfam annotation: Domain name=DnaJ; Domain location=16-75; Score =104.6; E_value=3.4e-28; Accession=PF00226.23; Description=DnaJ domain
  Pfam annotation: Domain name=DnaJ_CXXCXGXG; Domain location=139-175; Score=-24.5; E_value=0.0029; Accession=PF00684.11; Description=DnaJ central domain (4 repeats)
  Pfam module annotation: Pfam domain module=DnaJ::DnaJ_CXXCXGXG; Domain location=16-75::139-175
SKKCLGGVPRRSNNTKYYEVLGVSSTASPRXELKKXYRKAAIKSHPDKGGDPEKFKELSQAYEVLSDPEKREIYDQYGEDGLKEGMGGGGDFHNPFDIFEQXFFGWWFLWGSRSRVRRQKRGEDVVHSLKVSLEDVYNGATKKLSLSRNVLCSKCKGKGTKSGAPGTCYGCHGIG

SEQ ID NO: 86211 - protein, 171 aa, Setaria italica
  Transcript Sequence Number=SeqID_20237
  Gene Ontology: Mol. function=heat shock protein binding; Cellular component=plasma membrane; Biological process=protein folding
  Homolog annotation: Hit_ID=B0FFN7; Match level="QueryCoverage=91%, HitCoverage=37%, E-value=8e-54, Identity=69%"; Hit description=DnaJ family heat shock protein
  Pfam annotation: Domain name=DnaJ; Domain location=13-71; Score =125.0; E_value=2.4e-34; Accession=PF00226.23; Description=DnaJ domain
MFGRVPRRSNNTKYYEVLGVSSTASQDELKKAYRKAAIKSHPDKGGDPEKFKELSQAYEVLSDPEKREIYDQYGEDGLKEGMGGGGDFHNPFDIFEQFFGGGSFGGSRSRVRRQKRGEDVVHSLKVSLEDVYNGATKKLSLSRNVLCSKCKGSVLKATRQPWKSVHALSPR

SEQ ID NO: 86212 - protein, 343 aa, Setaria italica
  Transcript Sequence Number=SeqID_20238
  Gene Ontology: Mol. function=molecular_function; Cellular component =cellular_component; Biological process=biological_process
  Homolog annotation: Hit_ID=B6T3I5; Match level="QueryCoverage=100%, HitCoverage=90%, E-value=1e-108, Identity=64%"; Hit description =Glioma tumor suppressor-like protein
  Pfam annotation: Domain name=Nop53; Domain location=1-328; Score= -47.6; E_value=9e-06; Accession=PF07767.3; Description=Nop53 (60S ribosomal biogenesis)
GAAAIPSLPSDSLFYVDKPAASTSAAGASDTTTKDIPAKRKIEKKREKVLYHESLLKRNPFIQPIPSSVVSKKDKKKTKKKELHETQGDISVPMEDDSAGKNLDIWAGDDKGDTKARKRSTKSLIPAVEVEPQGCSFNPPFEAHQDALAQAVADERHKTLMKELGPTPVPLIISGEPITEEDKFFLDADDGDEDVTDDDGEQDADTSVGQRKNKTKRVTRVEMNRRARRKERLREEAEAKKMESISKEIDSLPNIIDEIAKEDEEKQKRRIRRTVIKEERLKSGPPRLGRHKFEPAPVQVLLTEEISGSLRKLKGCSNLTRDRYKSIEKRGLLAPSRRISKRR

SEQ ID NO: 86213 - protein, 419 aa, Setaria italica
  misc_feature (410)..(410): Xaa can be any naturally occurring amino acid
  Transcript Sequence Number=SeqID_20239
  Gene Ontology: Mol. function=heat shock protein binding; Cellular component=membrane; Biological process=protein folding
  Homolog annotation: Hit_ID=B0FFN7; Match level="QueryCoverage=100%, HitCoverage=100%, E-value=1e-178, Identity=74%"; Hit description =DnaJ family heat shock protein
  Pfam annotation: Domain name=DnaJ; Domain location=13-71; Score =125.0; E_value=2.4e-34; Accession=PF00226.23; Description=DnaJ domain
  Pfam annotation: Domain name=DnaJ_C; Domain location=233-359; Score =38.1; E_value=1.7e-09; Accession=PF01556.10; Description=DnaJ C terminal region
  Pfam annotation: Domain name=DnaJ_CXXCXGXG; Domain location=134-220; Score=122.4; E_value=1.5e-33; Accession=PF00684.11; Description=DnaJ central domain (4 repeats)
  Pfam module annotation: Pfam domain module=DnaJ::DnaJ_C::DnaJ _CXXCXGXG; Domain location=13-71::233-359::134-220
MFGRVPRRSNNTKYYEVLGVSSTASQDELKKAYRKAAIKSHPDKGGDPEKFKELSQAYEVLSDPEKREIYDQYGEDGLKEGMGGGGDFHNPFDIFEQFFGGGSFGGSRSRVRRQKRGEDVVHSLKVSLEDVYNGATKKLSLSRNVLCSKCKGKGTKSGAPGTCYGCHGIGMKTITRQIGLGMIQQMNTVCPECTGSGEIIRERDRCPSCRANKVVQEKKVLEVHIEKGMQHGQKIVFQGEADEAPDTVTGDIVFILQVKEHPRFKRKYDDLFIEHTVSLTEALCGFQFILTHLDGRQLLIKSNPGEIIKPGQHKAINDEGVPQYGRPFMKGRLFVEFNVEFPESGTLSPDQCRALEKVLPQLPRGRLSDMEVDQCEETIMHDVNIEEEMRRRKYQRQREAYEDVDEDEDXGPRVQCAQQ

SEQ ID NO: 86214 - protein, 275 aa, Setaria italica
  Transcript Sequence Number=SeqID_20240
  Gene Ontology: Mol. function=phosphoprotein phosphatase activity; Cellular component=cytoplasm; Biological process=response to stress
  Homolog annotation: Hit_ID=B4FWT1; Match level="QueryCoverage=100%, HitCoverage=85%, E-value=1e-159, Identity=98%"; Hit description =Serine/threonine protein phosphatase
  Pfam annotation: Domain name=Metallophos; Domain location=15-210; Score=157.8; E_value=3.3e-44; Accession=PF00149.20; Description =Calcineurin-like phosphoesterase
KRVLLSQPNLLRIHAPVKICGDIHGQFVDLLRLFDLGGYPPTSTYVFLGDYVDRGKQSLETICLLLAYKIRYPEKIFLLRGNHEDAKINRVYGFYDECKRRFNVRLWKIFSDCFNCLPIAALIDDKILCMHGGLSPELTSLDQIKDIERPAEIPDYGLLCDLLWSDPSPDGEGWGESDRGVSCTFGADKLVEFLEKNDLDLICRAHQVVEDGYEFFAQRRLVTIFSAPNYCGEFDNVGALLSIDESLMCSFQILKPTDMGPPHARKQIPNKPARG

SEQ ID NO: 86215 - protein, 104 aa, Setaria italica
  misc_feature (18)..(18): Xaa can be any naturally occurring amino acid
  Transcript Sequence Number=SeqID_20241
  Gene Ontology: Cellular component=integral to membrane
  Homolog annotation: Hit_ID=Q9LV85; Match level="QueryCoverage=81%, HitCoverage=15%, E-value=1e-17, Identity=41%"; Hit description =Protein CPR-5
FCANTLGGDGNIWLICWXVLCSIHLLGNCYPSVLYRVLHGPISVSHSKEVVWFPYWIRRWVFYAVLGFIIPALTGFLPFASLSDWFNHFTKELKSIFVGDEIEA

SEQ ID NO: 86216 - protein, 375 aa, Setaria italica
  misc_feature (40)..(40): Xaa can be any naturally occurring amino acid
  Transcript Sequence Number=SeqID_20242
  Gene Ontology: Cellular component=integral to membrane
  Homolog annotation: Hit_ID=B9SRP7; Match level="QueryCoverage=89%, HitCoverage=61%, E-value=6e-79, Identity=44%"; Hit description =Protein CPR-5, putative
DFNLVNEMPVFEQSPIPQCSSKHEDSAAASMLSTGGPQNXPQEIRQDVLNSVESRLVLYAGSNQQLTRRTRGISSPEADQRILNAFERSLKEQTRSNELKEFEIGLSMRKLQLKQSQLELNSYSHMLEKMKISLGFQKASFRGEKFKTQMQDTRHAQILRTLIDFLVSAVIIMSVCFGYGTYIYSYQRITDITAACSATSRGPKSWWMPNSVSNFNSGLLFLRCHFIAATRMGFGIVMIMAIAWLAFQRSAVSGSNMPVTFNFILLGVMCGIAGRFCANTLGGDGNIWLICWEVLCSIHLLGNCYPSVLYRVLHGPISVSHSKEVVWFPYWIRRWVFYAVLGFIIPALTGFMPLIATKIFQASISHQQRSILVLL

SEQ ID NO: 86217 - protein, 79 aa, Setaria italica
  Transcript Sequence Number=SeqID_20243
TRPASAASRPSAAAASPARGHPSWRCGQAGHSALSHIWAMALNKMLYLCKYVKTYYCLYVVLVSLHICGYKYTMMHSSD

SEQ ID NO: 86218 - protein, 146 aa, Setaria italica
  Transcript Sequence Number=SeqID_20244
  Gene Ontology: Mol. function=receptor activity
  Homolog annotation: Hit_ID=Q9M838; Match level="QueryCoverage=41%, HitCoverage=4%, E-value=4e-14, Identity=60%"; Hit description =T27C4.14 protein
EQSIRGIHGPNRQFAAINFLENLVSEFSPSTASAMGLPKEFHEQCECSLELHFLKDFYCWAQSAVFNTADKILNSNETIPEERACSAGLRLMFQILSWNFKHTVEPESSDAKINSGLRIDTINLKKFERSLVKPGSMWRDVLISSG

SEQ ID NO: 86219 - protein, 154 aa, Setaria italica
  Transcript Sequence Number=SeqID_20245
  Subcellular localization annotation: CTP_CleavageSite=78; ConfidenceScore=5.02e-01
YTLEYYKRPNQPLTWISHLQGASQTFSTPRSLVQIHKIQTHTAAAPEFLATPLSPELPASTCSSKFPWSLPTECQPISRSKLSELVSHTSKLPWRPFPSQYWAVPARRCRRFRGQWSSISGGINGLLSRQRREQPNHLIFSTSAPTLPSNPELA

SEQ ID NO: 86220 - protein, 58 aa, Setaria italica
  Transcript Sequence Number=SeqID_20246
  Gene Ontology: Mol. function=inositol or phosphatidylinositol phosphatase activity
  Homolog annotation: Hit_ID=A8IDW2; Match level="QueryCoverage=62%, HitCoverage=5%, E-value=3e-10, Identity=80%"; Hit description =Inositol-1,4,5-triphosphate-5-phosphatase
VYLSIWVRRSLRKHIQSLKVSTVGVGAMGYIGNKASFYKRHHSQILSYSSKEILLLQN

SEQ ID NO: 86221 - protein, 126 aa, Setaria italica
  Transcript Sequence Number=SeqID_20247
  Gene Ontology: Mol. function=metalloexopeptidase activity; Cellular component=cytoplasm; Biological process=cellular process
  Homolog annotation: Hit_ID=B9GEE4; Match level="QueryCoverage=99%, HitCoverage=19%, E-value=2e-33, Identity=60%"; Hit description =Methionine aminopeptidase
MAAVDTATKEMEALQVGQNEETKENLIKEGKAANSNGAAPAAQSSPPEDDDEAQADGASQDGAPEAAKKKKKKKNKSKKKDPLQQTDPPSIPVDELFPSGDFPEGEIQQYKDDNLWRTTSEEKREL

SEQ ID NO: 86222 - protein, 317 aa, Setaria italica
  Transcript Sequence Number=SeqID_20248
  Gene Ontology: Mol. function=metalloexopeptidase activity; Cellular component=cytoplasm; Biological process=cellular process
  Homolog annotation: Hit_ID=B6TR34; Match level="QueryCoverage=82%, HitCoverage=58%, E-value=1e-153, Identity=97%"; Hit description =Methionine aminopeptidase
  Pfam annotation: Domain name=Peptidase_M24; Domain location=12-222; Score=184.1; E_value=4e-52; Accession=PF00557.16; Description =metallopeptidase family M24
MPQIQGSYCSTVLFTRHLVLQAGIAFPTGCSLNWVAAHWTPNAGDKTVLQYDDVMKLDFGTHIDGYIVDCAFTVAFNPMYDPLLQATRDATNTGIKEAGIDARLCDVGAAIQEVMESYEVEINGKVFQVKSVRNLNGHSIGPYQIHAGKSVPIVKGGEQTKMEEGEFYAIETFGSTGKGFVREDLECSHYMKNFDVGHVPLRLAKAKQLLGTINNNFGTLAFCRRYLDRLGETKYLMALKNLCDNNIVQPYPPLCDVKGSYVSQFEHTILLRPTCKEVISKSAKLFVRLRHVLFFRKMVHRLRKTVYSLHKQPVQRS

SEQ ID NO: 86223 - protein, 61 aa, Setaria italica
  Transcript Sequence Number=SeqID_20249
  Gene Ontology: Mol. function=metalloexopeptidase activity; Cellular component=cytoplasm; Biological process=cellular process
  Homolog annotation: Hit_ID=B6TR34; Match level="QueryCoverage=96%, HitCoverage=13%, E-value=7e-30, Identity=98%"; Hit description =Methionine aminopeptidase
PVLDRLGETKYLMALKNLCDNGIIQPYPPLCDVRGSYVSQFEHTILLRPTCKEVISRGDDY

SEQ ID NO: 86224 - protein, 398 aa, Setaria italica
  Transcript Sequence Number=SeqID_20250
  Gene Ontology: Mol. function=metalloexopeptidase activity; Cellular component=cytoplasm; Biological process=cellular process
  Homolog annotation: Hit_ID=Q2QLT5; Match level="QueryCoverage=98%, HitCoverage=86%, E-value=0.0, Identity=91%"; Hit description =Methionine aminopeptidase
  Pfam annotation: Domain name=Peptidase_M24; Domain location=87-335; Score=274.2; E_value=2.9e-79; Accession=PF00557.16; Description =metallopeptidase family M24
VLGNCLIDGPSQDGAPEAVKKKKKKNKSKKKKDPLQQTDPPSIPVDELFPSGDFPEGEIQQYKDDNLWRTTSEEKRELERLQKPMYNSVRRAAEVHRQVRKYMRSIIKPGMLMVDLCETLENMVRKLIKENGLQAGIAFPTGCSLNWVAAHWTPNAGDKTVLQYDDVMKLDFGTHIDGYIVDCAFTVAFNPMYDPLLQATRDATNTGIKEAGIDARLCDVGAAIQEVMESYEVEINGKVFQVKSVRNLNGHSIGPYQIHAGKSVPIVKGGEQTKMEEGEFYAIETFGSTGKGFVREDLECSHYMKNFDVGHVPLRLAKAKQLLGTINNNFGTLAFCRRYLDRLGETKYLMALKNLCDNGIIQPYPPLCDVRGSYVSQFEHTILLRPTCKEVISRGDDY

SEQ ID NO: 86225 - protein, 65 aa, Setaria italica
  Transcript Sequence Number=SeqID_20251
MVAVQLGALLLALLLALWRLAWRPRAVARSFAQQGVRGPAYRFLAGSLPEAKRLLLAGRSGAWRP

SEQ ID NO: 86226 - protein, 70 aa, Setaria italica
  Transcript Sequence Number=SeqID_20252
WKPTVCSLRICQFQCLFMGCSDLPLCQPDDYLFNSIMEIGIHLTVEAGLAAVVDHILPPFQITISPSIHV

SEQ ID NO: 86227 - protein, 61 aa, Setaria italica
  Transcript Sequence Number=SeqID_20253
  Subcellular localization annotation: CTP_CleavageSite=30; ConfidenceScore=5.29e-01
MREEVRSSSGAAAEPPLAVARSSSPPHTPVASSAGASSPAMQTNIGRQASRVDSSSQVAAH

SEQ ID NO: 86228 - protein, 89 aa, Setaria italica
  misc_feature (36)..(36): Xaa can be any naturally occurring amino acid
  misc_feature (47)..(47): Xaa can be any naturally occurring amino acid
  Transcript Sequence Number=SeqID_20254
  Subcellular localization annotation: CTP_CleavageSite=39; ConfidenceScore=5.06e-01
PSGFGCNNQIGKIVGLVVSTQEASSFLGSIIEAPSXLVVSKTAMKMXQTIATASVVLVRKSLAWITGIILLVSTLIGVCLLMNTGGCPW

SEQ ID NO: 86229 - protein, 116 aa, Setaria italica
  misc_feature (10)..(10): Xaa can be any naturally occurring amino acid
  Transcript Sequence Number=SeqID_20255
  Gene Ontology: Cellular component=plasma membrane
  Homolog annotation: Hit_ID=B9RWJ6; Match level="QueryCoverage=98%, HitCoverage=30%, E-value=2e-17, Identity=47%"; Hit description=PMP, putative
  Subcellular localization annotation: CTP_CleavageSite=50; ConfidenceScore=5.50e-01
EVSAAVSVLXGFAPPTALPALSSSQLNKVLLPNPFDRPRAVFLVQIAGSSADSFVSEAGSIFKTRIEGANNAATGLTDKDELIIIHSDESLDHTGSDLTDSELSRLANWLEGSYQK

SEQ ID NO: 86230 - protein, 117 aa, Setaria italica
  misc_feature (23)..(23): Xaa can be any naturally occurring amino acid
  misc_feature (51)..(51): Xaa can be any naturally occurring amino acid
  misc_feature (92)..(92): Xaa can be any naturally occurring amino acid
  Transcript Sequence Number=SeqID_20256
IHTGGFIILGSIIEAPSSLHISXRQLEEASQTIATASVVLVRKSLAWITGXIILLVSTLIGGEPEPCLICRRLKHYYLSWLPKLIYPKPHLXIVQVCLLMNMPLTRDTLLYSNVKID

SEQ ID NO: 86231 - protein, 141 aa, Setaria italica
  Transcript Sequence Number=SeqID_20257
  Gene Ontology: Cellular component=plasma membrane
  Homolog annotation: Hit_ID=B9RWJ6; Match level="QueryCoverage=68%, HitCoverage=27%, E-value=3e-17, Identity=50%"; Hit description=PMP, putative
PASDTKLSAEALDPAIFKTRIEGANNAATGLTDKDELIIIHSDESLDHTGSDLTDSELSRLANWLEGSYQKSSGELVIPLESGNSLTLLLHKEADLEFASSLASLLKTIERAIQVHEDFSGVISPAELLVCHFTGIKALED

SEQ ID NO: 86232 - protein, 162 aa, Setaria italica
  Transcript Sequence Number=SeqID_20258
  Gene Ontology: Cellular component=plasma membrane
  Homolog annotation: Hit_ID=B9RWJ6; Match level="QueryCoverage=91%, HitCoverage=40%, E-value=5e-18, Identity=40%"; Hit description=PMP, putative
EPRAVFLVQIAGSSASADSFVSEAGSIFKTRIEGANNAATGLTDKDELIIIHSDESLDHTGSDLTDSELSRLANWLEGSYQKSSGELVIPLESGNSLTLLLHKEADLEFASSLASLLKTIERAIQVHEDFSGVISPAELLVCHFTGIKVTHKLLVCNLKLGN

SEQ ID NO: 86233 - protein, 369 aa, Setaria italica
  Transcript Sequence Number=SeqID_20259
  Gene Ontology: Cellular component=plasma membrane
  Homolog annotation: Hit_ID=B9RWJ6; Match level="QueryCoverage=91%, HitCoverage=92%, E-value=7e-72, Identity=47%"; Hit description=PMP, putative
MARCHHLLLLLLSLFLAVAAAAPGQGQGHHGEASAVFIDAASHRYLRDQPTDDQEASMSLNEVSAAVSVLLGFAPPTALPALSSSQLNKVLLPNPFDRPRAVFLVQIAGSSASADSFVSEAGSIFKTRIEGANNAATGLTDKDELIIIHSDESLDHTGSDLTDSELSRLANWLEGSYQKSSGELVIPLESGNSLTLLLHKEADLEFASSLASLLKTIERAIQVHEDFSGVISPAELLVCHFTGIKALEDEYASTEIVKQGTEIVQRAVTKAFQSLHGAYKGKIVGLVVSTQEASSFLGSIIEAPSSLHISRQLEEASQTIATASVVLVRKSLAWITGIILLVSTLIGVCLLMNMPLTRDTLLYSNVKID

SEQ ID NO: 86234 - protein, 37 aa, Setaria italica
  Transcript Sequence Number=SeqID_20260
FCGVPVNMFTTPLLEYQNNQVQECFISTYSIISYIRT

SEQ ID NO: 86235 - protein, 69 aa, Setaria italica
  Transcript Sequence Number=SeqID_20261
  Subcellular localization annotation: CTP_CleavageSite=60; ConfidenceScore=5.05e-01
PESTCCLDLSALLIPHRKRPSPTPIAIGTVPSVLSTLRQLPQFNFLTIFNIYTSFLACPRPATRKPCTT

SEQ ID NO: 86236 - protein, 179 aa, Setaria italica
  misc_feature (43)..(43): Xaa can be any naturally occurring amino acid
  misc_feature (95)..(95): Xaa can be any naturally occurring amino acid
  Transcript Sequence Number=SeqID_20262
  Gene Ontology: Cellular component=integral to membrane; Biological process=transport
  Homolog annotation: Hit_ID=B6TXS8; Match level="QueryCoverage=58%, HitCoverage=31%, E-value=5e-40, Identity=77%"; Hit description =Solute carrier family 35, member F1
  Pfam annotation: Domain name=DUF6; Domain location=28-147; Score= -0.3; E_value=0.079; Accession=PF00892.12; Description=Integral membrane protein DUF6
  Pfam annotation: Domain name=DUF914; Domain location=1-176; Score= -126.1; E_value=2.2e-06; Accession=PF06027.4; Description=Eukaryotic protein of unknown function (DUF914)
  Pfam module annotation: Pfam domain module=DUF6::DUF914; Domain location=28-147::1-176
MEVKRKDVWGLLLVLLLGQLVAFTLAASSFSSSLIANLELNKXTTNYNDKSFFTYLLLISVFVPIVLYRRRKLQVAWYWYLALAFIDVQGNYLCXAYQYSYITSVTLLDCWTIVLIILTWYALGTRYSFWQFVGAGTCVAGLVLLSNAKATDEQASSRWPRPPPQRRRAPPPRRPPRPP

SEQ ID NO: 86237 - protein, 195 aa, Setaria italica
  misc_feature (94)..(94): Xaa can be any naturally occurring amino acid
  misc_feature (134)..(134): Xaa can be any naturally occurring amino acid
  Transcript Sequence Number=SeqID_20263
  Gene Ontology: Cellular component=integral to membrane; Biological process=transport
  Homolog annotation: Hit_ID=B6TXS8; Match level="QueryCoverage=76%, HitCoverage=44%, E-value=5e-44, Identity=64%"; Hit description =Solute carrier family 35, member F1
  Pfam annotation: Domain name=DUF914; Domain location=44-193; Score= -141.1; E_value=1.3e-05; Accession=PF06027.4; Description=Eukaryotic protein of unknown function (DUF914)
CDTCICQSCTPPPILQLRLRRSTQCLYLLLLHLNPQRPALLRFMEVKRKDVWGLLLVLLLGQLVAFTLAASSFSSSLIANLGVDAPLTQSFFTXLLLISVYVPIVLYRRRKLQVAWYWYLALAFIDVQGNYLCXAYQYSYITSVTLLDCWTIVLIILTWYALGTRYSFWQFVGAGTCVAGLVLLSNAKATDEQGN

SEQ ID NO: 86238 - protein, 65 aa, Setaria italica
  Transcript Sequence Number=SeqID_20264
DCVYANLQEVDLRSTDVSSDPHANVSLNVADTSYRAIVPEIIDVLRTVCERHELPLAQTWIPCIC

SEQ ID NO: 86239 - protein, 166 aa, Setaria italica
  misc_feature (109)..(109): Xaa can be any naturally occurring amino acid
  Transcript Sequence Number=SeqID_20265
  Gene Ontology: Mol. function=RNA-directed DNA polymerase activity; Cellular component=mitochondrion
  Homolog annotation: Hit_ID=B9RMY5; Match level="QueryCoverage=95%, HitCoverage=17%, E-value=1e-50, Identity=57%"; Hit description =Pentatricopeptide repeat-containing protein, putative
  Pfam annotation: Domain name=PPR; Domain location=109-143; Score =38.7; E_value=2.3e-08; Accession=PF01535.12; Description=PPR repeat
  Pfam annotation: Domain name=PPR; Domain location=3-36; Score=5.2; E _value=2.1; Accession=PF01535.12; Description=PPR repeat
  Pfam annotation: Domain name=PPR; Domain location=38-72; Score=24.8; E_value=0.00035; Accession=PF01535.12; Description=PPR repeat
  Pfam annotation: Domain name=PPR; Domain location=73-107; Score=44.8; E_value=3.4e-10; Accession=PF01535.12; Description=PPR repeat
  Pfam module annotation: Pfam domain module=PPR::PPR::PPR::PPR; Domain location=109-143::3-36::38-72::73-107
RLITYNSLMTSFVKKGYLKQVWAILHERGGQLCPNDVATYNLIIQGLGQMGKAEFASTIIDRLSKKGVYMDIVMYNTLIHQFGKVGKVEEASCLFEQIVRSGMKPDVVXTFNTLININAKAGRLKEADKYLRRMITEGIAPNHATETILVFLHKEIEKKKAEGQMN

SEQ ID NO: 86240 - protein, 52 aa, Setaria italica
  Transcript Sequence Number=SeqID_20266
  Gene Ontology: Mol. function=catalytic activity
  Homolog annotation: Hit_ID=Q7XTC7; Match level="QueryCoverage=67%, HitCoverage=7%, E-value=4e-12, Identity=94%"; Hit description =Probable protein phosphatase 2C 40
GYYSIHEGLSKPGKLRPWDGPFLCHSCQEKKEAMEGKRHSRDSSSRNSGSSE

SEQ ID NO: 86241 - protein, 65 aa, Setaria italica
  Transcript Sequence Number=SeqID_20267
  Gene Ontology: Mol. function=catalytic activity
  Homolog annotation: Hit_ID=B6TZ19; Match level="QueryCoverage=76%, HitCoverage=11%, E-value=4e-21, Identity=96%"; Hit description =Catalytic/ protein phosphatase type 2C
FACAICQIDLESGQGISIHEGLSKPGKLRPWDGPFLCHSCQEKKEAMEGKRHSRDSSSRNSGSSE

SEQ ID NO: 86242 - protein, 258 aa, Setaria italica
  misc_feature (243)..(243): Xaa can be any naturally occurring amino acid
  Transcript Sequence Number=SeqID_20268
  Gene Ontology: Mol. function=catalytic activity; Cellular component =plasma membrane
  Homolog annotation: Hit_ID=B6TZ19; Match level="QueryCoverage=98%, HitCoverage=57%, E-value=1e-122, Identity=89%"; Hit description =Catalytic/ protein phosphatase type 2C
  Pfam annotation: Domain name=PP2C; Domain location=10-258; Score =75.6; E_value=1.8e-19; Accession=PF00481.13; Description=Protein phosphatase 2C
RVAAAGAGVERPTVAAGQAGRAKKGEDLALLKPACERRPGAPSTSFSAFALFDGHNGSAAAVYAKEHLLGNVLGCVPTDLSRDEWLAALPRALVAGFVKTDKDFQTKAHSSGTTVTLVIIDGSVVTVASVGDSRCVLEAEGSIYYLSADHRFDSSEEEVGRVTECGGEVGRLNVVGGAEIGPLRCWPGGLCLSRSIGDQDVGEYIIPVPYVKQMKLSNSGGRLIIASDGVWDALTAEVAFSCXARGLSPEAAADQIVK

SEQ ID NO: 86243 - protein, 276 aa, Setaria italica
  Transcript Sequence Number=SeqID_20269
  Gene Ontology: Mol. function=catalytic activity; Cellular component =plasma membrane
  Homolog annotation: Hit_ID=B6TZ19; Match level="QueryCoverage=94%, HitCoverage=58%, E-value=1e-134, Identity=89%"; Hit description =Catalytic/ protein phosphatase type 2C
FYYLSADHRFDSSEEEVGRVTECGGEVGRLNVVGGAEIGPLRCWPGGLCLSRSIGDQDVGEYIIPVPYVKQMKLSNSGGRLIIASDGVWDALTAEVAFSCARGLSPEAAADQIVKEAVESKGLRDDTTCIVIDIIPPEKPKSTIESPKTPGKGLGLLKSFFLRKTASDSLSLATKDNYSEPDFVEEVFEDGCPSLSRRLNSEYPVRNMFKLFACAICQIDLESGQGISIHEGLSKPGKLRPWDGPFLCHSCQEKKEAMEGKRHSRDSSSRNSGSSE

SEQ ID NO: 86244 - protein, 101 aa, Setaria italica
  Transcript Sequence Number=SeqID_20270
SLVWIMIRGAVEYTVCQIRMHSGFRSDQNAVAGMRMRGLGCMPWTDSHLGDLLVVVCDQVSMALVVGRLSVWQLINQLKIKIGWPATEPDSTPSYLTTRFR

SEQ ID NO: 86245 - protein, 380 aa, Setaria italica
  misc_feature (167)..(167): Xaa can be any naturally occurring amino acid
  Transcript Sequence Number=SeqID_20271
  Gene Ontology: Cellular component=integral to membrane; Biological process=intracellular signaling cascade
  Homolog annotation: Hit_ID=B9SKL1; Match level="QueryCoverage=82%, HitCoverage=40%, E-value=1e-101, Identity=57%"; Hit description =Suppression of tumorigenicity, putative
  Pfam annotation: Domain name=DENN; Domain location=31-252; Score= -7.6; E_value=3e-06; Accession=PF02141.13; Description=DENN (AEX-3) domain
  Pfam annotation: Domain name=dDENN; Domain location=294-371; Score =9.2; E_value=0.015; Accession=PF03455.11; Description=dDENN domain
  Pfam module annotation: Pfam domain module=DENN::dDENN; Domain location=31-252::294-371
SFGRENYIHDNGQTSPDLLSMHSPISRRLERAQSVESFLDSSVKVARSDDEDEVSLKHEMIVDDEKVIGWAKAHNNEPLQIVCGYHALPLPPRGGELVFRPLEHLQPVKYSRAGLSLLGFGETILDNGLTLAETNKVNARLAAAEEALALSIWTTATLCRALSLESXLFAGVLLEKQTVVICPNLGVLSAIVLSIIPMIRPFQWQSLLLPVLPRKLIDFLDAPVPFIAGVQHKPPDMKMKGSSLVRINVQKDQVKACSLPQLPRYKELVSDLGPIHARLSCENALAKRHPIYKCNEVQAEAAWQFLNVMRSYLESLCSDLRFHTITNVQSNNDRVSLLLKDSFIDSFPSKDHPFVKLFVETQMFSVLSDSRLYSFENERT

SEQ ID NO: 86246 - protein, 147 aa, Setaria italica
  Transcript Sequence Number=SeqID_20272
ARDSLRHREEAKKKQAELTELENEANELKQKNEEERVAIQGLEALLIKRKRRVEKCHRLAEAQSNYKAVLEKMIRDAMHQSVVYKEQLRLNQAATSTLMARLEAQRAMCDSSETELRKKYQQRDDLERQIKPERKRYRVDDGLLEER

SEQ ID NO: 86247 - protein, 307 aa, Setaria italica
  misc_feature (289)..(289): Xaa can be any naturally occurring amino acid
  Transcript Sequence Number=SeqID_20273
  Gene Ontology: Mol. function=hydrolase activity; Cellular component =cell wall
  Homolog annotation: Hit_ID=B6TJZ9; Match level="QueryCoverage=87%, HitCoverage=79%, E-value=1e-134, Identity=87%"; Hit description =Catalytic/ hydrolase
  Pfam annotation: Domain name=Abhydrolase_1; Domain location=89-307; Score=-15.2; E_value=0.099; Accession=PF00561.12; Description =alphabeta hydrolase fold
  Subcellular localization annotation: CTP_CleavageSite=49; ConfidenceScore=5.19e-01
PVGSVVGALGRWISGAVPPPPPPRVCGTPGGPPVTAPRLRLRDGRHLAYAESGARKEDARFKVVISHGFTGSRLDTIRAAPEVAEELGVYMVGFDRAGYGQSDPNPNRSVKSAALDVEELADALGLGPKFYVIGISLGCHAVWGALKYIPDRIAGAAMMAPVVNYWWPGFPADLVAEVYAKQEVGDQWALRVSHHAPGILHWWMEQSWLPTSTVVAGTTPLPNKRDAEIRSKMKEDGTFQQKMEQATQQGIHESYYRDMMVMFGKWEFDPMSLPEPPCPVHLWQGDEDXGLVPVVLQRYLASRLSWL

SEQ ID NO: 86248 - protein, 107 aa, Setaria italica
  Transcript Sequence Number=SeqID_20274
  Gene Ontology: Mol. function=hydrolase activity
  Homolog annotation: Hit_ID=B6TJZ9; Match level="QueryCoverage=96%, HitCoverage=30%, E-value=1e-50, Identity=89%"; Hit description =Catalytic/ hydrolase
LRTSKMKEDGTFQQKMEQATQQGIHESYYRDMMVMFGKWEFDPMSLPEPPCPVHLWQGDEDGLVPVVLQRYLASRLSWLNYHELPGTGHFLSPVPGLGDTVLRTLFG

SEQ ID NO: 86249 - protein, 108 aa, Setaria italica
  Transcript Sequence Number=SeqID_20275
  Gene Ontology: Mol. function=transcription factor activity; Cellular component=nucleus; Biological process=regulation of transcription, DNA-dependent
  Homolog annotation: Hit_ID=Q6Z301; Match level="QueryCoverage=71%, HitCoverage=32%, E-value=9e-28, Identity=77%"; Hit description=AP2 domain-containing transcription factor-like
  Pfam annotation: Domain name=AP2; Domain location=15-66; Score=69.2; E_value=1.6e-17; Accession=PF00847.12; Description=AP2 domain
NAAAAAARQQGAGKRQYKGVRMRSWGSWVSEIRAPNQKTRIWLGSYSTAEAAARAYDAALLCLKGSAADLNFPLRLPFDMPPAAMSPKAIQRVAAAAAAAASNGGADF

SEQ ID NO: 86250 - protein, 428 aa, Setaria italica
  Transcript Sequence Number=SeqID_20276
  Gene Ontology: Mol. function=protein serine/threonine kinase activity; Cellular component=plasma membrane; Biological process =protein amino acid phosphorylation
  Homolog annotation: Hit_ID=B6UCJ4; Match level="QueryCoverage=100%, HitCoverage=68%, E-value=0.0, Identity=89%"; Hit description =BRASSINOSTEROID INSENSITIVE 1-associated receptor kinase 1
  Pfam annotation: Domain name=Pkinase; Domain location=106-378; Score =132.8; E_value=1.1e-36; Accession=PF00069.17; Description=Protein kinase domain
  Pfam annotation: Domain name=Pkinase_Tyr; Domain location=106-378; Score=111.2; E_value=3.6e-30; Accession=PF07714.9; Description =Protein tyrosine kinase
  Pfam module annotation: Pfam domain module=Pkinase::Pkinase_Tyr; Domain location=106-378::106-378
YAHDYSLAGNRFLCNSSVIHGCSDLTAMTNGTVSRQVQKAKNHHQLALAISLSVTCSTILVLLFVYWLSCCRWRLPFASADQDLEFELGHLKHFSFHDLQSATNNFNSKNILGQGGFGIVYKGCLRNETLVAVKRLKDPDVTGEVQFQTEVELIGLAVHRNLLRLYGFCMTSNERLLVYPYMHNGSVADRLRDYCNGKPSLDWSKRMRIALGAARGLLYLHEQCNPKIIHRDVKAANILLDESFEAIVGDFGLAKLLDRQESHVTTAVRGTIGHIAPEYLSTGQSSEKTDVYGFGILLLELITGPKTLSNGHAHSQKGMILDWVRELKEEKKLDKLVDRDLKDSFDVAELECSVDVIIQCTQTNPILRPKMSEVLHALEANVTLAESSIELHREPVPYGGTYSFSIRHEDPHDSSSFIIEPIELSGPR

SEQ ID NO: 86251 - protein, 112 aa, Setaria italica
  misc_feature (86)..(86): Xaa can be any naturally occurring amino acid
  misc_feature (93)..(93): Xaa can be any naturally occurring amino acid
  Transcript Sequence Number=SeqID_20277
  Pfam annotation: Domain name=DUF92; Domain location=1-109; Score= -79.9; E_value=1.5e-06; Accession=PF01940.8; Description=Integral membrane protein DUF92
HVRKGTNGGVTLQGLLAATGGGLLIGLTFIIVGLLTAECSFDVALQQLLVLPISAAAGLLGSLIDSLLGATLQFSGYCSVRKKVVXKSGPTVXTKISGMTVLDNDSKCTQKL

SEQ ID NO: 86252 - protein, 295 aa, Setaria italica
  misc_feature (39)..(39): Xaa can be any naturally occurring amino acid
  Transcript Sequence Number=SeqID_20278
  Gene Ontology: Cellular component=integral to membrane
  Homolog annotation: Hit_ID=UPI0000ECD30D; Match level="QueryCoverage =85%, HitCoverage=75%, E-value=6e-26, Identity=31%"; Hit description =Transmembrane protein 19.
  Pfam annotation: Domain name=DUF92; Domain location=18-288; Score =393.5; E_value=3.7e-115; Accession=PF01940.8; Description=Integral membrane protein DUF92
MVIPAAFSSSLVVRSAVGVLLAAAIAARAVRRRSLDASXGGIAGFVVMAVHIACGYRYGAVLLAFFLSSSKLTKIGEDRKRRVEEEFKEGGQRNWIQVLANSTIATILVVIFEIITGGQDQCLDSNGSKIITGIMGGIIGHYCCCNGDTWSSEIGVLSNEQPRLITTLKHVRKGTNGGVTLQGLLAATGGGLLIGLTFIIVGLLTAECSFDVALQQLLVLPISAAAGLLGSLIDSLLGATLQFSGYCSVRKKVVSKSGPTVTKISGMTVLDNDAINAVSILLTTILTAFVCIYIF

SEQ ID NO: 86253 - protein, 130 aa, Setaria italica
  Transcript Sequence Number=SeqID_20279
MATESEFVTAPSTPEADSLKIVVEQRLLLHDDGEGGSRSTTIFRVPAHVRDANKELYEPRLVSVGPYYRGRAALRAMEQHKWRYLRELLRERRPRTLLARCVEAVRDVEHRARCCYVERTDIFDAAAKAA

SEQ ID NO: 86254 - protein, 111 aa, Setaria italica
  Transcript Sequence Number=SeqID_20280
RRRPRASPRWAPAGPRTKPPSSVEVGADGAVRLRMRLPKAEVARLMKESRDPAEAAERIMQLCVARDQGAAAAPPPVARSALSGRNATTTTAGLKREKRTRFMAVPDEIIG

SEQ ID NO: 86255 - protein, 77 aa, Setaria italica
  Transcript Sequence Number=SeqID_20281
VSEQLLMFQAPATPLALSRRRDRSTTKGRKTQEERQSNEYALRSPPCHPIVFFRFSLGTAMNLVRFSLFKPAVVVVA

SEQ ID NO: 86256 - protein, 390 aa, Setaria italica
  Transcript Sequence Number=SeqID_20282
  Gene Ontology: Mol. function=hydrolase activity, hydrolyzing O -glycosyl compounds; Biological process=carbohydrate metabolic process
  Homolog annotation: Hit_ID=A4PID2; Match level="QueryCoverage=95%, HitCoverage=85%, E-value=1e-148, Identity=70%"; Hit description=Beta- 1,3-glucanase
  Pfam annotation: Domain name=Glyco_hydro_17; Domain location=31-350; Score=359.8; E_value=5.2e-105; Accession=PF00332.10; Description =Glycosyl hydrolases family 17
MAPTTLLLLCCCLLAFPLPGSLAVEDFVGGYGINYGRIANNLPSPDKVVELLRKSKIRNVKIYDSDHSVLDAFKGSGLNLVIAIPNGLVKDMAANESKSMDWLNQNVKPYLPETRIIGITVGNEVLGGQDQSLYQPLVDAVKNVYNGLKRLHLEKQIEIFTPHSEAVFATSYPPSACVFKEELMPYMKPLLDLFATTHSSFYVNAYPFLAYTYDPEHIDINYALFKPNNGIVDPNNSLHYDNMFDAQIDAAYAALHAAGYDDMEVRVAETGWASSGDQSEAGASSENARTYNFNLRKRLFLRKGTPLKPNRPVKAYIFALFNENGKPGAGSEKHYGLFLPDGRISYDIGVSGLLPSSASSSMLSKKKIRAGGWILHYLATVLLSIFIFWP

SEQ ID NO: 86257 - protein, 93 aa, Setaria italica
  misc_feature (64)..(64): Xaa can be any naturally occurring amino acid
  Transcript Sequence Number=SeqID_20283
  Subcellular localization annotation: CTP_CleavageSite=55; ConfidenceScore=5.73e-01
SPPALPNSADSPRCPPCPLPPPDPRFAWPVSGASPAAGSSPSPLAPATTKRARPRLAAPPSAPXRVDYLHRSTPARIPLCSSPLHPPPLPPPL

SEQ ID NO: 86258 - protein, 54 aa, Setaria italica
  Transcript Sequence Number=SeqID_20284
GTGSGGGFARVDESRLGGGRGPESEPRFLLGDWEKERAVLIRWGLLLRHSIEVH

SEQ ID NO: 86259 - protein, 121 aa, Setaria italica
  Transcript Sequence Number=SeqID_20285
  Gene Ontology: Mol. function=metal ion binding
  Homolog annotation: Hit_ID=B6TV66; Match level="QueryCoverage=91%, HitCoverage=24%, E-value=6e-22, Identity=55%"; Hit description =Protein binding protein
MDHTGNLGHRDHTIDIPRNDVTSPSASHQDDHSDLDEFHDSRSPPDEIPAVPESSSGTHDVPNSQNASSARRDRGHPEARILNSGFWISIELIVNVSQIIAAISVLSVSRNEHPHAPLFVW

SEQ ID NO: 86260 - protein, 72 aa, Setaria italica
  Transcript Sequence Number=SeqID_20286
  Subcellular localization annotation: CTP_CleavageSite=62; ConfidenceScore=5.69e-01
MRNPPGRHLLRLSNRAVRSSSSSSGLGANAGASTSVASPRPLPVAGGRPLRASSPPPPSAVAAAAYWESRAL

SEQ ID NO: 86261 - protein, 40 aa, Setaria italica
  Transcript Sequence Number=SeqID_20287
HILVTLYSNTTNNCTMLYITSLDWFEQPALCSCWWCYCIR

SEQ ID NO: 86262 - protein, 170 aa, Setaria italica
  Transcript Sequence Number=SeqID_20288
  Homolog annotation: Hit_ID=B9T6K6; Match level="QueryCoverage=45%, HitCoverage=16%, E-value=2e-18, Identity=55%"; Hit description=DNA -directed RNA polymerase II, putative
  Subcellular localization annotation: CTP_CleavageSite=61; ConfidenceScore=5.29e-01
GWTKATRTQYPCPTAAIPSNSNSKQIRRTRTLHRLRTLGTKEGTPWWDHSSATAAPAALSLAASASASSLGNPVRTTTGAFSTSSFASFRPRYMLHFINIAVHILSAPALHVSGFKGSCSQIWQRSSYWSTRQSQSKVYPLFIPRKNVCTGGEESSLTESGPANFGVDSI

SEQ ID NO: 86263 - protein, 133 aa, Setaria italica
  Transcript Sequence Number=SeqID_20289
  Gene Ontology: Mol. function=structural constituent of ribosome; Cellular component=intracellular; Biological process=translation
  Homolog annotation: Hit_ID=B6T4E0; Match level="QueryCoverage=96%, HitCoverage=79%, E-value=1e-20, Identity=51%"; Hit description=50S ribosomal protein L12-2
  Pfam annotation: Domain name=Ribosomal_L12; Domain location=84-133; Score=29.2; E_value=1.2e-05; Accession=PF00542.11; Description =Ribosomal protein L7L12 C-terminal domain
TGPRFRRLSTAAATAAGEDPKLSRIADELLALSPAELDDYAALLRLKLRLSLTSSAAAGGASSAGAGDASAGPEEAAAAVKTAFDVKIEKYEAAAKIKIIKEVRAVTDLGLKEAKELVEKAPVVVRTGLPKEE

SEQ ID NO: 86264 - protein, 382 aa, Setaria italica
  Transcript Sequence Number=SeqID_20290
  Homolog annotation: Hit_ID=B9T6K6; Match level="QueryCoverage=99%, HitCoverage=79%, E-value=4e-88, Identity=46%"; Hit description=DNA -directed RNA polymerase II, putative
  Subcellular localization annotation: CTP_CleavageSite=32; ConfidenceScore=5.53e-01
SSSDLKAQTASLNLAFVTLKKRRADAVTMHTNAMKVAQMNLMATTSERLKMQSKSVKQLCRLFPMRRVIKEGEKKEDYTGPYDSICGARLPRGLDPHSVPSEELSAALGYMLHFINIAVRILSAPALHVSGFKGSCSQIWQRSSYWSTRQSQSKVYPLFIPRKNVCTGGEESSLTESGSANFGVDSIDSVKKHSFDSKRSNSFNFSGGSSHSMERHQYLQRGISLLKTSVTAITTYYYNSLGLDVPSNLSTFEAFAKLLHMLSSSKALRAALESNIASRSEKQAQQLNKSIWKASSAISSDSSFMDSIHTAIMPSTLDNLLLNSNESFLYTGKLVKHGGVPDNILDSWDLVEREVLPPPPSDVENVAQWERAMYADGGTKKK

SEQ ID NO: 86265 - protein, 630 aa, Setaria italica
  Transcript Sequence Number=SeqID_20291
CESKSLEELELGDGEADADMDVRGKSLEESELGNADVRSAGLDEMELGDLVTRNKVLEELGLGDADARNNIEELEVVDEDARGKSLDKSEAVDEDVRSKSLDEPEAVDEDGRGKNLDELEAVDEDDKGTSLDESGMIDGHVNGTNMDGSGLGFVAVEAVSAEAMPDDKEDAGDAEPAEGDDVAGASEEDGEEPLVETVVVTQEEVVAVAEEVGDEEADGEEESDAMGLSLGFNSTNGYDSMDVEEETHIENLDEGDSDNEDAEESEDDGFEGVNGGKDMSWRIGDDSGDGNEDEEMTHSLQRCNTFGGMEFENLNKGEAEMRDELGFDDFSGRGSLERMTSSNLLQAMNSIPSSYNITENVHGLSGEFLSMGADAHKNGVDLEPGSSYLFGNNGKRQIGDIDGYNGNLQAQEQFPQCNQQKRMRHSNSSSISPGSGFFNANFSVPIQNLMVEASRLYEQKEQELQNLQFEKQHWSDMLQQKDAIIQTLNSTRFEQQNKYQAELRRFEHDLNVMAQLVTGYKKALKQTQASFEEYRKKFPCNKPLYGDVTGGGGLVLSVSELERMRFEEERQKLAAANAMIEKFQNEWFLKLDEWTLSVNSLWSRMEGLYKEIDLLKEYRRARFATPSTEE

SEQ ID NO: 86266 - protein, 95 aa, Setaria italica
  Transcript Sequence Number=SeqID_20292
  Subcellular localization annotation: CTP_CleavageSite=85; ConfidenceScore=5.79e-01
RARGTASSPRHRSAAPAPSRPCLTSPRPPRLPASPRTPTSPSVSHPSKLLPFFYHNTAAIHLAFNTCSTKYLTGPVKPLGEPSPRLFSVSGLRAE

SEQ ID NO: 86267 - protein, 122 aa, Setaria italica
  Transcript Sequence Number=SeqID_20293
VFRTNLGVTTYNSVEKRNGCIDISPFLHHQKEAARKKQVIHVETMYCCCRSHEYRTAKREPTRRRGRILLRWPPVQHAHVRRLHKARSPSAAHARGTPAPLVMMARASPSFSELGQGPNRNK

SEQ ID NO: 86268 - protein, 280 aa, Setaria italica
  Transcript Sequence Number=SeqID_20294
  Gene Ontology: Mol. function=protein binding; Cellular component =integral to membrane; Biological process=RNA metabolic process
  Homolog annotation: Hit_ID=Q53Q54; Match level="QueryCoverage=77%, HitCoverage=18%, E-value=1e-123, Identity=95%"; Hit description =Major Facilitator Superfamily protein, expressed
  Pfam annotation: Domain name=MA3; Domain location=29-135; Score =142.5; E_value=1.3e-39; Accession=PF02847.9; Description=MA3 domain
DEEEEESDEEEDEEEMEIRDRTETNLVNLRRTIYLTIMSSVDFEEAGHKLMKIKLEPGQEMELCIMLLECCSQERTYLRYYGLLGQRFCMINKVYQENFEKCFVQQYSMIHRLETNKLRNVAKFFAHLLGTDALPWHVLAYIRLTEEDTTSSSRIFIKILFQELSEHLGIRLLNERLNDPNMQGSFESIFPKDHPKNTRFSINFFTSIGLGGITESLREYLKNMPRLIMQQQKPESSESESSGSESGSESSGSGSSSESESESSSDESERRRSKKRRKRT

SEQ ID NO: 86269 - protein, 496 aa, Setaria italica
  Transcript Sequence Number=SeqID_20295
  Gene Ontology: Mol. function=protein binding; Cellular component =integral to membrane; Biological process=RNA metabolic process
  Homolog annotation: Hit_ID=Q53Q54; Match level="QueryCoverage=75%, HitCoverage=33%, E-value=1e-150, Identity=71%"; Hit description =Major Facilitator Superfamily protein, expressed
  Pfam annotation: Domain name=MIF4G; Domain location=162-345; Score =142.6; E_value=1.2e-39; Accession=PF02854.11; Description=MIF4G domain
RARVSDGEEDGDRRRRRARVSDDEKEDGRRRRRARDSDEEREDRRGKRDRERDSRRHRRRSASSESGSSPDDRRRRRHRRDEGSRRRDDRRRRDDDRGERRRSPEKKEPTPPLPPPPPLLPEMIPGRTGGIYIPPFRMAQMMREVEDKSSPEYQRLTWDALKKSINGLVNKVNATNIKNIVPELFAENLVRGRGLFCQSCIKSQMASPGFTDVFAALVAVVNTKFPEIGRLLLVRVVLQLKRAYKRNDKPQLLAATKFIAHLVNQVVAHELVALELLTVLLENPTDDSVEVAAGFVKECGAMLQDLSPQGLHAIFERFRGILHEGEIDKRVQFLIEGLFAIRKAKFQGFPAIRPELDLVEQEDQFTHEISLEDDLDPETNLNVFRANPNFVEDEKAYENLKRSILGAESSEDEEGSDAASDDEEEEESDEEEDEEEMEIRDRTETNLVNLRRTIYLTIMSSVDFEEAGHKLMKIKLEPGQEMELCIMLLECCSQER

SEQ ID NO: 86270 - protein, 192 aa, Setaria italica
  Transcript Sequence Number=SeqID_20296
  Gene Ontology: Mol. function=electron carrier activity; Cellular component=endoplasmic reticulum membrane; Biological process =oxidation reduction
  Homolog annotation: Hit_ID=B6TML3; Match level="QueryCoverage=90%, HitCoverage=33%, E-value=1e-78, Identity=85%"; Hit description =Flavonoid 3-monooxygenase
MEIGRTMDIPTPLLLSTLAVSVVICYVLFWKQVATRKRAPLPPGPRGWPVLGNLPQLGGKTHQTLHEMTKVYGPLLRLRFGSSDVVVAGSAPVAEQFLRAHDANFSCRPPNSGGEHMAYNYQDVVFAPYGPRWRAMRKVCAVNLFSARALDDLRAVREREAALMVRSLAAAGQATAAVPLGRAVNVCTTNAL

SEQ ID NO: 86271 - protein, 136 aa, Setaria italica
  Transcript Sequence Number=SeqID_20297
HRLLPLAFAPPEIASIQRHHHSHTTDNSTDHGSSITSFLPIFFYLYSTHLIFPTKKIILEGNIIEYQTRRRAKPSPTGGGGRGCRRRRQPPRCRTARPAPPPWGSWQGTLSRRGRTWAAAGCSVAVPVRAAGPGRS

SEQ ID NO: 86272 - protein, 266 aa, Setaria italica
  Transcript Sequence Number=SeqID_20298
  Gene Ontology: Mol. function=protein binding
  Homolog annotation: Hit_ID=B9S8S6; Match level="QueryCoverage=98%, HitCoverage=50%, E-value=6e-87, Identity=60%"; Hit description =Protein binding protein, putative
LGYLPRITSDNLNSPFETLANIMEMVLTSTDDRGRREMKALVLNLLKDSSHCTDGSSDICSETLYSSCQGCLDRLHRLFTEASEEDYSVSVTRRITLETDNLLWLVEILVTQRICDDFVVMWSSQTELAELHSKLPGASRHTVSCITARLFVGIGRGEMLPSKNTRLRLLQVWLQALIDDYSWLQCSCRSFDRKLVEDGIGQTILTLPLEDQRSILLSWFGRFLKLGDNCPNLQRAFEVWWRRTFVRPYVNQAEAGNVLTSDRSSP

SEQ ID NO: 86273 - protein, 62 aa, Setaria italica
  Transcript Sequence Number=SeqID_20299
  Subcellular localization annotation: CTP_CleavageSite=23; ConfidenceScore=5.58e-01
SKQPTSADEPRSLRAGGSSLPVSAGAGSSNRGPPSLSTLRLVDWSFVSSQRRADWFLPFRWY

SEQ ID NO: 86274 - protein, 121 aa, Setaria italica
  Transcript Sequence Number=SeqID_20300
  Gene Ontology: Mol. function=nucleoside-triphosphatase activity; Cellular component=integral to membrane; Biological process=transport
  Homolog annotation: Hit_ID=Q6ZIV9; Match level="QueryCoverage=100%, HitCoverage=13%, E-value=4e-51, Identity=77%"; Hit description =Putative ABC transporter
  Pfam annotation: Domain name=ABC_tran; Domain location=1-121; Score =19.5; E_value=1.3e-07; Accession=PF00005.19; Description=ABC transporter
LWETLTGREHLQFYGRLKGLSGSSLDLAVDESLRSVNLFHGGAPDKQVKKYSGGMRRRLSVAISLIGDAKVVYMDEPSTGLDPASRKSLWRAVKQAKQDRAIILTTHSMEEAETLCDRLCI

SEQ ID NO: 86275 - protein, 531 aa, Setaria italica
  Transcript Sequence Number=SeqID_20301
  Gene Ontology: Mol. function=binding; Cellular component=mitochondrion
  Homolog annotation: Hit_ID=B9SPI6; Match level="QueryCoverage=99%, HitCoverage=98%, E-value=1e-160, Identity=53%"; Hit description =Pentatricopeptide repeat-containing protein, putative
  Pfam annotation: Domain name=PPR; Domain location=120-154; Score =32.1; E_value=2.3e-06; Accession=PF01535.12; Description=PPR repeat
  Pfam annotation: Domain name=PPR; Domain location=155-189; Score =26.2; E_value=0.00013; Accession=PF01535.12; Description=PPR repeat
  Pfam annotation: Domain name=PPR; Domain location=190-224; Score =21.6; E_value=0.0032; Accession=PF01535.12; Description=PPR repeat
  Pfam annotation: Domain name=PPR; Domain location=226-260; Score =13.9; E_value=0.2; Accession=PF01535.12; Description=PPR repeat
  Pfam annotation: Domain name=PPR; Domain location=296-330; Score =12.6; E_value=0.29; Accession=PF01535.12; Description=PPR repeat
  Pfam annotation: Domain name=PPR; Domain location=375-409; Score =19.4; E_value=0.015; Accession=PF01535.12; Description=PPR repeat
  Pfam annotation: Domain name=PPR; Domain location=410-444; Score=1.1; E_value=6.6; Accession=PF01535.12; Description=PPR repeat
  Pfam module annotation: Pfam domain module=PPR::PPR::PPR::PPR::PPR::PP R::PPR; Domain location=120-154::155-189::190-224::226-260::296 -330::375-409::410-444
MATRVKDVARRSTKKYVEEALYRRLFRKGSTPQAVREEVDGFLDSRKRAFKWEVGVCVRRMRRNALYRPALKLSEVMARRGMNPTISDQAIRLDLVAKSRGIAAAEKYFLDLPETSKTHLTYGALLNCYCKELMAEKAEALMEKMKELNFAFTAMSFNSLMTLYTKVNQPEKVPSIIQDMKADDVLPDIFTYNVWMRALAALKDIPGVERVIEEMKRDGRVTPDWTTYSNLASIYVDAGLFEKAEASLKELEKRNTSNDIEAYQFLITLYGRTQNLVEVHRVWRSLKRNCPRKANMSYLNMIQVLASLNDLPAAEACFKEWEAQYIHPPKKNMEDSGASTTEADSSTTVPSNQSDVKGTKGVEELELKHPKYDIRIANAMIKAYIAEGMLDKAVALKKRAKMRGGRLNAKTWEIFMEHYLKEGDLKMAHWCADRAIKKGHSSGRIWVPPRDVTETLMGYFEKNKDVDGAEQYVEVLKKVQKDLGTLVFEPLVRTYAAAGKKFPGMRQRLKIENVEVGEEAAKLLDSICVDQ

SEQ ID NO: 86276 - protein, 55 aa, Setaria italica
  Transcript Sequence Number=SeqID_20302
IFKRPSCGLQDYCKRLHVDLKNCGIEGHYLFRIFCVRFSKGHLVACETIVKDKWI

SEQ ID NO: 86277 - protein, 145 aa, Setaria italica
  Transcript Sequence Number=SeqID_20303
  Gene Ontology: Mol. function=hydrolase activity, hydrolyzing O -glycosyl compounds; Biological process=carbohydrate metabolic process
  Homolog annotation: Hit_ID=Q5Z791; Match level="QueryCoverage=68%, HitCoverage=26%, E-value=6e-42, Identity=79%"; Hit description =Putative beta-1,3-glucanase
FAAARLGYGNVPVHVSETGWPSKGDANEAGATVENARQYNRNLLMRQVSGEGTPLRPKLRLEVYLFALFNEDMKPGPTSERNYGLYQPDMSMVYNVGLNQLSTTSAASLSLATSPATRTDVRKDFGSLCLVTSLAILLITQALLL

SEQ ID NO: 86278 - protein, 73 aa, Setaria italica
  Transcript Sequence Number=SeqID_20304
  Gene Ontology: Mol. function=transferase activity, transferring hexosyl groups; Cellular component=endoplasmic reticulum; Biological process=carbohydrate metabolic process
  Homolog annotation: Hit_ID=B9RF27; Match level="QueryCoverage=100%, HitCoverage=41%, E-value=3e-26, Identity=78%"; Hit description=UDP-N- acetylglucosamine transferase subunit alg13, putative
KPLIVVVNEDLMDNHQSELAEELAERKHLFCARPQTLGETIRAMDLGTLVPYVPGDAKPVVTLINKFLGFPVD

SEQ ID NO: 86279 - protein, 90 aa, Setaria italica
  Transcript Sequence Number=SeqID_20305
  Gene Ontology: Mol. function=metal ion binding; Cellular component =integral to membrane; Biological process=ubiquitin-dependent protein catabolic process
  Homolog annotation: Hit_ID=B6TJ34; Match level="QueryCoverage=53%, HitCoverage=12%, E-value=6e-19, Identity=93%"; Hit description=RING -H2 finger protein ATL3B
  Pfam annotation: Domain name=PHD; Domain location=1-46; Score=-1.7; E_ value=0.041; Accession=PF00628.21; Description=PHD-finger
  Pfam annotation: Domain name=zf-C3HC4; Domain location=2-43; Score =38.4; E_value=2.8e-08; Accession=PF00097.17; Description=Zinc finger, C3HC4 type (RING finger)
  Pfam module annotation: Pfam domain module=PHD::zf-C3HC4; Domain location=1-46::2-43
ECAVCLAAFEDHDELRVLPACYHVFHPDCIDPWLDGAVTCPLCRADLTVAPPPAAPAESCDLTARQGAVREEPDDNEEEDERDEACLVAA

SEQ ID NO: 86280 - protein, 390 aa, Setaria italica
  misc_feature (68)..(68): Xaa can be any naturally occurring amino acid
  Transcript Sequence Number=SeqID_20306
  Gene Ontology: Mol. function=acid phosphatase activity; Cellular component=extracellular region; Biological process=biological_process
  Homolog annotation: Hit_ID=B6SPD1; Match level="QueryCoverage=99%, HitCoverage=76%, E-value=0.0, Identity=88%"; Hit description=Purple acid phosphatase
  Pfam annotation: Domain name=Metallophos; Domain location=88-285; Score=82.8; E_value=1.2e-21; Accession=PF00149.20; Description =Calcineurin-like phosphoesterase
AMIVSWVTPSELGSSTVMYGGAPHKLELRAEGTHTRYDYFNYTSGFIHHCTLKNLKHSSKYYYAMGFXHTVRTFWFTTPPKPGPDAPYKFGLIGDLGQTFDSNRTLSHYESNGGDAVLFVGDLSYADNHPLHDNNRWDTWARFVERSVAYQPWIWTAGNHELDFAPELGETTPFKPFSHRYPTPYRAAGSTEPFWYSVKIASAHVIVLASYSAYGKYTPQWTWLQDELKRVDRKTTPWLLVLMHSPWYNSNGYHYMEGETMRVQFEQWLVDAKADLVLAGHVHAYERSHRVSNVAYDIVNGKSTPVRDQGAPVYVTIGDGGNIEGIADNFTRPQPSYSAFREASFGHATLEIKNRTHAYYAWHRNQDGAKVVADGLWLTNRYWMPTDDTN

SEQ ID NO: 86281 - protein, 163 aa, Setaria italica
  Transcript Sequence Number=SeqID_20307
  Gene Ontology: Mol. function=calcium ion binding
  Homolog annotation: Hit_ID=B9STM5; Match level="QueryCoverage=87%, HitCoverage=28%, E-value=2e-20, Identity=38%"; Hit description =Pentatricopeptide repeat-containing protein, putative
  Pfam annotation: Domain name=PPR; Domain location=28-62; Score=32.7; E_value=1.5e-06; Accession=PF01535.12; Description=PPR repeat
  Pfam annotation: Domain name=PPR; Domain location=63-97; Score=28.4; E_value=2.8e-05; Accession=PF01535.12; Description=PPR repeat
  Pfam module annotation: Pfam domain module=PPR::PPR; Domain location =28-62::63-97
TYADRGMSSEALKLLDHMQLEGMSPTAACWDSVISAFLRNGQFEDALEVFKQMLLTRTRPNLRTWSLLISGLSKTGMHQEVTNLYCKMQEVESAPSPTVYSAVILAVKTAVSVHCGKAIHACVVKKGLLLSKSVIQSLLNMYSSFDDRGTMDSLLRLLAECSK

SEQ ID NO: 86282 - protein, 113 aa, Setaria italica
  Transcript Sequence Number=SeqID_20308
IIKPINNESRFPRAFPLAACEKDISGERRDSSPSSCSRALRHLRRGGVSASNGKKQSSLAPFFRGSYSARLRAGAGSHNHSALVRSTWEREIEEPRNRGMGPAVVAGEDKGVS

SEQ ID NO: 86283 - protein, 96 aa, Setaria italica
  Transcript Sequence Number=SeqID_20309
  Subcellular localization annotation: CTP_CleavageSite=42; ConfidenceScore=5.42e-01
PANLHSTTYKLHHSFKLFLFGGGLITGRSFLLSKRHFTMTVSLSMEPRLAASLGELLLWAVAAEIRHVANLLLGSGPPLSCSASCELWQRSLSAVA

SEQ ID NO: 86284 - protein, 67 aa, Setaria italica
  Transcript Sequence Number=SeqID_20310
  Gene Ontology: Mol. function=SNAP receptor activity; Cellular component=membrane; Biological process=intracellular protein transport
  Homolog annotation: Hit_ID=B6TK09; Match level="QueryCoverage=100%, HitCoverage=21%, E-value=4e-30, Identity=97%"; Hit description =Syntaxin-related protein KNOLLE
MNDLMTKSFMSYVDLKKAAMKDLEAGGDGIELPESGAGGVTDERLRGFFQEAEAVKAEMAAIRDALD

SEQ ID NO: 86285 - protein, 119 aa, Setaria italica
  Transcript Sequence Number=SeqID_20311
  Subcellular localization annotation: CTP_CleavageSite=33; ConfidenceScore=5.13e-01
RRSGLLSSSGSVSRRTPAGRGGATGVRAVDGASAAAAVAAAADAALPPPQVTWQIVVGAVAGVTPFVVAGVEFGKRIVQQKKCEICGGSGLVMKNDYYVRCQGCGGFLPWQSWRRFFTG

SEQ ID NO: 86286 - protein, 183 aa, Setaria italica
  misc_feature (17)..(17): Xaa can be any naturally occurring amino acid
  Transcript Sequence Number=SeqID_20312
  Gene Ontology: Mol. function=protein serine/threonine kinase activity; Cellular component=cytoplasm; Biological process=protein amino acid phosphorylation
  Homolog annotation: Hit_ID=B9S1Z3; Match level="QueryCoverage=100%, HitCoverage=14%, E-value=1e-100, Identity=92%"; Hit description=ATP binding protein, putative
  Pfam annotation: Domain name=Pkinase; Domain location=1-183; Score =146.8; E_value=6.6e-41; Accession=PF00069.17; Description=Protein kinase domain
  Pfam annotation: Domain name=Pkinase_Tyr; Domain location=1-180; Score=-70.6; E_value=4.9e-09; Accession=PF07714.9; Description =Protein tyrosine kinase
  Pfam module annotation: Pfam domain module=Pkinase::Pkinase_Tyr; Domain location=1-183::1-180
HENIIEMIDAFETPQEXFCVVTEFAQGELFEVLEDDKCLPEEQVQAIAKQLVKALYYLHSNRIIHRDMKPQNILIGKGSIVKLCDFGFARAMSANTVVLRSIKGTPLYMAPELVREQPYNHTADLWSLGVILYELFVGQPPFYTNSVYALIRHIVKDPVKYPDNMSANFKSFLKGLLNKVPQS

SEQ ID NO: 86287 - protein, 122 aa, Setaria italica
  Transcript Sequence Number=SeqID_20313
  Gene Ontology: Mol. function=aspartic-type endopeptidase activity; Cellular component=retromer complex; Biological process=DNA integration
  Homolog annotation: Hit_ID=Q6I5B6; Match level="QueryCoverage=99%, HitCoverage=10%, E-value=1e-23, Identity=49%"; Hit description =Putative polyprotein
TRYEPTGQSTFLAAIRQEQLVRQGDGTVDDFYGQISTIWRQLDTLSPPLSSSTCQSCLGQQQALELRRTYDFLTRLRDEFEPLRAQLVARHPCVSLMEALAAVRNEETRLLAAGLMRYSSVL

SEQ ID NO: 86288 - protein, 179 aa, Setaria italica
  Transcript Sequence Number=SeqID_20314
  Homolog annotation: Hit_ID=B6SZG6; Match level="QueryCoverage=100%, HitCoverage=43%, E-value=1e-91, Identity=88%"; Hit description =Fructose-2,6-bisphosphatase
SDALTEMSHGQWEGCSKSEIYTPEMLNLMDSTQPDFSAPSGESLRQVQFRMMEFLNRTILRLPEKVAMGDTLSQQNEAKWFSRQSSSNSVQDGPPWDLLYRLNPHSLQRKKSGKSRLQFVTSGDNDPEDDFSPKDINQRHILHKGSLGSSVTTSIAIFSHATPIRCLIAGLLDCNPMMS

SEQ ID NO: 86289 - protein, 141 aa, Setaria italica
  Transcript Sequence Number=SeqID_20315
  Gene Ontology: Mol. function=signal transducer activity; Biological process=two-component signal transduction system (phosphorelay)
  Homolog annotation: Hit_ID=B6TQG5; Match level="QueryCoverage=98%, HitCoverage=96%, E-value=6e-62, Identity=81%"; Hit description =Histidine-containing phosphotransfer protein 5
  Pfam annotation: Domain name=Hpt; Domain location=41-126; Score=58.7; E_value=2.2e-14; Accession=PF01627.15; Description=Hpt domain
MDAANQLTALLNNMFATGLLDEQFQQLQMLQDPSAPDFVSEVVTLFCQDGERIIGELAKLLEKPTVDFDRVDAFVHQLKGSSASVGAQKVKNTCVQFREVCQLKSRDGCLKTLDLVRTEFYDLRGKFQTMLQLEKHIQGFK

SEQ ID NO: 86290 - protein, 150 aa, Setaria italica
  misc_feature (1)..(1): Xaa can be any naturally occurring amino acid
  Transcript Sequence Number=SeqID_20316
  Gene Ontology: Mol. function=transporter activity; Cellular component= membrane; Biological process=oligopeptide transport
  Homolog annotation: Hit_ID=Q7X619; Match level="QueryCoverage=99%, HitCoverage=24%, E-value=2e-49, Identity=69%"; Hit description =P0076O17.8 protein
XRGSIFTSDCKGFVAAFTKRKQICPSGSSNPANGGAGDPAAPVDDNFRHANKFRFLDKACIRIAPEPDTEPESPWRLCTAAEVRQAKTLLAVMPIVACTVVFNTVLAQLQTFSVQQGSIMDTRLAPGSSSFAIPPASLQAIPYAMLLALV

SEQ ID NO: 86291 - protein, 71 aa, Setaria italica
  Transcript Sequence Number=SeqID_20317
  Homolog annotation: Hit_ID=B6SLG3; Match level="QueryCoverage=76%, HitCoverage=13%, E-value=2e-11, Identity=64%"; Hit description=Acid phosphatase
AAAAGEAEAEAPAAEATDASPDDGAPARPVVLLTCGGGIRSAGLAALVDALVAGGRCDVHVCAPESDKPAC

SEQ ID NO: 86292 - protein, 65 aa, Setaria italica
  Transcript Sequence Number=SeqID_20318
  Gene Ontology: Mol. function=6-phosphofructo-2-kinase activity; Biological process=fructose 2,6-bisphosphate metabolic process
  Homolog annotation: Hit_ID=Q947C1; Match level="QueryCoverage=96%, HitCoverage=8%, E-value=2e-22, Identity=82%"; Hit description =Fructose-6-phosphate-2-kinase/fructose-2, 6-bisphosphatase
VSLKMENARISGDLVPHVYGSEPIIGSWDPARALAMERELASMWELSFVVPPDHGALPLVAVLFH

SEQ ID NO: 86293 - protein, 50 aa, Setaria italica
  Transcript Sequence Number=SeqID_20319
PLQKPDGQKGLFIDRGVGSPKLPKSASAYSLASGLSSKVSIPSIPEYSCV

SEQ ID NO: 86294 - protein, 79 aa, Setaria italica
  Transcript Sequence Number=SeqID_20320
FICIQLSSFTERHCQPFKRGIISSIQQDNSCKINTFTCCFLYGAITKLLIEKLPWILIFYLPNSKWHTKCGKYHMKESG

SEQ ID NO: 86295 - protein, 768 aa, Setaria italica
  Transcript Sequence Number=SeqID_20321
  Gene Ontology: Mol. function=6-phosphofructo-2-kinase activity; Cellular component=6-phosphofructo-2-kinase/fructose-2,6 -biphosphatase 1 complex; Biological process=fructose 2,6 -bisphosphate metabolic process
  Homolog annotation: Hit_ID=Q947C1; Match level="QueryCoverage=94%, HitCoverage=97%, E-value=0.0, Identity=87%"; Hit description =Fructose-6-phosphate-2-kinase/fructose-2, 6-bisphosphatase
  Pfam annotation: Domain name=6PF2K; Domain location=355-574; Score =413.5; E_value=3.5e-121; Accession=PF01591.10; Description=6 -phosphofructo-2-kinase
  Pfam annotation: Domain name=CBM_20; Domain location=46-138; Score= -4.4; E_value=0.00053; Accession=PF00686.11; Description=Starch binding domain
  Pfam annotation: Domain name=PGAM; Domain location=576-727; Score =123.5; E_value=6.9e-34; Accession=PF00300.14; Description =Phosphoglycerate mutase family
  Pfam module annotation: Pfam domain module=6PF2K::CBM_20::PGAM; Domain location=355-574::46-138::576-727
MGTSGSKGIDGVGGLGSQAAGVGAAGGDGEAGEGGGAAEAWHGGAQLYVSLKMENARISGDLVPHVYGSEPIIGSWDPARALAMERELASMWELSFVVPPDHETVEFKFLLKPKDTATPCIIEEGPTRLLTGGMLEGDVRVALFKLNGDDEVLEFRVFNKADIVSPLELAASWRVYKENFQPSRVRGIPDISINVAPTHATEEGSAATLELDLEHYVVPAPTAPPNEYAANLTATPASLIQTGASWTNDMLLSDGIQSPSTVSADFEGCNNLKKNIEAWATDSSKKLQGSGLIESKSVGTFTPLQKPDGQKGLFIDRGVGSPKLPKSASAYSLASGLSSKTMPEAAGAVAAAAVADRLHGSKEDRKLAIVLVGLPARGKTFTAVKLTRYLRWLGHETRHFNVGKYRRLKHGANQAADFFRDDNPEGIEARNEVAALAMEDMIDWMHGGGQVGIFDATNSTRKRRHMLMKMAEGNCKIIFLETICNDPRIIETNIRLKIQQSPDYADQPDYEAGLQDFKERLTNYEKVYEPVGEGSYIKMIDMVKGQGGQLQVNNISGYLPGRIVFFLVNSHLTPRPILLTRHGESLHNVRGRVGGDSVLSEAGELYANKLANFIEKRLKSEKTATIWTSTLQRTILTASPIIGFPKIQWRALDEINSGVCDGMTYEEIKKIMPEEYESRRKDKLRYRYPRGESYLDVIQRLEPVIIELERQQAPVVVISHQAVLRALYAYFADRPLREVPNIEMPLHTIIEIQMGVTGVEEKRYKLMD

SEQ ID NO: 86296 - protein, 145 aa, Setaria italica
  Transcript Sequence Number=SeqID_20322
  Gene Ontology: Mol. function=nucleotide binding; Cellular component =nucleus; Biological process=defense response
  Homolog annotation: Hit_ID=Q8RV64; Match level="QueryCoverage=88%, HitCoverage=14%, E-value=4e-41, Identity=61%"; Hit description =Disease-resistant protein DS3
LLKLIVNFSYNNLTHHLKTCLLYLSMYPDGCMVCKDDLVKQWVAEGFIDATGGREVGIAESYFHELIARRFLQPADIRYNSEVVSCSVHDVVRDLVVQKSLEENFIMVLDCYRRNVSLSEKVHRLSLHFPHAKYARTNIRSSQVR

SEQ ID NO: 86297 - protein, 99 aa, Setaria italica
  Transcript Sequence Number=SeqID_20323
GYHIEDLSGHGYGCEVKLLAIPNITTFTSCSSGRHRGPYARTGLARNLCWCASFFSFIQEQNSLFQKQEKKRTLYTLSEFACGNKNSIRTSALASAQLP

SEQ ID NO: 86298 - protein, 134 aa, Setaria italica
  Transcript Sequence Number=SeqID_20324
  Gene Ontology: Mol. function=phosphopantetheine binding; Cellular component=chloroplast envelope; Biological process=fatty acid biosynthetic process
  Homolog annotation: Hit_ID=B4FV78; Match level="QueryCoverage=99%, HitCoverage=94%, E-value=2e-47, Identity=74%"; Hit description=Acyl carrier protein
  Pfam annotation: Domain name=PP-binding; Domain location=62-129; Score=62.1; E_value=2.1e-15; Accession=PF00550.17; Description =Phosphopantetheine attachment site
  Subcellular localization annotation: CTP_CleavageSite=54; ConfidenceScore=5.44e-01
MASLSAVSGKAAAGYCKPLALSCKGSRVPGRSLISMGETRGRLISLRSPRFRVYAAKEETVNKVIDIVKQQLALGADAALTPESKFTDLGADSLDTVEIVMALEEEFMITVEEDNAQNITTIQEAADLIDKLVG

SEQ ID NO: 86299 - protein, 98 aa, Setaria italica
  Transcript Sequence Number=SeqID_20325
TSTAQCYQNSSSTTIASILDPGRLHVPLLTRDQLIGRLQVSLQIQYQPILTIRYVLGSFGVTVVLSSTSGSWEMLPLHGIRRWKFIQIMAKVFNCPCH

SEQ ID NO: 86300 - protein, 117 aa, Setaria italica
  misc_feature (42)..(42): Xaa can be any naturally occurring amino acid
  Transcript Sequence Number=SeqID_20326
  Subcellular localization annotation: CTP_CleavageSite=37; ConfidenceScore=5.31e-01
GPRPRPRPRPRPRRRRGARFANPSRRLPQPRTQSAPAAAANXPTLFSPMATKSHKKKPSAANPPINPKAASSDKKSKPPKPTEDQPVQAAAEKKPKKQKARDEIDEIFSAAKASKKR

SEQ ID NO: 86301 - protein, 98 aa, Setaria italica
  Transcript Sequence Number=SeqID_20327
  Subcellular localization annotation: CTP_CleavageSite=41; ConfidenceScore=5.25e-01
GFQQSQNASSFSSMPSTMLSMRGLGRQKIKDQSREKMLIFPSSMLSTMLKHGGGCASLHHKHRKDGGEVPLLSVYCKKSIQTPNRLNHIILWSNSGIS

SEQ ID NO: 86302 - protein, 292 aa, Setaria italica
  Transcript Sequence Number=SeqID_20328
  Gene Ontology: Mol. function=nucleotide binding; Biological process =defense response
  Homolog annotation: Hit_ID=Q84YF1; Match level="QueryCoverage=98%, HitCoverage=22%, E-value=1e-95, Identity=64%"; Hit description =Putative Xa1-like protein
RDLRVLFIFMNSTNSLPHSFSKLIHLRHLKLETPYDNWGLCCPRIVSRFYHLKFLDLQNWHGICCDDFPEDISRLVNLCHFGARKEFHTNIPEVGKMRLLQELKEFHVKKESTGFELRELGQLVQLGGELSIRGLENVRSSKEAAEARLMAKRDLIKLGLFWSRGHQSKVDDILTNLQPHSNLRALCIVNHGGPAGPSWLCSNIHMKYLETLHLEGVSWSTLPPFGQIYHLRKLKLKNIVGISQFGPDFIGGITEKSFTHLKEVQLHDMPELVEWIGGGNTHLFSRLERNTK

SEQ ID NO: 86303 - protein, 128 aa, Setaria italica
  Transcript Sequence Number=SeqID_20329
  Gene Ontology: Mol. function=nucleotide binding; Biological process =defense response
  Homolog annotation: Hit_ID=Q84YF1; Match level="QueryCoverage=89%, HitCoverage=8%, E-value=2e-36, Identity=61%"; Hit description =Putative Xa1-like protein
SQVQTGISQQYFWQLDNGFLMKGDQNYYVMHDLMHELAQVVSSKECAYISCSSFRADDVQPSIRHLSILMSNDYNETFGEEMDKLKRRVDIGNLRSLMIFGEYERASLVNILKETFKEIKGLRVLFIF

SEQ ID NO: 86304 - protein, 84 aa, Setaria italica
  Transcript Sequence Number=SeqID_20330
  Gene Ontology: Mol. function=glyceraldehyde-3-phosphate dehydrogenase (phosphorylating) activity; Cellular component=cytoplasm; Biological process=glucose metabolic process
  Homolog annotation: Hit_ID=A5JEH4; Match level="QueryCoverage=57%, HitCoverage=37%, E-value=2e-16, Identity=89%"; Hit description =Glyceraldehyde 3-phosphate dehydrogenase (Fragment)
  Pfam annotation: Domain name=Gp_dh_C; Domain location=2-84; Score= -45.8; E_value=0.00072; Accession=PF02800.12; Description =Glyceraldehyde 3-phosphate dehydrogenas
KASLLTLVLLSVKLATILYSYKFNCDSASNLYINLLQAVGKVLPELNGKLTGMSFRVPTVDVSVVDLTVRLQKGASYEDIKKAI

SEQ ID NO: 86305 - protein, 47 aa, Setaria italica
  Transcript Sequence Number=SeqID_20331
GSQNISKIWWEPKDVIIVISLFLAVACSSEIIQALFQFFLWNLLIPA

SEQ ID NO: 86306 - protein, 69 aa, Setaria italica
  misc_feature (14)..(14): Xaa can be any naturally occurring amino acid
  misc_feature (16)..(16): Xaa can be any naturally occurring amino acid
  Transcript Sequence Number=SeqID_20332
KKDGDIGKAEGSIXGXKGKINTLSKDIELLQLAVAEAQKRRKGGIWTWLYAATTTMVAAISFIYATRSN

SEQ ID NO: 86307 - protein, 175 aa, Setaria italica
  misc_feature (20)..(20): Xaa can be any naturally occurring amino acid
  Transcript Sequence Number=SeqID_20333
RNKTIIQKAETTAESSSCAXQKTSSIIWSCSTCQANGTSEADLKEHLSGKTHQQNIEGQCQEGDGMTKNAEPQEAMCQESKLPQLSEKPPCTICQDNCTTKSELGSLLLAKIQTLLDAIDNMAMNSESHKAKSPPNNMPQHAEQTSQSNCSICQTGSTSQSNCNICQTGSGYQSC

SEQ ID NO: 86308 - protein, 127 aa, Setaria italica
  misc_feature (36)..(36): Xaa can be any naturally occurring amino acid
  misc_feature (41)..(41): Xaa can be any naturally occurring amino acid
  misc_feature (58)..(58): Xaa can be any naturally occurring amino acid
  misc_feature (91)..(91): Xaa can be any naturally occurring amino acid
  misc_feature (105)..(105): Xaa can be any naturally occurring amino acid
  Transcript Sequence Number=SeqID_20334
  Gene Ontology: Mol. function=protein binding; Cellular component =nucleus; Biological process=regulation of transcription, DNA -dependent
  Homolog annotation: Hit_ID=Q6ASS7; Match level="QueryCoverage=72%, HitCoverage=14%, E-value=1e-19, Identity=57%"; Hit description=MSI type nucleosome/chromatin assembly factor C, putative
NPSRRGCRKLAAAAAAAYAFRAEVEERLINEDCEIXKDNTXFLYGLAVAQALELEWPXPLIVRWLPDCDEPRGKGHSLQKIGARTSGDPSXLMLAQVQRPIDDAXGDVLHYDDYHADIRRARLSCRG

SEQ ID NO: 86309 - protein, 269 aa, Setaria italica
  misc_feature (257)..(257): Xaa can be any naturally occurring amino acid
  Transcript Sequence Number=SeqID_20335
  Gene Ontology: Mol. function=binding; Cellular component=integral to membrane
  Homolog annotation: Hit_ID=B9SXF5; Match level="QueryCoverage=81%, HitCoverage=36%, E-value=7e-89, Identity=70%"; Hit description =Endomembrane protein emp70, putative
  Pfam annotation: Domain name=EMP70; Domain location=77-269; Score= -138.0; E_value=2.9e-10; Accession=PF02990.8; Description =Endomembrane protein 70
YLSKHKGREELRHEHRPRAGRPFPSPMASAGGAALAALALLVLLPVAAASDSDHKYQADEPVTLWVNKVGPYNNPQETYNYYSLPFCHATENHVHKWGGLGEVLGGNELIDSQIDIKFRKNVDKATICSLDLDLDKAKQLSDAIENLYWFEFFIDDLPLWGFVGEADRNNDNKYFLFTHKNIVIRYNGNQIIHVNLTQESPKLIDANKAMDMTYSVKWEPTNITFAHRFDVYLDYPFFEHQIHWFSIFNSFMMVIFXTGLVSMILMRTL

SEQ ID NO: 86310 - protein, 56 aa, Setaria italica
  Transcript Sequence Number=SeqID_20336
MASAHRAVIGFLLVFLASLSGAASKSFTITNNCEYTVWPGILSSAGSAGMDATGFA

SEQ ID NO: 86311 - protein, 87 aa, Setaria italica
  Transcript Sequence Number=SeqID_20337
  Subcellular localization annotation: CTP_CleavageSite=58; ConfidenceScore=5.26e-01
SGVPSSAEEARASSPKSSSPPCSSLNNPLDPAPATNPTSGDSNHAASWEQQGSGGGARSAQGGDYLEHVDLEDLEEEIPRLMGQKKS

SEQ ID NO: 86312 - protein, 287 aa, Setaria italica
  Transcript Sequence Number=SeqID_20338
  Gene Ontology: Mol. function=DNA binding; Biological process =regulation of transcription
  Homolog annotation: Hit_ID=Q7XPT2; Match level="QueryCoverage=88%, HitCoverage=93%, E-value=6e-87, Identity=66%"; Hit description =OSJNBa0083N12.9 protein
  Pfam annotation: Domain name=Myb_DNA-binding; Domain location=40-91; Score=45.3; E_value=2.3e-10; Accession=PF00249.23; Description=Myb -like DNA-binding domain
RRRITQGRGVSSMFEGMERAGYGGAAAMGGVVLSRDPKPRLRWTPDLHERFVEAVTKLGGPDKATPKSVLRLMGMKGLTLYHLKSHLQKYRLGKQSKKDTGLEASRGAFAAQGINFSAPVPPSIPSTAGNNTGETPLADALKYQIEVQRKLHEQLEVQKKLQMRIEAQGKYLQTILEKAQNNLSYDASGAANLEATRSQLTDFNLALSGFMDNVSQVCEQNNGDLAKAISEDNLRASNLGFQLYHGVHDGDDVKCTPDEGLLLLDLNIRGGYDHRSAADLKMNQHMR

SEQ ID NO: 86313 - protein, 80 aa, Setaria italica
  Transcript Sequence Number=SeqID_20339
  Subcellular localization annotation: CTP_CleavageSite=8; ConfidenceScore=5.24e-01
RSIARRVSSATAGSGDDGRQLRSKSTKAVILPGRKLQPGLSQFNSDRTNQFNHPQRVKINLTYNRTRLRPRPYKKGRLTD

SEQ ID NO: 86314 - protein, 266 aa, Setaria italica
  Transcript Sequence Number=SeqID_20340
  Gene Ontology: Mol. function=oxidoreductase activity; Biological process=oxidation reduction
DSNLRTLGFSEEEDEEEGDDQDADGGADDPAVVFDACEGDMDALPAAAEYARRMRDVGMRVVALLSGCPDAGIREEPFAEGRRKARCLVWASKVSAGDTAPPAAGKAKAYPYVVGLQCQWEASGQEAAPASWVMNEGGEWTAVGARDGALLVTIGDIAQVWSNGKLRKVRGMARPTSAPLGTQHGETDRLSLTVLVTLSLDNIISPLVPLSSDAAGEGDEDRDEEADGAGADGDGWRFHSFLLEDYAWRVYHQRLQFKDPLVRYRI

SEQ ID NO: 86315 - protein, 52 aa, Setaria italica
  Transcript Sequence Number=SeqID_20341
TLRLFFKPSILFLIETGALYTFCSLNQKCRVNDFDADVMVYSHMACCVLITC

SEQ ID NO: 86316 - protein, 138 aa, Setaria italica
  misc_feature (135)..(135): Xaa can be any naturally occurring amino acid
  Transcript Sequence Number=SeqID_20342
  Gene Ontology: Mol. function=metal ion binding
  Homolog annotation: Hit_ID=Q2RA96; Match level="QueryCoverage=85%, HitCoverage=15%, E-value=1e-11, Identity=39%"; Hit description=PHD -finger family protein, expressed
FGGSRRHRSRKARRDSTDACTKHFPSGGTFNSSEMFVEEKAKHNDVEKEGESKKDHLIYQLESADGSSHSAPDLAAEIRKTMVDVEPTMNIMECMDLSKEKDSCSLSLNYVEGSIPLNCDVERSHPFVRDDSCPXVPI

SEQ ID NO: 86317 - protein, 81 aa, Setaria italica
  Transcript Sequence Number=SeqID_20343
  Subcellular localization annotation: CTP_CleavageSite=17; ConfidenceScore=5.37e-01
QHSTSPAVVFCRVQFHSGAMRQEACSLFFLSISFFILLHSTSSSFSMLQALSFPYLGHGNGSSSMQQHTVASLLNHSTSIG

SEQ ID NO: 86318 - protein, 369 aa, Setaria italica
  Transcript Sequence Number=SeqID_20344
  Gene Ontology: Mol. function=transcription regulator activity; Cellular component=nucleus; Biological process=regulation of transcription
  Homolog annotation: Hit_ID=B9RKM4; Match level="QueryCoverage=72%, HitCoverage=78%, E-value=6e-56, Identity=46%"; Hit description =Transcription factor, putative
MMGGGEFKSSLLQQMMWSGGTDSKNMMSSLMPCAEEQEASNNKMPPLSSPSMLLPQHLLQISSGLAPEVNSAATSLASSDLHDGRESNMPESWSQLLLGGLVGDHERYSAATALLSKGLEEGPMPNQGAAAAYNFYGHGGVGGEEIQTSGTNKSQVASSPRSCITASLGSNMLDFSNSTVQAPEVKNHHSDNSSEGNSTASGSAPKKARVQTSSSAQSTLKVRKERLGDRITALHQIVSPFGKTDTASVLQETIGYIRFLLSQIEALSFPYLGHGNGSSSMQQHTVASLLNHSTSIGTVEAQGPTEQDEGDVGDEEGKKDLRSRGLCLVPVSCTSHLAGDDSGASDFWAVAAAPPPPPPPPPLGSIIWR

SEQ ID NO: 86319 - protein, 128 aa, Setaria italica
  misc_feature (51)..(51): Xaa can be any naturally occurring amino acid
  Transcript Sequence Number=SeqID_20345
  Gene Ontology: Mol. function=tRNA (5-methylaminomethyl-2 -thiouridylate)-methyltransferase activity; Cellular component =cytoplasm; Biological process=purine nucleotide biosynthetic process
  Homolog annotation: Hit_ID=B9SP14; Match level="QueryCoverage=66%, HitCoverage=24%, E-value=8e-36, Identity=82%"; Hit description=GMP synthase, putative
KSLSKVDITRSLSLYLPVTCVDASEQFLSKLKGVEDPEQKRKIIGREFIAXFDDFGHKLEQKIGKRPGFLVQGTLYPDVIESCPPPGSGRTHSHTFKILPNFRTSSLNRSLSGSMSFNFISFGSPPTL

SEQ ID NO: 86320 - protein, 136 aa, Setaria italica
  Transcript Sequence Number=SeqID_20346
  Gene Ontology: Mol. function=tRNA (5-methylaminomethyl-2 -thiouridylate)-methyltransferase activity; Cellular component =cytoplasm; Biological process=purine nucleotide biosynthetic process
  Homolog annotation: Hit_ID=B9SBB6; Match level="QueryCoverage=87%, HitCoverage=22%, E-value=2e-54, Identity=81%"; Hit description=GMP synthase, putative
  Pfam annotation: Domain name=GMP_synt_C; Domain location=43-135; Score=164.5; E_value=3.1e-46; Accession=PF00958.14; Description=GMP synthase C terminal domain
YFYFLKSYYPIFLGSLVLAVRVLGDVTQGNALDTLRQVDEIFVQAIKDAGLYDKIWQAFAVFLPVQTVGVQGDQRTHSNAVVLRAITSEDGMTADWYYFGHEFLVDVVNKICNNVRGINRVCQDITSKPPATVEWE

SEQ ID NO: 86321 - protein, 631 aa, Setaria italica
  misc_feature (197)..(197): Xaa can be any naturally occurring amino acid
  Transcript Sequence Number=SeqID_20347
  Gene Ontology: Mol. function=signal transducer activity; Cellular component=integral to membrane
  Homolog annotation: Hit_ID=B9SDD5; Match level="QueryCoverage=90%, HitCoverage=76%, E-value=1e-151, Identity=47%"; Hit description =Signal transducer, putative
MAASPQQQGQGSQGGSGGGGWSPEQFWSLLDKADRRFARVRDLPLLGRQEPDAFAKAFRAYTQLWRMQQEHRHRLLEAGLRRWQVGEIAARIAHLYYAQYQRTADTALLSEAFVFYHAVLDRAYFLDADHHLTPAKHLRFLARFLLVALLLARRAHTVPRLAADIRALLDDSKKSFQEAEYKEWKHVVQEILRFLRXADSPFMNMRPLRYSYAFDLPPDKLPTVPPTVKKRGLVLSDAILCSYYPNEVKFTDLSIDVFRMLQCLEWEPCGSFALNNGYSAHDESGQNQPNLLKDLRDAALPPNPLKTNLNRPSVTHFLTVLATKCEELPSNGIMLIYLSAAGEMGTSGCCPDTGEKIVSNFSKFDISSTSHTSSKEDKEPCLWLGCRETEGSNCIYPGDLIPFTRRPLFLVIDSSISYAFKSIHGIERGETAAMLLSPSSRSAAAGFSGDSTRHTGSQFTMFLTAPLQAFCLLIGNNGADINRDAYNKAEELLSSSLNEWATTLVASSSLHPVWVEVLSDPLLRRLLLRFIFCRATLSLFKPTSGKAEFLPTCVPPLPESVDAESMLSQSCVMRFASHFGSASQFALSEITTWPDADAEEAGAIGSAGSANRGVPETVGDSDISYSSTSSF

SEQ ID NO: 86322 - protein, 217 aa, Setaria italica
  Transcript Sequence Number=SeqID_20348
  Gene Ontology: Mol. function=hydrolase activity; Cellular component =mitochondrion
  Homolog annotation: Hit_ID=B9S964; Match level="QueryCoverage=86%, HitCoverage=76%, E-value=4e-51, Identity=55%"; Hit description=Nudix hydrolase 15, mitochondrial, putative
  Pfam annotation: Domain name=NUDIX; Domain location=23-157; Score =58.5; E_value=2.5e-14; Accession=PF00293.20; Description=NUDIX domain
  Subcellular localization annotation: CTP_CleavageSite=46; ConfidenceScore=5.34e-01
VGAPAAAADTVPAKSPRPAASKVPAAVLVCLFEDPSCGPRVLLTKRASSLSSHSGEVSLPGGKVDEGDADAKATALREAKEEIGLDPAIVSVVTVLEPFLSKNGVNVVPVIGMVSDKALFKPVLNKAEVEDIFDAPLEMFLKDDHRRTKQMNWMGIDIPVQFFDYEEDGKKFVIWGLTAHILTRAAAVVLQRQPSFAELPRPKYASAPTADTDETKP

SEQ ID NO: 86323 - protein, 80 aa, Setaria italica
  misc_feature (1)..(9): Xaa can be any naturally occurring amino acid
  Transcript Sequence Number=SeqID_20349
XXXXXXXXXAHHSAPHYFHCSKSRRQVHVQIDHSNEQAKKGISGLNGPIEPHRWRVKKLLFFVGKIVCAAMWGDGGCTAG

SEQ ID NO: 86324 - protein, 64 aa, Setaria italica
  Transcript Sequence Number=SeqID_20350
EGHGHKDLLLHLLGAKRRQMNTTTRHRCFLPKLFFSNDVPHHFFSMIFLNFFNGLLCNITSKIC

SEQ ID NO: 86325 - protein, 134 aa, Setaria italica
  misc_feature (67)..(67): Xaa can be any naturally occurring amino acid
  misc_feature (104)..(104): Xaa can be any naturally occurring amino acid
  Transcript Sequence Number=SeqID_20351
  Homolog annotation: Hit_ID=B6T5X0; Match level="QueryCoverage=50%, HitCoverage=33%, E-value=3e-30, Identity=89%"; Hit description =Meiosis 5
MQSKASGNFMHAPQITVELCILPDGSSPTPTYGTGGGYKPTPTPDYSTTPTPSYGSTPSTPSYTFLXGIPEIPKHGFTGSCDYWKSHPDMIVAVVGSLGNIGKXFGTACSLIVGKKLENLHDALSNTRTDGVGA

SEQ ID NO: 86326 - protein, 202 aa, Setaria italica
  Transcript Sequence Number=SeqID_20352
  Homolog annotation: Hit_ID=B6T5X0; Match level="QueryCoverage=90%, HitCoverage=89%, E-value=7e-62, Identity=65%"; Hit description =Meiosis 5
MASKVLLVSAVLVGLVTLSSCRSLGELSEQKTYSSAPSYGSSPTPTYGTGGGYKPTPTPDYSTTPTPSYGSTPSTPSTPSYGIPEIPKHGFTGSCDYWKSHPDMIVAVVGSLGNIGKTFGTACSLIVGKKLENLHDALSNTRTDGVGALIREGAAAYLNSIVNKKFPFTTQQVKDCIIVAVTSDGAASAQAGIFKKANEYHY

SEQ ID NO: 86327 - protein, 203 aa, Setaria italica
  Transcript Sequence Number=SeqID_20353
  Gene Ontology: Mol. function=nucleotide binding; Cellular component =intracellular; Biological process=small GTPase mediated signal transduction
  Homolog annotation: Hit_ID=B4FF78; Match level="QueryCoverage=100%, HitCoverage=100%, E-value=1e-104, Identity=92%"; Hit description=ARF- related protein
  Pfam annotation: Domain name=ATP_bind_1; Domain location=22-190; Score=-71.3; E_value=0.057; Accession=PF03029.9; Description =Conserved hypothetical ATP binding protein
  Pfam annotation: Domain name=Arf; Domain location=1-184; Score=170.1; E_value=6.5e-48; Accession=PF00025.13; Description=ADP-ribosylation factor family
  Pfam annotation: Domain name=GTP_EFTU; Domain location=15-186; Score=- 90.9; E_value=0.033; Accession=PF00009.19; Description=Elongation factor Tu GTP binding domain
  Pfam annotation: Domain name=MMR_HSR1; Domain location=18-136; Score =16.7; E_value=2.9e-05; Accession=PF01926.15; Description=GTPase of unknown function
  Pfam annotation: Domain name=Miro; Domain location=19-136; Score =32.7; E_value=1.5e-06; Accession=PF08477.5; Description=Miro-like protein
  Pfam annotation: Domain name=Ras; Domain location=19-186; Score= -47.9; E_value=1e-05; Accession=PF00071.14; Description=Ras family
  Pfam annotation: Domain name=SRPRB; Domain location=15-187; Score= -68.3; E_value=0.015; Accession=PF09439.2; Description=Signal recognition particle receptor beta su
  Pfam module annotation: Pfam domain module=ATP_bind_1::Arf::GTP _EFTU::MMR_HSR1::Miro::Ras::SRPRB; Domain location=22-190::1-184::15 -186::18-136::19-136::19-186::15-187
MFSLFYGLWKYVFTKDEFRVLILGVDKAGKTTLLEKLKSIYLKGEGLPPDRVVPTVGLNIGRIEDANAKLVFWDLGGQVGLRTIWEKYYEEAHAIMFVIDAATASSFEDAKSALEKVIRHEHLRGAPLLIVANKQDLPGVINDEELAKFLNFKELDDRPYMFQAVSAYDGRGIKSGIDWLVEQMEKSKRTETLRARAGVAGSI

SEQ ID NO: 86328 - protein, 593 aa, Setaria italica
  Transcript Sequence Number=SeqID_20354
  Gene Ontology: Mol. function=ATPase activity, coupled to transmembrane movement of substances; Cellular component=integral to membrane; Biological process=transport
  Homolog annotation: Hit_ID=Q6Y3I1; Match level="QueryCoverage=100%, HitCoverage=73%, E-value=0.0, Identity=68%"; Hit description =Multidrug resistance associated protein 1
  Pfam annotation: Domain name=ABC_tran; Domain location=250-421; Score= 162.9; E_value=9.4e-46; Accession=PF00005.19; Description=ABC transporter
  Pfam annotation: Domain name=SMC_N; Domain location=239-425; Score= -126.8; E_value=0.029; Accession=PF02463.11; Description=RecFRecNSMC N terminal domain
  Pfam module annotation: Pfam domain module=ABC_tran::SMC_N; Domain location=250-421::239-425
TGEIVNYIAVDAYRLGDAISWLHMGWSFPLQLVFAVATLFWALKLGALPGLVPLVIFGFLNVPFAKILQGYQAKFMVAQDERLRSTSEILNSMKIIKLQSWEERFRNMIESFRDGEFKWLRETQMKKAYGAVMYWMSPTVVSAVMYTATAIMGSAPLNASTLFTVLATLRVMSEPVRFLPEILTMMIQYKVSLDRIERFLLEEDIREEDVRRVPSVNSAIRVLVQDGNFSWTANRADLSLRNINLSVSRGEKVAVCGPVGSGKSSLLYALLGEIPRISGLVEVFGSVAYVSQNSWIQSGTVRDNILFGKPFNKELYEKAIKSCALDKDIENFDHGDLTEIGQRGLNMSGGQKQRIQLARAVYNDADVYLLDDPFSAVDAHTAAVLFYDCVMTALAEKTVVLVTHQVEFLTETSRILVMEGGQVSQQGKYSELLESGTAFEKLVSAHQSSITQLDTSASQQNQVQGQLVPDENIVPSALQTTRQASDIEVAAKGTSAAIQLTEEEEKGIGDLGWKPYKDYINISKGAFQFSGMFTSQVLFTCFQIASTYWLAVAVQMDNISAALLVGAYSGLSIFSCFFAYFRSLFAAILGLKA

SEQ ID NO: 86329 - protein, 149 aa, Setaria italica
  Transcript Sequence Number=SeqID_20355
  Subcellular localization annotation: CTP_CleavageSite=39; ConfidenceScore=5.10e-01
PPIQADKQRTMPWHWQPQPHHVHQTAHKSQLARTLLSPNCTTGKAFYTQRRHPSRPAHLAILVGLKRGRWRTTCHDDHGCPTLSLMEDQASGHAAELPERAVTLSDDGSCSRRRLHQSRCAAVRGGRTGQSGSLQNGRFLGFGIVPAAP

SEQ ID NO: 86330 - protein, 82 aa, Setaria italica
  misc_feature (13)..(13): Xaa can be any naturally occurring amino acid
  Transcript Sequence Number=SeqID_20356
  Homolog annotation: Hit_ID=B6SXM0; Match level="QueryCoverage=85%, HitCoverage=11%, E-value=5e-19, Identity=73%"; Hit description =ATBRCA1
LLLCPTHSSKKLXPCERSKSKKKAKLLQPSSDIDDLNSPSPMQMDEHWITSPVLTSERVICGSALNGRERMNVGHVLGHSRF

SEQ ID NO: 86331 - protein, 713 aa, Setaria italica
  Transcript Sequence Number=SeqID_20357
  Gene Ontology: Mol. function=molecular_function; Cellular component =cytoplasm; Biological process=biological_process
  Homolog annotation: Hit_ID=Q5ZA32; Match level="QueryCoverage=95%, HitCoverage=50%, E-value=0.0, Identity=60%"; Hit description=WD-40 repeat protein-like
PKPSAPPLAYSEGDGSVHLPSAPPASKMELPGSGPAPGTRDIDQSAFDYTANRNMERDALKRQDTPMPIRKDILGKDELRDGHSDVAMLPNPRLMFQVGGNATHLVTPSEIISGTLSSAENNDVSKSDGGKIQDVSSRSSRIAELEPKHIDESKPDQNSGLEAVKEAQIVCEHMEKTRSLEQTVEMISERSVTTDKYSVEESQAPSDKPTLDHTGVADENVRKNSLEMPEKSDYSASREQSSSYTKEEKVLHPQTSGQPSPSVSAFNSTESHEPLSSAYPPISSFPEVAATQGMLQQLIGMQKDMEKKLDTMIPVSVAKESKKLETSLGRTMEKSIKAHFDAFWVRLQEENTKREKADRERMQQLVTLITSSINKDVPSNLEKSLKKEISSLGPVVARAITPIIEKCIASAVSDSVQKGVGDKVCNQLDKSISGKLEATLARQIQMQFHTSVKQALQDALRTSFESLLVPAFEQSCKTMFEQVDGTFQKGMSEHTVAIQQQLEAAHTPLALTLKETINSASSITQSFSSELLDGQRKLLALVASGNAKAHTPNALQPINGPMGGPQEVKVEAPLDPMKELGRLVSERKFDEAFTMALQRSDVSIVSWLCSQVDLRALLAMVPVPLNQGVLLALLQQLAVDINNETSRKVQWMTDVAMAINPADPMIAVHVRPIFDQVYSQLAHQRSLPTMSSSDGTSIRMLMHVINSVLLSYK

SEQ ID NO: 86332 - protein, 327 aa, Setaria italica
  Transcript Sequence Number=SeqID_20358
  Gene Ontology: Mol. function=nucleic acid binding; Cellular component= nucleus
  Homolog annotation: Hit_ID=Q9M8Z6; Match level="QueryCoverage=39%, HitCoverage=26%, E-value=1e-51, Identity=74%"; Hit description =F17A9.19 protein
  Pfam annotation: Domain name=Alba; Domain location=17-87; Score =109.2; E_value=1.4e-29; Accession=PF01918.13; Description=Alba
MDRYQRVERPRNESTIEENEIRITAQGLIRNYVSYATSLLQERRIKEIVLKAMGQAISKSVAVAEIIKKRIPGLHQDTNISSVSITDTWEPIEEGLVALEMTRHVSMISITLSPGELDKNTPGYQAPAYVEQPRQQQRVQQAPPPQRQPRRPQGQFQQLEYEDSYARGRGRGRGRGRGRGWGRGGYGGYGGYGNNQGGYNQGGGYYDNQGGYGSYDNQGGYGGGYGYNQGRYGNYQENGGYSRGRGGGMRGRGNWGYRGGYDGGRGGGYDGGRGGGYEGGRGGYEGGRGGGYEGGRGGGGYEQGRGGGGRGYGGRGRGRMGGRGRGN

SEQ ID NO: 86333 - protein, 198 aa, Setaria italica
  misc_feature (8)..(8): Xaa can be any naturally occurring amino acid
  Transcript Sequence Number=SeqID_20359
  Gene Ontology: Mol. function=sequence-specific DNA binding; Cellular component=nucleus; Biological process=regulation of transcription, DNA-dependent
  Homolog annotation: Hit_ID=Q6IET0; Match level="QueryCoverage=57%, HitCoverage=22%, E-value=6e-44, Identity=68%"; Hit description=WRKY transcription factor 1
  Pfam annotation: Domain name=WRKY; Domain location=143-198; Score =111.8; E_value=2.3e-30; Accession=PF03106.7; Description=WRKY DNA -binding domain
PRHPRRGXKPKEEVELQAELGRMNEENHRLRGMLAQVTTSYQALQMHLLTLMQQAQHQQAPAPLAAVAPIAPPPRQLQLDQQPASNSSTEVGSPRRSSSTANNKEDSPEATGGPAEGRPQQLDQASMRKARVSVRARSEAPIIADGCQWRKYGQKMAKGNPCPRAYYRCTMANACPVRKQVQRCADDRSILITTYEGT

SEQ ID NO: 86334 - protein, 107 aa, Setaria italica
  Transcript Sequence Number=SeqID_20360
NEPNQKPRPTRPPARHFIRSGWTHEIFRWDPDGAREEFRVVVTDYKLSRVNSSAHKKFYGRITRRRPGSERRRRRPGRGASCGIPRRVRLQPPPCCAGFGDPCGGGR

SEQ ID NO: 86335 - protein, 86 aa, Setaria italica
  Transcript Sequence Number=SeqID_20361
  Gene Ontology: Mol. function=transferase activity; Biological process= metabolic process
  Homolog annotation: Hit_ID=Q9SAA1; Match level="QueryCoverage=100%, HitCoverage=21%, E-value=1e-19, Identity=54%"; Hit description =F25C20.9
LEARAQSGGEKTAATDAALEAFKQRWELFRVACDHAEELVESIRQRIGSECLVDESTGSASAGSAPAPLAAAPGIKPISAVRLEQM

SEQ ID NO: 86336 - protein, 94 aa, Setaria italica
  Transcript Sequence Number=SeqID_20362
  Gene Ontology: Mol. function=protein serine/threonine kinase activity; Biological process=protein amino acid phosphorylation
MQRSGGGTTDQIGRLRRMAFGPGAGGSTTGTGTISEYASSEFSNPTSEYGLNPSSEYTASSGGDTGEVPPAAAAQGGQQWSGRRAAGDTERMSR

SEQ ID NO: 86337 - protein, 479 aa, Setaria italica
  misc_feature (137)..(137): Xaa can be any naturally occurring amino acid
  Transcript Sequence Number=SeqID_20363
  Homolog annotation: Hit_ID=B9SB74; Match level="QueryCoverage=97%, HitCoverage=94%, E-value=1e-144, Identity=55%"; Hit description =Transcription factor, putative
RLRPANIIRNKFPTFKNGSNGIIIKLADSPEMPSLKDAVAKETTDLLDKHQRLSVRELTMKFEKGFNTATLLSNEVKWRHAALLERDILLKNLKNVLESLRSRVAGKNRDEIEESLSMVDILAVQLSKREDELLRQXTEVTKIAASLKLASEDAKRIVDEERANARVEMESAKGSAQRVQLAIEEEENVSQRTRKQDVNELKEEVQEARRVKMLHCPSKAMDIENEIQVLRDQLAEKSSDYVHLLKELELHQLFGENDMPSYELQGLETLGSMLHIVARDNASVDFSNGSIQWFRIQPEGSKKEIISGATKPVYAPEPHDVGRYIQAEITFGGQISIAKTAGPVDPAAGLADYVEALIRNPETEYNVVVLQVNGVAQPADSLHVLCIGRLRMRLAKGASVVAKEFYSSSLQLCGVRGGGDAAPQAIFWQPRKELSFVLGFETTRERNSALMLARRFAMDCNIILAGPGDKNSVVTSSPL

SEQ ID NO: 86338 - protein, 119 aa, Setaria italica
  Transcript Sequence Number=SeqID_20364
  Gene Ontology: Mol. function=protein serine/threonine kinase activity; Biological process=protein amino acid phosphorylation
  Homolog annotation: Hit_ID=B6SWP8; Match level="QueryCoverage=100%, HitCoverage=16%, E-value=8e-33, Identity=64%"; Hit description =Carbohydrate binding protein
AVDPRLGGEFEEGEMRRALLVGLACSSPEPALRPGMRAVVQMLSGEADPPFVPAARPSMSFSANHQLLLSLQDSVSDYNALGLTLSDSSSDSLSSSSLTSTLRRGGHDIGFSSTAGDAR

SEQ ID NO: 86339 - protein, 33 aa, Setaria italica
  Transcript Sequence Number=SeqID_20365
MSGEQDHVSKSSSSSISSSTQESEEEVSVTIGT

SEQ ID NO: 86340 - protein, 147 aa, Setaria italica
  misc_feature (136)..(136): Xaa can be any naturally occurring amino acid
  Transcript Sequence Number=SeqID_20366
  Homolog annotation: Hit_ID=B6UEQ9; Match level="QueryCoverage=71%, HitCoverage=27%, E-value=8e-19, Identity=60%"; Hit description=CF9
MDSLAAACLCSRRRRARRLLLAAAAATAGYGLYRLYRHHRRRIVAALSLADAVSQVGSDLAEFLRSDSDQVPRSLLQLSKLAASEPVSSAASSLSESLASGVLRAISSHQHQLRQQQQQNPPQTPLQDRILDRLLXSPEGAGFASAV

SEQ ID NO: 86341 - protein, 85 aa, Setaria italica
  misc_feature (1)..(24): Xaa can be any naturally occurring amino acid
  Transcript Sequence Number=SeqID_20367
XXXXXXXXXXXXXXXXXXXXXXXXPAALILAVYYCLIKRNKRVHINTLAHINCANIMGLSSDGFILEVREGELCTRTTKHRALHN

SEQ ID NO: 86342 - protein, 80 aa, Setaria italica
  misc_feature (20)..(20): Xaa can be any naturally occurring amino acid
  Transcript Sequence Number=SeqID_20368
  Gene Ontology: Mol. function=metal ion binding
  Pfam annotation: Domain name=zf-C3HC4; Domain location=13-57; Score =31.6; E_value=3.1e-06; Accession=PF00097.17; Description=Zinc finger, C3HC4 type (RING finger)
MQVAEPASADHQCTICMDGXTTSGAGPTAPVNLPCSHPFHTHCITVWLFKGHSCPVCRHDLRGLVSAPWASQARKLGLKY

SEQ ID NO: 86343 - protein, 234 aa, Setaria italica
  misc_feature (4)..(4): Xaa can be any naturally occurring amino acid
  Transcript Sequence Number=SeqID_20369
  Homolog annotation: Hit_ID=B6T7I4; Match level="QueryCoverage=84%, HitCoverage=64%, E-value=4e-87, Identity=83%"; Hit description=Hus1 -like protein
  Subcellular localization annotation: CTP_CleavageSite=53; ConfidenceScore=5.16e-01
YRAXRSVLAVHAQPPAAGDAAGAAAIQVRLVNKLPAGSRSATPFLTFETKGSRAAVVQDVPISRPLSRSDVERLQAALDAAKDLPQTLVQVPDLPQLQSLVDRLKNVGDLLTVAVTQYGDLHLQVSTSLVTVGSEFRKLRVIGDRANAPVGDQNLTASTRMDMAVERGEALSVQVNMKHLVKSLHCHFAKPDYTFYGIAPGGACLTVVFQYFIPGTRLADKSISFYCRLPVLDP

SEQ ID NO: 86344 - protein, 165 aa, Setaria italica
  misc_feature (19)..(19): Xaa can be any naturally occurring amino acid
  misc_feature (128)..(128): Xaa can be any naturally occurring amino acid
  Transcript Sequence Number=SeqID_20370
  Gene Ontology: Mol. function=GTPase activity; Biological process =immune response
  Homolog annotation: Hit_ID=B9S4R5; Match level="QueryCoverage=99%, HitCoverage=30%, E-value=2e-77, Identity=75%"; Hit description =Interferon-induced guanylate-binding protein, putative
  Pfam annotation: Domain name=GBP; Domain location=1-163; Score=-73.8; E_value=0.018; Accession=PF02263.11; Description=Guanylate-binding protein, N-terminal domain
KFWVGHMRDTKTKGIWIWXTPVEMDVDGSKVSVLYLDTEGFESVGKSNVYDDRIFALATVLSSVLIYNLPETVREADISRLSFAVEIAEEFYGRVKGQDVAFEPAKLLWLIQRDFLQGKSVQQMVNEXLQRVPNDNGDKYIDEVNQIRDSLAIMGDNSTAFSLPQ

SEQ ID NO: 86345 - protein, 168 aa, Setaria italica
  misc_feature (168)..(168): Xaa can be any naturally occurring amino acid
  Transcript Sequence Number=SeqID_20371
  Gene Ontology: Mol. function=GTPase activity
  Homolog annotation: Hit_ID=B9S4R5; Match level="QueryCoverage=94%, HitCoverage=25%, E-value=1e-68, Identity=77%"; Hit description =Interferon-induced guanylate-binding protein, putative
TEGKSVQQMVNEALQRVPNDNGDKYIDEVNQIRDSLAIMGDNSTAFSLPQPHLQRTKLCDMEDKELEPLYVKRREQLKQLVASIIKPKIVQGKNLNGKDFVSFLQQILEALNKGEIPSTGSLVEIFNKAILDRCLKVYREKMDGLGLPVPVDKLQQVHEMANAAYKIX

SEQ ID NO: 86346 - protein, 64 aa, Setaria italica
  Transcript Sequence Number=SeqID_20372
CVSHQFSERSFRQIISLLVASRDRGVPILLDSKPEILSTNLLFYFVLTFLSSSVMFMCTVFLHD

SEQ ID NO: 86347 - protein, 160 aa, Setaria italica
  Transcript Sequence Number=SeqID_20373
  Subcellular localization annotation: CTP_CleavageSite=16; ConfidenceScore=5.05e-01
WCRSRWLVATAQEPIRCSQTRHWRGPRVTNRVAFCSSAKERRPPRLLTRCLVAGGRGRGNGERQNGGRRLPKFDSVGGAAVRSPSVLVQICSLVVTDLGQSRFTCAHGWTPPAPRRGPAPPPPRLTSPTTSSSISCRGCRSNRSAGSSASPATGIPPRAP

SEQ ID NO: 86348 - protein, 110 aa, Setaria italica
  misc_feature (104)..(104): Xaa can be any naturally occurring amino acid
  Transcript Sequence Number=SeqID_20374
  Gene Ontology: Mol. function=methyltransferase activity; Biological process=tRNA processing
  Homolog annotation: Hit_ID=Q8H4D4; Match level="QueryCoverage=92%, HitCoverage=9%, E-value=3e-46, Identity=84%"; Hit description=tRNA wybutosine synthesizing protein 2 homolog
CLKFSFLFAKFVYACEWNPHALEALRRNVCDNHVQERCIILEGDNRVTAPKGVADRVCLGLLPSSECSWATAVRALRVEGGILHIHGNVNDSDETRWLDNVLNXISNIAK

SEQ ID NO: 86349 - protein, 385 aa, Setaria italica
  Transcript Sequence Number=SeqID_20375
  Gene Ontology: Mol. function=methyltransferase activity; Biological process=tRNA processing
  Homolog annotation: Hit_ID=Q8H4D4; Match level="QueryCoverage=99%, HitCoverage=36%, E-value=0.0, Identity=80%"; Hit description=tRNA wybutosine synthesizing protein 2 homolog
  Pfam annotation: Domain name=Met_10; Domain location=123-325; Score =81.8; E_value=2.5e-21; Accession=PF02475.8; Description=Met-10+ like- protein
ILKKFGWLDLARKVRVSHDNSHVLFPVNEVFHVLNTDDHMMMEHKSCNLDETLAFTEKKLAGDNVSLQNALKFLSSCNGSFLKDELAISRKPSKSPQNIMKELVSSLLETKGMPSQLLEQLPARWEILGDIIILPKTCFKDPLWESVSEELWPLVAKSLGAQRLARQGKIIPNGTRDSTLELLLGDNGWVTHHENGICYSLDATKCMFSSGNRSEKLRMGQLDCRDEVVVDLFAGIGYFVLPFLVKANAKFVYACEWNPHALEALRRNVCDNHVQERCIILEGDNRVTAPKGVADRVCLGLLPSSECSWATAVRALRVEGGILHIHGNVNDSDETRWLDNVVESISNIAKAHGLSWSVSSEHVERVKWYGPHIRHLVVDVRCRPI

SEQ ID NO: 86350 - protein, 125 aa, Setaria italica
  Transcript Sequence Number=SeqID_20376
HGISAPDTSSLPMNRVELTEIPSPKADLRNLRTPGLKSRSVMSDGEASAFLENFPPGQVGAAPVGSRRAAQEVEDAGAAVVAARATLVHGLVLEVVCRRHHLRRTGDPWPPVSCVWRGAGGGGGM

SEQ ID NO: 86351 - protein, 200 aa, Setaria italica
  misc_feature (90)..(90): Xaa can be any naturally occurring amino acid
  misc_feature (101)..(101): Xaa can be any naturally occurring amino acid
  misc_feature (129)..(129): Xaa can be any naturally occurring amino acid
  Transcript Sequence Number=SeqID_20377
  Gene Ontology: Mol. function=binding; Cellular component=chloroplast
  Homolog annotation: Hit_ID=O49300; Match level="QueryCoverage=99%, HitCoverage=15%, E-value=3e-43, Identity=43%"; Hit description =T26J12.6 protein
  Pfam annotation: Domain name=Arm; Domain location=106-150; Score =16.4; E_value=0.1; Accession=PF00514.15; Description=Armadillobeta -catenin-like repeat
  Pfam annotation: Domain name=Arm; Domain location=20-62; Score=9.5; E_ value=0.75; Accession=PF00514.15; Description=Armadillobeta-catenin -like repeat
  Pfam module annotation: Pfam domain module=Arm::Arm; Domain location =106-150::20-62
SESTRACEAAAGLLRNITSVSIYRKMAIESGAIEETISLLCKSTITPEMMEQCLCTIWNFSIDENWRYKIMRSDVLTKVVSYLDEEDIKXSKKLAGGIISXNLALSSSNHGALVEAGVIPKLVHLLSNXKEDDYKIIRKEARSSLILLARDDYYHSLIIEEGLVRVPLVGSAAYKAFKPLPHSWPSFPDGSEIQRSSRPS

SEQ ID NO: 86352 - protein, 172 aa, Setaria italica
  Transcript Sequence Number=SeqID_20378
  Homolog annotation: Hit_ID=Q9AY70; Match level="QueryCoverage=100%, HitCoverage=60%, E-value=5e-75, Identity=43%"; Hit description =Pentatricopeptide, putative
  Pfam annotation: Domain name=PPR; Domain location=99-133; Score=52.1; E_value=2.1e-12; Accession=PF01535.12; Description=PPR repeat
STMISGYVLNGMIEEALQMFRYLLEQCIKPNAVTVTSVLPACASMAAMALGQEIHGYVLRNAYEGKCYVESALMDMYSKCGRLDLSHYIFSEMSVKDEVTWNSMISSCAQNGEPEEALDLFRQMSMEGIKYNSVTISSALSACASLPAIYYGKEIHGVIIKGPIRADIFAES

SEQ ID NO: 86353 - protein, 198 aa, Setaria italica
  misc_feature (192)..(192): Xaa can be any naturally occurring amino acid
  Transcript Sequence Number=SeqID_20379
  Homolog annotation: Hit_ID=Q9AY70; Match level="QueryCoverage=100%, HitCoverage=23%, E-value=1e-101, Identity=87%"; Hit description =Pentatricopeptide, putative
  Pfam annotation: Domain name=PPR; Domain location=42-76; Score=25.9; E_value=0.00017; Accession=PF01535.12; Description=PPR repeat
  Pfam annotation: Domain name=PPR; Domain location=7-41; Score=46.1; E_ value=1.3e-10; Accession=PF01535.12; Description=PPR repeat
  Pfam annotation: Domain name=PPR; Domain location=78-111; Score=4.0; E_value=3; Accession=PF01535.12; Description=PPR repeat
  Pfam module annotation: Pfam domain module=PPR::PPR::PPR; Domain location=42-76::7-41::78-111
MSDKNEVSWNSIIAAYGAHGLLKESVSLLYRMQEEGFKPDHVTFLTLISACAHAGQVEEGVRLFQCMTKEYQIAPRMEHFACMVDLYSRSGKLDQAIEFIADMPFKPDAGIWGALLHACRVHRNVELADIASQELFKLDPGNSGYYVLMSNINAVAGRWDGVSKVRRLMKDNKVQKIPGYSWVDVNNSSHLXVAADKA

SEQ ID NO: 86354 - protein, 61 aa, Setaria italica
  misc_feature (61)..(61): Xaa can be any naturally occurring amino acid
  Transcript Sequence Number=SeqID_20380
GRGRGRGRGSGGIPDEWGERSPPGAPEPPAQPDLPVDEDEWGGDTAEGNSRPIVVDEWGSX

SEQ ID NO: 86355 - protein, 81 aa, Setaria italica
  Transcript Sequence Number=SeqID_20381
VKPEGACIFFLFRPRPSPCLPVPSPTMQQWGGGRRRYEHLPDHRRRSPSTPRHPRALLDGIRAFLGLFCEGIMWSFASNAI

SEQ ID NO: 86356 - protein, 57 aa, Setaria italica
  Transcript Sequence Number=SeqID_20382
  Subcellular localization annotation: CTP_CleavageSite=23; ConfidenceScore=5.10e-01
LGSKCHRRQRGASTTVPLPKSFSAATNKCVPCYCSCSTSEHQGGLSPILTFEEYSSD

SEQ ID NO: 86357 - protein, 54 aa, Setaria italica
  Transcript Sequence Number=SeqID_20383
AAELLLMHLSVCDDTCYLIIVQEGRNYVPIVVVGACVQDFLYVWRATKNTYLSA

SEQ ID NO: 86358 - protein, 149 aa, Setaria italica
  misc_feature (2)..(2): Xaa can be any naturally occurring amino acid
  Transcript Sequence Number=SeqID_20384
SXFSFFLGRGSFHAVFRWLIVFGIYNTKRQKVYDHVTAHAVSQIIEYHIFSYRLRRTGKYFCGSPNIQKVLNTSTYDNNRYLVPAFLDDDYVVPGSLLQAQVWDASTVPLPKSFSAATNKCVPCYCSCSTSEHQGGLSPILTFEEYSSD

SEQ ID NO: 86359 - protein, 90 aa, Setaria italica
  Transcript Sequence Number=SeqID_20385
  Gene Ontology: Mol. function=DNA binding; Cellular component =mitochondrion
  Homolog annotation: Hit_ID=B6ST71; Match level="QueryCoverage=97%, HitCoverage=14%, E-value=8e-23, Identity=63%"; Hit description=DNA -binding protein
MWALRRAGNPLRVRAQQVVSARGCASLEVLLNADAKDVEEHHEGNCQKACCCCKPKLPAFRLSFSSSRIALGRSFSSQAGASSGNKDDFV

SEQ ID NO: 86360 - protein, 113 aa, Setaria italica
  misc_feature (83)..(83): Xaa can be any naturally occurring amino acid
  misc_feature (100)..(100): Xaa can be any naturally occurring amino acid
  Transcript Sequence Number=SeqID_20386
  Gene Ontology: Mol. function=glycerone kinase activity; Biological process=glycerol metabolic process
  Homolog annotation: Hit_ID=Q6ASW2; Match level="QueryCoverage=90%, HitCoverage=56%, E-value=1e-41, Identity=83%"; Hit description =Putative DAK2 domain containing protein
  Pfam annotation: Domain name=Dak2; Domain location=1-113; Score=7.3; E_value=6.7e-07; Accession=PF02734.9; Description=DAK2 domain
VTSVYPFELIAAGTINEIGATIRRVMGGTSGILYDILFKAAYASLKQSTTVTANEWADALEASVAAVSKYGGASTGYRTMLDXLIPAATVLKQRLKAGEXPVTAFIASSEAAS

SEQ ID NO: 86361 - protein, 62 aa, Setaria italica
  Transcript Sequence Number=SeqID_20387
  Gene Ontology: Mol. function=glycerone kinase activity; Biological process=glycerol metabolic process
  Homolog annotation: Hit_ID=Q10DU3; Match level="QueryCoverage=85%, HitCoverage=10%, E-value=1e-21, Identity=92%"; Hit description=3,4 -dihydroxy-2-butanone kinase, putative, expressed
YGIAVDRVYIGTLMTSLDMAGLSITIMKSDENILKRLDAPTKAPAWPVGSEGNCHGHGGRID

SEQ ID NO: 86362 - protein, 626 aa, Setaria italica
  Transcript Sequence Number=SeqID_20388
  Gene Ontology: Mol. function=glycerone kinase activity; Biological process=glycerol metabolic process
  Homolog annotation: Hit_ID=Q10DU4; Match level="QueryCoverage=94%, HitCoverage=100%, E-value=0.0, Identity=75%"; Hit description=3,4 -dihydroxy-2-butanone kinase, putative, expressed
  Pfam annotation: Domain name=Dak1; Domain location=54-377; Score =618.6; E_value=6.4e-183; Accession=PF02733.9; Description=Dak1 domain
  Pfam annotation: Domain name=Dak2; Domain location=439-615; Score =230.7; E_value=3.8e-66; Accession=PF02734.9; Description=DAK2 domain
  Pfam module annotation: Pfam domain module=Dak1::Dak2; Domain location=54-377::439-615
MLLASPSFPPISGPSPAPAIDGPHAAAGSPHAMAFQGKKLINNPDDVVTEFIEGLVETYPGLQYLDGFPQIKVVLRADVERGAYDKVAVISGGGSGHEPAHAGFVGPGMLTAAVSGDVFASPPVDSILAAIRAVTGPMGCLLIVKNYTGDRLNFGLAAEQAKSEGYKMEMVIVGDDCALPPPRGIAGRRGLAGTILVHKVAGAAADAGLSLADVAAEAKYASEVVGTMGVALSVCTLPGQATSDRLGPKQMELGLGIHGEPGVAVVDLQPVDVVVEHVLKQILSQETQYLPITRGSNAVLLINGLGATPIMELMIAARKAVPELQLAYGIAVDRVYIGTLMTSLDMAGLSITIMKSDENILKRLDAPTKAPAWPVGSEGNRPPAKFPVPVPPSPSMEDDEVLAQPQELSKQGCILEAAIEASATEIINLKDILNEWDSKVGDGDCGTTMYRGATSILEDMNKRYPLNDAAGTINEIGATIRRVMGGTSGILYDILFKAAYASLKQSTTVTANEWADALEASVAAVSKYGGASTGYRTMLDALIPAATVLKQRLKAGEDPVTAFIASSEAASVGAESTKQMQAKAGRSSYIAPDLLASIPDPGAMAAAAWYRAAALAVKNKLHGSKS

SEQ ID NO: 86363 - protein, 69 aa, Setaria italica
  Transcript Sequence Number=SeqID_20389
FQAQRVKKRDSLHSYLIRVFWSRHRRLLLDACLYTYAKQDPFTKIHSLPCERLSGRQEQIDAGYGNHGT

SEQ ID NO: 86364 - protein, 327 aa, Setaria italica
  Transcript Sequence Number=SeqID_20390
  Gene Ontology: Mol. function=binding; Cellular component=mitochondrion
  Homolog annotation: Hit_ID=B9RY68; Match level="QueryCoverage=99%, HitCoverage=77%, E-value=1e-97, Identity=35%"; Hit description =Pentatricopeptide repeat-containing protein, putative
  Pfam annotation: Domain name=PPR; Domain location=107-141; Score=3.2; E_value=3.7; Accession=PF01535.12; Description=PPR repeat
  Pfam annotation: Domain name=PPR; Domain location=142-176; Score =22.5; E_value=0.0018; Accession=PF01535.12; Description=PPR repeat
  Pfam annotation: Domain name=PPR; Domain location=177-211; Score =37.3; E_value=6.2e-08; Accession=PF01535.12; Description=PPR repeat
  Pfam annotation: Domain name=PPR; Domain location=2-36; Score=44.2; E_ value=5e-10; Accession=PF01535.12; Description=PPR repeat
  Pfam annotation: Domain name=PPR; Domain location=212-246; Score =51.8; E_value=2.6e-12; Accession=PF01535.12; Description=PPR repeat
  Pfam annotation: Domain name=PPR; Domain location=247-281; Score =39.4; E_value=1.4e-08; Accession=PF01535.12; Description=PPR repeat
  Pfam annotation: Domain name=PPR; Domain location=282-316; Score =21.3; E_value=0.004; Accession=PF01535.12; Description=PPR repeat
  Pfam annotation: Domain name=PPR; Domain location=37-71; Score=47.3; E_value=5.9e-11; Accession=PF01535.12; Description=PPR repeat
  Pfam annotation: Domain name=PPR; Domain location=72-106; Score=16.7; E_value=0.093; Accession=PF01535.12; Description=PPR repeat
  Pfam module annotation: Pfam domain module=PPR::PPR::PPR::PPR::PPR::PP R::PPR::PPR::PPR; Domain location=107-141::142-176::177-211::2 -36::212-246::247-281::282-316::37-71::72-106
RDTYVSLISSYSRCGLFDQAMEIYKRMIEAGIYPDVSTYNAVLSALARGGRWEQAEKMFAEMEDRDCKPDELSYSSLLHAYANAKKLDKMKALSEDIYSERIEPHNWLVKTLVLVNNKVNNLSETEKAFQELRRRRCSLDINVLNAMISVYGKNRMVKKVEEILSLMKENCINHSAATYNSLMHMYSRLGDSEKCETILTEIKSSGMRPDRYSYNTVIYAYGRKGQVKEASRLFSEMKCSGVKPDIVTYNIFIKSYVANTMFEEAIDLVRYMVAQGCKPNERTYNSILQGYCRHGRMVEAKSFLINLPKLYPGISKQEKQRLLELWA

SEQ ID NO: 86365 - protein, 107 aa, Setaria italica
  Transcript Sequence Number=SeqID_20391
  Subcellular localization annotation: CTP_CleavageSite=29; ConfidenceScore=5.54e-01
HLRLPFPSCPSPAPLLSRSPLPRWPPPLRALASGAPVRRGGVFGLDALLSTAELLCLAPPAICSVVCAARLVFSSGSASAGPPPLAGGRLLVLQYVLLVGAVAIGSL

SEQ ID NO: 86366 - protein, 217 aa, Setaria italica
  misc_feature (2)..(2): Xaa can be any naturally occurring amino acid
  Transcript Sequence Number=SeqID_20392
  Gene Ontology: Mol. function=oxidoreductase activity; Biological process=oxidation reduction
  Homolog annotation: Hit_ID=B9RQA6; Match level="QueryCoverage=99%, HitCoverage=68%, E-value=1e-49, Identity=43%"; Hit description =Flavonol synthase/flavanone 3-hydroxylase, putative
  Pfam annotation: Domain name=2OG-FeII_Oxy; Domain location=101-201; Score=64.4; E_value=4.4e-16; Accession=PF03171.12; Description=2OG -Fe(II) oxygenase superfamily
PXFALPVDAKRRNYYGADKPFHGYLGDIPGYESLAIVDGTKLELVRDFAGLMWPDGGSNDGFCNAVHGAASRIFELEEAVRRMVMEGLGVAKYHDALRASTWHLFRMSEYQAPHAAEKTVRFGSHQDTNLLSIVCQHEVEGLEVQTRDGERVLVKPSPTSLVVMVGQALRAWTNDRLYAPFHRITVGGDATRYSAMLFSVPNFQIQAPGELVDDEHP

SEQ ID NO: 86367 - protein, 85 aa, Setaria italica
  Transcript Sequence Number=SeqID_20393
  Gene Ontology: Biological process=cell redox homeostasis
  Homolog annotation: Hit_ID=B6TP19; Match level="QueryCoverage=100%, HitCoverage=61%, E-value=4e-36, Identity=85%"; Hit description =Thioredoxin-like protein 5
  Pfam annotation: Domain name=DUF953; Domain location=9-85; Score= -38.9; E_value=0.08; Accession=PF06110.3; Description=Eukaryotic protein of unknown function (DUF953)
MTVQKVDATLADFSAHFDRLIASPAAASDGKLKLLLFLADREPGSSLTWCPDCNVAEPVIYERLEALQGRDAVLLRAYVGDKPTW

SEQ ID NO: 86368 - protein, 138 aa, Setaria italica
  Transcript Sequence Number=SeqID_20394
  Gene Ontology: Biological process=cell redox homeostasis
  Homolog annotation: Hit_ID=B6TP19; Match level="QueryCoverage=100%, HitCoverage=100%, E-value=8e-64, Identity=85%"; Hit description =Thioredoxin-like protein 5
  Pfam annotation: Domain name=DUF953; Domain location=9-135; Score =100.1; E_value=7.5e-27; Accession=PF06110.3; Description=Eukaryotic protein of unknown function (DUF953)
MTVQKVDATLADFSAHFDRLIASPAAASDGKLKLLLFLADREPGSSLTWCPDCNVAEPVIYERLEALQGRDAVLLRAYVGDKPTWRDPAHPWREDPKFGIKGVPTLIRWENGGAAARLGDEEAHLKDKVDALLGVGGN

SEQ ID NO: 86369 - protein, 113 aa, Setaria italica
  Transcript Sequence Number=SeqID_20395
AALLPGASILRPDVRALCADQLASPKEREDVRRQPGGASGVAAGGCAAPGIRDGFGLRRGSGLQLEQCANAPQSRRLREATSGGRRACSSFQWCSRSPGEGKEGLFSSNIKWI

SEQ ID NO: 86370 - protein, 185 aa, Setaria italica
  Transcript Sequence Number=SeqID_20396
  Gene Ontology: Mol. function=transferase activity, transferring glycosyl groups; Biological process=metabolic process
  Homolog annotation: Hit_ID=Q8GSR2; Match level="QueryCoverage=100%, HitCoverage=92%, E-value=3e-77, Identity=77%"; Hit description =Glucosyltransferase (Fragment)
LNFFIHETAGMSQASAVVINTFDELDAPLLDAMSKLLPPVYTVGPLPLAARNTVPRDSPVAAMGSNLWKEQDAPLRWLDGRPPRSVVYVNFGSITVMSAEQLAEFAWGLANTGYAFLWNVRPDLVKGGGDSGGAGLPAGFAAATEGRSMLSTWCPQAAVLEHEAVGVFLTHSGWNSTLESICGGV

SEQ ID NO: 86371 - protein, 137 aa, Setaria italica
  Transcript Sequence Number=SeqID_20397
MAFFSNSGSRADSGGYNLNEKADDEGAYESVRDGDVDSNSRQWNLNEKAEDAYHSEPEQCEAGQPSLYSSDNTFGQHARRGGGPWGTDFLKDSRSNQTSKEVPSNRGMDAASSHDDMDASGEDDELNRANGEVPAEE

SEQ ID NO: 86372 - protein, 379 aa, Setaria italica
  Transcript Sequence Number=SeqID_20398
  Gene Ontology: Mol. function=protein binding; Cellular component =nucleus; Biological process=regulation of transcription, DNA -dependent
  Homolog annotation: Hit_ID=Q8VZY6; Match level="QueryCoverage=98%, HitCoverage=98%, E-value=0.0, Identity=98%"; Hit description =Polycomb group protein FIE2
  Pfam annotation: Domain name=WD40; Domain location=123-162; Score =22.3; E_value=0.002; Accession=PF00400.24; Description=WD domain, G -beta repeat
  Pfam annotation: Domain name=WD40; Domain location=168-208; Score =36.1; E_value=1.4e-07; Accession=PF00400.24; Description=WD domain, G-beta repeat
  Pfam annotation: Domain name=WD40; Domain location=235-271; Score =12.0; E_value=1.5; Accession=PF00400.24; Description=WD domain, G -beta repeat
  Pfam annotation: Domain name=WD40; Domain location=284-324; Score =7.5; E_value=5.1; Accession=PF00400.24; Description=WD domain, G -beta repeat
  Pfam annotation: Domain name=WD40; Domain location=333-370; Score =9.1; E_value=3.4; Accession=PF00400.24; Description=WD domain, G -beta repeat
  Pfam annotation: Domain name=WD40; Domain location=77-119; Score=4.1; E_value=13; Accession=PF00400.24; Description=WD domain, G-beta repeat
  Pfam module annotation: Pfam domain module=WD40::WD40::WD40::WD40::WD4 0::WD40; Domain location=123-162::168-208::235-271::284-324::333 -370::77-119
WRSWGPGQGLGCEAAEGSLVPSRKREYKPCGKHTEGKRPLYAIGFNFMDARYYDVFATVGGNRVTTYRCLENGSFAVLQAYVDEDKDESFYTLSWARDHVDGSPLLVAAGSNGIIRVINCATEKLAKSFVGHGDSINEIRTQALKPSLIISASKDESVRLWNVHTGICILVFAGAGGHRNEVLSVDFHPSDIERFASCGMDNTVKIWSMKEFWLYVDKSYSWTDLPSKFPTKYVQFPVLIAAVHSNYVDCTRWLGDFILSKSVDNEIVLWEPKTKEQSPGEGSIDILQKYPVPECDIWFIKFSCDFHFNQLAIGNREGKIYVWEVQSSPPVLIARLYNQQCRSPIRQTAVSFDGSTILGAGEDGTIWRWDEVDHGSSKN

SEQ ID NO: 86373 - protein, 83 aa, Setaria italica
  Transcript Sequence Number=SeqID_20399
FLLVSCHLIVLPFVAYPLQLHIRYQLENNASKQKSCTVQVSIGIVWLKSCKNRKKITQDVASSASSRLKKIFSQLEKESIAAK

SEQ ID NO: 86374 - protein, 108 aa, Setaria italica
  Transcript Sequence Number=SeqID_20400
  Gene Ontology: Biological process=pollen maturation
  Homolog annotation: Hit_ID=Q9ZVT9; Match level="QueryCoverage=90%, HitCoverage=9%, E-value=1e-26, Identity=55%"; Hit description =F15K9.2 protein
SRNSERHEGEAMSTQQKSPLPNKNGWLVEEVMTLEGIPIGECFNLHIRYQLENNASKQKSCTVQVSIGIVWLKSCKNRKKITQDVASSASSRLKKIFSQLEKESIAAK

SEQ ID NO: 86375 - protein, 547 aa, Setaria italica
  Transcript Sequence Number=SeqID_20401
  Gene Ontology: Cellular component=nucleus; Biological process =regulation of transcription, DNA-dependent
  Homolog annotation: Hit_ID=B6SVG7; Match level="QueryCoverage=100%, HitCoverage=100%, E-value=0.0, Identity=87%"; Hit description=Chitin- inducible gibberellin-responsive protein 2
  Pfam annotation: Domain name=GRAS; Domain location=177-547; Score =634.0; E_value=1.5e-187; Accession=PF03514.6; Description=GRAS family transcription factor
MADTPTSRMVHPFGNVPRQTPKQFLYSGNTQHLCHPYQSASDTHVVPEHHYTMKSHSPDAVSEEHETRKQYTLDSSAASGCSRHDSPSSQSIHTGSGSPLSHEDSHSGSTNGNGSPVSASCVTEDPTDLKQKLKDLEAVMLGTDSEIVDSLEISVANQLSLEPEKWVHMMSMPKGNLKELLIACARAVEQNNSFAIDLMIPELRKMVSVSGEPLERLGAYMVEGLVARLASSGNSIYKALKCKEPKSSDLLSYMHFLYEACPYFKFGYMSANGAIAEAVKGEDRIHIIDFHIAQGAQWISLLQALAARPGGPPFVRITGIDDSVSAYARGGGLELVGRRLSHIAGLYKVPFQFNAVAISGNEMEEGHLGIVPGEAVAVNFTLELHHIPDETVSTANHRDRILRLVKSLSPKVLTLVEQESNTNTAPFAQRFAETLDYYTAIFESIDLALPREDRERINMEQHCLAREIVNLVACEGEERVERHEVFGKWKARLMMAGFRPSPLSALVNATIKTLLQSYSPDYKLAERDGVLYLGWKNRPLIVSSAWH

SEQ ID NO: 86376 - protein, 352 aa, Setaria italica
  Transcript Sequence Number=SeqID_20402
  Gene Ontology: Mol. function=cysteine-type endopeptidase activity; Biological process=proteolysis
  Homolog annotation: Hit_ID=B6TKN0; Match level="QueryCoverage=88%, HitCoverage=89%, E-value=1e-131, Identity=76%"; Hit description =Thiol protease SEN102
  Pfam annotation: Domain name=Inhibitor_I29; Domain location=41-97; Score=93.0; E_value=1e-24; Accession=PF08246.4; Description =Cathepsin propeptide inhibitor domain (
  Pfam annotation: Domain name=Peptidase_C1; Domain location=135-351; Score=405.5; E_value=9e-119; Accession=PF00112.15; Description =Papain family cysteine protease
  Pfam module annotation: Pfam domain module=Inhibitor_I29::Peptidase _C1; Domain location=41-97::135-351
MTMATASASLAVALLFASLLAGTVFSDDIIPIIRIPLLERFHAWQAEYNRTYATPEEFQYRFKVYCENVKFIETMNRAGSSYELGENQFTDLTQEEFEDMYLMKLNEVASAPEAMGQLGTMNAGGTSGGGNTDEAPNYVDWRTKGAVTPVKDQQQCGSCWAFAAVASIEGVHKIKTGRLVSLSEQEIVDCDRGGNDHGCHGGYPSSAMAWVARNGGLTTESDYPYVGRQGQCRRDKLGHHAATIRGVWAVQRNNEAMLERAVAGQPVAVSINASRAFQFYKRGVFSGPCNTSLNHAVTVVGYGADPDGRKYWIVKNSWGQTWGENGYVRLERRVSSREGMCGIAMEPYYPVM

SEQ ID NO: 86377 - protein, 97 aa, Setaria italica
  Transcript Sequence Number=SeqID_20403
RPGILDGDGAAIEGSAGSKKGEGKGTTCARSSPLTQNIEQVVGQVEGRGTTGCSQPVVPLPSTSHTAVMAWLGYGGDVLRRAVVIDVGRQARLGVAS

SEQ ID NO: 86378 - protein, 111 aa, Setaria italica
  Transcript Sequence Number=SeqID_20404
  Gene Ontology: Mol. function=kinase activity
  Pfam annotation: Domain name=DUF579; Domain location=1-103; Score =54.1; E_value=7.8e-14; Accession=PF04669.5; Description=Protein of unknown function (DUF579)
SLPREVLDARWDVVVVDGPSGAGPEEPGRMGTIYTAAALARASAAAAAAGEGAPQVDVAVHDVDRTVDRWYAWEYLCEDNLVAAKGRLWHFRVGAGGPPDAFCNTGPVQIL

SEQ ID NO: 86379 - protein, 53 aa, Setaria italica
  Transcript Sequence Number=SeqID_20405
VFITKKLEFLLRWHTVRTQQHTSILLTQATLALIVFSHIYSQYMAAHRPMISS

SEQ ID NO: 86380 - protein, 55 aa, Setaria italica
  Transcript Sequence Number=SeqID_20406
TNLFCLQFHFGKVEGRHMLLFPHGEIYVLIYTHYQCNCLYENPSMSFILVTRCWK

SEQ ID NO: 86381 - protein, 91 aa, Setaria italica
  Transcript Sequence Number=SeqID_20407
APASPDGESHDYDLEDAEEDQDHTPAHRDHDRRTMPIPPGLPPLHTGREGRPVISPGSTKRVGAIVRPTTPKSPVPSVSAFERIEDSDEEE

SEQ ID NO: 86382 - protein, 142 aa, Setaria italica
  Transcript Sequence Number=SeqID_20408
  Gene Ontology: Mol. function=protein serine/threonine kinase activity; Biological process=protein amino acid phosphorylation
  Homolog annotation: Hit_ID=Q5ZBD7; Match level="QueryCoverage=54%, HitCoverage=29%, E-value=2e-16, Identity=53%"; Hit description =Receptor-like protein kinase-like
  Pfam annotation: Domain name=DUF26; Domain location=59-111; Score =88.1; E_value=3.2e-23; Accession=PF01657.9; Description=Domain of unknown function DUF26
GGNAPESAATNMNNVSDGNVAEFDALVARLVAAVANKASNASRRYATGQAGFPPQKMNVYALAQCTPDLTTAQCRGCLAGIIREMPSWFTGRIGGRILGVRCDIRYEDTVFMATGADMVKLTPLVNSSKGNNTTLWVVATVV

SEQ ID NO: 86383 - protein, 34 aa, Setaria italica
  Transcript Sequence Number=SeqID_20409
RIIADLCLCDWSGYLNNPEATKNTIDADGWLHTG

SEQ ID NO: 86384 - protein, 492 aa, Setaria italica
  Transcript Sequence Number=SeqID_20410
  Gene Ontology: Mol. function=4-coumarate-CoA ligase activity; Biological process=phenylpropanoid metabolic process
  Homolog annotation: Hit_ID=P17814; Match level="QueryCoverage=95%, HitCoverage=81%, E-value=0.0, Identity=84%"; Hit description =Probable 4-coumarate--CoA ligase 1
  Pfam annotation: Domain name=AMP-binding; Domain location=1-415; Score=399.7; E_value=5e-117; Accession=PF00501.20; Description=AMP -binding enzyme
AALRREPLGLRRGAVVMNLMLNSAEFVLSFFAASRVGAAVTTANPMSTPHEIANQIAASGATVVFTESMAVDKLPASAKDGGALTVVLIDARRDGCLHFWDDVMASVPDEEVAAGDEDSASGDGEFDPDDVVALPYSSGTTGLPKGVMLTHRSLSTSVAQQVDGDNPNIGFHSGDVILCSLPMFHIYSLNTIMMCGLRVGAAIVVMRRFALTAMMKLVERHRITIAPLVPPIVVDVAKSGEAAAHDLSSVRMVLSGAAPMGKDIEDAFMAKLPGAVLGQGYGMTEAGPVLSMCLAFAKEPFKVKSGACGTVVRNAELKIIDPNTGKSLGRNQPGEICIRGQQIMKGYLNNPEATKNTIDADGWLHTGDVGFVDDDDEIFIVDRLKEIIKYRGFQVAPAELEALLITHPSIADAAVVGKQVEPEIGEIPVAFVAKAQGSELSDDDVKQFVAKEVIYYKKVREVIFIDKIPKAPSGKILRKELRKQLQEQQQAV

SEQ ID NO: 86385 - protein, 87 aa, Setaria italica
  misc_feature (33)..(33): Xaa can be any naturally occurring amino acid
  misc_feature (40)..(40): Xaa can be any naturally occurring amino acid
  Transcript Sequence Number=SeqID_20411
  Gene Ontology: Mol. function=binding
  Homolog annotation: Hit_ID=Q5VS02; Match level="QueryCoverage=94%, HitCoverage=8%, E-value=5e-27, Identity=64%"; Hit description =Pentatricopeptide (PPR) repeat-containing protein-like
MYSSTGSTDEAKFIYDQLIEMGIKPNDSAVATXIVQYGRXEQLEQAQELFKSASASFPEGAHIYNAMVDAFCKCGKTEDAYHLSWNG

SEQ ID NO: 86386 - protein, 299 aa, Setaria italica
  misc_feature (272)..(272): Xaa can be any naturally occurring amino acid
  misc_feature (286)..(286): Xaa can be any naturally occurring amino acid
  Transcript Sequence Number=SeqID_20412
  Gene Ontology: Mol. function=binding; Cellular component=mitochondrion
  Homolog annotation: Hit_ID=Q5VS02; Match level="QueryCoverage=90%, HitCoverage=24%, E-value=1e-80, Identity=56%"; Hit description =Pentatricopeptide (PPR) repeat-containing protein-like
  Pfam annotation: Domain name=PPR; Domain location=1-35; Score=24.9; E_ value=0.00033; Accession=PF01535.12; Description=PPR repeat
  Pfam annotation: Domain name=PPR; Domain location=121-155; Score =26.7; E_value=9.3e-05; Accession=PF01535.12; Description=PPR repeat
  Pfam annotation: Domain name=PPR; Domain location=190-224; Score =34.7; E_value=3.8e-07; Accession=PF01535.12; Description=PPR repeat
  Pfam annotation: Domain name=PPR; Domain location=225-259; Score =12.0; E_value=0.34; Accession=PF01535.12; Description=PPR repeat
  Pfam annotation: Domain name=PPR; Domain location=36-69; Score=22.6; E_value=0.0017; Accession=PF01535.12; Description=PPR repeat
  Pfam module annotation: Pfam domain module=PPR::PPR::PPR::PPR::PPR; Domain location=1-35::121-155::190-224::225-259::36-69
FCCNDLLRLYIRLGHLEKARTLVLKMREDNFQLDDDLHMTVMELYCKIGMVDDAEKLFKEIQRNGKPMKIPTMVSLIEMYARNRTRAIQKDQSLSKALDKTSSSSAGMALKFLLDMPGGLSSVSQLISKLAREGSTDEAKFIYDQLIEMGIKPNDSAVATLIVQYGQGEQLEQAQELFKSASASFPEGAHIYNAMVDAFCKCGKTEDAYHLFMEMADQGNNRDAVTVSILVNHLTKNGKFQEVENIIHGCFRDEVQLDTVLYNTFIKSMLEXQVNCIQPLAYMIAXYPLAFHGPCRHSI

SEQ ID NO: 86387 - protein, 640 aa, Setaria italica
  Transcript Sequence Number=SeqID_20413
  Gene Ontology: Cellular component=endosome membrane; Biological process=protein transport
  Homolog annotation: Hit_ID=B9S0R4; Match level="QueryCoverage=99%, HitCoverage=89%, E-value=0.0, Identity=80%"; Hit description =Vacuolar protein sorting protein, putative
  Pfam annotation: Domain name=Vps52; Domain location=19-521; Score =899.5; E_value=1.8e-267; Accession=PF04129.4; Description=Vps52 Sac2 family
HFIKLREYTKGVENNIRQVELDSIQDYIKESENLVSLHDQIRDCDNILSQMEMVLTGFQTEIGSISSEIKVLQEKSMDMGLKLKNRKAAESKLSKFVEDIIVPPRMIDIIVDGEVNDEYMKTLETLSKKIKFIDADPMVKSSKALKDVQPEVERLRQKAVSKIFEFVIQKFYALRKPKTNIQILQQSVLLKYKYTIIFLKEHAKEIYAEIRAAYIDTMNKVLSAHFRAYIQALEKLQMDIATSTDLLGVETRSTGFLFSIGKESLKTRSSVFALGERINILKEIDQPALIPHIAEAKSQKYPYEVLFRSLQKLLIDTATSEYLFTDDFFGEESIFHDIFAGPIQVVDEYFNAVLLNCYDAIGIMLMIRIIHQHQLIMFKRRIPCLDSYLDKVNMSLWPRFKMVFDLHLNSLRNANIKTLWEDDVHPHYVTRRYAEFTASLVHLNVEHGDGQLDLNLERLRMAIEDLLVKLAKMFSKPKLQTIFLINNYDLTIAILKEAGTEGGKAQLHFEEVLKSNIAIYVEELLQEHFSDLIRFVKTRPADETASSSEKISVAEVEPLVKDFASRYKAAIEQMHKDVITSFSNFLCGMEILRAALAQLLLYYTRLTECVKRINGGSALNKDLVSISSILFEIKKYSRTF

SEQ ID NO: 86388 - protein, 57 aa, Setaria italica
  Transcript Sequence Number=SeqID_20414
  Gene Ontology: Mol. function=transporter activity; Cellular component= mitochondrial inner membrane; Biological process=transport
  Homolog annotation: Hit_ID=B1N662; Match level="QueryCoverage=100%, HitCoverage=19%, E-value=5e-21, Identity=82%"; Hit description =Mitochondrial carrier protein
  Pfam annotation: Domain name=Mito_carr; Domain location=3-56; Score= -12.5; E_value=0.047; Accession=PF00153.19; Description=Mitochondrial carrier protein
MGEVVKDLTAGTVGGAANLIVGHPFDTIKVKLQSQPTPAPGQLPKYAGAIDAVKQTI

SEQ ID NO: 86389 - protein, 296 aa, Setaria italica
  Transcript Sequence Number=SeqID_20415
  Gene Ontology: Mol. function=transporter activity; Cellular component= mitochondrial inner membrane; Biological process=transport
  Homolog annotation: Hit_ID=B9S1F6; Match level="QueryCoverage=100%, HitCoverage=100%, E-value=1e-119, Identity=70%"; Hit description =Protein dif-1, putative
  Pfam annotation: Domain name=Mito_carr; Domain location=103-202; Score=95.6; E_value=1.7e-25; Accession=PF00153.19; Description =Mitochondrial carrier protein
  Pfam annotation: Domain name=Mito_carr; Domain location=208-296; Score=91.3; E_value=3.3e-24; Accession=PF00153.19; Description =Mitochondrial carrier protein
  Pfam annotation: Domain name=Mito_carr; Domain location=3-98; Score =92.4; E_value=1.6e-24; Accession=PF00153.19; Description =Mitochondrial carrier protein
  Pfam module annotation: Pfam domain module=Mito_carr::Mito_carr::Mito_ carr; Domain location=103-202::208-296::3-98
MGEVVKDLTAGTVGGAANLIVGHPFDTIKVKLQSQPTPAPGQLPKYAGAIDAVKQTIAAEGPRGLYKGMGAPLATVAAFNALLFSVRGQMEALLREEPGVALTVKQQVIAGAGAGLAVSFLACPTELIKCRLQAQSSLAEAAAASGVALPKGPIDVAKHVVRDAGAKGLFKGLVPTMGREVPGNALMFGVYEATKQYLAGGRDTSNLGRGSQILAGGLAGAAFWLSVYPTDVVKSVVQVDDYKNPRYSGSLDALRKIVAADGVKGLYKGFGPAMARSVPANAATFVAYEITRSALG

SEQ ID NO: 86390 - protein, 47 aa, Setaria italica
  misc_feature (5)..(5): Xaa can be any naturally occurring amino acid
  Transcript Sequence Number=SeqID_20416
LRLKXKFWHTRATVVARIGNYLKNRIPEILEVEIEDEKQLDDSPAAF

SEQ ID NO: 86391 - protein, 154 aa, Setaria italica
  Transcript Sequence Number=SeqID_20417
  Subcellular localization annotation: CTP_CleavageSite=39; ConfidenceScore=5.75e-01
MAFAGVLRAGVLAVPPPLPASSPPPFFATSAYARVPRPTAAARAVRYRRRGRPSRAAAAITASLDLTEDNVRLALEEAKSELGQLFDTSVGITGQVDLAELDGPFVKLRLKGKFWHTRATVVARIGNYLKNRIPEILEVEIEDEKQLDDSPAAF

SEQ ID NO: 86392 - protein, 85 aa, Setaria italica
  Transcript Sequence Number=SeqID_20418
  Gene Ontology: Cellular component=vacuole
  Homolog annotation: Hit_ID=Q9SRS0; Match level="QueryCoverage=63%, HitCoverage=34%, E-value=1e-10, Identity=50%"; Hit description =F21O3.17 protein
  Pfam annotation: Domain name=DUF538; Domain location=2-53; Score= -30.4; E_value=0.0052; Accession=PF04398.4; Description=Protein of unknown function, DUF538
RLPPPAFSGVAAQDLFIWFPVHDITVDIPSSGVIYFNVGVVKKHFPLALFDAPPACTPDRLLRTTPQRLEDVDLDGLLISGSASQ

SEQ ID NO: 86393 - protein, 180 aa, Setaria italica
  Transcript Sequence Number=SeqID_20419
  Gene Ontology: Cellular component=integral to membrane
  Subcellular localization annotation: CTP_CleavageSite=88; ConfidenceScore=5.25e-01
MQAPSTPQRHPHHIASRHLLHAMQGISNAPTLPRCSLSPLVVLSAFLVLLGAGGSLLIRAYFVHGGRRLWLSTMIQLSGWPLLLPPICASLLLRSRSRDGAGGGVADHLPPPRLVRAVAVLGAVFAVACFAYSLGSQALPLSTSSLLQATQLTFNAVSAFLFAGLRFTPFSVNAVVLLTI

SEQ ID NO: 86394 - protein, 498 aa, Setaria italica
  misc_feature (178)..(178): Xaa can be any naturally occurring amino acid
  Transcript Sequence Number=SeqID_20420
  Gene Ontology: Mol. function=diacylglycerol kinase activity; Cellular component=plasma membrane; Biological process=activation of protein kinase C activity
  Homolog annotation: Hit_ID=A8QM13; Match level="QueryCoverage=100%, HitCoverage=100%, E-value=0.0, Identity=83%"; Hit description =Diacylglycerol kinase 3
  Pfam annotation: Domain name=DAGK_acc; Domain location=240-413; Score= 61.0; E_value=4.5e-15; Accession=PF00609.11; Description =Diacylglycerol kinase accessory domain
  Pfam annotation: Domain name=DAGK_cat; Domain location=45-188; Score =115.1; E_value=2.4e-31; Accession=PF00781.16; Description =Diacylglycerol kinase catalytic domain
  Pfam module annotation: Pfam domain module=DAGK_acc::DAGK_cat; Domain location=240-413::45-188
MDLHRNGTNGSDHSSCGPLTNYYIPDYILKPDSEQVIVDNAPSCPVVVFINSRSGGQLGSSLIKTYRELLNEAQVFDLSEEAPDKVLHRLYSNFEKLKSNGDLLAIQIQKNLRLIVAGGDGTASWLLGVVSDLKLSHPPPIATVPLGTGNNLPFSFGWGKKNPATDQAAVKSFLGQVXKAREMNIDSWHIIMRMRVPQEGPCDPIAPLDLPHSLHAFHRVSASDSLNVEGYHTFRGGFWNYFSMGMDAQVSYEFHSERKRNPEKFKNQLTNQGTYAKLGLKQGWFAASLTHPSSRNIAQLAKVKIMKRPGRQWEELIIPRSIRSIICLNLPSFSGGLNPWGTPGTRKVQDRDLTAPYVDDGLIEVVGFRDAWHGLVLLAPNGHGTRLAQAHRIRFEFHKGAAEHTFMRIDGEPWKQPLPKEDDTVVVEISHLRQVAMLASENCRSKSVNDPSSPSCHSHDDDDSNSLEDEDEWEDGRKKFGAAATFKIPDEVDIAHLS

SEQ ID NO: 86395 - protein, 103 aa, Setaria italica
  misc_feature (49)..(49): Xaa can be any naturally occurring amino acid
  misc_feature (86)..(86): Xaa can be any naturally occurring amino acid
  Transcript Sequence Number=SeqID_20421
  Gene Ontology: Mol. function=voltage-gated potassium channel activity; Cellular component=integral to membrane; Biological process=potassium ion transport
  Homolog annotation: Hit_ID=B6ST31; Match level="QueryCoverage=70%, HitCoverage=9%, E-value=5e-22, Identity=78%"; Hit description=Cyclic nucleotide-gated ion channel 9
ILVSPLLPAILISIFPFNSTLGQGLVTSTYPGEVLFSIAICVLGLILFXALLIGNMQSYLQSVAIRLEEMRVKKRDAEQWMHHRSXLPPEIRHRVRRYERYRW

SEQ ID NO: 86396 - protein, 235 aa, Setaria italica
  misc_feature (109)..(109): Xaa can be any naturally occurring amino acid
  Transcript Sequence Number=SeqID_20422
  Gene Ontology: Mol. function=voltage-gated potassium channel activity; Cellular component=integral to membrane; Biological process=potassium ion transport
  Homolog annotation: Hit_ID=Q25A66; Match level="QueryCoverage=92%, HitCoverage=29%, E-value=2e-85, Identity=71%"; Hit description =H0306F03.9 protein
MFDGAQKAQYMDGHRERFIRLEESSPRSSVPSEVGGGSALRFSMPGFGYGSFNALRSFLSGVRKGSGRLKSLRQSLTSGAPKTAFAEDLKSFKKTIFDPQDKLLFRMNXVFFSSCIIAVAVDPLFFFLPIINITKDGKPTCIGIDKTLAVASTIIRTVIDSIYFIRIILQFRTAYVAPSSRVFGTGELVIDPVPIAMRYIKSYFIMDLFALLPLPQVQPFILCVKQCAINCSMDV

SEQ ID NO: 86397 - protein, 178 aa, Setaria italica
  Transcript Sequence Number=SeqID_20423
  Homolog annotation: Hit_ID=B9RVI6; Match level="QueryCoverage=98%, HitCoverage=30%, E-value=7e-56, Identity=57%"; Hit description=Gd2b, putative
  Subcellular localization annotation: CTP_CleavageSite=20; ConfidenceScore=5.26e-01
VALSIVLAFAWQKAVRTWPRAMVRVILWSSFGVTLGVGALLMIFSTLATVGLGVAMVVFSIGTGLYACWVTRRVGFTARVFERAVQPVDKFRGLNGPAYLMVAAGFLWISVWCVAVIGAVNFRFPGLTILALVLSLAWTAEVMRNVANLTASRVIALYYLRGMQSSVQFSFQRALSYN

SEQ ID NO: 86398 - protein, 86 aa, Setaria italica
  Transcript Sequence Number=SeqID_20424
  Gene Ontology: Mol. function=protein serine/threonine phosphatase activity; Cellular component=protein serine/threonine phosphatase complex; Biological process=protein amino acid dephosphorylation
  Homolog annotation: Hit_ID=Q65XG6; Match level="QueryCoverage=93%, HitCoverage=17%, E-value=4e-25, Identity=73%"; Hit description =Probable protein phosphatase 2C 49
GPRYGVTSVCGLRREMEDAVSIRPDFLHGGGGGGASSSSSGKHHFFGVFDGHGCCHVARMCQDRMHELVADEYSKAASGKEGGATR

SEQ ID NO: 86399 - protein, 32 aa, Setaria italica
  Transcript Sequence Number=SeqID_20425
MDRVMKLASERAVVVFTLSSCCMCHTVTKLMQ

SEQ ID NO: 86400 - protein, 86 aa, Setaria italica
  Transcript Sequence Number=SeqID_20426
KDPHPSLSDPIYKLHKIQENGDRHRLLEKMHINQVHDFLRFYNKDANSLRAVREQKFHYQLICICSPITFYNINISLTQLVSYHHI

SEQ ID NO: 86401 - protein, 161 aa, Setaria italica
  Transcript Sequence Number=SeqID_20427
  Homolog annotation: Hit_ID=Q2QP06; Match level="QueryCoverage=77%, HitCoverage=21%, E-value=7e-13, Identity=27%"; Hit description =Calmodulin-binding protein, putative, expressed
  Pfam annotation: Domain name=Calmodulin_bind; Domain location=1-155; Score=-123.6; E_value=0.0018; Accession=PF07887.3; Description =Calmodulin binding protein-like
NYQASVSFILLLFFSTIIDALLFTAYRKDPHPSLSDPIYKLHKIQENGDRHRLLEKMHINQACKNISDHDWNTIVNHALSCKPGHRHYSYHIPAKDATMFFNSLYKIVGAEFNGKYTSYEELNDTQKGLVEVSKKKAYDNLKLVQYEGKNSVHEHQVIFGD

SEQ ID NO: 86402 - protein, 182 aa, Setaria italica
  misc_feature (101)..(101): Xaa can be any naturally occurring amino acid
  Transcript Sequence Number=SeqID_20428
VVLQDDNSDGFDTTDTIDMKISSVPDDDKDVFVDVSDSAVTEPTLRRTKSNSKILEEDNATCATGVTILQNGNKNMVKDGADLECSPAKEFAKESTREFSXNWQQGCFEGREGKIGVLLGRKNDNLTEAGLGSGLKEGVSSPDHCFSQGDHARDGENSIENGFRTPRHCDSNCSHGQPFFQL

SEQ ID NO: 86403 - protein, 108 aa, Setaria italica
  Transcript Sequence Number=SeqID_20429
  Gene Ontology: Mol. function=metal ion binding
  Homolog annotation: Hit_ID=Q69T46; Match level="QueryCoverage=99%, HitCoverage=22%, E-value=1e-28, Identity=53%"; Hit description=Zinc -finger protein-like
NPVEGMESLVEGKDTCCLCLRKVGLCLRCSSGDCHITFHPTCARNSGFYMNTKGFGTTSQHKAYCGKHSAQQKEEDAQRYGLEELRSMKRMRLQTRALYAVFEVSIRW

SEQ ID NO: 86404 - protein, 480 aa, Setaria italica
  Transcript Sequence Number=SeqID_20430
  Gene Ontology: Mol. function=metal ion binding; Cellular component =NuA3 histone acetyltransferase complex; Biological process =regulation of transcription, DNA-dependent
  Homolog annotation: Hit_ID=Q69T46; Match level="QueryCoverage=95%, HitCoverage=92%, E-value=1e-131, Identity=52%"; Hit description=Zinc- finger protein-like
  Pfam annotation: Domain name=C1_1; Domain location=71-121; Score=5.0; E_value=0.0079; Accession=PF00130.14; Description=Phorbol estersdiacylglycerol binding do
  Pfam annotation: Domain name=C1_2; Domain location=82-111; Score =15.9; E_value=0.058; Accession=PF03107.8; Description=C1 domain
  Pfam annotation: Domain name=C1_3; Domain location=81-111; Score =12.2; E_value=0.021; Accession=PF07649.4; Description=C1-like domain
  Pfam annotation: Domain name=PHD; Domain location=82-129; Score=26.3; E_value=3.5e-05; Accession=PF00628.21; Description=PHD-finger
  Pfam annotation: Domain name=zf-C3HC4; Domain location=83-126; Score =5.7; E_value=0.022; Accession=PF00097.17; Description=Zinc finger, C3HC4 type (RING finger)
  Pfam module annotation: Pfam domain module=C1_1::C1_2::C1_3::PHD::zf -C3HC4; Domain location=71-121::82-111::81-111::82-129::83-126
  Subcellular localization annotation: CTP_CleavageSite=101; ConfidenceScore=5.25e-01
QAVLAAAAAAAASSSRNSTMRKDAKEDAAPANQESSPKLVAGSSRVGQRTKDSSKSSNSKLPPDNKFGSFHMPISSNENALHCDVCMRTETLLNRIFICSRCKAAVHIDCYRNLENSIGPWKCELCEDQDISLETPTTSDKLDCNGKKSPFARCGMCHGTSGAFRKTADGQWVHAFCAEWLLDTKYVRGQENPVEGMESLVEGKDTCCLCLRKVGLCLRCSSGDCHITFHPTCARNSGFYMNTKGFGTTSQHKAYCGKHSAQQKEEDAQRYGLEELRSMKRMRVELEKLRLLCERVIKREKVKRETVLCDHDILAKTKDTVIFSYLACGASSESATTSVNNRSYSGTAQRSDDVTVDSTLSRKKTIRFSLNSRDAERNTADSSRTLISFKRKLSERGLHAGKQLPQRPAITSQKLDDGEKKTNDKKIEMFQKELVMTSDQASTQNQRLPKGYVYVPRDSLSKERPWNRNTQPHTPQEPGG

SEQ ID NO: 86405 - protein, 867 aa, Setaria italica
  misc_feature (20)..(20): Xaa can be any naturally occurring amino acid
  misc_feature (43)..(43): Xaa can be any naturally occurring amino acid
  Transcript Sequence Number=SeqID_20431
  Gene Ontology: Mol. function=metal ion binding; Cellular component =cytoplasm; Biological process=regulation of transcription, DNA -dependent
  Homolog annotation: Hit_ID=B9RJB8; Match level="QueryCoverage=94%, HitCoverage=66%, E-value=1e-102, Identity=32%"; Hit description=Phd finger protein, putative
  Pfam annotation: Domain name=PHD; Domain location=73-119; Score=34.5; E_value=4.4e-07; Accession=PF00628.21; Description=PHD-finger
PFEVDQAVSNGIVSAQCAEXGRSSLNWLLGATGRFVLTSERPXKRKLLGVAAGLEQLVLLPRLGAEKSSTCDVCCLGESSMDSNRIVNCSNCKVSVHQKCYGLRVVPDGQWLCAWCTYLESNKDSGSTQPTPCVLCPKEKGALKPVKVEPTQTADVSHLKFAHLFCSLWAPEVFVEDMESMEPVTNLDNVQENRMKLTCSICKIKHGACVRCSHGTCRAAFHPICARESKHQMEIWGKSRHSNVELRAFCSKHSSVGYTSSVENSNHASEQSPTESGPNNTNLITGKIPKLRFTRKNKDKFMNCETSASSSGNLIRVETTEQDALANTVRNANAQPIRSRETGTGHPSVGGDRMRSPGDIAVVLRKLIDSGKVSVGDIASEVGISSESLEAALVGETTTFSHGLMLKIINWLQNSVHMHAVQGNACKGNSVVLQDDNSDGFDTTDTIDMKISSVPDDDKDVFVDVSDSAVTEPTLRRTKSNSKILEEDNATCATGVTILQNGNKNMVKDGADLECSPAKEFAKESTREFSPIGSKGVSKEEKGKLILNNTSGNNEFGTSMEIPNENRGVLLGRKNDNLTEAGLGSGLKEGVSSPDHCFSQGDHARDGENSIENGFRTPRHCDSNCSHGQPFFNFDDSHSYIHPFIKKKISHHWDITFNQNKEALNHHEEPSCPSHEKIPVDSSEEHEDATDTAASDQVLKASSLEILEHAPDDEVEGEIVYLQARLLDNAVVLKHRYEKLIAKVVQNISRELDAFSRRKWDLIFVNQFLRDVREAKKRGRKEKRHKEAQAVLAAAAAAAASSSRNSTMRKDAKEDAAPANQESSPKLVAGSSRVGQRTKDSSKSSNSKLPPDNKFGSFHMPQISNEK

SEQ ID NO: 86406 - protein, 68 aa, Setaria italica
  Transcript Sequence Number=SeqID_20432
  Subcellular localization annotation: CTP_CleavageSite=52; ConfidenceScore=5.71e-01
SSRGLLTVHQSTSPPPPPPLCFPPPPLPRRRRSHAPFYPWRATARIPPPGTSVAAPSRLPPPEYPPAP

SEQ ID NO: 86407 - protein, 85 aa, Setaria italica
  Transcript Sequence Number=SeqID_20433
  Gene Ontology: Mol. function=nucleic acid binding; Cellular component= nucleolus
  Homolog annotation: Hit_ID=B4FL92; Match level="QueryCoverage=98%, HitCoverage=39%, E-value=1e-38, Identity=90%"; Hit description=MKI67 FHA domain-interacting nucleolar phosphoprotein-like
  Pfam annotation: Domain name=RRM_1; Domain location=31-85; Score =16.9; E_value=0.0054; Accession=PF00076.14; Description=RNA recognition motif. (a.k.a. RRM, RBD, o
CKDFLPLEGGPGKRLRKVQQPEEPENTATVVYIGHIPHGFYEDQMQGFFKQFGDIKRLRIARNRKTGKSKHYGFIEFESPLVAKV

SEQ ID NO: 86408 - protein, 216 aa, Setaria italica
  Transcript Sequence Number=SeqID_20434
  Gene Ontology: Mol. function=nucleic acid binding; Cellular component= nucleolus; Biological process=multicellular organismal development
  Homolog annotation: Hit_ID=B4FL92; Match level="QueryCoverage=99%, HitCoverage=99%, E-value=1e-111, Identity=91%"; Hit description =MKI67 FHA domain-interacting nucleolar phosphoprotein-like
  Pfam annotation: Domain name=RRM_1; Domain location=56-126; Score =66.0; E_value=1.4e-16; Accession=PF00076.14; Description=RNA recognition motif. (a.k.a. RRM, RBD, o
MGMRDKKRNQKRVLAQRTAAPRPGEGKDFLPLEGGPGKRLRKVQQPEEPENTATVVYIGHIPHGFYEDQMQGFFKQFGDIKRLRIARNRKTGKSKHYGFIEFESPLVAKVVADEMNNYLLFEHTLRVSLVPPEKVHPKLWRGVRRGFIPIDRVAIERKRHNKDKTTEEHKKMVEGIVKRDEKRRKRIKAAGIDYECPALLGSIQPSAKKIKFDEDQ

SEQ ID NO: 86409 - protein, 382 aa, Setaria italica
  Transcript Sequence Number=SeqID_20435
  Gene Ontology: Mol. function=serine-type carboxypeptidase activity; Cellular component=extracellular region; Biological process =proteolysis
  Homolog annotation: Hit_ID=B6U082; Match level="QueryCoverage=99%, HitCoverage=77%, E-value=0.0, Identity=84%"; Hit description =Lysosomal protective protein
  Pfam annotation: Domain name=Peptidase_S10; Domain location=5-377; Score=536.7; E_value=2.8e-158; Accession=PF00450.14; Description =Serine carboxypeptidase
SLRAPQDPLDKPLVLWLNGGPGCSSFGSGAMLELGPFSVRNDNKTLYRKRHAWNRVANMLFVEIPAGVGYSYSNTTSDYYNTGDQRTTDDAYTFIVNWLEKFPEYRDRDFFITGESYAGHYIPELANLIVSKNRASNATNVKLKGVAIGNADLDDNLTLRASFDYYWMHAMISRKAYRAIKDKCDFNGTYTKDCQNAMNLATQEKGNVDDYDIYAPTCHDASNPSKSSDSLVGDPCTNHYVSSYLNRPEVQKALHANTTGLHYPWMDCSQHVFDNWKDSPETMLPSIKKLISSGIRIWLYSGDMDAVCSFISTQYVLDILGLPIETSWRPWSIDNEVAGYVIGYKGLVFATVRGAGHMVPYYQPRRALALFSSFLEGKLPPH

SEQ ID NO: 86410 - protein, 160 aa, Setaria italica
  Transcript Sequence Number=SeqID_20436
  Gene Ontology: Cellular component=integral to membrane
  Homolog annotation: Hit_ID=B6SXZ2; Match level="QueryCoverage=76%, HitCoverage=19%, E-value=9e-44, Identity=70%"; Hit description =Transmembrane 9 superfamily protein member 4
  Pfam annotation: Domain name=EMP70; Domain location=2-160; Score= -254.4; E_value=4.1e-06; Accession=PF02990.8; Description =Endomembrane protein 70
MLGQWFVGRKDWSYFIHNHLSFLVKYNKDEHTGLARIVGFEESDIKWASRWDTYLSTPDDHWFYIVNTLMTVLFLSVMVAMIMLRTLYRDISMYNQLENQEEAQEESGWKLLHGDVFRPPVNADTLCVYVGTGVQFFGMLLVTLLLAILGLLSPSNRGGF

SEQ ID NO: 86411 - protein, 59 aa, Setaria italica
  Transcript Sequence Number=SeqID_20437
CMDQGAYLLTQSGVKANESKDEQSDSEELLPINITGCASRVSMGNIYSICIYEEMNIYS

SEQ ID NO: 86412 - protein, 76 aa, Setaria italica
  Transcript Sequence Number=SeqID_20438
VQRHARHVLKKKLLRPLLVVEPSIYVIRTCIIPVPHDGMYIPSWRNCTMNHGVTGFLFVTVSAHAIAKVFTLPPLA

SEQ ID NO: 86413 - protein, 140 aa, Setaria italica
  Transcript Sequence Number=SeqID_20439
VTSCLVLVRDVVVAASALLLRLVRLVVVAAHAALAAGNFLLVALVIVVVLTLAVIILITIVPAATPRTTTLVVTRRFWQLVPEVGVSGSVPEYRLPLPMVRVTVGHDGGPGEVCVRVIFFVPRRHGNSLLWVFYELLGRP

SEQ ID NO: 86414 - protein, 163 aa, Setaria italica
  Transcript Sequence Number=SeqID_20440
KVCSLVVEPSIYVIRTCIIPVPHDGMYIPSWRNCTMNHGVTGFLFVTVSAHAIAKVFTLPPLACTPPVRLVLVRDVVVAASALLLRLVRLVVVAAHAALAAGNFLLVALVIVVVLTLAVIILITIVPAATPRTTTLVSLLRSFSWSSLGFRLSLGSFFLWFLV

SEQ ID NO: 86415 - protein, 117 aa, Setaria italica
  Transcript Sequence Number=SeqID_20441
  Gene Ontology: Mol. function=sodium:dicarboxylate symporter activity; Cellular component=plasma membrane
  Homolog annotation: Hit_ID=UPI0001A7B14A; Match level="QueryCoverage =98%, HitCoverage=14%, E-value=6e-38, Identity=62%"; Hit description =aminopeptidase
HPSPQNLIGKVAIQEPTFEEVIVLYRRKSPKGQDDRAIHVKHFKNIPMADMELVLPEKKNPSLTPMDWVQFIVSVVIGLVTLISSLEMPKADFWVVIAILSALAGYCAKIYFSFQQN

SEQ ID NO: 86416 - protein, 137 aa, Setaria italica
  Transcript Sequence Number=SeqID_20442
  Subcellular localization annotation: CTP_CleavageSite=43; ConfidenceScore=5.46e-01
RSGAARDASRTSPPFPTRRRLRRHSPSPACPAIRLASPLSGPSAASLNPPREPERHQSKPLVTCPPHPVPLSQAAPCPASRARASSPGSPLSPSAPPPRQPPPPPPPPPHPRLRRRRRRLRPPPRPRPLPGTHPPSP

SEQ ID NO: 86417 - protein, 114 aa, Setaria italica
  Transcript Sequence Number=SeqID_20443
RWNFDPAASLIELVDKLNNEKSAKTTCLHQHLTQKLQLLTAHHNVTISDTETAILYLVQPLNFVELADGLIFCTAPRQGFLRPPCALVSVIRSELNGAVLPDAVRKHSKEGKET

SEQ ID NO: 86418 - protein, 48 aa, Setaria italica
  Transcript Sequence Number=SeqID_20444
  Homolog annotation: Hit_ID=B6SU83; Match level="QueryCoverage=68%, HitCoverage=16%, E-value=8e-12, Identity=96%"; Hit description=RING -H2 finger protein ATL3F
  Pfam annotation: Domain name=zf-C3HC4; Domain location=2-32; Score =16.8; E_value=0.0012; Accession=PF00097.17; Description=Zinc finger, C3HC4 type (RING finger)
DEARALPRCGHRFHAACVDAWLRRRHTTCPLCRASVVVAAAEDVDAPV

SEQ ID NO: 86419 - protein, 112 aa, Setaria italica
  Transcript Sequence Number=SeqID_20445
RPMFLAWIMQSWHCSVSKFRHFSVLYQKRRVLQIVTNCHKAERMKWAPLGLQLAFCAPFTFWDKKIFNYLESPSVPYAPVTANSLFACYFQDHLLDVLLIHPSKRRAKSRMK

SEQ ID NO: 86420 - protein, 154 aa, Setaria italica
  Transcript Sequence Number=SeqID_20446
  Gene Ontology: Cellular component=integral to membrane
  Pfam annotation: Domain name=DUF588; Domain location=6-139; Score =116.5; E_value=8.7e-32; Accession=PF04535.4; Description=Domain of unknown function (DUF588)
MKDVLVSPGTWSGMALRLSQCVSAGGSMAAMATAYGFSNYTAFCYLIASMGLQLLWSFGLACLDIYSLKTKRDLHNPVLVSLFVVGDWVTAILSFAAASASAGVTILFERDVHFCRMYPQLSCGRYELSVILAFITWSFIATSAVSMFWLLPSL

SEQ ID NO: 86421 - protein, 94 aa, Setaria italica
  Transcript Sequence Number=SeqID_20447
  Gene Ontology: Cellular component=plasma membrane
  Subcellular localization annotation: CTP_CleavageSite=49; ConfidenceScore=5.61e-01
VPDLSVPSLYHTPASTPSSKSPRRHQPPLIPPPQATPVVGVLSPPLEPQAAVKSTKRAGIIGVAFEAYYSKISQMPAASKVDACNAAAVWAGQY

SEQ ID NO: 86422 - protein, 149 aa, Setaria italica
  Transcript Sequence Number=SeqID_20448
  Gene Ontology: Mol. function=extracellular-glutamate-gated ion channel activity; Cellular component=integral to membrane; Biological process=G-protein coupled receptor protein signaling pathway
  Homolog annotation: Hit_ID=Q7XP59; Match level="QueryCoverage=100%, HitCoverage=15%, E-value=7e-65, Identity=75%"; Hit description =Glutamate receptor 3.1
LLLERIRKVNFMGATGTVKLDSDGNLINPAYDIINIIGSGLRTIGYWTNYSGLSIVSPETLYKKPPNDTIENQKLHTAIWPGETIKRPRGWVFANNGDELRIGVPNRVSYRQFVSDDNQTGMVGGLCIDVFAAAINLLQYPVAYRFIPF

SEQ ID NO: 86423 - protein, 91 aa, Setaria italica
  Transcript Sequence Number=SeqID_20449
  Subcellular localization annotation: CTP_CleavageSite=34; ConfidenceScore=5.47e-01
SPGSTGCDLWIPCPLQPCAPAGQRQAAKRRRSARAAAGGRAQAAVPCRRSRLSCLASSLHPRHSGHLSIYDLGFSVLWILGNGRRENAEWG

SEQ ID NO: 86424 - protein, 280 aa, Setaria italica
  misc_feature (203)..(203): Xaa can be any naturally occurring amino acid
  Transcript Sequence Number=SeqID_20450
QDEENCAEISKHPRLLSKITSPLSSPDFLNNVREDTMVVRMLSKSLTALSRILACPGDGATRLRQELASTTEAVRNLMAILENGSGAAQELHRQALEILTELAFDDSFKKLEFNKLLKALLCIFLEEAPSNNTVVQVEQADRENATRLMRGKAGEGLARLLPVSTARERDVIISKQQAINLLTKVLDQILSSKMGTSADAAEXKGEAEQSEERKFMAAMLSLAVVICNENVISREDFARSTPEDAALAKKLKEILEVNKQRTAQSECFRVVKLTCQMVIA

SEQ ID NO: 86425 - protein, 175 aa, Setaria italica
  Transcript Sequence Number=SeqID_20451
  Gene Ontology: Mol. function=DNA binding; Cellular component=nucleus; Biological process=regulation of transcription, DNA-dependent
  Homolog annotation: Hit_ID=B9SLD5; Match level="QueryCoverage=41%, HitCoverage=16%, E-value=2e-35, Identity=93%"; Hit description =Transcription factor, putative
  Pfam annotation: Domain name=TCP; Domain location=54-157; Score =156.2; E_value=9.9e-44; Accession=PF03634.5; Description=TCP family transcription factor
  Subcellular localization annotation: CTP_CleavageSite=47; ConfidenceScore=5.34e-01
ASNSGVPQPPPQQQPSPFAGALAITPVPEQAQPSSAAGADKKALVPVAAPAAGPVVAKRPSKDRHTKVDGRGRRIRMPALCAARVFQLTRELGHKSDGETIEWLLQQAEPAILAATGTGTIPANYSSLNISIRSGAAAAANPSRASPFPALALHPHHHQAAAAPHDMSAMMGYHH

SEQ ID NO: 86426 - protein, 97 aa, Setaria italica
  Transcript Sequence Number=SeqID_20452
  Gene Ontology: Mol. function=calcium ion binding; Cellular component =plasma membrane
  Homolog annotation: Hit_ID=B9R838; Match level="QueryCoverage=79%, HitCoverage=9%, E-value=2e-25, Identity=78%"; Hit description =Tetratricopeptide repeat protein, tpr, putative
ANGDGGLDRDEMAALVVAVNPRVKFSDDQISAILDEVFRTYAEFILPDGRGLSLPGLLRTYDDGAGDVDRDFLALSLPAVDSDASSPEIGPGGRRRP

SEQ ID NO: 86427 - protein, 118 aa, Setaria italica
  Transcript Sequence Number=SeqID_20453
  Gene Ontology: Mol. function=helicase activity; Cellular component =chloroplast
  Homolog annotation: Hit_ID=B9SZC0; Match level="QueryCoverage=100%, HitCoverage=35%, E-value=2e-41, Identity=45%"; Hit description =Pentatricopeptide repeat-containing protein, putative
  Pfam annotation: Domain name=PPR; Domain location=41-75; Score=42.9; E_value=1.2e-09; Accession=PF01535.12; Description=PPR repeat
  Pfam annotation: Domain name=PPR; Domain location=6-40; Score=35.2; E_ value=2.7e-07; Accession=PF01535.12; Description=PPR repeat
  Pfam annotation: Domain name=PPR; Domain location=76-110; Score=28.6; E_value=2.6e-05; Accession=PF01535.12; Description=PPR repeat
  Pfam module annotation: Pfam domain module=PPR::PPR::PPR; Domain location=41-75::6-40::76-110
LQPDNITYNSILTHYCKQGNIKKAADILETMTANGFEVDVVTYGTLINGLCKAGRTQVALKLLRGMRIKGMRPTPKAYNPVIQSLFKRNNLRDALNLFREMTEVGEPPDALTYKIVFR

SEQ ID NO: 86428 - protein, 323 aa, Setaria italica
  Transcript Sequence Number=SeqID_20454
  Gene Ontology: Mol. function=molecular_function; Cellular component =plasma membrane
  Homolog annotation: Hit_ID=B9REE7; Match level="QueryCoverage=93%, HitCoverage=82%, E-value=1e-145, Identity=79%"; Hit description=SPFH domain-containing protein 2, putative
  Pfam annotation: Domain name=Band_7; Domain location=21-204; Score =70.7; E_value=5.3e-18; Accession=PF01145.17; Description=SPFH domain Band 7 family
VAFIGICFVLISLSVPSSVLHQVPEGHVGVYWRGGALLKTITPPGFHLKLPWITQYEPIQVTLQTDQVRDIPCGTKGGVMISFDKIEVVNRLRKEFVHETLLNYGVHYDKTWIYDKIHHEINQFCSAHSLQQVYIDMFDQIDETMKEAIQRDCTRYAPGIEIISVRVTKPNIPGSIRRNFELMEEERTKALIAIEKQKVAEKEAETQKKIALSEAEKNAQVSKILMEQKLMEKDSSKRQEQIDNEMYLAREKALADANYYRILKEAEANKLKLTPEYLELRFMESIANNSKIFFGEKIPNMIMDQRLLKNYLNDVPRKDYSEL

SEQ ID NO: 86429 - protein, 65 aa, Setaria italica
  Transcript Sequence Number=SeqID_20455
  Homolog annotation: Hit_ID=B6TUZ9; Match level="QueryCoverage=92%, HitCoverage=23%, E-value=1e-09, Identity=58%"; Hit description =Receptor protein kinase-like protein
MQRVAWKDEPLHQGIDASNNHAVGVGPGMPFANALLRSGRAGAPVVALVPCAVGGTRMADWARGT

SEQ ID NO: 86430 - protein, 122 aa, Setaria italica
  Transcript Sequence Number=SeqID_20456
  Subcellular localization annotation: CTP_CleavageSite=41; ConfidenceScore=5.54e-01
LPPTPSPSPSPPPGKPAKTLAESTPPSKAPARPKPTAEKPKAAPVPATTNGAGAATGENWWLVGSAEMAGLSTCKGRRIAPGDAVTFSFPNAAAAASAAGKSRSGRPSLASCSSEIMRFSTP

SEQ ID NO: 86431 - protein, 138 aa, Setaria italica
  misc_feature (112)..(112): Xaa can be any naturally occurring amino acid
  misc_feature (128)..(128): Xaa can be any naturally occurring amino acid
  misc_feature (131)..(131): Xaa can be any naturally occurring amino acid
  Transcript Sequence Number=SeqID_20457
  Homolog annotation: Hit_ID=B6U1H3; Match level="QueryCoverage=91%, HitCoverage=32%, E-value=3e-36, Identity=70%"; Hit description=ZIM motif family protein
  Pfam annotation: Domain name=CCT_2; Domain location=68-94; Score =55.5; E_value=2.1e-13; Accession=PF09425.2; Description=Divergent CCT motif
  Subcellular localization annotation: CTP_CleavageSite=68; ConfidenceScore=5.74e-01
PPSAISKPIPSVLQAATLPRSASSCNLDSPVPKCSVPLAVPPLSQAPATQPATLTTATAAAIMPRAVPQARKASLARFLEKRKERVTTTAPYPSAKSPLESSDTLGSGSANXDKSSCTDIALSSNREXLLXLGQPGHQ

SEQ ID NO: 86432 - protein, 442 aa, Setaria italica
  Transcript Sequence Number=SeqID_20458
  Gene Ontology: Mol. function=protein binding; Cellular component =nucleus
  Homolog annotation: Hit_ID=B6U1H3; Match level="QueryCoverage=90%, HitCoverage=100%, E-value=1e-144, Identity=71%"; Hit description=ZIM motif family protein
  Pfam annotation: Domain name=CCT_2; Domain location=360-386; Score =55.5; E_value=2.1e-13; Accession=PF09425.2; Description=Divergent CCT motif
  Pfam annotation: Domain name=tify; Domain location=213-248; Score =77.7; E_value=4.1e-20; Accession=PF06200.6; Description=tify domain
  Pfam module annotation: Pfam domain module=CCT_2::tify; Domain location=360-386::213-248
EKREEREASPSLLGEGCRAVRLSTPPTCYPRRAKSAASFPEPGWMERDFLAAIGKEQQHPQREKPGREESAYFGATAAGAPAMDWSFASKPGAAPSLMSFRSAAREEPTFPQFSAFDGAKNPAPRILTHQRSFGADSQQYAAVHRAQPPQHALNGARVIPVSSPFNQNNPMFRVQSSPSIPNGTAGPFKQPPFAMNNAVNNSTVGVYGTRDAVKPKTAQLTIFYAGSVNVFDNVSAEKAQELMFLASRGSLPSSAPVARKPEAPIFAPAKVTVPEASPAKQMLFQKPPHVSSPPSAISKPIPSVLQAATLPRSASSCNLDSPVPKCSVPLAVPPLSQAPATQPATLTTATAAAIMPRAVPQARKASLARFLEKRKERVTTTAPYPSAKSPLESSDTLGSGSANDKSSCTDIALSSNREELLSLGQPRNISFSQESPSTKLQI

SEQ ID NO: 86433 - protein, 111 aa, Setaria italica
  Transcript Sequence Number=SeqID_20459
  Gene Ontology: Mol. function=catalytic activity
DTTPVMPIEIVSRCLKHFKKFRILKLPCLCIRGHAVHSLELRSLEILCLNFPELSCGIGIVVDQISGESPENFGGIEAGDIICSIDGVVLHSLAQLTAMLLDKFFAMKSEK

SEQ ID NO: 86434 - protein, 89 aa, Setaria italica
  Transcript Sequence Number=SeqID_20460
  Gene Ontology: Mol. function=catalytic activity
ISGESPENFGGIEAGDIICSIDGVVLHSLAQLTAMLLDKFFAMKSEKTMVLQAVMRRPRDNSKFVAMLNIWENSSVECSNSFSNRWPLL

SEQ ID NO: 86435 - protein, 339 aa, Setaria italica
  misc_feature (328)..(328): Xaa can be any naturally occurring amino acid
  Transcript Sequence Number=SeqID_20461
  Gene Ontology: Mol. function=ATPase activity, coupled to transmembrane movement of substances; Cellular component=integral to membrane; Biological process=transport
  Homolog annotation: Hit_ID=Q71CZ3; Match level="QueryCoverage=100%, HitCoverage=22%, E-value=1e-143, Identity=72%"; Hit description =Multidrug resistance associated protein MRP2
  Pfam annotation: Domain name=ABC_membrane; Domain location=102-337; Score=11.5; E_value=0.00066; Accession=PF00664.15; Description=ABC transporter transmembrane region
GKYDDILGSGEEFMELVVAHKDALTTLDAIDAMNGGGNVSSSCSGTAKLKLSRSLSSSEKKEKANEDEGNAQSRQLVQEEETKKGSVGFWVYWNYLTVAYRGALVPFVLLAQILFQVLQIASNYWMAWAAPVSKDVEPPVSMSTLLYVYVALSLGSSWCVFLRALFLVTASYKTATLLFNKMHMSIFRAPMSFFDSTPSGRILNRASTDQSEVDTNIADQMGSVAFSIIQLVGIVVVMSQVAWQVFVLFIPVFAACVWYQRYYIDTARELQRLVGVCKAPIIQHFAESITGSTTIRSFGKENQFVSANSHLMDAYSRPRFYNAGAMEXWLCFRLDALSA

SEQ ID NO: 86436 - protein, 41 aa, Setaria italica
  Transcript Sequence Number=SeqID_20462
  Gene Ontology: Mol. function=heat shock protein binding; Cellular component=chloroplast; Biological process=response to stress
  Homolog annotation: Hit_ID=B6U659; Match level="QueryCoverage=100%, HitCoverage=8%, E-value=3e-15, Identity=92%"; Hit description =Chaperone protein dnaJ
  Pfam annotation: Domain name=DnaJ; Domain location=1-35; Score=35.5; E_value=2.1e-07; Accession=PF00226.23; Description=DnaJ domain
YHPDVNKEPGATEKFKEISAAYEILSDEQKRALYDQYGEAG

SEQ ID NO: 86437 - protein, 132 aa, Setaria italica
  Transcript Sequence Number=SeqID_20463
  Gene Ontology: Mol. function=heat shock protein binding; Cellular component=cytoplasm; Biological process=response to stress
  Homolog annotation: Hit_ID=B6U659; Match level="QueryCoverage=75%, HitCoverage=20%, E-value=9e-35, Identity=74%"; Hit description =Chaperone protein dnaJ
  Pfam annotation: Domain name=DnaJ; Domain location=74-132; Score =114.1; E_value=4.5e-31; Accession=PF00226.23; Description=DnaJ domain
  Subcellular localization annotation: CTP_CleavageSite=35; ConfidenceScore=5.74e-01
MAFALSTLPFVPSNPSPSSRAPADAAFPPRRVHFSAAVRSGGGDLPLACAAPRHRGRAPRRRRGGRLLVWASADYYATLGVPRSATNKDIKAAYRKLARQYHPDVNKEPGATEKFKEISAAYEILSDEQKRA

SEQ ID NO: 86438 - protein, 263 aa, Setaria italica
  Transcript Sequence Number=SeqID_20464
  Gene Ontology: Mol. function=heat shock protein binding; Cellular component=cytoplasm; Biological process=response to stress
  Homolog annotation: Hit_ID=B6U659; Match level="QueryCoverage=99%, HitCoverage=53%, E-value=1e-115, Identity=78%"; Hit description =Chaperone protein dnaJ
  Pfam annotation: Domain name=DnaJ; Domain location=2-47; Score=69.6; E_value=1.1e-17; Accession=PF00226.23; Description=DnaJ domain
  Pfam annotation: Domain name=DnaJ_C; Domain location=177-261; Score= -41.8; E_value=0.0054; Accession=PF01556.10; Description=DnaJ C terminal region
  Pfam annotation: Domain name=DnaJ_CXXCXGXG; Domain location=120-204; Score=97.1; E_value=6.3e-26; Accession=PF00684.11; Description=DnaJ central domain (4 repeats)
  Pfam module annotation: Pfam domain module=DnaJ::DnaJ_C::DnaJ _CXXCXGXG; Domain location=2-47::177-261::120-204
IIKAAYLFLARQYHPDVNKEPGATEKFKEISAAYEILSDEQKRALYDQYGEAGVKSAVGGSGGAYTTNPFDLFETFFGASMGGFSGMDQSTFRTRRRSTAVQGEDIRYDVILGFTEAIFGTEKDIILSHLETCDTCGGSGSRAGSKMRICSTCGGRGQVMRTEQTPFGLFSQVSICPACAGEGEVISEYCRKCSGEGRIRVRKEIKVKIPPGVSKGSTLRVRGEGDAGPKGGPPGDLYVCLDIEEPSDIKRDGINLYSTVSVS

SEQ ID NO: 86439 - protein, 220 aa, Setaria italica
  misc_feature (137)..(137): Xaa can be any naturally occurring amino acid
  Transcript Sequence Number=SeqID_20465
  Gene Ontology: Mol. function=substrate-specific transmembrane transporter activity; Cellular component=integral to membrane; Biological process=transmembrane transport
  Homolog annotation: Hit_ID=B4FS29; Match level="QueryCoverage=96%, HitCoverage=40%, E-value=1e-84, Identity=76%"; Hit description =Hexose carrier protein HEX6
  Pfam annotation: Domain name=Sugar_tr; Domain location=1-220; Score= -136.5; E_value=0.0013; Accession=PF00083.16; Description=Sugar (and other) transporter
KLHLQSIPLYLSEMAPPQYRGAINNGFELCLSLGILCANILNYFVVKIKAGWGWRISLSMAALPGAFLTMGAIFLPETPSFIIQHDGDADKARVLLQKLRGTESVQKELDDLVSASNLSRTTRYPFRNIFKRKYRPXQLVIALLIPFFNQVTGINVINFYAPVMFRTIGLKENASLLSSVVTRLCATFANIVAIILVDRSGRRKLLLVGNIQMILSLFTV

SEQ ID NO: 86440 - protein, 100 aa, Setaria italica
  Transcript Sequence Number=SeqID_20466
SRLDRRRRSRSRSRSRSRSRTRSHHAGGRRDDSDWRAGGRDFDHTKVPDSGIVPAAAGGGDVDEMPRQQRVPSSVVVAEEADGTANRSMPIEDGEMESEM

SEQ ID NO: 86441 - protein, 99 aa, Setaria italica
  misc_feature (16)..(16): Xaa can be any naturally occurring amino acid
  Transcript Sequence Number=SeqID_20467
  Gene Ontology: Mol. function=metal ion binding; Cellular component =nucleus
  Homolog annotation: Hit_ID=B6TEF9; Match level="QueryCoverage=98%, HitCoverage=45%, E-value=2e-47, Identity=90%"; Hit description=DNA binding protein
  Pfam annotation: Domain name=PHD; Domain location=23-72; Score=49.1; E_value=1.7e-11; Accession=PF00628.21; Description=PHD-finger
GFLLRFDYKAGSGAFXPDRVAVYCNYEMPYNPDDLMVQCEGCKDWFHPSCMGMTIEQAKKIDHYMCSDCAKENGAKRPSNSYPVAPNSDSKIESKRRKR

SEQ ID NO: 86442 - protein, 173 aa, Setaria italica
  misc_feature (163)..(163): Xaa can be any naturally occurring amino acid
  Transcript Sequence Number=SeqID_20468
  Gene Ontology: Mol. function=metal ion binding
  Homolog annotation: Hit_ID=B6TEF9; Match level="QueryCoverage=98%, HitCoverage=79%, E-value=2e-93, Identity=94%"; Hit description=DNA binding protein
  Pfam annotation: Domain name=BAH; Domain location=21-136; Score =143.9; E_value=4.9e-40; Accession=PF01426.10; Description=BAH domain
  Pfam annotation: Domain name=PHD; Domain location=140-173; Score= -2.6; E_value=0.05; Accession=PF00628.21; Description=PHD-finger
  Pfam module annotation: Pfam domain module=BAH::PHD; Domain location =21-136::140-173
MAKTKQGKRDVDAYTIKGTNKVVRVGDCVLMRPADTDKPPYVARVERMESDGRGGVRVRCRWYYRPEEAKGGRRPFHGAKELFLSDHFDTQSAHTIEGKCVVHSFKNYTKLDNVGPEDFYCRFDYKAGSGAFTPDRVAVYCKCEMPYNPDDLMVQCEGCKDWXPSCMGMTINL

SEQ ID NO: 86443 - protein, 198 aa, Setaria italica
  Transcript Sequence Number=SeqID_20469
  Gene Ontology: Mol. function=metal ion binding
  Homolog annotation: Hit_ID=B6TEF9; Match level="QueryCoverage=89%, HitCoverage=82%, E-value=1e-99, Identity=95%"; Hit description=DNA binding protein
  Pfam annotation: Domain name=BAH; Domain location=10-118; Score =115.1; E_value=2.3e-31; Accession=PF01426.10; Description=BAH domain
  Pfam annotation: Domain name=PHD; Domain location=122-171; Score =51.4; E_value=3.5e-12; Accession=PF00628.21; Description=PHD-finger
  Pfam module annotation: Pfam domain module=BAH::PHD; Domain location =10-118::122-171
VRGYLSLSCIVVPVGTTVYKPPYVARVERMESDGRGGVRVRCRWYYRPEEAKGGRRPFHGAKELFLSDHFDTQSAHTIEGKCVVHSFKNYTKLDNVGPEDFYCRFDYKAGSGAFTPDRVAVYCKCEMPYNPDDLMVQCEGCKDWFHPSCMGMTIEQAKKIDHYMCSDCAKENGAKRPSNSYPVAPNSDSKIESKRRKR

SEQ ID NO: 86444 - protein, 357 aa, Setaria italica
  misc_feature (11)..(11): Xaa can be any naturally occurring amino acid
  misc_feature (14)..(14): Xaa can be any naturally occurring amino acid
  Transcript Sequence Number=SeqID_20470
  Gene Ontology: Mol. function=metal ion binding
  Subcellular localization annotation: CTP_CleavageSite=41; ConfidenceScore=5.56e-01
KIKANNSKSPXNIXVAGTDATKISSPSNTGKISSASTLNKEASSRRENRNNQPSLDQKNHSSGDIKEDKRKWALEILARKNGSSVTSKDQTGDDDALKRKFPLLAQLPVDMRPKLAAGRNNKVPVSVRQVQLHRIAEHYLQKANLDVIRRCADTELAIADAVNVEKDIYERSSSKSIYVNLCSQASRQPAKEKSDKDTSTLTKKTELGSDLISQKVASENNVSGSDMEDALHRAVVSDLKSEIGDAITSEQTVQKHIVSFSNAEEALRKAGLFDSPPNSPEREITSVEGECRLEEQSKNLESNHDYRVKDVSSVKDDKSPLPNDHDAANCQNLNTVLCQQQKPILKSKQKLTARGET

SEQ ID NO: 86445 - protein, 242 aa, Setaria italica
  misc_feature (153)..(153): Xaa can be any naturally occurring amino acid
  Transcript Sequence Number=SeqID_20471
  Gene Ontology: Mol. function=metal ion binding
PEREITSVEGECRLEEQSKNLESNHDYRVKDVSSVKDDKSPLPNDHDAANCQNLNTVLCQQQKPNSEEQQKLTARGETEDVIANETNATNLAEDDRCSEQCEKSSGPGKEISIDSNMPDKVTGNVETSRDMEKAASILPSQSHKDGLARDGEXDQQTKNLEPTKEKSSSDKPSLNSKHPKGDKPSHIAEGGDDPKKQAPDQAGKSTPDASSSTYKKVEMFVKEHIRPLCKSGVITVDQYRWA

SEQ ID NO: 86446 - protein, 148 aa, Setaria italica
  misc_feature (137)..(137): Xaa can be any naturally occurring amino acid
  Transcript Sequence Number=SeqID_20472
  Gene Ontology: Mol. function=RNA splicing factor activity, transesterification mechanism; Cellular component=spliceosome; Biological process=nuclear mRNA splicing, via spliceosome
  Homolog annotation: Hit_ID=P83876; Match level="QueryCoverage=76%, HitCoverage=77%, E-value=2e-49, Identity=79%"; Hit description =Thioredoxin-like protein 4A
  Pfam annotation: Domain name=DIM1; Domain location=39-148; Score =194.7; E_value=2.5e-55; Accession=PF02966.8; Description=Mitosis protein DIM1
VQALSPHDPNLLAGKQFGARRREVERRRSGRRRKKMSYLLPHLHSGWAVDQAILAEEERLVIIRFGHDWDETCMQIDWMDEVLAAVAETIKNFAVIYLVDITEVPDFNTMYELYDPSTVMFFFRNKHIMIDLGTGNXTKINWALKDKQ

SEQ ID NO: 86447 - protein, 102 aa, Setaria italica
  Transcript Sequence Number=SeqID_20473
  Gene Ontology: Mol. function=RNA splicing factor activity, transesterification mechanism; Cellular component=spliceosome; Biological process=mitosis
  Homolog annotation: Hit_ID=Q1EP80; Match level="QueryCoverage=100%, HitCoverage=53%, E-value=2e-53, Identity=98%"; Hit description =Spliceosomal U5 snRNP-specific 15 kDa protein, putative
  Pfam annotation: Domain name=DIM1; Domain location=1-96; Score=185.5; E_value=1.5e-52; Accession=PF02966.8; Description=Mitosis protein DIM1
MDEVLAAVAETIKNFAVIYLVDITEVPDFNTMYELYDPSTVMFFFRNKHIMIDLGTGNNNKINWALKDKQEFVDIVETVYRGARKGRGLVIAPKDYSTKYRY

SEQ ID NO: 86448 - protein, 70 aa, Setaria italica
  Transcript Sequence Number=SeqID_20474
LLVCYESVIKISWRPGALLNLGNWGVRISVVGAAVGCLSLGESSQGKITDAYLNCHNLAAVVSVIRASSS

SEQ ID NO: 86449 - protein, 167 aa, Setaria italica
  Transcript Sequence Number=SeqID_20475
  Gene Ontology: Mol. function=RNA splicing factor activity, transesterification mechanism; Cellular component=spliceosome; Biological process=nuclear mRNA splicing, via spliceosome
  Homolog annotation: Hit_ID=P83876; Match level="QueryCoverage=85%, HitCoverage=100%, E-value=7e-71, Identity=83%"; Hit description =Thioredoxin-like protein 4A
  Pfam annotation: Domain name=DIM1; Domain location=29-161; Score =326.9; E_value=4e-95; Accession=PF02966.8; Description=Mitosis protein DIM1
RLHRLSSPKFQFLSRRRLANRGSAEMSYLLPHLHSGWAVDQAILAEEERLVIIRFGHDWDETCMQMDEVLAAVAETIKNFAVIYLVDITEVPDFNTMYELYDPSTVMFFFRNKHIMIDLGTGNNNKINWALKDKQEFIDIVETVYRGARKGRGLVIAPKDYSTKYRY

SEQ ID NO: 86450 - protein, 225 aa, Setaria italica
  Transcript Sequence Number=SeqID_20476
  Gene Ontology: Mol. function=RNA splicing factor activity, transesterification mechanism; Cellular component=spliceosome; Biological process=nuclear mRNA splicing, via spliceosome
  Homolog annotation: Hit_ID=P83876; Match level="QueryCoverage=63%, HitCoverage=100%, E-value=5e-71, Identity=84%"; Hit description =Thioredoxin-like protein 4A
  Pfam annotation: Domain name=DIM1; Domain location=87-219; Score =324.8; E_value=1.7e-94; Accession=PF02966.8; Description=Mitosis protein DIM1
SVLSNYLLLRSLVTTRSYGCIVSFFRLDPPPHDAAANASRLRGAEHLTCLQPPSTDASSASAVYLQIRRREVERRRSGRRRKKMSYLLPHLHSGWAVDQAILAEEERLVIIRFGHDWDETCMQMDEVLAAVAETIKNFAVIYLVDITEVPDFNTMYELYDPSTVMFFFRNKHIMIDLGTGNNNKINWALKDKQEFVDIVETVYRGARKGRGLVIAPKDYSTKYRY

SEQ ID NO: 86451 - protein, 51 aa, Setaria italica
  Transcript Sequence Number=SeqID_20477
LMSYLNELQQVPKLCFQHSPRLFILPTKQRFNIFITHTSATNFLVQNLNKT

SEQ ID NO: 86452 - protein, 150 aa, Setaria italica
  Transcript Sequence Number=SeqID_20478
  Gene Ontology: Mol. function=transporter activity; Cellular component= integral to membrane; Biological process=ion transport
  Homolog annotation: Hit_ID=B9SY49; Match level="QueryCoverage=98%, HitCoverage=27%, E-value=1e-53, Identity=70%"; Hit description =Organic cation transporter, putative
ADGAASSTVAEWGLVCGERYKVGLAQAIFFAGCMIGAGVFGHLSDSFLGRKGSLQVVCVLNATFGLLTALAPNYWAYAALRLLTGFSTGSVGVLAFVLATEPIGPSRRGAAGMSTFYFFSGGIAALAGVAALFPRSWRALYVVTSLPSLA

SEQ ID NO: 86453 - protein, 57 aa, Setaria italica
  Transcript Sequence Number=SeqID_20479
MCMDQAAVPVKRVWLGLATRLGLRRKTGLRKLRKEVRTCEYHDVHVMWEMLRTTWYS

SEQ ID NO: 86454 - protein, 87 aa, Setaria italica
  Transcript Sequence Number=SeqID_20480
FLLPLLYRPRFSSADRLVNAGLRKLRKEVRTCEYHDVHVMWEMLRTTDGPVPLAEKEAAAAAAVAAAASARKRKNACRRFIYYCCAF

SEQ ID NO: 86455 - protein, 46 aa, Setaria italica
  Transcript Sequence Number=SeqID_20481
MCMDQAAVPVKRVWLGLATRLGLRRKTGKLLALPATSDLVLGQLSP

SEQ ID NO: 86456 - protein, 61 aa, Setaria italica
  Transcript Sequence Number=SeqID_20482
PNSNQGKTCLNLQNKNTVCSQYDQGEFNITTTIEPDDLNHSQLNCSTDKNTNILNGNTIFW

SEQ ID NO: 86457 - protein, 205 aa, Setaria italica
  misc_feature (58)..(58): Xaa can be any naturally occurring amino acid
  misc_feature (111)..(111): Xaa can be any naturally occurring amino acid
  Transcript Sequence Number=SeqID_20483
  Gene Ontology: Cellular component=nucleus; Biological process=cell division
  Homolog annotation: Hit_ID=Q41731; Match level="QueryCoverage=100%, HitCoverage=48%, E-value=5e-87, Identity=79%"; Hit description =Cyclin IIIZm
MENLRSENYHQGVAMEGVKFASEMANTNRRALSDIKNIIGGPHQHLAVSKRGLSRTSXTAAVHTKDQAGFVGHRPVTRKFAATLANQPTTAHLAPIGSERQKRNADTAFHXTPADMESTKMADDIPLPMLSEMDEVMSSELKEIEMEDIEESAPDIDSCDAGNSLAVVEYVDEIYRFYRRTEGSSCVPTNYMSSQTDINEKMRGI

SEQ ID NO: 86458 - protein, 1004 aa, Setaria italica
  misc_feature (384)..(384): Xaa can be any naturally occurring amino acid
  misc_feature (437)..(437): Xaa can be any naturally occurring amino acid
  Transcript Sequence Number=SeqID_20484
  Gene Ontology: Mol. function=metal ion binding; Cellular component =nucleus
  Homolog annotation: Hit_ID=Q5Z405; Match level="QueryCoverage=41%, HitCoverage=100%, E-value=1e-153, Identity=65%"; Hit description=RB -binding protein-like
  Pfam annotation: Domain name=PHD; Domain location=867-912; Score =52.6; E_value=1.5e-12; Accession=PF00628.21; Description=PHD-finger
  Pfam annotation: Domain name=PLU-1; Domain location=50-362; Score= -40.1; E_value=1.5e-06; Accession=PF08429.3; Description=PLU-1-like protein
  Pfam annotation: Domain name=zf-C3HC4; Domain location=610-655; Score= 1.6; E_value=0.066; Accession=PF00097.17; Description=Zinc finger, C3HC4 type (RING finger)
  Pfam module annotation: Pfam domain module=PHD::PLU-1::zf-C3HC4; Domain location=867-912::50-362::610-655
KGKMLIDEVNSALSSRLTVDKLETLYSRVSEFPVKLTQSLTLFREISSAKSWLKKANDCLEQNKLGTIDIDVLNKLKLEIIQLRVLLPEIDIISKLWKDAESWQMRCQLYLQDFPGLEELEGFLLSADGASFSIPELNRLKQHYLDGCSWVNHAKNILGKLHTRSDYHNVAEELTGILKDAEFLGVKVDELPIVEKELKRSLCRKQASEALATVMSMDVVEDVLKEASILTIEEEQPFVDLSRMLKEATAWEEKARLILEQSASLSEYEDHMRRSDDIRIILPSEPRMKAEIDIAKLWIDKCQAYLRPKCNKLALGGFLQVEDIKDLINRAGNLKVILDTSALNSVLNIVEKWEGNSLSLLSNLRTLLHLNHIGSTVDPLKKKXLEELQDKLNTEIESGSSLGFEFRVLDELKDSLLVLRWILDSLSLCCMIPLLQXIEAVVHLPASLSDCSLVTLLMRGLSCLRKALILLPDRETSVKSKLKDVENILAEFKEIDVPYLIITSKLEDAVNKHTSWTEQCNTYFMLPDGQSWAGLLNLRDNGQSVAFDCPEMDKVIVEVKKVEEWLNQCHRTLFLDGNNSSLLSALVKIRQSLDGVCSLLAEDCVKKGLCAICLCDMGDSLASRCVTCQEWYHDSCVENLSVSTQMTSECICPFCSLLQSEDLLENQIHVKMSKGNCPALTALNELLSSATGFCTGIEEINLLEEIVQKARNLNAYLMQILDDSGSYHGEDLTVICKSLLVALKATSASGLYDHHVSCKIESVLSRYLWKKQIHKLLCSGKKALIEEVLHLDKEGSHLEIFGQDFFKLEISKIKETSLQWLAKAEKVACDSGELALDLVYGLIVEGENLSVHFEKELKLLRDRSVLYCICRKPYDNRAMIACDECDEWYHFDCINLIGPPPETFFCPACRPNNGEESISLPRSDHDEDRSSTGGGAPPHTPPASCDAPGRAADANKCEKRGKSQIRVDLIKILRCHGETDGSWREGKRVPHRTARRRSSFVGLL

SEQ ID NO: 86459 - protein, 97 aa, Setaria italica
  Transcript Sequence Number=SeqID_20485
  Pfam annotation: Domain name=F-box; Domain location=18-63; Score =22.0; E_value=0.0025; Accession=PF00646.25; Description=F-box domain
MAPPLREEEGGDSAAVEASALRAPAHVMARVFSQLDCVDLLSCSLVCKQWYRDSAELREEWRKEYLDAWNQFGLSVTREPQPLCPTCSLRSLRSLCP

SEQ ID NO: 86460 - protein, 115 aa, Setaria italica
  Transcript Sequence Number=SeqID_20486
HKSFNDEKPYFRYEPQIEHRFTLDGSAGKEKEDQKLDDPLHTSATPYQDKIFTTFVCGKTKVPDSGPEQAATSLFDFGPVRMDFDTPGMEIQPDEENVYKSLKKQFVSWQNNFKP

SEQ ID NO: 86461 - protein, 356 aa, Setaria italica
  Transcript Sequence Number=SeqID_20487
  Gene Ontology: Mol. function=oxidoreductase activity; Biological process=oxidation reduction
  Homolog annotation: Hit_ID=B6TDE0; Match level="QueryCoverage=100%, HitCoverage=100%, E-value=0.0, Identity=90%"; Hit description=NADP -dependent oxidoreductase P1
  Pfam annotation: Domain name=ADH_zinc_N; Domain location=163-316; Score=113.3; E_value=7.8e-31; Accession=PF00107.18; Description=Zinc- binding dehydrogenase
MAATAANRRVILKDYVEGYPREEHMEVLPGAEVPLRLAGDDPPGSVLVRNLYLSCDPYMRPKMSRPLRESYTAAFTPGSVITGYGVARVLDSSDPRLAPGDLVWGITGWEDYSVVKPPATAFLAKISHGGEGGGVPLSYYTGILGMPGLTAYVGFHEICAPKKGETVFVSAASGAVGQLVGQFARLAGCHVVGSAGSKEKVELLKTKFGFHDAFNYKEEADLAAALKRCFPEGIDIYFENVGGAMLDAVLLNMRVHGRIAVCGFISQYNLREGEKDAVRNLSAVIGKRLRMQGFIEPDHKHLYPQYEAWVLPYIRDGTIAYVEDVAEGLESAPKALIGLFHGRNVGKQLVRIADDE

SEQ ID NO: 86462 - protein, 168 aa, Setaria italica
  misc_feature (148)..(148): Xaa can be any naturally occurring amino acid
  Transcript Sequence Number=SeqID_20488
  Gene Ontology: Mol. function=nucleic acid binding; Cellular component= ribonucleoprotein complex
  Homolog annotation: Hit_ID=B9T5Q7; Match level="QueryCoverage=100%, HitCoverage=52%, E-value=3e-20, Identity=37%"; Hit description=RNA binding protein, putative
  Pfam annotation: Domain name=RRM_1; Domain location=1-45; Score=3.9; E_value=0.087; Accession=PF00076.14; Description=RNA recognition motif. (a.k.a. RRM, RBD, o
  Pfam annotation: Domain name=RRM_1; Domain location=104-168; Score =42.4; E_value=1.8e-09; Accession=PF00076.14; Description=RNA recognition motif. (a.k.a. RRM, RBD, o
  Pfam module annotation: Pfam domain module=RRM_1::RRM_1; Domain location=1-45::104-168
VRSVIVMRDRETGHGRGFGFVEFEDEADAAAALGDGDKPRHFICGRMVDVKRARTRAPRNQGEQNSQPQQPEHGQGQGHQDNQPPAGNGNAESGNNVTYDSKKVFIGGLRDNITEEEFRAYFETFGTVTDVVVIYDSLTSRSRGFGFXVTFDSEEAVGKVMRESFHTL

SEQ ID NO: 86463 - protein, 58 aa, Setaria italica
  Transcript Sequence Number=SeqID_20489
  Gene Ontology: Mol. function=solute:hydrogen antiporter activity; Cellular component=integral to membrane; Biological process =regulation of pH
  Homolog annotation: Hit_ID=A0ZS64; Match level="QueryCoverage=93%, HitCoverage=4%, E-value=5e-15, Identity=77%"; Hit description=Na+/H+ antiporter
MGEPEPDDAVLFVGVSLVLGIASRHLLRGTRVPYTVALLVLGVALGSLEYGTHHGLGK

SEQ ID NO: 86464 - protein, 116 aa, Setaria italica
  Transcript Sequence Number=SeqID_20490
  Gene Ontology: Mol. function=nucleotide binding; Biological process =defense response
  Homolog annotation: Hit_ID=Q2QZS6; Match level="QueryCoverage=99%, HitCoverage=11%, E-value=8e-35, Identity=60%"; Hit description=NB -ARC domain containing protein, expressed
KLCCTERLDGSYSKDDEINMEKTFEQLIPPHNLEYLTILRFFGCNYLTWLGATTHLSSMKYLQLMLCKSCVHLPPIGYLPNLKFLKIQGATAVTKIGPELVSCATGSNTGSSIAFP

SEQ ID NO: 86465 - protein, 253 aa, Setaria italica
  Transcript Sequence Number=SeqID_20491
  Gene Ontology: Mol. function=transcription factor activity; Cellular component=transcription factor complex; Biological process =regulation of transcription, DNA-dependent
  Homolog annotation: Hit_ID=Q27W79; Match level="QueryCoverage=98%, HitCoverage=60%, E-value=1e-110, Identity=76%"; Hit description =Transcription regulator of the cell cycle TaE2Fe
  Pfam annotation: Domain name=E2F_TDP; Domain location=31-111; Score =120.1; E_value=7.5e-33; Accession=PF02319.12; Description =Transcription factor E2Fdimerisation partner (TDP)
YLEEDEKLSQSIDNTSDKPDAPGCRLRSDHRKEKSLGLLTQNFVKLFLTMEVETVSLDEAARLLLGEGHAESNMRTKVRRLYDIANVLSSLNLIEKTQQAETRKPAFRWLGQAKRMQENNVTVALAPVRPNKRAFGTDLTNIDNKRGRLDSAMENKAKLMQGAGNIVKTFERQLGQGNRSDFVYGPFHPAVAKKQETDDHTIKQKERRTIQDWENLAVSFRPQYQNQALNDLFGHYVEAWKSWYLDLTRETSS

SEQ ID NO: 86466 - protein, 94 aa, Setaria italica
  Transcript Sequence Number=SeqID_20492
  Gene Ontology: Mol. function=nucleotide binding; Biological process =defense response
  Homolog annotation: Hit_ID=Q8LJZ8; Match level="QueryCoverage=97%, HitCoverage=9%, E-value=1e-27, Identity=60%"; Hit description =Putative Mla1
ALTITVYPGQRSIGGLDAWVAPQHLRELDTRRSCWFSTLPAWVNPSLLLDLTDLSIAMRELRQVDLDILGRLPALCFLDLVVDNKNLGILAGFN

SEQ ID NO: 86467 - protein, 298 aa, Setaria italica
  Transcript Sequence Number=SeqID_20493
  Gene Ontology: Mol. function=kinase activity
  Homolog annotation: Hit_ID=O80656; Match level="QueryCoverage=93%, HitCoverage=58%, E-value=9e-84, Identity=51%"; Hit description =T14N5.8 protein
  Pfam annotation: Domain name=DUF300; Domain location=18-298; Score =436.6; E_value=3.7e-128; Accession=PF03619.8; Description=Domain of unknown function
MRVNLGLLLPLMDKYAAPTWAILISGFFMLLSVSLSMYLIFEHLSAYNNPEEQKFVLGVILMVPCYAIESYVSLVNPDTSVYCGILRDGYEAFAMYCFGRYITACLGGEERTIAFLKREGGEDSGEPLLHHASEKGVIHHHFPINYILKPWRLGVRFYQIIKFGIFQYVIIKTLTASLSLILQPFGVYCDGEFKWGCGYPYFAVVLNFSQYWALYCLVEWYTATKDELAHIKPLAKFLSFKSIVFLTWWQGVIIAIMYSLGLVRSPLAQSLELKSSIQDFIICIEMGIASVVHLYVFP

SEQ ID NO: 86468 - protein, 166 aa, Setaria italica
  misc_feature (82)..(82): Xaa can be any naturally occurring amino acid
  Transcript Sequence Number=SeqID_20494
  Gene Ontology: Mol. function=kinase activity
  Homolog annotation: Hit_ID=O80656; Match level="QueryCoverage=92%, HitCoverage=27%, E-value=1e-39, Identity=55%"; Hit description =T14N5.8 protein
  Pfam annotation: Domain name=DUF300; Domain location=1-163; Score =94.1; E_value=4.8e-25; Accession=PF03619.8; Description=Domain of unknown function
DLQETLVKYFVHVQVIIKTLTASLSLILQPFGVYCDGEFKWGCGYPYFAVVLNFSQYWALYCLVEWYTATKDELAHIKPLAXKFLSFKSIVFLTWWQGVIIAIMYSLGLVRSPLAQSLELKSSIQDFIICIEMGIASVVHLYVFPAKPYELLGKQYSPTNISVLGD

SEQ ID NO: 86469 - protein, 97 aa, Setaria italica
  misc_feature (18)..(18): Xaa can be any naturally occurring amino acid
  Transcript Sequence Number=SeqID_20495
  Homolog annotation: Hit_ID=Q7XKS8; Match level="QueryCoverage=100%, HitCoverage=24%, E-value=5e-35, Identity=76%"; Hit description =OSJNBa0038P21.3 protein
YSLEEKTKALRAQRPSKXQLLIEYSQALERGNLERSNRPNYRTVMEYDGILSRRVENQESARTKTKEELLAEERDYKRRRASYRGKKVNRNPTEILR

SEQ ID NO: 86470 - protein, 48 aa, Setaria italica
  Transcript Sequence Number=SeqID_20496
LPVLLCKKRQLLLTKHRRTIIWHAGTRSVSKEHDHQVLIIINQFYFFH

SEQ ID NO: 86471 - protein, 136 aa, Setaria italica
  Transcript Sequence Number=SeqID_20497
  Gene Ontology: Mol. function=4 iron, 4 sulfur cluster binding; Cellular component=intracellular; Biological process=base-excision repair
  Homolog annotation: Hit_ID=B6U0P3; Match level="QueryCoverage=99%, HitCoverage=37%, E-value=2e-74, Identity=97%"; Hit description =Endonuclease III-like protein 1
  Pfam annotation: Domain name=HHH; Domain location=44-73; Score=31.0; E_value=4.8e-06; Accession=PF00633.15; Description=Helix-hairpin -helix motif
  Pfam annotation: Domain name=HhH-GPD; Domain location=1-122; Score =32.8; E_value=1.3e-06; Accession=PF00730.17; Description=HhH-GPD superfamily base excision DNA repair protein
  Pfam module annotation: Pfam domain module=HHH::HhH-GPD; Domain location=44-73::1-122
NGLLDPDAIVRTDEATLANLIKPVGFYQRKAQFIKEASKICLERFGGDIPDSLNDLLALRGVGPKMAHLVMSIAWKNTQGICVDTHVHRISNRLGWVFREGTKQKTTTPEQTRISLEKWLPKDEWEPINPLLVFFY

SEQ ID NO: 86472 - protein, 263 aa, Setaria italica
  Transcript Sequence Number=SeqID_20498
  Gene Ontology: Mol. function=4 iron, 4 sulfur cluster binding; Cellular component=intracellular; Biological process=base-excision repair
  Homolog annotation: Hit_ID=B6U0P3; Match level="QueryCoverage=98%, HitCoverage=71%, E-value=1e-147, Identity=96%"; Hit description =Endonuclease III-like protein 1
  Pfam annotation: Domain name=EndIII_4Fe-2S; Domain location=227-243; Score=23.8; E_value=0.00069; Accession=PF10576.1; Description=Iron -sulfur binding domain of endonucle
  Pfam annotation: Domain name=HHH; Domain location=131-160; Score =31.0; E_value=4.8e-06; Accession=PF00633.15; Description=Helix -hairpin-helix motif
  Pfam annotation: Domain name=HhH-GPD; Domain location=65-209; Score =68.2; E_value=3.1e-17; Accession=PF00730.17; Description=HhH-GPD superfamily base excision DNA repair protein
  Pfam module annotation: Pfam domain module=EndIII_4Fe-2S::HHH::HhH -GPD; Domain location=227-243::131-160::65-209
INQIKVEKKVRVSSVIKVGAPENWEAVLGGIKNMRLSGQAPVDTKGCEKAGSLLPPKERRFAVLISTMMSSQTKDEVTHAAVERLSENGLLDPDAIVRTDEATLANLIKPVGFYQRKAQFIKEASKICLERFGGDIPDSLNDLLALRGVGPKMAHLVMSIAWKNTQGICVDTHVHRISNRLGWVFREGTKQKTTTPEQTRISLEKWLPKDEWEPINPLLVGFGQTICTPLRPKCDMCGINNLCPSAFKESSSPNPKQKKTRSP

SEQ ID NO: 86473 - protein, 55 aa, Setaria italica
  Transcript Sequence Number=SeqID_20499
AIHIKGPQESHKGGTMLYTTIGAIFKSGWGYTKIITIKTEASCKIRYKTCDFVNT

SEQ ID NO: 86474 - protein, 414 aa, Setaria italica
  misc_feature (134)..(134): Xaa can be any naturally occurring amino acid
  Transcript Sequence Number=SeqID_20500
  Gene Ontology: Mol. function=GTP binding; Cellular component=nucleus; Biological process=small GTPase mediated signal transduction
  Homolog annotation: Hit_ID=B6TZQ3; Match level="QueryCoverage=99%, HitCoverage=88%, E-value=0.0, Identity=89%"; Hit description =Nucleolar GTP-binding protein 1
  Pfam annotation: Domain name=MMR_HSR1; Domain location=214-312; Score= 52.3; E_value=1.8e-12; Accession=PF01926.15; Description=GTPase of unknown function
  Pfam annotation: Domain name=NOG1; Domain location=280-337; Score =83.7; E_value=6.6e-22; Accession=PF06858.6; Description=Nucleolar GTP-binding protein 1 (NOG1)
  Pfam module annotation: Pfam domain module=MMR_HSR1::NOG1; Domain location=214-312::280-337
DFLPTLEPGVSAVYLCRRVHSTTCSVSLDGRLQGELDGAKGEVRKHETVGAFQKIPMVMPATDILMSAQRKSRNVPPTKGIANIAKRERNKGAKQLDALMKELSVPLRTYTENFPKRRDLHPYERSLIELTFGXGYYEQVLGRVDALRKRITSVGKQHASVCAKSTTKREAEERLAEGKKRLEEAFQHGQHAIDDLVNVAKALRSMPVVDLHIPTLCLVGSPNVGKSSLVRILSSGKPEVCSYPFTTRGILMGHIVSNHERFQVTDTPGLLTRHDDDRNNIERLTLAVLSYLPIAVLYVHDLSEDCGTSVADQYTTYKHMKERFGDRLWIDVISKCDLLGKKAPISFDDADEDVTQYRKFGPEGALRVSVQSEIGVKELKERVHQLLTSQMARIKADKAEHETQEAGVSVPWRS

SEQ ID NO: 86475 - protein, 172 aa, Setaria italica
  Transcript Sequence Number=SeqID_20501
  Gene Ontology: Cellular component=mitochondrion
  Homolog annotation: Hit_ID=B9S2E8; Match level="QueryCoverage=98%, HitCoverage=85%, E-value=1e-37, Identity=34%"; Hit description =Pentatricopeptide repeat-containing protein, putative
  Pfam annotation: Domain name=PPR; Domain location=119-153; Score =45.3; E_value=2.3e-10; Accession=PF01535.12; Description=PPR repeat
  Pfam annotation: Domain name=PPR; Domain location=14-48; Score=47.7; E_value=4.6e-11; Accession=PF01535.12; Description=PPR repeat
  Pfam annotation: Domain name=PPR; Domain location=49-83; Score=24.0; E_value=0.00062; Accession=PF01535.12; Description=PPR repeat
  Pfam annotation: Domain name=PPR; Domain location=84-118; Score=31.8; E_value=2.7e-06; Accession=PF01535.12; Description=PPR repeat
  Pfam module annotation: Pfam domain module=PPR::PPR::PPR::PPR; Domain location=119-153::14-48::49-83::84-118
RQLFDEMALPPDVVTYGILVHGYCALGELESAVKLLDEMVARGMEPNAIVYTSIVALLCDNGQVSDGQRVVEDMVQRKVILDEAVYTTVLSGFCNKGDLAAARRWFDEMQKSGLATDGVTYTTLINGLCRAGELKEAEMLLQQMLARQLDADEVTYTVLIDGYCKRGKIKLF

SEQ ID NO: 86476 - protein, 105 aa, Setaria italica
  Transcript Sequence Number=SeqID_20502
  Pfam annotation: Domain name=VMA21; Domain location=1-66; Score=57.7; E_value=4.5e-14; Accession=PF09446.2; Description=VMA21-like domain
  Subcellular localization annotation: CTP_CleavageSite=64; ConfidenceScore=5.33e-01
MSGVITKFAVASMVMWMAPVAIVYGFYYQVFPGVSQMSSSAQTLASGFLAVISVNLVIGFYICMAMKETPHQEPQPDPTFLANAKASINQPTSSQVSDDSKGREG

SEQ ID NO: 86477 - protein, 55 aa, Setaria italica
  Transcript Sequence Number=SeqID_20503
ISAQQTQMAFSYRNIECSYVQDPNMNRTRQTHSLSPSLMKSSNSYLLCIYFYTID

SEQ ID NO: 86478 - protein, 100 aa, Setaria italica
  misc_feature (65)..(65): Xaa can be any naturally occurring amino acid
  Transcript Sequence Number=SeqID_20504
YPLPLTPLSSLLANEQPPSSAASAKLDTTDLPSLNLPSILHDPLLHLPLPTSPLIPLHGSQAYLXSCGPSISSAVPLLPSLKPLLPEADSLVERSARETL

SEQ ID NO: 86479 - protein, 50 aa, Setaria italica
  Transcript Sequence Number=SeqID_20505
SEKTIYQLYSYIRMTYSYSSQTYKQHVQYFRLPHKCTFQIITYKYVHFIL

SEQ ID NO: 86480 - protein, 155 aa, Setaria italica
  misc_feature (146)..(146): Xaa can be any naturally occurring amino acid
  Transcript Sequence Number=SeqID_20506
NSGRSFLVRISESKMKSLLDGRPTLSDLTGISNSRLDAFATHLHAYLLASSIGDVKSLGSLNDFLGLSRPHDQYLQLQSAVSKTSRFRASATNATKPSSVYQASLSPRSGTFKDGVPRASCSRVVGREKLKRRAEWSSPSIAPLDXNDVTTTVST

SEQ ID NO: 86481 - protein, 89 aa, Setaria italica
  misc_feature (18)..(18): Xaa can be any naturally occurring amino acid
  misc_feature (53)..(53): Xaa can be any naturally occurring amino acid
  Transcript Sequence Number=SeqID_20507
  Gene Ontology: Mol. function=nucleotide binding; Biological process =defense response
  Homolog annotation: Hit_ID=Q5Z9J6; Match level="QueryCoverage=98%, HitCoverage=5%, E-value=8e-14, Identity=52%"; Hit description =Putative NBS-LRR disease resistance protein
TFGNLFKKARALRAIFLXSGASYIVEDMWQNFSKLVHLRYLRIKGSYHFWKQXLPGTISRLYHLKILDIKDSRDCPIPSRYLSNLVSMQ

SEQ ID NO: 86482 - protein, 64 aa, Setaria italica
  Transcript Sequence Number=SeqID_20508
LDPYSRCRFQTSSVLRTPPHALHLHWLKSANLGFCSWDLPEVSRREFRGDFNFGNLHLQNHRTG

SEQ ID NO: 86483 - protein, 132 aa, Setaria italica
  misc_feature (79)..(79): Xaa can be any naturally occurring amino acid
  misc_feature (91)..(91): Xaa can be any naturally occurring amino acid
  Transcript Sequence Number=SeqID_20509
  Gene Ontology: Mol. function=nucleoside-triphosphatase activity; Biological process=defense response
  Homolog annotation: Hit_ID=Q84KC2; Match level="QueryCoverage=88%, HitCoverage=7%, E-value=6e-15, Identity=43%"; Hit description=NBS -LRR disease resistance protein homologue
QQGARAARAAATSEGVLLLPHQLQRLRIWDCQKFGLLDYDEDEGRTGAGGLQGLSSLTSIQIQKCPRFLSSYSSSSSSXFLFPFPTSLDTXLAGVEGMETLLPLSNLTCLTELRISECGDLKGEGLQSLLET

SEQ ID NO: 86484 - protein, 67 aa, Setaria italica
  Transcript Sequence Number=SeqID_20510
TPNPTSNPLIPPQPKPPKPLNYREGYGFHSYPRLPYGNRQGEVGENTDLAYLLDPLFLFNPSCSFSS

SEQ ID NO: 86485 - protein, 120 aa, Setaria italica
  misc_feature (16)..(16): Xaa can be any naturally occurring amino acid
  misc_feature (66)..(66): Xaa can be any naturally occurring amino acid
  Transcript Sequence Number=SeqID_20511
QVPTFTPLMSDPIVHXPVIDVCSAGQAYLVSCGPSISSAVPLLPSLKPLLPEADSLVERSARETLXMRLIASTPPASNPQLVNILPVVVPESISRANNVRHLDVVFNLILPSCLVAYFSV

SEQ ID NO: 86486 - protein, 59 aa, Setaria italica
  Transcript Sequence Number=SeqID_20512
DRFSSVRLSATPSYSVDLDECNVKEHLVHSCLRWHWPDLPIIEPLGTSEVAPARVVVVC

SEQ ID NO: 86487 - protein, 36 aa, Setaria italica
  Transcript Sequence Number=SeqID_20513
TLMEKYLRRFYKISILKHLRRAILKHLRRAIYFSDK

SEQ ID NO: 86488 - protein, 210 aa, Setaria italica
  Transcript Sequence Number=SeqID_20514
  Gene Ontology: Mol. function=nucleoside-triphosphatase activity; Biological process=defense response
  Homolog annotation: Hit_ID=Q84KD1; Match level="QueryCoverage=100%, HitCoverage=16%, E-value=1e-56, Identity=57%"; Hit description=NBS -LRR disease resistance protein homologue (Fragment)
DQSTRIEVVGKSYLIDLVNYGFFKKNEKDNGCHYYVIHDLLHELAVKVSQYDCLSIQISKVRSVHIPASVRYLSIIVDNKDVEDIITYKDCEKDLGALDKRLQIENVRTLMLFGENVESFSKTFGNLSKKARALRAIFLSGALYIVEDMWQNFSKLVHLRYLRIKGSYHFLETDLPGTISRLYHLKILDIENSRYCRIPSRYLSNIVSMQ

SEQ ID NO: 86489 - protein, 48 aa, Setaria italica
  Transcript Sequence Number=SeqID_20515
RNVMILVRYLCYLMSPSDNMCGSNEVWVMSKVRSSFQKSLGIYVQLKN

SEQ ID NO: 86490 - protein, 99 aa, Setaria italica
  misc_feature (38)..(38): Xaa can be any naturally occurring amino acid
  Transcript Sequence Number=SeqID_20516
  Gene Ontology: Mol. function=nucleotide binding; Biological process =defense response
  Homolog annotation: Hit_ID=Q84KC8; Match level="QueryCoverage=96%, HitCoverage=5%, E-value=8e-18, Identity=61%"; Hit description=NBS -LRR disease resistance protein homologue
RLDIRSCNAISSLPKDGLPGSLLELMICDCQGIRSDTXKECLPNSLQKLVIRCCPGIRSLPKVEYLPSSLRELDVDFWNSEELRRHCRKLIGTIPIVRA

SEQ ID NO: 86491 - protein, 74 aa, Setaria italica
  Transcript Sequence Number=SeqID_20517
SKKDIQSEKYYTGKLAKPINKFRVNMLVLQSEKYYSGELAKPTNKFRVNMLWMQPISVAVHQDNLKVVGATRRS

SEQ ID NO: 86492 - protein, 168 aa, Setaria italica
  Transcript Sequence Number=SeqID_20518
  Gene Ontology: Mol. function=nucleoside-triphosphatase activity; Biological process=defense response
  Homolog annotation: Hit_ID=Q84KC2; Match level="QueryCoverage=100%, HitCoverage=10%, E-value=7e-40, Identity=52%"; Hit description=NBS -LRR disease resistance protein homologue
MEFAFSAARWVVGKALAPVADGFLEAWAASKNLGSEVDGLMTELQYAQAMLNNTRGRDINNPALNDLLLKLRLLAYAAADVLDELDYFRIQDELDGTYHAANEHAGGCARDLLLNARHTGRYVANKFKLSSGSPDATRGARNKQGDDAEGHGCLSGVLCSCGRRAASS

SEQ ID NO: 86493 - protein, 53 aa, Setaria italica
  Transcript Sequence Number=SeqID_20519
  Gene Ontology: Mol. function=nucleoside-triphosphatase activity; Biological process=defense response
  Homolog annotation: Hit_ID=Q84KC2; Match level="QueryCoverage=100%, HitCoverage=3%, E-value=8e-12, Identity=64%"; Hit description=NBS -LRR disease resistance protein homologue
MEFAFSAARWVVGKALAPVADGFLEAWAASKNLGSEVDGLMTVLQYAQAMLNN

SEQ ID NO: 86494 - protein, 72 aa, Setaria italica
  Transcript Sequence Number=SeqID_20520
VIILHIGSVVGLWQNTTNSENTGPVLFLLLKFKPAYVENEAGGYMYCLEYCTVRRQRAPRRLLLRHQDWATR

SEQ ID NO: 86495 - protein, 60 aa, Setaria italica
  Transcript Sequence Number=SeqID_20521
QHFLDQAWHASCVGTKIWLIQGNFWHFSDQHKTTTLAGATSDVPSGSMIGRSGQCHLKQL

SEQ ID NO: 86496 - protein, 72 aa, Setaria italica
  misc_feature (31)..(31): Xaa can be any naturally occurring amino acid
  misc_feature (33)..(33): Xaa can be any naturally occurring amino acid
  misc_feature (42)..(42): Xaa can be any naturally occurring amino acid
  Transcript Sequence Number=SeqID_20522
DDTIQLIVGGLSSTTLNNNFVLLCLLFVLIXFXFSALFISLXFYSLTCGNVDHAVLVLCCSNLYLLQLCLFL

SEQ ID NO: 86497 - protein, 47 aa, Setaria italica
  Transcript Sequence Number=SeqID_20523
RNVILVRYLCYFISSSANMCGSNEVWVMSKVKNSFQKSLGICVQLKN

SEQ ID NO: 86498 - protein, 140 aa, Setaria italica
  Transcript Sequence Number=SeqID_20524
  Gene Ontology: Mol. function=nucleoside-triphosphatase activity; Biological process=defense response
  Homolog annotation: Hit_ID=Q84KG0; Match level="QueryCoverage=100%, HitCoverage=79%, E-value=3e-41, Identity=58%"; Hit description=NBS -LRR disease resistance protein homologue (Fragment)
DFNADRLAQEAVKKIPEVKDEKKSGSDQELIEQRLKGKRFLLVLDDIWKCHEDEWEKLLAPFRKGGGKGNMVIVTTRMSDVAKMVKTGDSQIQLDRLGAKDFRDFFDACVSTKHESWSDHPELIEIGEEIMVKLKCSPLA

SEQ ID NO: 86499 - protein, 71 aa, Setaria italica
  Transcript Sequence Number=SeqID_20525
KFFLSAKFHNFWLHSLGDMNFYMLLSGLLCKFRSAVLSCVLGDLRSLIKYSFATKVLVHSLKFPDTYLFDT

SEQ ID NO: 86500 - protein, 102 aa, Setaria italica
  Transcript Sequence Number=SeqID_20526
  Subcellular localization annotation: CTP_CleavageSite=4; ConfidenceScore=5.01e-01
PRSVCGMARPLYCFRRGRSATFSGTLQPCGHFRRHSARCSKGGVDRFIERLFYSTTLDLYVRIRRFRLRICMSSIGSIRIYLEISIITLLKYITILFLSFKK

SEQ ID NO: 86501 - protein, 457 aa, Setaria italica
  Transcript Sequence Number=SeqID_20527
  Gene Ontology: Mol. function=nucleoside-triphosphatase activity; Biological process=defense response
  Homolog annotation: Hit_ID=Q84KC2; Match level="QueryCoverage=99%, HitCoverage=28%, E-value=1e-127, Identity=53%"; Hit description=NBS -LRR disease resistance protein homologue
  Pfam annotation: Domain name=NB-ARC; Domain location=310-457; Score= -110.8; E_value=0.016; Accession=PF00931.14; Description=NB-ARC domain
MEFAFSAARWVVGKALAPVADGFLEAWAASKNLGSEVDGLMTELQYAQAMLNNTRGRDIDNPALNDLLLKLRLLAYDADDVLDELDYFRIQDELDGTYHAANEHAGGCARDLLLNARHTGRYVANKFKLSSGSPDATRGAPNKQGDDAEGHGCLSGVLCSCGIRADSSSSPPPPTTTTTHTNHGDNKVGTDAGCMPKVTSAARNTANAVGKRLPCCSSIFVDGRGRRFLCGAWPSKVPQRRQTAQIPKLKFDRVDVSTRMTEIVKKLKPICAMVSTVLNLELIGSKGITTATMERPTTSEEITEPRLYGRETELQCVVDSITHGECFANELTVLPIVGPGGIGKTTFTQHVYQEARSHFQVTIWICVSLDFNADRLAQEAVKKIPEVKDENKSGSDQELIEQRLKGKRFLLVLDDIWKCHEYEWEKLLAPFRKGGGTGNMVIVTTRMSDVAKMVKTG

SEQ ID NO: 86502 - protein, 82 aa, Setaria italica
  Transcript Sequence Number=SeqID_20528
LHAFYAAHTSCLYARNYVSLEGDIEGWHCTSLHALLPTYCILTTVRVRDGSTTVLLPEGPLCDVLRHSTAMWSLQAPQCAMF

SEQ ID NO: 86503 - protein, 181 aa, Setaria italica
  Transcript Sequence Number=SeqID_20529
MDPPPSREEPELEPGSRPCPDADEPETSPSERDDPETFRPESSGASPPPPLRQQLMGACRADERLRPLLALNVSCTAADDRFIAHLAQHFEVSEVGMLARCLCVPLVSLRVGKVQRDGALLCPTPIRGKLNLGLLPSSSMCLTFVGDDGYSEQLALLSNGFEFLDVVIEEISADNSGRSFL

SEQ ID NO: 86504 - protein, 83 aa, Setaria italica
  Transcript Sequence Number=SeqID_20530
  Gene Ontology: Mol. function=protein serine/threonine kinase activity; Cellular component=chromatin; Biological process=RNA -dependent DNA replication
  Homolog annotation: Hit_ID=Q2RAW3; Match level="QueryCoverage=91%, HitCoverage=11%, E-value=1e-10, Identity=41%"; Hit description =Retrotransposon protein, putative, unclassified
MAATDISPCHFASYVWKNRAPPRVKCFIWLLVQERIPLPCRGNLAEKHMVPNARCDLCGHLEETTDHIIFQCPTALALWARLG

SEQ ID NO: 86505 - protein, 141 aa, Setaria italica
  Transcript Sequence Number=SeqID_20531
  Gene Ontology: Mol. function=aspartic-type endopeptidase activity; Cellular component=chromatin
  Homolog annotation: Hit_ID=Q8SA91; Match level="QueryCoverage=63%, HitCoverage=3%, E-value=7e-10, Identity=40%"; Hit description =Putative gag-pol polyprotein
MLLTLACLYTRNYVSLEGDIEGGHCTSQHALLPTYCILTTVRVRDGSSTAFLEDSWLPVGPLCDVLPALYSHAVTSGATVRDVLQGGVDRFLRNRANRVAAAEKVKLQLVVGPKPNRRYEVVVCRDKDISSKGDRGCSINE

SEQ ID NO: 86506 - protein, 504 aa, Setaria italica
  Transcript Sequence Number=SeqID_20532
  Gene Ontology: Mol. function=nucleotide binding; Biological process =defense response
  Homolog annotation: Hit_ID=Q84KC8; Match level="QueryCoverage=98%, HitCoverage=31%, E-value=7e-97, Identity=47%"; Hit description=NBS -LRR disease resistance protein homologue
  Pfam annotation: Domain name=LRR_1; Domain location=182-207; Score =2.5; E_value=1e+02; Accession=PF00560.25; Description=Leucine Rich Repeat
  Pfam annotation: Domain name=LRR_1; Domain location=221-255; Score =1.8; E_value=1.4e+02; Accession=PF00560.25; Description=Leucine Rich Repeat
  Pfam annotation: Domain name=LRR_1; Domain location=296-329; Score =1.6; E_value=1.5e+02; Accession=PF00560.25; Description=Leucine Rich Repeat
  Pfam annotation: Domain name=LRR_1; Domain location=380-402; Score =4.7; E_value=38; Accession=PF00560.25; Description=Leucine Rich Repeat
  Pfam annotation: Domain name=LRR_1; Domain location=404-424; Score =7.4; E_value=12; Accession=PF00560.25; Description=Leucine Rich Repeat
  Pfam annotation: Domain name=LRR_1; Domain location=427-449; Score =3.6; E_value=62; Accession=PF00560.25; Description=Leucine Rich Repeat
  Pfam annotation: Domain name=LRR_1; Domain location=450-471; Score =12.8; E_value=1.1; Accession=PF00560.25; Description=Leucine Rich Repeat
  Pfam annotation: Domain name=LRR_1; Domain location=47-73; Score=2.6; E_value=98; Accession=PF00560.25; Description=Leucine Rich Repeat
  Pfam module annotation: Pfam domain module=LRR_1::LRR_1::LRR_1::LRR _1::LRR_1::LRR_1::LRR_1::LRR_1; Domain location=182-207::221-255::296- 329::380-402::404-424::427-449::450-471::47-73
ARISGTSGLDNLYCGNDYKSKYSLSITGTIALDSTFWNMLAFGNLTELEDLSIDNCPPLPLHHFHMLSSLKTLGLWRSSIIVFPLIEGESRAEYQFPVESMSIHKWGASAKELTQLLTYFPKLSELWVGWCEKISVLGVVEKQATATPADVAHIEQHQQQDGTRGEEEISAEGLLLLPSQSHLQYLRICFCPELSLRSIPADYNREAGRTRGGQGLQGLTSLRLLQIINCPRLLSSDSSSSTSPCSPFPTSLEYLSLNDVETLLPLSNLISLTDLSIDDCGDLRGEGLRPFLAHGRLTSLRVSGTPNFFAGSESSLPHEQDIPSSSSKLQELLTDDVAGALSAPICTLLPSSLTKLIFWGDSEVERFTKEQEEALQLLTSLEGIRFQQCDNLQCLPAGLHRLPNLKRLDINTCKAICSLPKDGLPGSLLELVIHDCQGIRSIHKECLPNSLQKLVIRHCPGIRSLPKLDDLPSSLQELDVCNSKSKELKRQCRKLIGTIPIVRV

SEQ ID NO: 86507 - protein, 1314 aa, Setaria italica
  misc_feature (171)..(171): Xaa can be any naturally occurring amino acid
  misc_feature (602)..(602): Xaa can be any naturally occurring amino acid
  misc_feature (1261)..(1261): Xaa can be any naturally occurring amino acid
  Transcript Sequence Number=SeqID_20533
  Gene Ontology: Mol. function=nucleoside-triphosphatase activity; Biological process=defense response
  Homolog annotation: Hit_ID=Q84KC2; Match level="QueryCoverage=99%, HitCoverage=85%, E-value=0.0, Identity=50%"; Hit description=NBS-LRR disease resistance protein homologue
  Pfam annotation: Domain name=LRR_1; Domain location=1050-1084; Score =4.0; E_value=53; Accession=PF00560.25; Description=Leucine Rich Repeat
  Pfam annotation: Domain name=LRR_1; Domain location=1103-1124; Score =2.4; E_value=1.1e+02; Accession=PF00560.25; Description=Leucine Rich Repeat
  Pfam annotation: Domain name=LRR_1; Domain location=1212-1234; Score =4.1; E_value=49; Accession=PF00560.25; Description=Leucine Rich Repeat
  Pfam annotation: Domain name=LRR_1; Domain location=1236-1259; Score =11.2; E_value=2.2; Accession=PF00560.25; Description=Leucine Rich Repeat
  Pfam annotation: Domain name=LRR_1; Domain location=351-375; Score =2.5; E_value=1e+02; Accession=PF00560.25; Description=Leucine Rich Repeat
  Pfam annotation: Domain name=LRR_1; Domain location=765-788; Score =4.6; E_value=40; Accession=PF00560.25; Description=Leucine Rich Repeat
  Pfam annotation: Domain name=LRR_1; Domain location=801-824; Score =8.7; E_value=6.5; Accession=PF00560.25; Description=Leucine Rich Repeat
  Pfam annotation: Domain name=LRR_1; Domain location=870-893; Score =8.9; E_value=5.9; Accession=PF00560.25; Description=Leucine Rich Repeat
  Pfam annotation: Domain name=NACHT; Domain location=99-247; Score= -34.5; E_value=0.037; Accession=PF05729.4; Description=NACHT domain
  Pfam annotation: Domain name=NB-ARC; Domain location=77-360; Score =188.8; E_value=1.5e-53; Accession=PF00931.14; Description=NB-ARC domain
  Pfam module annotation: Pfam domain module=LRR_1::LRR_1::LRR_1::LRR _1::LRR_1::LRR_1::LRR_1::LRR_1::NACHT::NB-ARC; Domain location=1050 -1084::1103-1124::1212-1234::1236-1259::351-375::765-788::801 -824::870-893::99-247::77-360
SPDATRGRQTAQIPKLKFDRVDISTRMTEIVKKLNPICAKVSTVLNLELIGSKGITTATMERPTTSEEITEPKLYGRETELQSVVDSITHGECFANELSVLPIVGPGGIGKTTFTQHVYQEVRSHFQVTIWICVSLDFNADRLAQEAVKKIPEDEKKSGSDQELIEQRLKXKRFLLVLDDIWKCHEDEWEKLLAPFRKGGGKGNMVIVTTRMSDVAKMVKTGDSQIQLDRLGAQDFKDFFDACVSTRHEFWSEHPELSEIGKEIRVKLKCSPLAAKTVGRLLRKQLTLEHWRRVLESKEWELQTSDTDIMPALKISYDYLPLNLKQCFSYCALFPEDYEFESEELVHFWIGLDVLHLGDQSIRIEDIGKSYLIDLVNYGFFKRNEKDNGRHYYVIHDLLHELAVKVSRHDCLSIQISKVRYVHIPASVRHLSIIVDNKDVEDIITYKDCEKDLGALDKRLQIENIRTLMLFGENVESFSKTFGNLFKKSRALRAIFLSGASYIVEDMWQNFSKLVHLRYLRIKGDYHFLETGLPGTISRLYHLKILDIKDSWGCPMPSRYLSNLVSMQHFLVPGNWLHSDILNVGNLKLLRELRRFEAKKEXKGFELKQLAELLELEVLGIYNLEKVKVKEEAVAVKLIQKHHLQELVLDWDINRYDQDPIGEENILESLMPHSNLYKLSISGHGGDTCPSWLGMNLSVKTLESLRLSSVSWKTFPPLGEMWFVGEHCKSCIPEQSFKKLKRLELEKVPKLIKWVGNGPSDLFSHLEVLVIKDCPELMELPFSHCAGYEQDVEDNMIWFPKLEELKITDCPKLSSLPCVPWSSSTCSAEIVQAGSGIEQLSFSGDTLKIKGKDTLDSAFWRVLAFHNLSKLEVLRVSTCPPLSLVHLEKLSSLEKLWIHDIGDAFCSAEGDGHAGYRFPVKDVTIGRYGGSGQRLTRLLSYFPNLLSFHMLECEKLTGLGVVGLHKRTEALPRPPSISVNQVEEAQVGQHEQQGARAEEEITSEGVLLLPHQLQILKISNCQNLVLCPGLLDHDEDEGRTGGGGLQGLSSLTSLEIEKCPRFLSSYSSSSSSSCFPFPTSLEYLALVGVEGMETLLPLSNLTSLTELDIRECGDLKGEGLQSLLVQGRLTRLFVYETPKFFAGSEPSLPREPELPSSSSKLQELDTDDVAGVLAAPICAFLSSSLTELNFSGVKEVERFTKEQEETLQLLTSLESIGFWQCDKLQCLPAGLHRLPNLKRLDINTCKAICSLPKDGLPNSLXQKLVIRCCPGIRSLPKVEYLPSSLRELVVDFWNSEELRRHCRKLIGTIPIVRA

SEQ ID NO: 86508 - protein, 1310 aa, Setaria italica
  Transcript Sequence Number=SeqID_20534
  Gene Ontology: Mol. function=nucleotide binding; Biological process =defense response
  Homolog annotation: Hit_ID=Q84KC8; Match level="QueryCoverage=98%, HitCoverage=82%, E-value=0.0, Identity=50%"; Hit description=NBS-LRR disease resistance protein homologue
  Pfam annotation: Domain name=LRR_1; Domain location=1024-1048; Score =4.5; E_value=42; Accession=PF00560.25; Description=Leucine Rich Repeat
  Pfam annotation: Domain name=LRR_1; Domain location=1054-1075; Score =3.1; E_value=77; Accession=PF00560.25; Description=Leucine Rich Repeat
  Pfam annotation: Domain name=LRR_1; Domain location=1077-1106; Score =3.1; E_value=78; Accession=PF00560.25; Description=Leucine Rich Repeat
  Pfam annotation: Domain name=LRR_1; Domain location=1186-1208; Score =4.0; E_value=52; Accession=PF00560.25; Description=Leucine Rich Repeat
  Pfam annotation: Domain name=LRR_1; Domain location=1210-1233; Score =10.1; E_value=3.5; Accession=PF00560.25; Description=Leucine Rich Repeat
  Pfam annotation: Domain name=LRR_1; Domain location=1256-1277; Score =10.3; E_value=3.2; Accession=PF00560.25; Description=Leucine Rich Repeat
  Pfam annotation: Domain name=LRR_1; Domain location=740-763; Score =4.6; E_value=40; Accession=PF00560.25; Description=Leucine Rich Repeat
  Pfam annotation: Domain name=LRR_1; Domain location=776-799; Score =8.1; E_value=8.6; Accession=PF00560.25; Description=Leucine Rich Repeat
  Pfam annotation: Domain name=LRR_1; Domain location=845-868; Score =8.6; E_value=6.8; Accession=PF00560.25; Description=Leucine Rich Repeat
  Pfam annotation: Domain name=NACHT; Domain location=69-221; Score= -33.6; E_value=0.032; Accession=PF05729.4; Description=NACHT domain
  Pfam annotation: Domain name=NB-ARC; Domain location=47-334; Score =182.2; E_value=1.5e-51; Accession=PF00931.14; Description=NB-ARC domain
  Pfam module annotation: Pfam domain module=LRR_1::LRR_1::LRR_1::LRR _1::LRR_1::LRR_1::LRR_1::LRR_1::LRR_1::NACHT::NB-ARC; Domain location= 1024-1048::1054-1075::1077-1106::1186-1208::1210-1233::1256-1277::740- 763::776-799:...
  Pfam module annotation: Domain location=:845-868::69-221::47-334
HFHISSRTSKNRLPLNLELIGSKGITTATMERPTTSEEITEPKLYGRETELQSVVDSITHGECFANELSVLPIVGPGGIGKTTFTQHVYQEARSHFQVTIWICVLLLGISNADRLAQEAVKKIPEVKDENKSGSDQELIEQRLKGKRFLLVLDDIWKCHEYEWEKLLAPFRKGGGTGNMVIVTTRMSDVAKMVKTGDSQIQLDHLGAEDFRAFFDACASTKHDSWSDHPELIETGEEIMAKLKRNPLAAKTVGRLLRKQLTLEHWRRVLESKEWELQTSDNDIMPALKISYDYLPLNLKQCFSYCALFPEDYEFDSKELVHFWIGLDVLHLGDQSTRIEDVGKSYLIDLVNYGFFKRNEKDNGCHYYVIHDLLHELAVKVSRYDCLSIQISKVRYVHIPASVRHLSIIVDKKDVEDIITYKDCEKDLGALDKRLQIESIRTLMLFGENVESFSKTFGNLFKKAGALRAIFFSGASYIVEDMCQNFSKLVHLRYLRIKGDYHFLETDLPGTISRLYHLKILDIKDSWGCPMPSRYLSNLVSMQHFLVSGYMRLHSDILNVGNLKLLRELRRFEAKKENKGFELEQLAQLLELEVLGIYNLEKVKVKEEAVAMKLIQKHRLQELVLDWDINRSDKDPIGEENILESLMPHSNLYKLSITGHGGDTCPSWLGTNLSVKTLESLRLSNVCWKTFPPLGEMWFVGEHCKSCIPEQSFKKLKRLELEKVPKLIKWVGNGPSDLFSHLEVLVIKDCPELMELPFSHCAGYEQDVENNMTWFPKLKKLEITDCPKLSSLPCVPWSSSTCRAEIVQAGSGIEQLFLGGRTLEIKGKDTLDSAFWRVLAFHNLSKLEVLEVTRCPPLSLVHLEKLSSLERLVIFDMGDAFCSAEGDGHAGYQFPVKYVTIRRYGGSGQRLTRLFSYFPNLLWFRMFECEKLTGLGVVGLHKRTEALPRPPSISVNQVEEAQVGQHEQQGARAEEEIATSEGVLLLPHQLQDLQISDCQNLVLCPGLLDHDEDEGRTGGLQGLSSLTSLTIRRCPRFLSSYSSSSSSSCFPFPTSLERLDLEGVEGMETLLPLSNLTSLTELDIQECGDLKGEGLQSLLAQGRLTELIVHETPNFFAGSEPSLPREPELPSSSSKLQELDTDDVAGVLAAPICAFLSSSLTELYFWGDSEVERFTKEQEEALQLLTSLEMIKFWQCDKLQCLPAGLHRLPNLKRLDIDTCKAICSLPKDGLPGSLLELVIDDCQGIRSMHKECLPNSLQKLVIRGCPGIRSLPKVEYLPSSLRELDVRYRNSEELRRHCRKLIGTIPIVRA

SEQ ID NO: 86509 - protein, 83 aa, Setaria italica
  Transcript Sequence Number=SeqID_20535
  Subcellular localization annotation: CTP_CleavageSite=70; ConfidenceScore=5.13e-01
LPQNCLFVAMIREDDTSMLMSSRLNHSAASPSARQWSLAPRPHPHPPSRSSSPRHLRARATICRSPPPILSLHVSQSQCCQES

SEQ ID NO: 86510 - protein, 251 aa, Setaria italica
  Transcript Sequence Number=SeqID_20536
  Gene Ontology: Mol. function=binding; Cellular component=cytoplasm; Biological process=embryonic development via the syncytial blastoderm
  Homolog annotation: Hit_ID=B6TFA8; Match level="QueryCoverage=100%, HitCoverage=74%, E-value=1e-139, Identity=94%"; Hit description =Protein Mo25
  Pfam annotation: Domain name=HEAT; Domain location=117-153; Score =10.3; E_value=2.7; Accession=PF02985.14; Description=HEAT repeat
  Pfam annotation: Domain name=HEAT; Domain location=161-198; Score =7.3; E_value=6.2; Accession=PF02985.14; Description=HEAT repeat
  Pfam annotation: Domain name=Mo25; Domain location=1-248; Score =351.8; E_value=1.3e-102; Accession=PF08569.3; Description=Mo25 protein family
  Pfam module annotation: Pfam domain module=HEAT::HEAT::Mo25; Domain location=117-153::161-198::1-248
PSLGWEGRKDLVHCWCILLRQKVDESYCCVQYIENHVDLLDFLVVCYKNLEIALNCGNMLRECIKYPTLAKYILESSSFELFFQYVELPNFDIASDALNTFKDLLTKHEDAVSEFLSSHYEQFFGLYTRLLSSTNYVTRRQSVKFLSEFLLEAPNAQIMKRYILDVHYLNIMIGLLKDSSKNIRICAFHIFKVFVANPNKPREIVRVLVDNHRELLKLLHNLPTSKGEDEQLDEERDLIIKQIEKLVRLSV

SEQ ID NO: 86511 - protein, 88 aa, Setaria italica
  Transcript Sequence Number=SeqID_20537
  Gene Ontology: Mol. function=serine-type endopeptidase activity; Cellular component=intracellular; Biological process=protein modification process
  Homolog annotation: Hit_ID=O64955; Match level="QueryCoverage=98%, HitCoverage=87%, E-value=4e-43, Identity=99%"; Hit description =Polyubiquitin (Fragment)
  Pfam annotation: Domain name=ubiquitin; Domain location=17-85; Score =138.0; E_value=2.9e-38; Accession=PF00240.15; Description=Ubiquitin family
TLHLVLRLRGGMQIFVKTLTGKTITLEVESSDTIDNVKAKIQDKEGIPPDQQRLIFAGKQLEDGRTLADYNIQKESTLHLVLRLRGGQ

SEQ ID NO: 86512 - protein, 138 aa, Setaria italica
  misc_feature (21)..(21): Xaa can be any naturally occurring amino acid
  Transcript Sequence Number=SeqID_20538
  Gene Ontology: Mol. function=serine-type endopeptidase activity; Cellular component=intracellular; Biological process=protein modification process
  Homolog annotation: Hit_ID=Q0WRN6; Match level="QueryCoverage=99%, HitCoverage=99%, E-value=1e-72, Identity=90%"; Hit description =Polyubiquitin 4 UBQ4
  Pfam annotation: Domain name=ubiquitin; Domain location=1-59; Score =91.6; E_value=2.7e-24; Accession=PF00240.15; Description=Ubiquitin family
  Pfam annotation: Domain name=ubiquitin; Domain location=67-135; Score= 138.0; E_value=2.9e-38; Accession=PF00240.15; Description=Ubiquitin family
  Pfam module annotation: Pfam domain module=ubiquitin::ubiquitin; Domain location=1-59::67-135
EVESSDTIDNVKAKIQDKEGXPPDQQRLIFAGKQLEDGRTLADYNIQKESTLHLVLRLRGGMQIFVKTLTGKTITLEVESSDTIDNVKAKIQDKEGIPPDQQRLIFAGKQLEDGRTLADYNIQKESTLHLVLRLRGGQ

SEQ ID NO: 86513 - protein, 85 aa, Setaria italica
  misc_feature (59)..(59): Xaa can be any naturally occurring amino acid
  Transcript Sequence Number=SeqID_20539
MPAAMQDTTAPPAHEQNPASDQRPRPHLSIDIPASNLTPTPTEGDITPTPTRFLQHQKXGIPITPVSSSSSTKGAQKPLRSPSFM

SEQ ID NO: 86514 - protein, 151 aa, Setaria italica
  Transcript Sequence Number=SeqID_20540
  Homolog annotation: Hit_ID=Q9LM68; Match level="QueryCoverage=45%, HitCoverage=19%, E-value=3e-12, Identity=54%"; Hit description =F2D10.35
  Subcellular localization annotation: CTP_CleavageSite=32; ConfidenceScore=5.23e-01
MAPASIAISLPFRLLLPPRPFRGRATWPRAIRATASGDTSGVAGGERKVALERRVGDLKALVASVPPAVASIQRNIGPNFVAGFCLGIAVLAAVARQVIIRSRERDNRGSVADLVRRGQLKSGQRGTAKLRTYDDPFNNPLVKIDEDASTA

SEQ ID NO: 86515 - protein, 194 aa, Setaria italica
  Transcript Sequence Number=SeqID_20541
  Homolog annotation: Hit_ID=Q9LM68; Match level="QueryCoverage=88%, HitCoverage=44%, E-value=1e-50, Identity=55%"; Hit description =F2D10.35
LLCCSAKLRTYDDPFNNPLVKIDEDASTAQMFGKEYRLAPVRLTKEQQELHQKRRSRAYQWKRPTVFLREGDSLPPHVDPDTVRWIPANHPFAAASSEVDEETAKQNVYQKDGVPSRVKAEHEALQARLEASNDVTKLPSNSSMQHNERPLRLSGKPFGNLQSSEFGSELENQDIEPGKHSCDESLQSNRLEGQ

SEQ ID NO: 86516 - protein, 78 aa, Setaria italica
  Transcript Sequence Number=SeqID_20542
  Gene Ontology: Mol. function=methyltransferase activity; Cellular component=cytoplasm; Biological process=metabolic process
  Homolog annotation: Hit_ID=Q8VYX1; Match level="QueryCoverage=100%, HitCoverage=25%, E-value=6e-24, Identity=52%"; Hit description =Phosphoethanolamine methyltransferase
KSLTVESMMLDSRAADLDKEERPENESINGHHKNITFMCADVTSPNLKIEDNSFDLIFSNWLLMYLSDEEVEKLVGKM

SEQ ID NO: 86517 - protein, 59 aa, Setaria italica
  misc_feature (54)..(54): Xaa can be any naturally occurring amino acid
  Transcript Sequence Number=SeqID_20543
  Gene Ontology: Mol. function=phosphoethanolamine N-methyltransferase activity; Cellular component=cytoplasm; Biological process=metabolic process
  Homolog annotation: Hit_ID=Q5SDQ0; Match level="QueryCoverage=96%, HitCoverage=11%, E-value=1e-22, Identity=87%"; Hit description =Putative phosphoethanolamine N-methyltransferase
MFQFLSVLRRELAEVEKNKDAFVADFTQEDYDDIVNGWNAKLKRSSAGEQRWGXFIATK

SEQ ID NO: 86518 - protein, 249 aa, Setaria italica
  Transcript Sequence Number=SeqID_20544
  Gene Ontology: Mol. function=methyltransferase activity; Cellular component=cytoplasm; Biological process=metabolic process
  Homolog annotation: Hit_ID=Q8VYX1; Match level="QueryCoverage=95%, HitCoverage=54%, E-value=1e-108, Identity=72%"; Hit description =Phosphoethanolamine methyltransferase
  Pfam annotation: Domain name=Methyltransf_11; Domain location=78-166; Score=37.8; E_value=4.4e-08; Accession=PF08241.4; Description =Methyltransferase domain
  Pfam annotation: Domain name=Methyltransf_12; Domain location=80-164; Score=10.6; E_value=0.049; Accession=PF08242.4; Description =Methyltransferase domain
  Pfam module annotation: Pfam domain module=Methyltransf _11::Methyltransf_12; Domain location=78-166::80-164
GLFKEGHSYDKNGDSFELSLVTYKCIGAYVKNKKNQNQICWLWEKVKSTEDKDFQRFLDNVQYKTNGILRYERIFGEGYVSTGGVETTKEFVDMLDLKPGQKYLMLDVELEECSVEFEVADCTTKDYPENSFDVIYSRDTILHIQDKPALFRSFFKWLKPGGKVLISDYCKNPGKPSEEFAAYIKQRGYDLHDVKAYGKMLEGAGFHDVIAEDRTEQFLSVLRRELAEVEKNKDAFVPAVHNVVIVLLG

SEQ ID NO: 86519 - protein, 367 aa, Setaria italica
  Transcript Sequence Number=SeqID_20545
  Gene Ontology: Mol. function=binding; Cellular component=integral to membrane; Biological process=transport
  Homolog annotation: Hit_ID=Q8VWY1; Match level="QueryCoverage=80%, HitCoverage=82%, E-value=1e-150, Identity=88%"; Hit description =Mitochondrial phosphate transporter
  Pfam annotation: Domain name=Mito_carr; Domain location=166-254; Score=86.7; E_value=8e-23; Accession=PF00153.19; Description =Mitochondrial carrier protein
  Pfam annotation: Domain name=Mito_carr; Domain location=267-350; Score=3.0; E_value=0.0017; Accession=PF00153.19; Description =Mitochondrial carrier protein
  Pfam annotation: Domain name=Mito_carr; Domain location=69-157; Score= 99.6; E_value=1.1e-26; Accession=PF00153.19; Description =Mitochondrial carrier protein
  Pfam module annotation: Pfam domain module=Mito_carr::Mito_carr::Mito_ carr; Domain location=166-254::267-350::69-157
  Subcellular localization annotation: CTP_CleavageSite=41; ConfidenceScore=5.43e-01
MALSDRSRESLLPSFLYASSARSFAASSPARSFAASAPAPAAAAGAGGGGAPFSIQAPNEKIELYSPAFYAACTAGGIASCGLTHMAVTPLDLVKCNMQIDPAKYKSISSGFGILLKEQGARGFFRGWVPTLLGYSAQGACKFGFYEFFKKYYSDIAGPEYAHKYKTLIYLAGSASAEVIADVALCPFEAVKVRVQTQPGFARGLSDGLPKFVRSEGALGLYKGIVPLWGRQIPYTMMKFASFETIVELIYKHAVPVPKSECSKTTQLGISFAGGYIAGVFCAIVSHPADNLVSFLNNAKGATVGDAVKKIGLLGLFTRGLPLRIVMIGTLTGAQWGIYDAFKVMVGLPTTGGVTPAPAEAESKASA

SEQ ID NO: 86520 - protein, 104 aa, Setaria italica
  Transcript Sequence Number=SeqID_20546
  Gene Ontology: Mol. function=ATP-dependent helicase activity
  Homolog annotation: Hit_ID=Q0DVX2; Match level="QueryCoverage=69%, HitCoverage=11%, E-value=2e-34, Identity=93%"; Hit description=DEAD -box ATP-dependent RNA helicase 50
LVSIKSRFSVCSVVLDEVDILFGEEGFEQVLHQLITVAPVTTQYLFVTATLPLDIYNKVVETFPDCEVIMGPGVHRTSSRLEEVGHFSLSSFFLPFIHSVTYAF

SEQ ID NO: 86521 - protein, 273 aa, Setaria italica
  misc_feature (8)..(8): Xaa can be any naturally occurring amino acid
  Transcript Sequence Number=SeqID_20547
  Gene Ontology: Mol. function=ATP-dependent helicase activity; Cellular component=nucleus; Biological process=ribosome biogenesis
  Homolog annotation: Hit_ID=Q0DVX2; Match level="QueryCoverage=98%, HitCoverage=41%, E-value=1e-150, Identity=95%"; Hit description=DEAD- box ATP-dependent RNA helicase 50
  Pfam annotation: Domain name=Helicase_C; Domain location=154-233; Score=82.0; E_value=2.1e-21; Accession=PF00271.23; Description =Helicase conserved C-terminal domain
LIATPGRXLYLLQEGFVQLSSLRCVVLDEVDILFGEEGFEQVLHQLITVAPVTTQYLFVTATLPLDIYNKVVETFPDCEVIMGPGVHRTSSRLEEILVDCSGDDNEEKNPETAFSNKKSALVKILEESPVRKTIIFCNKIETCRKVENVLRRLDRKASQIKVLPFHAALDQAQRIANIKEFLNKQTADSMFLVCTDRASRGIDFANVNHVVLFDYPRDPSEYVRRVGRTARGASGNGKAFVFAVGKQVSLARRVMERNMKGHPLHDVPTEITF

SEQ ID NO: 86522 - protein, 89 aa, Setaria italica
  Transcript Sequence Number=SeqID_20548
LSYCGNNGIPVNSIKIVMMPVFAVMWSALSSGNQTAAELKPWNKSVTCPVSLCLNLINCQYSIWRLLVCEFVDKKCSSKCCDVGFHYYY

SEQ ID NO: 86523 - protein, 84 aa, Setaria italica
  misc_feature (74)..(74): Xaa can be any naturally occurring amino acid
  Transcript Sequence Number=SeqID_20549
  Subcellular localization annotation: CTP_CleavageSite=25; ConfidenceScore=5.17e-01
ADKAGNPFNSQTRGVLPARTKGGRRASGASASTVIDAGGLMEILLFCCWNMSRPAPPQGMLLQLRRIEESDCNXMLYLEFLMLT

SEQ ID NO: 86524 - protein, 238 aa, Setaria italica
  misc_feature (16)..(16): Xaa can be any naturally occurring amino acid
  Transcript Sequence Number=SeqID_20550
  Gene Ontology: Mol. function=protein serine/threonine kinase activity; Cellular component=integral to membrane; Biological process=protein amino acid phosphorylation
  Homolog annotation: Hit_ID=B9R6R4; Match level="QueryCoverage=91%, HitCoverage=21%, E-value=2e-60, Identity=55%"; Hit description =Receptor protein kinase CLAVATA1, putative
  Pfam annotation: Domain name=Pkinase; Domain location=1-216; Score= -10.6; E_value=7.4e-08; Accession=PF00069.17; Description=Protein kinase domain
  Pfam annotation: Domain name=Pkinase_Tyr; Domain location=1-216; Score=-65.7; E_value=2.3e-09; Accession=PF07714.9; Description =Protein tyrosine kinase
  Pfam module annotation: Pfam domain module=Pkinase::Pkinase_Tyr; Domain location=1-216::1-216
ITSEDGGASLLVYEHXPRGSLHERLHGPEGRKLGGGLGWAERHDVAVGAARGLEYLHHGCDRPILHRDVKSSNILLDEAFKPRLADFGLAKILTAASARVDSSAGVVAGTLGYMAPEYAYTWKVTEKSDVYSFGVVLLELVTGRPAMVPVEEGGGDLVEWVSRRLESREKPMSLVDARVTEGWAREEAVRVLRVAVLCTSRTPAMRPSMRSVVQMLEDVAAAREDDAPAAKLIQVKVV

SEQ ID NO: 86525 - protein, 96 aa, Setaria italica
  misc_feature (65)..(65): Xaa can be any naturally occurring amino acid
  Transcript Sequence Number=SeqID_20551
  Gene Ontology: Mol. function=peptidase activity
  Homolog annotation: Hit_ID=B6T6Y3; Match level="QueryCoverage=94%, HitCoverage=25%, E-value=2e-37, Identity=83%"; Hit description =Cysteine-type peptidase
  Pfam annotation: Domain name=OTU; Domain location=11-96; Score=48.7; E_value=2.2e-11; Accession=PF02338.11; Description=OTU-like cysteine protease
GAVWLVELKVNGDGNCQFRALSDQFYRTPEHHRFVRQQVLKQLELHPEFYAGYVPMDYREYLKKXMSKSGEWGDHVTLQAAADSVNFMYLELSMFY

SEQ ID NO: 86526 - protein, 163 aa, Setaria italica
  Transcript Sequence Number=SeqID_20552
  Gene Ontology: Mol. function=peptidase activity
  Homolog annotation: Hit_ID=B6T6Y3; Match level="QueryCoverage=95%, HitCoverage=44%, E-value=3e-80, Identity=89%"; Hit description =Cysteine-type peptidase
  Pfam annotation: Domain name=OTU; Domain location=28-140; Score =137.6; E_value=3.9e-38; Accession=PF02338.11; Description=OTU-like cysteine protease
YDSLLFDSDHQRLLDRLVLYGLVELKVNGDGNCQFRALSDQFYRTPEHHRFVRQQVLKQLELHPEFYAGYVPMDYREYLKKMSKSGEWGDHVTLQAAADSYGVKVFILTSFKDTCYIEILPVVEKSRRVICLSFWAEVHYNSIYPEGEELPITEKKRRSWWPF

SEQ ID NO: 86527 - protein, 313 aa, Setaria italica
  Transcript Sequence Number=SeqID_20553
  Gene Ontology: Cellular component=integral to membrane
  Homolog annotation: Hit_ID=O64487; Match level="QueryCoverage=92%, HitCoverage=37%, E-value=1e-108, Identity=63%"; Hit description =F20D22.3 protein
  Pfam annotation: Domain name=Dymeclin; Domain location=1-301; Score =157.1; E_value=5.5e-44; Accession=PF09742.1; Description=Dyggve -Melchior-Clausen syndrome prot
LLNLFRSSIVLLFYNASRKTSNQIYMLLIILLILSQDSTFNASVHKLVLPAVPWYHERLMHQTSLGSLMVVILIRTIKYNLSKLRDVYLHTNCLAILANMAPHVHRLSAYASQRLVSLFDMLSRKYAKLAELKNDKSHKVISDQMEADNIADDMSTELHIYTDFLRIVLEIINAILTYALPRNPEVVYAVLHRQEVFEPFKNHPRFNELLENIYTVLDFFNSRMDMQQLDGEWSVDKVLEVINKNCRSWRGEGMKMFTQLRFTYEQESHPEEFFIPYAWRLVLSRGFSFNPGAINLFPVEIHLDDAPSGEEKV

SEQ ID NO: 86528 - protein, 186 aa, Setaria italica
  Transcript Sequence Number=SeqID_20554
  Homolog annotation: Hit_ID=B6TKL7; Match level="QueryCoverage=62%, HitCoverage=61%, E-value=2e-31, Identity=54%"; Hit description=Actin associated protein
  Subcellular localization annotation: CTP_CleavageSite=13; ConfidenceScore=5.34e-01
LGPHAAAGQDGLPAASRPSSPRAEDSPESPPSTPPAPSQRAPPPLPVDSVPTPPLVRTTVPPLLPAEKLSRPPPVQVPTPLVKVVSTPLQAPELSSHPPPPVQVPPSQFEKASPASDGSVLALFWDAVARVQEAHASLDEHISRWFGLDQSKYQWALNEYYESTGQEIDSGKAGNGKEHSCKVQKV

SEQ ID NO: 86529 - protein, 127 aa, Setaria italica
  misc_feature (80)..(80): Xaa can be any naturally occurring amino acid
  Transcript Sequence Number=SeqID_20555
  Subcellular localization annotation: CTP_CleavageSite=59; ConfidenceScore=5.71e-01
STRNAPPAKSNQTCCCVHCPSHLPASSSSSLPRCPNPFLPIPKPYSAVSQPGFRGSASIASAASQTLAAPSPMPMRPKPXSSPPPCAPPPPRPPWRPPPPPADPRPGPDPGVAKKPRLAQPPPRDPD

SEQ ID NO: 86530 - protein, 70 aa, Setaria italica
  misc_feature (66)..(66): Xaa can be any naturally occurring amino acid
  Transcript Sequence Number=SeqID_20556
  Homolog annotation: Hit_ID=B6U1F2; Match level="QueryCoverage=100%, HitCoverage=18%, E-value=2e-25, Identity=81%"; Hit description =Senescence-associated protein 12
MACCGGAMSARPRGVREETLLRVPGASVHLMAGSDGPVELARGDLSVVRIAKDGVAVATAVRVGHXLGWP

SEQ ID NO: 86531 - protein, 74 aa, Setaria italica
  Transcript Sequence Number=SeqID_20557
WFGGRWGFGGTNKKEVKKEEARSVHVCIPQSHITTTVRSFVGLKQVIGNVCVTWQESPCGRSLSSKGTLGIKVV

SEQ ID NO: 86532 - protein, 68 aa, Setaria italica
  Transcript Sequence Number=SeqID_20558
KCRSLFIQWHLLTLFHLSATVVREEANSSNEPENNDEQEQIRIARALLNYRLKEKMAMANYPHASPFP

SEQ ID NO: 86533 - protein, 70 aa, Setaria italica
  Transcript Sequence Number=SeqID_20559
NMVCDILKCRSLFIQWHLLTLFHLSATVVREEANSSNEPENNDEQEQIRIARALLPDFVISCLPCTFRSV

SEQ ID NO: 86534 - protein, 474 aa, Setaria italica
  misc_feature (99)..(99): Xaa can be any naturally occurring amino acid
  Transcript Sequence Number=SeqID_20560
  Gene Ontology: Mol. function=double-stranded RNA binding; Cellular component=intracellular
  Homolog annotation: Hit_ID=B9SVC8; Match level="QueryCoverage=51%, HitCoverage=55%, E-value=9e-46, Identity=46%"; Hit description =Double-stranded RNA binding protein, putative
  Pfam annotation: Domain name=dsrm; Domain location=44-109; Score =66.5; E_value=1e-16; Accession=PF00035.17; Description=Double -stranded RNA binding motif
ESPGFFTTLRQAEHAAAEVALAALARRGPSYSLAARILDETGVYKNLLQEVAQRVGAPLPSYTTERSGLGHLPVFTCTVELAGITFTGDPAKNKKQAEXNAASAAWSALKQLVREEANSSNEPENNDEQEQIRIARALLNYRLKEKMAMANYPHASPFPKKFPMQPERKPSFGQSSQSSYSKILPLFRPKSNSRCRPESPASTDGVSQTALRTLESLNPKSRFPAAEAAPYVPVGHYRMPCHSMAPSVTIRTAVPVFSAPPLPPPAARTQQQLPPLMSHPPPIRMASPVRIRPASPMFGPSAPVQGPKPVMSVQLKDVQQQSRREPVKPVIPVQVKDVQYQPMKGSVSPVVPVQVKDAQRRPLVGSLSGVIPIKVKDVQTQAPKESLAAPIPAIRPSVKIEAPAQAKEASAAVTSEVPCSAAGNTTAVECTTSSEVTPTRQSRAADGDDSKAEAVHEAEAQAVAEAAIRQLEIN

SEQ ID NO: 86535 - protein, 156 aa, Setaria italica
  Transcript Sequence Number=SeqID_20561
  Gene Ontology: Mol. function=copper ion binding; Cellular component =mitochondrial inner membrane; Biological process=positive regulation of growth rate
  Homolog annotation: Hit_ID=B4X866; Match level="QueryCoverage=100%, HitCoverage=60%, E-value=1e-88, Identity=98%"; Hit description =Avirulence protein-interacting protein
  Pfam annotation: Domain name=CtaG_Cox11; Domain location=1-153; Score= 345.2; E_value=1.3e-100; Accession=PF04442.6; Description=Cytochrome c oxidase assembly protein  CtaG  Cox11
LYRRFCQATVYGGTVQRRESVEEKISRHARDGTTTAREIIVQFNADVADGMPWKFIPTQREVRVKPGESALAFYTAENRSSAPITGVSTYNVAPMKAAIYFNKIQCFCFEEQTLLPGEQIDMPVFFYIDPEFETDPKMEGVNNIVLSYTFFKVNDS

SEQ ID NO: 86536 - protein, 153 aa, Setaria italica
  Transcript Sequence Number=SeqID_20562
  Gene Ontology: Mol. function=copper ion binding
  Homolog annotation: Hit_ID=B6T5S8; Match level="QueryCoverage=85%, HitCoverage=54%, E-value=1e-52, Identity=80%"; Hit description =Cytochrome c oxidase assembly protein ctaG
  Pfam annotation: Domain name=CtaG_Cox11; Domain location=79-147; Score=-42.0; E_value=7.6e-07; Accession=PF04442.6; Description =Cytochrome c oxidase assembly protein  CtaG  Cox11
  Subcellular localization annotation: CTP_CleavageSite=70; ConfidenceScore=5.42e-01
MAMRQLARLQQHLSPSLLCRHTPRHAWPPTADASFLCRGLASSSSSAAAAAAGREKSSRRTLGYLLGVAVAMVGASYAAVPLYRRFCQATGYGGTVQRRESVEEKISRHARDGTTTAREIIVQFNADVADGLVIVLLVSFYSLLLVVVRFLGL

SEQ ID NO: 86537 - protein, 74 aa, Setaria italica
  Transcript Sequence Number=SeqID_20563
CKLSRSHMIFIKLIFTVRPCYRVKEFRDIIVHIAYITDATASPYEYNTSDIQIEIRVRYLYYVYKRSYISVKGC

SEQ ID NO: 86538 - protein, 215 aa, Setaria italica
  misc_feature (22)..(22): Xaa can be any naturally occurring amino acid
  Transcript Sequence Number=SeqID_20564
  Gene Ontology: Mol. function=electron carrier activity; Cellular component=extracellular region; Biological process=response to oxidative stress
  Homolog annotation: Hit_ID=A2I994; Match level="QueryCoverage=79%, HitCoverage=52%, E-value=1e-63, Identity=67%"; Hit description =Putative peroxidase
  Pfam annotation: Domain name=peroxidase; Domain location=40-211; Score=215.7; E_value=1.2e-61; Accession=PF00141.15; Description =Peroxidase
CWPCCFWCSPPSALARRRRRRXGLKKGFYKKSCPQAEDIARKVVWGRVAGNGELAAKFLRMFFHDCFVRGCDASVLLDSPTNTAEKNAPPNLSLAGFDVIDEVKAELERACPGVVSCADIVALAARDSVSFQYKRNLWEVETGRRDGTVSSDQEALNDIPAPTSTFDVLLSNFSSKGLGLQDLVVLSGGHTIGVRVTCLTLFLVFVGLLSNFLPV

SEQ ID NO: 86539 - protein, 133 aa, Setaria italica
  misc_feature (22)..(22): Xaa can be any naturally occurring amino acid
  misc_feature (46)..(46): Xaa can be any naturally occurring amino acid
  Transcript Sequence Number=SeqID_20565
  Gene Ontology: Mol. function=electron carrier activity; Cellular component=extracellular region; Biological process=response to oxidative stress
  Homolog annotation: Hit_ID=A2I994; Match level="QueryCoverage=82%, HitCoverage=34%, E-value=2e-42, Identity=72%"; Hit description =Putative peroxidase
  Pfam annotation: Domain name=peroxidase; Domain location=40-133; Score=-2.4; E_value=1e-09; Accession=PF00141.15; Description =Peroxidase
CWPCCFWCSPPSALARRRRRRXGLKKGFYKKSCPQAEDIARKVVWXRVAGNGELAAKFLRMFFHDCFVRGCDASVLLDSPTNTAEKNAPPNLSLAGFDVIDEVKAELERACPGVVSCADIVALAARDSVSFQY

SEQ ID NO: 86540 - protein, 354 aa, Setaria italica
  Transcript Sequence Number=SeqID_20566
  Gene Ontology: Mol. function=electron carrier activity; Cellular component=extracellular region; Biological process=response to oxidative stress
  Homolog annotation: Hit_ID=Q5ZDE7; Match level="QueryCoverage=69%, HitCoverage=74%, E-value=1e-124, Identity=86%"; Hit description =Putative cationic peroxidase isozyme 38K
  Pfam annotation: Domain name=peroxidase; Domain location=66-319; Score=419.5; E_value=5.4e-123; Accession=PF00141.15; Description =Peroxidase
IRSKLGEGDGEGIAHGHGLDAGPAASGLRRTVYGSPPSALARRRRRRRGLKKGFYKKSCPQAEDIARKVVWGRVAGNGELAAKFLRMFFHDCFVRGCDASVLLDSPTNTAEKNAPPNLSLAGFDVIDEVKAELERACPGVVSCADIVALAARDSVSFQYKRNLWEVETGRRDGTVSSDQEALNDIPAPTSTFDVLLSNFSSKGLGLQDLVVLSGGHTIGVGNCNLFSSRLFNFTGKNNPSDIDPSLNPSYAKFLQGQCRRNLQDPNDNTTVVPMDPGSSLSFDNHYFVNLKAHQGMFTSDATLLTNGRAANIVDKLQDPGVFFDTFKNSIKRMGQIGVLTGANGQIRNKCNVVN

SEQ ID NO: 86541 - protein, 148 aa, Setaria italica
  misc_feature (121)..(121): Xaa can be any naturally occurring amino acid
  Transcript Sequence Number=SeqID_20567
  Gene Ontology: Mol. function=binding
  Homolog annotation: Hit_ID=Q6H6D6; Match level="QueryCoverage=100%, HitCoverage=15%, E-value=2e-34, Identity=54%"; Hit description =Transducin-like
RCRRMKSLQRLYNDNMDSGTAQFAMYYKEWLKSGGSEPPVPSVPLPSMPGNFDACEKHSASVRRSSINRNLYNAVFGTAFELEDVKDAKLDDETELVLDLDLDVGLNDNSVSLKMEKLAHXSKMGLQEKHYRSQKEGAIPETAPTQRK

SEQ ID NO: 86542 - protein, 188 aa, Setaria italica
  Transcript Sequence Number=SeqID_20568
  Gene Ontology: Mol. function=DNA binding; Cellular component=nucleus; Biological process=regulation of transcription
  Homolog annotation: Hit_ID=Q5N7Y8; Match level="QueryCoverage=100%, HitCoverage=19%, E-value=7e-79, Identity=77%"; Hit description =Putative Myb-like protein
  Pfam annotation: Domain name=Myb_DNA-binding; Domain location=11-57; Score=56.7; E_value=9e-14; Accession=PF00249.23; Description=Myb -like DNA-binding domain
  Pfam annotation: Domain name=Myb_DNA-binding; Domain location=63-108; Score=46.5; E_value=1e-10; Accession=PF00249.23; Description=Myb-like DNA-binding domain
  Pfam module annotation: Pfam domain module=Myb_DNA-binding::Myb_DNA -binding; Domain location=11-57::63-108
WQKVLNPELVKGPWSKEEDEIIIQMVNKLGPKKWSTIAQALPGRIGKQCRERWHNHLNPGINKDAWTQEEEIKLIHAHQTYGNKWAELTKFLPGRTDNAIKNHWHSSVKKKVDSYRASGLLAQFQGLTPVEYTAGGLNVDSSSAMTNQISEDSGFNVCREVEDSTELSQSSFVKGSCSQEEQTDVALG

SEQ ID NO: 86543 - protein, 110 aa, Setaria italica
  Transcript Sequence Number=SeqID_20569
  Gene Ontology: Mol. function=flavin-containing monooxygenase activity; Cellular component=intrinsic to endoplasmic reticulum membrane; Biological process=oxidation reduction
  Homolog annotation: Hit_ID=B6U2L7; Match level="QueryCoverage=76%, HitCoverage=23%, E-value=2e-35, Identity=82%"; Hit description =Monooxygenase/ oxidoreductase
RRGQREIEGGQGGGRGRAFGTGKDGGWRITVKDLKVGDTQVLQVDFLILCIGRHSGTPNIPEFPANGPELFKGKILHSLDYSYMDNVAHFVKGKHVTIVGSGKSAFDIAA

SEQ ID NO: 86544 - protein, 169 aa, Setaria italica
  Transcript Sequence Number=SeqID_20570
  Subcellular localization annotation: CTP_CleavageSite=61; ConfidenceScore=5.24e-01
NTTPAATHCYHRLILCTSELRSTTTSPPMAMSKYPSSTFAYSGGAVPEPEHRTRRPSSPLQAQGRRRRHRGRRRQAVGLHEDGPEHVHVLALARLDVVVQDVDPSLLALHRVDAAPEPPERGEHGPEPPHAEPRPPPTSHTYKQSAKPCVAGEHVKNEPSPLPLRPENE

SEQ ID NO: 86545 - protein, 127 aa, Setaria italica
  Transcript Sequence Number=SeqID_20571
  Gene Ontology: Mol. function=ammonium transmembrane transporter activity; Cellular component=integral to membrane; Biological process=transport
  Homolog annotation: Hit_ID=Q6T8L6; Match level="QueryCoverage=92%, HitCoverage=25%, E-value=2e-40, Identity=70%"; Hit description =Ammonium transporter AMT2.1
MSTSSGFPLAYQGSAASPDWLNKGDNAWQLTAATLVGLQSFPGLVVLYGGVVKKKWAVNSAFMALYAFAAVWICWVTWAYNMSFGDKLIPIWGKARPALNQGFLIGQAALPATAHYRAGGATIETPA

SEQ ID NO: 86546 - protein, 222 aa, Setaria italica
  Transcript Sequence Number=SeqID_20572
  Gene Ontology: Mol. function=DNA binding
  Homolog annotation: Hit_ID=Q8PXB6; Match level="QueryCoverage=79%, HitCoverage=70%, E-value=1e-35, Identity=41%"; Hit description=HTH DNA-binding protein
  Pfam annotation: Domain name=DUF124; Domain location=1-186; Score =140.7; E_value=4.6e-39; Accession=PF01987.9; Description=Protein of unknown function DUF124
MDNNYLPENDGGVWQWIFGKSVSSTVFFNTGSDDGYVGIAAPFPGRILPVDLANFGGELLCHADAFLCSVNDVSVTSTVEPRPRNIEIGAEMILKQKLRGQGMAFLVGGGSVMQKILAPQEVITVDAACIVAMTTTINFQLKSPNQLRRAVFGGENQLTASLTGPGVVFIQSLPFHRLSQRIASRSVVGPSLRDNPKFFIQIVMFFFLAYVMIVSSIILTDV

SEQ ID NO: 86547 - protein, 210 aa, Setaria italica
  misc_feature (165)..(165): Xaa can be any naturally occurring amino acid
  Transcript Sequence Number=SeqID_20573
  Gene Ontology: Mol. function=DNA topoisomerase type I activity; Cellular component=chromosome; Biological process=DNA unwinding during replication
  Homolog annotation: Hit_ID=Q0J0S6; Match level="QueryCoverage=100%, HitCoverage=24%, E-value=1e-106, Identity=86%"; Hit description=DNA topoisomerase
  Pfam annotation: Domain name=Toprim; Domain location=4-147; Score =57.8; E_value=4.3e-14; Accession=PF01751.14; Description=Toprim domain
MAPKVLMVAEKPSIALSIASALSGGRMSTRKGSTDIHEFDGMFQGSYANFKVTSVIGHVLSVDFPPAYQNWDGTDPMDLFEAPVLRSECNPKAHIRRHLAQEVRGCTYLILWLDCDREGENICYEVIECTGIPENEAGRRIFRARFSSVTEKDILSAMDNLVLPXKDEALSVDARQEIDLKVGVAFTRFQTRYFQGKYGNLDSRVISYGP

SEQ ID NO: 86548 - protein, 119 aa, Setaria italica
  misc_feature (98)..(98): Xaa can be any naturally occurring amino acid
  Transcript Sequence Number=SeqID_20574
  Gene Ontology: Mol. function=protein serine/threonine kinase activity; Cellular component=chloroplast; Biological process=protein amino acid phosphorylation
  Homolog annotation: Hit_ID=B6SUF3; Match level="QueryCoverage=100%, HitCoverage=26%, E-value=1e-52, Identity=85%"; Hit description =Serine/threonine-protein kinase Cx32
GPTGSNSHITTRVMGTYGYAAPEYVATGHLYVKSDVYGFGVVMLEMLSGQRALDPNRPNGQLSLADWAKPYLADRRRLARLMDPRFEGQYNSKQAFQXAAQLTLNCLAGEPRSRPSMKE

SEQ ID NO: 86549 - protein, 564 aa, Setaria italica
  Transcript Sequence Number=SeqID_20575
  Gene Ontology: Mol. function=acid-amino acid ligase activity; Cellular component=intracellular; Biological process=ubiquitin -dependent protein catabolic process
  Homolog annotation: Hit_ID=Q6YU89; Match level="QueryCoverage=100%, HitCoverage=31%, E-value=0.0, Identity=64%"; Hit description =Putative HECT ubiquitin-protein ligase 3
AGILAWKDPQVLIPALQIAEIMMEKLPETFSKLFVREGVVHAVESLICAESSNALPSQVPPQDKDNDSPMPSRSRRQRRRGGAVPAENSSLDESNSSNLGVTCSTTSTSEVPNTSLRFAVSDHAKSFKDKYFPTDTDSSDIGVTDDLLKLRALCTKFNTAIENAKTKAKGKSKAVSADCFDISFDVEEQLDEVISEMLGELSKVNGVSTFEFIRSGVVTSLLDYLSCGTFGKEKVSEGNLPQLRQQALRRYKSFISVALSIDHERDGTPMALLVQKLQSALSSLERFPVVLSQSSRIGIGGSRLTSGLSALAQPFKLRLSRAQGEKSLRDYSSNIVLIDPFASLAAVEDFLWPRVQRSEVASKPIVPSGNNSESGVPGTTAGASLTAATAHSGRRPTTRSKSSAASSGTSKKDAHDESTSTAKGKGKAIVKPNSDESKGPNTRNAARQKSASEKDSEMKRAHGHSSSEDEELDTSLVEIDDALMIDDDDISEDDDDDHEVLQEGSLPICSQDGVHDVKLGDADENIGSASFSQAQPSSGSIARNTSSRGPDSSEFRSASTFGSR

SEQ ID NO: 86550 - protein, 773 aa, Setaria italica
  Transcript Sequence Number=SeqID_20576
  Gene Ontology: Mol. function=acid-amino acid ligase activity; Cellular component=intracellular; Biological process=ubiquitin -dependent protein catabolic process
  Homolog annotation: Hit_ID=Q6YU89; Match level="QueryCoverage=99%, HitCoverage=42%, E-value=0.0, Identity=82%"; Hit description =Putative HECT ubiquitin-protein ligase 3
  Pfam annotation: Domain name=HECT; Domain location=388-773; Score =395.0; E_value=1.3e-115; Accession=PF00632.17; Description=HECT -domain (ubiquitin-transferase)
  Subcellular localization annotation: CTP_CleavageSite=74; ConfidenceScore=5.55e-01
DNRTVKLGDADENIGSASFSQAQPSSGSIARNTSSRGPDSSEFRSASTFGSRGAMSFVAATMAGLASVGGRSVRGSRDRRGLSLGGSMSDHNKLVFTAGGKQLSKHLTVYQAIQRQLMLDEDDEERFNGSDLSNDGNRFWGDVFTITYQKADNQAEKGSQGGSTSLNSKSDSCRSISEMQGVSLLDSILQGELPCDLERTNSTYNILALLRVLDGLNQLSSRLRAQGASDDFAEGKIRTLDELYRTGAKVPSEEFVNSKLTPKLARQMQDVLALCSGSLPSWCYQMTKACPFLFPFETRRQYFYSTAFGLSRALNRLQQQQSDNHSSGGEREVRFGRLQRQKVRVSRNRILDSAAKVMEMFSSQRAVLEVEYFGEVGTGLGPTLEFYTLLSHELQSSQLGLWRSTSPYDSGLQIDRSDAINLDPEDGLSGKELNSDLPGDGRHLIQAPLGLFPRPWPPKADSSEGTRFFKVLEYFRLIGQVMAKVLQDGRLLDLPLSTAFYKLILGQELDLFDIVSFDSEFGKTLQELRVLVERKKFLESTPGENQLEVADLRFRGAAIEDLCLDFTLPGYPDYVLKEGEGSTIVNIYNLEEYISLLVDATVKSGIKRQIEAFRSGFNQVFDISSLQIFSPQELDYLICGRQEIWEPESLVDNIKFDHGYTAKSPAIVNLLEIMVEFTPEQQHAFCQFVTGAPRLPPGGLAALSPKLTIVRKHPSSVVNTSNSTGVTEPADDDLPSVMTCANYLKLPPYSTKEIMRKKLLYAILEGRGSFDLS

SEQ ID NO: 86551 - protein, 149 aa, Setaria italica
  Transcript Sequence Number=SeqID_20577
DQDQRSGHNAYVAVVFTFFTAVKFFYHELMMTDSLHDLAWSLLGRMVEMPVHIPAIKGLKASGPQALDDSFDTIHEVLFNVMLGRTFICSVHLTALGLDVTWKLGWCLEMLTPSQLLSLMHHVLFTFRVTCICCIFFRRLCFVELILLL

SEQ ID NO: 86552 - protein, 314 aa, Setaria italica
  misc_feature (8)..(8): Xaa can be any naturally occurring amino acid
  Transcript Sequence Number=SeqID_20578
  Gene Ontology: Mol. function=zinc ion binding; Cellular component =intracellular
  Homolog annotation: Hit_ID=Q7XP23; Match level="QueryCoverage=88%, HitCoverage=73%, E-value=1e-90, Identity=62%"; Hit description =OSJNBa0027H09.16 protein
  Pfam annotation: Domain name=DUF1644; Domain location=1-192; Score =221.7; E_value=1.8e-63; Accession=PF07800.4; Description=Protein of unknown function (DUF1644)
  Subcellular localization annotation: CTP_CleavageSite=22; ConfidenceScore=5.53e-01
SNCLDRFXKMKVNDGDSPSQPSSSVPRGTRNQNVVRRSRFGVTRESPRLLIDISEPAEASDHQDASHRPAAIAGRQEENNYNEGPDLTLESQEVEISGPLVSSDVSNSNQLLCPLCRGTVSGWKIIKEARQYLDEKSRACSREACTFSGNYREIRRHARSVHPTTRPADEDPSRRCAWHRLEHQREYGDIVSAIRSAMPGAVVLGDYAIEGGEMFSHDRETSGPSEPSGSLLTTFFLFHMLSSSPIRSSDDPRGASRGLRRRRRRYLWGENLLGLQYDDDDDEEEDEEEDDLDEEVQRPRSRRRFIRSRSEERA

SEQ ID NO: 86553 - protein, 120 aa, Setaria italica
  Transcript Sequence Number=SeqID_20579
QPGAGSGSGRRGGWAGADARVRAGRREAGEGAICALRPERGVEPHRPAARATSLSSHLTSHLRKRTVLGPRLSELKRQTAANKIDFLDFFPFFNRCLPFFFVKSKGWWTADCRLHSTASS

SEQ ID NO: 86554 - protein, 95 aa, Setaria italica
  Transcript Sequence Number=SeqID_20580
  Homolog annotation: Hit_ID=Q9S9M0; Match level="QueryCoverage=100%, HitCoverage=74%, E-value=2e-10, Identity=43%"; Hit description =T24D18.25 protein
  Subcellular localization annotation: CTP_CleavageSite=20; ConfidenceScore=5.37e-01
MVLDSLSSPHRRSQNTFFVSSAKKPQSSRDDSWSALVERHRFLLTTLVVLAFLCTIYLYFAVTLGASDACAGLAGAERIECQAKSLLRHGKLKFL

SEQ ID NO: 86555 - protein, 82 aa, Setaria italica
  Transcript Sequence Number=SeqID_20581
VFGGRVCQAVSLTSADVQLYFARHDSDILLTLSDTLSYSMESITINCEDCNICFSENWTAVRILAVSSSFFFMRRPKWCQIT

SEQ ID NO: 86556 - protein, 91 aa, Setaria italica
  misc_feature (33)..(33): Xaa can be any naturally occurring amino acid
  misc_feature (67)..(67): Xaa can be any naturally occurring amino acid
  Transcript Sequence Number=SeqID_20582
  Subcellular localization annotation: CTP_CleavageSite=44; ConfidenceScore=5.06e-01
LSSKDAFSGNSGLCGRPVSSHCSRSLRSLGGGXLGILCAGLVIVIAAASLLLAYFFWRYTEKGKGGXRRQRRGGSESGGAAVEDGSWWAER

SEQ ID NO: 86557 - protein, 65 aa, Setaria italica
  misc_feature (7)..(7): Xaa can be any naturally occurring amino acid
  misc_feature (15)..(15): Xaa can be any naturally occurring amino acid
  Transcript Sequence Number=SeqID_20583
ASALHKXLFYVACCXILVVSRGGLIMIERLIYCGVSVTLDLGVCGVCKEGLSLSSPCTFCTSHLS

SEQ ID NO: 86558 - protein, 79 aa, Setaria italica
  Transcript Sequence Number=SeqID_20584
IVEQYALRHIEFQGFFIQCQFSLLVSTITVCLSANRLDLNFICTHDIHCSFPLPASMHLLALNVLDYGSFLCNVVWRTS

SEQ ID NO: 86559 - protein, 301 aa, Setaria italica
  Transcript Sequence Number=SeqID_20585
  Gene Ontology: Mol. function=binding; Cellular component=vacuole
  Homolog annotation: Hit_ID=B9RP02; Match level="QueryCoverage=95%, HitCoverage=39%, E-value=1e-103, Identity=63%"; Hit description=Heat shock protein 70 (HSP70)-interacting protein, putative
TEAIEDTITTEEAQEVFQLAERNFQEMAALAFFHWGNVHMSRARKRLLLSGDSPRELVLEQVKEAYEWAREEYNKAGKTYEEAVKAKPDFFEGFLALAHQQFEQAKLSWYYAIGSNMDLETCSTEILELFNKAEDNIEKGIEMWEETEEQRLKNRSKPSQENVVLEKMGLEEYIKDVSTDDAAEQASNLRSQINILWGMLLYERSVVEFKLSLPMWEDCLMAAIEKFKLGGATATDIAVLVKNHCANETAQDGLGFKIDEIVQAWNEMYDIKRWLRGVPSFRLEPLFRRRVPHLHTALEHI

SEQ ID NO: 86560 - protein, 110 aa, Setaria italica
  misc_feature (39)..(39): Xaa can be any naturally occurring amino acid
  Transcript Sequence Number=SeqID_20586
VSETSRHVGRLSVSTNHDLPFKDVANQCEALLIGKQQKXSVCMSVQQKEVSNSVYLKLSTVKTAVSSFEKHYSRSVGHCLNRVHLAVARCDGSDFPFRYIALNFVLHLLA

SEQ ID NO: 86561 - protein, 387 aa, Setaria italica
  misc_feature (122)..(122): Xaa can be any naturally occurring amino acid
  Transcript Sequence Number=SeqID_20587
  Gene Ontology: Mol. function=binding; Cellular component=nucleus
  Homolog annotation: Hit_ID=Q2L357; Match level="QueryCoverage=96%, HitCoverage=45%, E-value=1e-66, Identity=42%"; Hit description =Putative cyclin-related protein (Fragment)
  Subcellular localization annotation: CTP_CleavageSite=21; ConfidenceScore=5.11e-01
MASTKDISFPSSTDTSTLSVPTQEKDAVTLMLSIRQANLLLSSLWTQALSPENVPRNYEAISHTYSLMLLFSGAKGSGVEVLVGSFQLAFSLRGVSLQAGFLSPSRRRSLFTLATSMLVFFXKAFNIPSLIPVVKHVLTESTVDPFLHLVEDSRLQVLDSVAKPCYGSKEDDDLALKSLSNIDMNKDQSKETSVSLILNSLEDLPESELSTIRKQLLEEFSADDNCPLGETSSKFAAQNGKMPQKSMEVIPLGFVFEDDTLVEPSDSLAEPQLRHQPDSSLLDVNQLLDSVSETSRHVGRLSVSTNHDLPFKDVANQCEALLIGKQQKMSVCMSVQQKEGGESSTEKLESSPEDLQGDRFLCLDDGQGDSNFCKLPVLNPYDQFLAR

SEQ ID NO: 86562 - protein, 108 aa, Setaria italica
  Transcript Sequence Number=SeqID_20588
  Gene Ontology: Mol. function=NADH dehydrogenase (ubiquinone) activity; Cellular component=mitochondrion; Biological process =electron transport chain
  Homolog annotation: Hit_ID=B4FLH6; Match level="QueryCoverage=100%, HitCoverage=100%, E-value=2e-51, Identity=92%"; Hit description=NADH- ubiquinone oxidoreductase B18 subunit
  Pfam annotation: Domain name=NDUF_B7; Domain location=1-89; Score =21.6; E_value=2.8e-08; Accession=PF05676.5; Description=NADH -ubiquinone oxidoreductase B18 subunit (
MEAAAAAAGVQLGSSKPQIATQAEMAEARVPLAYRDQCAHLLIPLNKCRVAEFYLPWKCEPERHAYEKCQYELVMERMLQMQKIREAQEAKVKGGASIGLIPATAKLA

SEQ ID NO: 86563 - protein, 93 aa, Setaria italica
  Transcript Sequence Number=SeqID_20589
ERQISTEEARARRGSETTAMVGATNGANGGGKVISLPLQYFCVLAAAVVAVMVLSLAFMSPAAMVAVRQNLGSVAAGASAGSSSNSSSGALAA

SEQ ID NO: 86564 - protein, 111 aa, Setaria italica
  Transcript Sequence Number=SeqID_20590
MSNFYHPLAIADRVRALKMLNPQSRSIKCKENLTIWPSWRFCEAHRHLFNVFSTTQGHNACFIIVSCQLKMSSTVSALFPFFFLFFQFSSMGRAHGNLVLQTQNHNLIVTI

SEQ ID NO: 86565 - protein, 110 aa, Setaria italica
  misc_feature (43)..(43): Xaa can be any naturally occurring amino acid
  misc_feature (62)..(62): Xaa can be any naturally occurring amino acid
  Transcript Sequence Number=SeqID_20591
  Subcellular localization annotation: CTP_CleavageSite=101; ConfidenceScore=5.55e-01
AFAFRFAFPSAIDRSLPLPLPPFIPIGVRPPSPSRTNPPAPAXFPGALLCFARDSIQALWSXAVVGGMASSPASSYDCSFKVLLIGDSAVGKSSLLVSFVSAAHIDEDIT

SEQ ID NO: 86566 - protein, 191 aa, Setaria italica
  Transcript Sequence Number=SeqID_20592
  Gene Ontology: Mol. function=triacylglycerol lipase activity; Biological process=lipid metabolic process
  Homolog annotation: Hit_ID=B4FGY5; Match level="QueryCoverage=93%, HitCoverage=50%, E-value=2e-78, Identity=76%"; Hit description=Lipase
  Pfam annotation: Domain name=Lipase_3; Domain location=33-173; Score =121.3; E_value=3.1e-33; Accession=PF01764.17; Description=Lipase (class 3)
DLTQGFEMRSLIVDVENCLQAFVGVAHNLNSIVVAIRGTQENSVQNWIEDLIWKQLDLSYPNMPNAKVHRGFFSSYNNTILRLAITSAVHKARKSYGDINVIVTGHSMGGAMASFCALDLAMKLGSDSVQLMTFGQPRVGNAAFASCFAKYVPNTIRVTHGHDIVPHLPPYFSFLPQFVLLFYLLSLKRGM

SEQ ID NO: 86567 - protein, 282 aa, Setaria italica
  misc_feature (72)..(72): Xaa can be any naturally occurring amino acid
  Transcript Sequence Number=SeqID_20593
  Gene Ontology: Mol. function=binding
QFASRQLLLLGEMLEFSDTMNRKIASSFLHELLVRPLEHEVDDDGNQIAIGDGVSLGGDKEWAKAVAELAKXVHSSVGEFEMVVSTVVEELARPCRERTADFMQWMHCLAVTGLLLENTSTLRNLQVTAIDPSELLHSLLIPAAKQNHVDVQRATLRCLCLLGLLESRPNAELVKQLRLSFINGPDLVSAMACKALIDLVTWHGPQEIDRAIGIELPDPSYEKSQFAQVDLSDMDGDDLNISVLDILFSGFHKDDWEFSLEGDNHDNVPTILGEGFAKILLT

SEQ ID NO: 86568 - protein, 302 aa, Setaria italica
  Transcript Sequence Number=SeqID_20594
  Gene Ontology: Mol. function=ATPase activity, coupled to transmembrane movement of substances; Cellular component=integral to membrane; Biological process=peptide transport
  Homolog annotation: Hit_ID=Q8RY46; Match level="QueryCoverage=100%, HitCoverage=43%, E-value=1e-115, Identity=65%"; Hit description=ABC transporter B family member 26, chloroplastic
  Pfam annotation: Domain name=ABC_membrane; Domain location=1-205; Score=-16.1; E_value=0.0085; Accession=PF00664.15; Description=ABC transporter transmembrane region
MILVKRMREMLFDSILSQDIFFFDEETVGDLTSRLGSDCQQVSRVIGNDLNLISRNLLQGAGALIYLLVLSWPLGLCTMLICATLSTIMLVHGRFQKRAAKFAQEFTASANNVAQEVITLVRTVRVYGTEKQEFKRYAKWLDKLYDVSFRQTVAYGGWSLSLNYLYHSTQVIGVVIGGLAIMSGKLTAEQLTKFTLYAEWLILSTWWIGDNWSSLMQSVGASEKVFRLMDLLPSKQLSSKGLKLEKLEGRIQYADVSFSYPSRPTVPILGRLNLTLNPNEVVAIVGLSGSGKSTIVNLLLRL

SEQ ID NO: 86569 - protein, 171 aa, Setaria italica
  Transcript Sequence Number=SeqID_20595
  Gene Ontology: Mol. function=transcription regulator activity; Cellular component=nucleus; Biological process=transcription
  Homolog annotation: Hit_ID=UPI000173925F; Match level="QueryCoverage =74%, HitCoverage=44%, E-value=4e-11, Identity=31%"; Hit description =DNA binding / protein binding / transcription regulator
  Pfam annotation: Domain name=TFIIS; Domain location=22-108; Score =93.0; E_value=1.1e-24; Accession=PF08711.3; Description =Transcription factor S-II (TFIIS)
SLCSSDRAEVVTNDGGAAPRNDAVVAEAFRVKAALSNAHEKSEAELLELLQRLRQLEFTVDAIMATEIGMAVKPLRKHASKQIRQLIRSLIEGWKSTVNEWVNDGGPIVDHTPQSVDASCLDQEEGGLPSPPMDEAALFATPCTSIQLSEFFDEMDDDGNIRSDAKERTRC

SEQ ID NO: 86570 - protein, 245 aa, Setaria italica
  Transcript Sequence Number=SeqID_20596
  Gene Ontology: Mol. function=transcription regulator activity; Cellular component=nucleus; Biological process=transcription
EYNNNQQSVDASCLDQEEGGLPSPPMDEAALFATPCTSIQLSEFFDEMDDDGNIRSDAKERTRCNPPNQEPVRKQSPMGQWYDPEQNWRLDQSAMKQSRPNEPFNWQTKHQPNPGAQGKPSNAAFGPGRPQMMRLELKGSEMRPKQEQDVSVAQRRLKPTVPKQPSPRQDENSVRAKLELAKEAKLEATKRKLQEGYQEFNNAKKQRTVQMVDPQDLPKQGNRNLVLNGKARNSNNIWNRLGMRR

SEQ ID NO: 86571 - protein, 166 aa, Setaria italica
  Transcript Sequence Number=SeqID_20597
  Gene Ontology: Cellular component=nucleus
  Homolog annotation: Hit_ID=B9RNZ2; Match level="QueryCoverage=92%, HitCoverage=41%, E-value=2e-29, Identity=40%"; Hit description =Aberrant root formation protein, putative
LFICSSATCFTCFTVVWTYMFDDMSKYAGEELELALKEVQSNHMKKWESINMLKSVLSSISYPWIIKSHSINLLLSLAGENHVEETDNHVDFTSYAPRIFATLKAIESVMMAAPEALMRKKAFAALKKVISMVPSSQRFDILQALVNNSMSPSLTAILLDIVKGKK

SEQ ID NO: 86572 - protein, 400 aa, Setaria italica
  misc_feature (95)..(95): Xaa can be any naturally occurring amino acid
  misc_feature (153)..(153): Xaa can be any naturally occurring amino acid
  Transcript Sequence Number=SeqID_20598
  Gene Ontology: Cellular component=nucleus
  Homolog annotation: Hit_ID=B9RNZ2; Match level="QueryCoverage=86%, HitCoverage=94%, E-value=7e-75, Identity=42%"; Hit description =Aberrant root formation protein, putative
AHGIGNAIQEMCKQMVNKNKEDLCAILGLYSLQSIALVSRSRQQDILSACGSVVLQHFRFLKSSGFTYLGLLTGSDASTATDKLSKEEDADFWSXFSFAMDGAALTVVWTYMFDDMSKYAGEELELALKEVQSNHMKKWESINMLKSVLSSLXYPWIIKSHSINLLLSLAGENHVEETDNHVDFTSYAPRIFATLKAIESVMMAAPEALMRKKAFAALKKVISMVPSSQRFDILQALVNNSMSPSLTAILLDIVREEVSRESCQANNDRVESDGFQDHGESPPWTSHVLELLELILRPPQGGPPCLPDHCEQVISALNLLRFILIIDSRGPRSGKLFQKETLHKVHSEWLIPLRPIVTGIQSENEKDDSEIANQIVCSVNPVQLVLYRCIELVEEKMKSF

SEQ ID NO: 86573 - protein, 137 aa, Setaria italica
  misc_feature (28)..(28): Xaa can be any naturally occurring amino acid
  Transcript Sequence Number=SeqID_20599
  Gene Ontology: Mol. function=nucleotide binding; Cellular component =intrinsic to membrane; Biological process=defense response
  Homolog annotation: Hit_ID=Q9SED7; Match level="QueryCoverage=100%, HitCoverage=12%, E-value=4e-14, Identity=36%"; Hit description=Vrga1
ELTREILQSIGGVDDTPYHEIPNIAKNXEKLGEVVASKKFFLVLDDVWNDEGKTELENRSVWNKVLAPISSAAIGSKILVTTRMKLVAEVLNASYVVTLDGLKIVDCLLLLKETALGSETMEIPQDLLEFGRAIAAK

SEQ ID NO: 86574 - protein, 105 aa, Setaria italica
  Transcript Sequence Number=SeqID_20600
STEECNQGRKKLCALSRRLSLKSKQYGLDSACDKEYKPPNCSLSDKMPNELPLSAPPAPIPKGEAVARNELPLLAPPAPMTKGEAVAPNELLLSAPTVLKSSKPK

SEQ ID NO: 86575 - protein, 63 aa, Setaria italica
  Transcript Sequence Number=SeqID_20601
  Homolog annotation: Hit_ID=Q94LQ9; Match level="QueryCoverage=88%, HitCoverage=2%, E-value=1e-20, Identity=80%"; Hit description =Putative transcription regulatory protein
MIPFNPAVAAEVRSLIQGADESTFDPIYRELCQLADCSPDGCVLLLQVCVDEVLLNVGGANEP

SEQ ID NO: 86576 - protein, 80 aa, Setaria italica
  Transcript Sequence Number=SeqID_20602
  Subcellular localization annotation: CTP_CleavageSite=22; ConfidenceScore=5.12e-01
SCNASTTATATTNSQTITLPSSCSEGEMNSSRYSWINSTTINPKTQEQDYVFATAGLLWAEEMKKQSRELARTQEQKQGN

SEQ ID NO: 86577 - protein, 75 aa, Setaria italica
  Transcript Sequence Number=SeqID_20603
  Subcellular localization annotation: CTP_CleavageSite=48; ConfidenceScore=5.31e-01
VKLIPSHKFPKPYKHLSTMTNSKGRRHAANGTTNSQLQTANLVKNIKLCQLKSNSSIHLMHYPTMIKSKQDNHKK

SEQ ID NO: 86578 - protein, 82 aa, Setaria italica
  Transcript Sequence Number=SeqID_20604
QVNIISNKVQIFGIESSPTPLEGKVTGGGNTYIAVAGGRAPTATVPMSTDVPRGKVTGGGRGGSRGGGAAAPRELDFASKIL

SEQ ID NO: 86579 - protein, 67 aa, Setaria italica
  Transcript Sequence Number=SeqID_20605
  Gene Ontology: Mol. function=hydrolase activity, acting on ester bonds; Biological process=lipid metabolic process
  Homolog annotation: Hit_ID=B6T560; Match level="QueryCoverage=83%, HitCoverage=15%, E-value=3e-09, Identity=57%"; Hit description=GSDL -motif lipase
  Subcellular localization annotation: CTP_CleavageSite=38; ConfidenceScore=5.13e-01
MCAGAHRTVAAGARSPATAMYVFGSSILDVGNNNYLVRGSVATSNRRYNGIDFPSSIPTGRFSNGYN

SEQ ID NO: 86580 - protein, 263 aa, Setaria italica
  Transcript Sequence Number=SeqID_20606
  Gene Ontology: Mol. function=hydrolase activity, acting on ester bonds; Biological process=lipid metabolic process
  Homolog annotation: Hit_ID=B6T560; Match level="QueryCoverage=80%, HitCoverage=55%, E-value=2e-34, Identity=42%"; Hit description=GSDL -motif lipase
  Pfam annotation: Domain name=Lipase_GDSL; Domain location=61-258; Score=9.0; E_value=0.0015; Accession=PF00657.14; Description=GDSL -like LipaseAcylhydrolase
  Subcellular localization annotation: CTP_CleavageSite=59; ConfidenceScore=5.14e-01
MGGLLLRLVICVQVLIGTVAVGARPPATAMYVFPPPVTFPSRGVGAHRTVAAGARSPATAMYVFGSSILDVGNNNYLPGASVARANRRYNGIDFPSSIPTGRFSNGYNIADYVAKSMGFASSPPAYLSLAPSSGPLVQNAVANGISYASGGAGILDSTNAGNTIRLSKQVQYFGTTKAKMVAALGPNVANALLSRSIFLIGIGNNDMYVFESAERAQNRSAVEQRRETAVLYGNLISNYTATMRELYSMGARKFAIVNIGLLG

SEQ ID NO: 86581 - protein, 96 aa, Setaria italica
  Transcript Sequence Number=SeqID_20607
RGTRQKSRQAVASMEAVAGSIRFSLFNRLISHQTVFLSQLAKQIMGGLLLRLVICVQVLIGTVAVGARPPATAMYVFPPPVTFPSRGVGELSIPKI

SEQ ID NO: 86582 - protein, 164 aa, Setaria italica
  Transcript Sequence Number=SeqID_20608
  Gene Ontology: Mol. function=nucleic acid binding; Cellular component= spliceosome; Biological process=protein folding
  Homolog annotation: Hit_ID=B4FJP1; Match level="QueryCoverage=89%, HitCoverage=88%, E-value=3e-57, Identity=76%"; Hit description =Peptidyl-prolyl cis-trans isomerase E
  Pfam annotation: Domain name=RRM_1; Domain location=10-80; Score =85.5; E_value=1.9e-22; Accession=PF00076.14; Description=RNA recognition motif. (a.k.a. RRM, RBD, o
MNQPVQKNTLYVGGLAEEVDEKILHAAFVPFGEVKDVKTPLDQSTQKHRSFGFVTFLEREDAAAAMDNMDGAELFGRVLTVNYAFPERIKGGEQGWAAQPIWADADTWFERQQQEEEMQRLQAEQRAAMQVAEKLHREKLAAERDGEKEEEADPMAAAEAQALK

SEQ ID NO: 86583 - protein, 152 aa, Setaria italica
  Transcript Sequence Number=SeqID_20609
  Gene Ontology: Mol. function=succinate dehydrogenase activity; Cellular component=membrane
  Homolog annotation: Hit_ID=B6SIX4; Match level="QueryCoverage=71%, HitCoverage=93%, E-value=6e-41, Identity=78%"; Hit description =Succinate dehydrogenase subunit 3
RFLPPWASSSSPAPDCRGVRSIQAPWVAELLEEKYYSKTKFAPFRDAPFALRGALGSSNTNLEQTRGYTSSPLGALRPKVPPSGRRPLHTSGPLSAPVANRPLSPHLPLKKPQLSATFSISHRIFGVALGVAIISVPLVTKVLVYSIVLVVL

SEQ ID NO: 86584 - protein, 119 aa, Setaria italica
  Transcript Sequence Number=SeqID_20610
  Gene Ontology: Mol. function=electron carrier activity
  Homolog annotation: Hit_ID=Q9SSK4; Match level="QueryCoverage=98%, HitCoverage=47%, E-value=5e-50, Identity=76%"; Hit description =F15H11.13 protein
VGETIANVVTSLPFIVLGLQTPRKNLNTALYANSLIGVGIASSLYHTSRGEIRKYMRWADYTMIATSTLCLSRALRDENPKFLMAASTLLLPFQPLMVSAIHTGIMEVSFAKRASIEPE

SEQ ID NO: 86585 - protein, 118 aa, Setaria italica
  Transcript Sequence Number=SeqID_20611
  Subcellular localization annotation: CTP_CleavageSite=48; ConfidenceScore=5.25e-01
MTPDPGSGPSLVVAFRIAPLRSPPHRPPPRVPAPIDRFGGVPSNDGVQAAQARFVGHRGQSLQGIVIKILAVMMDEFVRRHGEENYSRSPLTFQSFAACSRFEGFFGFFASLLDLIRP

SEQ ID NO: 86586 - protein, 450 aa, Setaria italica
  Transcript Sequence Number=SeqID_20612
  Gene Ontology: Mol. function=nucleic acid binding
  Homolog annotation: Hit_ID=B6UAL3; Match level="QueryCoverage=99%, HitCoverage=100%, E-value=0.0, Identity=74%"; Hit description=Zinc finger C-x8-C-x5-C-x3-H type family protein
  Pfam annotation: Domain name=zf-CCCH; Domain location=400-426; Score =22.6; E_value=0.0016; Accession=PF00642.16; Description=Zinc finger C-x8-C-x5-C-x3-H type (and similar)
MMGSRRPRRVSWATGANLCKVRLFLSEDSPSQAGLRPQDNLQAKGSWLMHAAGPSSDDSLPPGFESLQPTNDHKIDISQIPLIRWRCPPQILYNPDWLVVAGEESVEAALQNERIFGALEAIYPRSSNIPPNPFVSPDVKDSYFDDSRTQLVPLIPVEEDDVSDQLEEPPAGPPNSYHQSDKYDSAIVRVPQGSDAPFTTAQQHPNGSINTASAAGISTDPDAVAAAIMQSNQMGNMIDQDLLIKILSDPAQLERLMKEYGTLKHEQPTNSPVPAPMLRGPPPQMTASIPVPFPDHVTTFHNINPTLPPPPPVMNRLPPAIPSVGMNPPASSSQAVNFSNIPGRGINYYKTLIHQHGGERQEPLQQHGMQFAMHHHSVPSQTSTIDVVSNGSMPGREKQRPTKPCAYFNSARGCRNGANCTFLHDVSAARKEQPKGSKRIKLDSRIAGRY

SEQ ID NO: 86587 - protein, 80 aa, Setaria italica
  Transcript Sequence Number=SeqID_20613
LRCCVYVSNWLHNIYQFSKHYSVVGGPHLDLPLRLALDRLLGCIFCQMIKLLSFSAKFVELGWSGAYVCPVDIYASNVKA

SEQ ID NO: 86588 - protein, 92 aa, Setaria italica
  Transcript Sequence Number=SeqID_20614
  Subcellular localization annotation: CTP_CleavageSite=71; ConfidenceScore=5.43e-01
LLLPFSLLPRSLRFAPQPHVLPRLPVASTPLPPPPPPLQPNPPTSAPQLGPRPPPARLKIRFWGALPPQIGGDAPSSFGRPVSEPPPPTPPP

SEQ ID NO: 86589 - protein, 86 aa, Setaria italica
  Transcript Sequence Number=SeqID_20615
MGRVAADQITLSNELMTQERREKEAKEKAAATSENPEAPESKKENSESKENSESKKKNSDGKVDSSGAKAEGEKEATIDLRPLTME

SEQ ID NO: 86590 - protein, 807 aa, Setaria italica
  Transcript Sequence Number=SeqID_20616
  Gene Ontology: Mol. function=nucleoside-triphosphatase activity; Biological process=cell division
  Homolog annotation: Hit_ID=B9RIQ4; Match level="QueryCoverage=99%, HitCoverage=94%, E-value=0.0, Identity=62%"; Hit description=ATP binding protein, putative
  Pfam annotation: Domain name=AAA; Domain location=498-683; Score =270.5; E_value=4e-78; Accession=PF00004.21; Description=ATPase family associated with various cellular activities (AAA)
  Pfam annotation: Domain name=AAA_3; Domain location=498-624; Score= -9.5; E_value=0.0041; Accession=PF07726.3; Description=ATPase family associated with various
  Pfam annotation: Domain name=AAA_5; Domain location=498-630; Score= -3.0; E_value=0.0017; Accession=PF07728.6; Description=ATPase family associated with various
  Pfam annotation: Domain name=NACHT; Domain location=497-647; Score= -40.1; E_value=0.1; Accession=PF05729.4; Description=NACHT domain
  Pfam module annotation: Pfam domain module=AAA::AAA_3::AAA_5::NACHT; Domain location=498-683::498-624::498-630::497-647
GAAEVEAELRRLVLDGRESQVTFDEFHNFHYYLSDQTKEVLISAAFVHLRKAELSKHIRNLSAASRAILLSGPTEPYLQSLAKALSQHFKARLLILDANDFSLRIQSKYGGSNKVMVRNQSVPETTFGKMSGLIGSFMTYPKKDEPRESLHRQTSNTDLRARGSDGSTSTPSLRKNASVSSDMSDLASQCSGHSVRRTSSWCFDEKVLIQSLYKVLISVSENDPIILYIRDVDHFLWKSQRTYTMFQKMMAKLSGQVLILGSRLLNFDADNRDVDERVSTLFPYHVDIKPPEEETHLDCWKNQMEEDTKKFQMQDNRNHIIEVLSANDLDCDDLSSICEADTMVLSNYIEEIIVSAVSYHLINNKDPEYKNGKLILSSKSLSHGLSIFQGGHGGKDTLKLEETKDGVKGALGSKKTEADKSTPVPVGDGPLPPPKPEIPDNEFEKRIRPEVIPASEIGVTFDDIGALADIKESLQELVMLPLRRPDLFKGGLLKPCRGILLFGPPGTGKTMLAKAIANDAGASFINVSMSTITSKWFGEDEKNVRALFSLAAKVAPTIIFVDEVDSMLGQRARSGEHEAMRKIKNEFMSHWDGLLSKSGERVLVLAATNRPFDLDEAIIRRFERRIMVGLPTQESRELILRTLLSKEKVDENIDFKELATMTEGYSGSDLKNLCVTAAYRPVRELLKKEREKELERREKEAKEKAAATSENPEAPESKKENSESKENSESKKKNSDGKVDSSGAKAEGEKEATIDLRPLTMEDLKEAKNQVAASFAAEGAVMNELKQWNDLYGEGGSRKKQQLTYFL

SEQ ID NO: 86591 - protein, 371 aa, Setaria italica
  Transcript Sequence Number=SeqID_20617
  Gene Ontology: Mol. function=ribose phosphate diphosphokinase activity; Cellular component=chloroplast; Biological process =ribonucleoside monophosphate biosynthetic process
  Homolog annotation: Hit_ID=B7ZZ73; Match level="QueryCoverage=97%, HitCoverage=90%, E-value=1e-176, Identity=85%"; Hit description =Ribose-phosphate pyrophosphokinase
  Pfam annotation: Domain name=Pribosyltran; Domain location=201-308; Score=114.3; E_value=4.1e-31; Accession=PF00156.19; Description =Phosphoribosyl transferase domain
LLCFIFFPSAQRCVLGSEQLRAVDGGKRTGGVEQRGAVWTPKAPAQEARLAALPRDARDSRMKIFSGTANRSLSQEIAAYLGVDLGKILIKGFADGEIYVQLQESVRGCDVFLVQPTCSPVNENLMELFIMIDACRRASARSITVVIPYFGYARADRKAQGREAITAKLAANLLTEAGSDRVIVCDIHSTQALGYFDIPVDHIYGQPVILDYLASKTISEDLVVVSPDVGGVVRARAFAKKLFDAPLAIVDKRRQGHNMSEVMHLIGDVKGKVAIMVDDMIDTAGTITSAAALLKQEGAEAVYACCTHAVFSPPAIERLSGGIFEEVIVTNSILLPEDKCFPQLTVLSMANLVAETIWHVHRDGSVSSIFQ

SEQ ID NO: 86592 - protein, 68 aa, Setaria italica
  Transcript Sequence Number=SeqID_20618
SDIRNINKFNKFVEVNGFKLNSEGGILKVSPDGLLQQSSTVADSSLFTFADGKTELRHATGVGKAHRG

SEQ ID NO: 86593 - protein, 115 aa, Setaria italica
  misc_feature (85)..(85): Xaa can be any naturally occurring amino acid
  Transcript Sequence Number=SeqID_20619
  Homolog annotation: Hit_ID=A8T8Q5; Match level="QueryCoverage=87%, HitCoverage=38%, E-value=3e-15, Identity=42%"; Hit description =Bifunctional N-succinyldiaminopimelate- aminotransferase/acetylornith ine transaminase protein
FQVLSRESEYAAWTLVNGYALNHATISTHRLESDIRNINKFNKFVEVNGFKLNSEGGILKVSPDGLLQQSSTVADSSLFTFADGXTESIPRSYIEFAEAPMVFFHLFILQIFELW

SEQ ID NO: 86594 - protein, 334 aa, Setaria italica
  misc_feature (12)..(12): Xaa can be any naturally occurring amino acid
  Transcript Sequence Number=SeqID_20620
  Homolog annotation: Hit_ID=Q5QZ05; Match level="QueryCoverage=85%, HitCoverage=97%, E-value=4e-36, Identity=36%"; Hit description =Uncharacterized conserved protein
AAPLRVPGLRAXPGYRGIAMAAAAHAPVPADPLPKGADSFFRTVISNMEKVYLSRNPTAKTILELVRSYDGDHICYDHLAFRTFGVDGYGINSLAEFFTDFGYLPREELRFPAKKLRAIWFSPPTNDGTGTGIYGPLPRIFISELLVDELSAQSQEIIHKYIRTSGKGNKHAALASISGELTWETPIYSDFQVLSRESEYAAWTLVNGYALNHATISTHRLESDIRNINKFNKFVEVNGFKLNSEGGILKVSPDGLLQQSSTVADSSLFTFADGKTESIPRSYIEFAERLRLPQFKDLQDEEVKEHHRRDGFEVGNADKIFESTSKDQLTRRSA

SEQ ID NO: 86595 - protein, 52 aa, Setaria italica
  Transcript Sequence Number=SeqID_20621
  Gene Ontology: Mol. function=transcription regulator activity; Cellular component=nucleus; Biological process=regulation of transcription
  Homolog annotation: Hit_ID=B6TB86; Match level="QueryCoverage=100%, HitCoverage=21%, E-value=3e-13, Identity=83%"; Hit description =Amelogenin like protein
MVPRDRAHGAAAAPTEKLVQGPILNKCEKKAPKKVHKSEREKRKRDKQNDLF

SEQ ID NO: 86596 - protein, 221 aa, Setaria italica
  Transcript Sequence Number=SeqID_20622
  Gene Ontology: Mol. function=transcription regulator activity; Cellular component=nucleus; Biological process=regulation of transcription
  Homolog annotation: Hit_ID=B6TB86; Match level="QueryCoverage=85%, HitCoverage=72%, E-value=4e-80, Identity=80%"; Hit description =Amelogenin like protein
  Pfam annotation: Domain name=HLH; Domain location=33-83; Score=13.9; E_value=0.0058; Accession=PF00010.18; Description=Helix-loop-helix DNA-binding domain
MVPRDRAHGAAAAPTEKLVQGPILNKCEKKAPKKVHKSEREKRKRDKQNDLFGELGNMLEPDRQNNGKACILSDTTRILKDLLSQVESLRQENGALKNESRYVALERNELLDENNMIRTEISELQNELRMHMEGNPIWSHDVTRSNRTVPHPATTVFALQHLSHPAVTTTMAPPLQQLAVLDQSYTAPAVSTTMAPPLQQLAVLDQSYTAPRRELQGRAVA

SEQ ID NO: 86597 - protein, 142 aa, Setaria italica
  Transcript Sequence Number=SeqID_20623
RTPLRTREPPMRVDGPALAALTTTPTPPDWETGGMARKPRTAEARQRLTRQGREAQRGLAAAAAGSREHTHGCPSRPEAIRFRGGNWKRRSPMQIFVHTMFIWFVPLLQIFDTSGSANPCAGLKNGFIQQDLDSENISFTKH

SEQ ID NO: 86598 - protein, 166 aa, Setaria italica
  Transcript Sequence Number=SeqID_20624
FFLEIKIYCCHYILCGIGLPTMKGMLNILRNRCPYMCSINSFNTILKVRISRLTWGRNCNSLASLARPPPPPWPAARPQIEPPHPTSKSNPTAVSVSFRGPIMSFPSENAGGSRSCVNSRHAPPPPLPCSPVQQGARVEYPSTGRSRLALLIGPPSRGRTSWQRLN

SEQ ID NO: 86599 - protein, 369 aa, Setaria italica
  Transcript Sequence Number=SeqID_20625
  Gene Ontology: Mol. function=transferase activity, transferring glycosyl groups
  Homolog annotation: Hit_ID=Q10QT2; Match level="QueryCoverage=99%, HitCoverage=59%, E-value=0.0, Identity=88%"; Hit description =Glycogenin glucosyltransferase, putative, expressed
  Pfam annotation: Domain name=Glyco_transf_8; Domain location=82-293; Score=182.6; E_value=1.1e-51; Accession=PF01501.12; Description =Glycosyl transferase family 8
VLRSECEPMMDLFRCDEEVGREGDWWMYRVDVQRLEEKLRLPVGSCNLALPLWGAGGINEVFNVSAELPSPAGGRPRREAYATVLHSSDTYLCGAIVLAQSIRRAGSTRDLILLHDHTVSKPALRALSAAGWTPRKIKRIRNPRAARGTYNEYNYSKFRLWQLSDYDRVVFVDADILVLRNLDALFRFPQLAAVGNDGSLFNSGVMVIEPSSCTFDALIRKRRTVRSYNGGDQGFLNEVFVWWHRLPRRVNYLKNFWANTTGERALKERLFRADPAEVWSIHYLGMKPWTCYRDYDCNWNVEDQRVYASDEAHRRWWQVYDRMGEAMRGPCRLSERRKVEIAWDRHVAEEVGFADQHWKINITDPRKWD

SEQ ID NO: 86600 - protein, 124 aa, Setaria italica
  misc_feature (72)..(72): Xaa can be any naturally occurring amino acid
  Transcript Sequence Number=SeqID_20626
  Gene Ontology: Mol. function=nucleic acid binding; Cellular component= nucleus; Biological process=response to stress
  Homolog annotation: Hit_ID=O04432; Match level="QueryCoverage=94%, HitCoverage=58%, E-value=3e-30, Identity=59%"; Hit description =Glycine-rich protein
  Pfam annotation: Domain name=RRM_1; Domain location=10-118; Score =43.4; E_value=9.1e-10; Accession=PF00076.14; Description=RNA recognition motif. (a.k.a. RRM, RBD, o
MAAADVEYRCFVGGLAWATDSESLQLAFASYGDVVDSKVHLRRVSPDLLCFGLDLRFSESNQTPTLMVLLFXLCLQVITDRETGRSRGFGFVTFSTEQSMLEAIENMNGKELDGRNIHRSNLGP

SEQ ID NO: 86601 - protein, 431 aa, Setaria italica
  misc_feature (360)..(360): Xaa can be any naturally occurring amino acid
  misc_feature (420)..(420): Xaa can be any naturally occurring amino acid
  Transcript Sequence Number=SeqID_20627
  Gene Ontology: Mol. function=protein binding
  Homolog annotation: Hit_ID=Q9AV62; Match level="QueryCoverage=88%, HitCoverage=87%, E-value=2e-95, Identity=52%"; Hit description =Putative disease resistance protein, 5'-partial (Fragment)
  Pfam annotation: Domain name=LRR_1; Domain location=114-136; Score =13.0; E_value=0.98; Accession=PF00560.25; Description=Leucine Rich Repeat
  Pfam annotation: Domain name=LRR_1; Domain location=139-161; Score =16.4; E_value=0.12; Accession=PF00560.25; Description=Leucine Rich Repeat
  Pfam annotation: Domain name=LRR_1; Domain location=163-185; Score =18.7; E_value=0.024; Accession=PF00560.25; Description=Leucine Rich Repeat
  Pfam annotation: Domain name=LRR_1; Domain location=225-247; Score =5.5; E_value=27; Accession=PF00560.25; Description=Leucine Rich Repeat
  Pfam annotation: Domain name=LRR_1; Domain location=249-271; Score =14.2; E_value=0.54; Accession=PF00560.25; Description=Leucine Rich Repeat
  Pfam annotation: Domain name=LRR_1; Domain location=273-295; Score =13.0; E_value=0.97; Accession=PF00560.25; Description=Leucine Rich Repeat
  Pfam annotation: Domain name=LRR_1; Domain location=297-318; Score =12.7; E_value=1.1; Accession=PF00560.25; Description=Leucine Rich Repeat
  Pfam annotation: Domain name=LRR_1; Domain location=41-63; Score =15.7; E_value=0.2; Accession=PF00560.25; Description=Leucine Rich Repeat
  Pfam annotation: Domain name=LRR_1; Domain location=65-88; Score=9.7; E_value=4.2; Accession=PF00560.25; Description=Leucine Rich Repeat
  Pfam annotation: Domain name=LRR_1; Domain location=90-112; Score =9.2; E_value=5.2; Accession=PF00560.25; Description=Leucine Rich Repeat
  Pfam module annotation: Pfam domain module=LRR_1::LRR_1::LRR_1::LRR _1::LRR_1::LRR_1::LRR_1::LRR_1::LRR_1::LRR_1; Domain location=114 -136::139-161::163-185::225-247::249-271::273-295::297-318::41-63::65- 88::90-112
RRLFYDEVAPARRLYDERRLNVLNSNTSSNRSGAAFCRLLSLQILDLSNNQLTGELPDCWWEMQALQFMDLSNNSFSGQIPEAPPTHNCYLESLHLAGNGFTGVFPSVVQGCESLATLDIGNNQFSGTIPPWIGGEDRALKILRLRSNNFTGEIPPDLSKLPQLQLLDLANNGLTGPIPREFGKLTAMRNPIINSTGSLDGSTYQDRIDIIWKGQELIFQRILQLMTGIDLSGNSLSQCIPEEITNLEGLRFLNLSRNNLSCGIPKNIGSLNVLESLDLSLNELSGVIPVGLSNMVSLNTLNLSNNHLSGQIPTGNQLQTLNDPSIYSNNPGLCGPPLDIPCTNASPALDKKDGKDCDQXLYYCVIAGIVFGFWLWCGMILSIPKWRHSVFFFVDRMQYKVMLKLQPIDQYLSKEKSDPXSVDVLSTNESS

SEQ ID NO: 86602 - protein, 98 aa, Setaria italica
  Transcript Sequence Number=SeqID_20628
EDNRKQGTDDITIIIVHIRDSENSGPAGSDKVDYGSIGTSITVHTIQSEMPVFVPSEASQLNRCVATEMQSSSSGSPTERSLSCVAPSPTHPLLIHRR

SEQ ID NO: 86603 - protein, 98 aa, Setaria italica
  Transcript Sequence Number=SeqID_20629
YTVEYQMLPSLCKVSKLHQNQYNLGIKWTVVLSWNGLCNEVSLQPPAKSRRVSELNGKRRPCHTPLPSSGATNRAMDVMLVSSKSRCCSCFLRAPAAN

SEQ ID NO: 86604 - protein, 86 aa, Setaria italica
  Transcript Sequence Number=SeqID_20630
  Subcellular localization annotation: CTP_CleavageSite=77; ConfidenceScore=5.74e-01
PVSPRACAAAAAAAIAQFAIPFHSGGRIRRALFRVGSVLPRLGPSNSRGRRRRARRPGGENLGRLGLARRAPVRGVRAFVGYSCLL

SEQ ID NO: 86605 - protein, 50 aa, Setaria italica
  Transcript Sequence Number=SeqID_20631
  Gene Ontology: Mol. function=metal ion binding
  Homolog annotation: Hit_ID=Q7XQ90; Match level="QueryCoverage=100%, HitCoverage=1%, E-value=1e-19, Identity=94%"; Hit description =OSJNBa0018M05.18 protein
MDPGGGGAMLLEDFGQRVDLTRRIREVLANYPEGTTALRELIQNADDAGA

SEQ ID NO: 86606 - protein, 152 aa, Setaria italica
  Transcript Sequence Number=SeqID_20632
  Subcellular localization annotation: CTP_CleavageSite=24; ConfidenceScore=5.07e-01
QQMAGYTQSQMPGTVWMVPSSNAQAAAAAAGGGGGGGESIWTFPQGASGGGAATLYRGVPSGLHLMNFPAPMALLPGGQQLGLGQAGGNNDNGGGGGEGHMGILAALNAYRVQAASDAAAAAQNGAEGGSSQHHQQHGGGERQESMSPSDDS

SEQ ID NO: 86607 - protein, 223 aa, Setaria italica
  misc_feature (37)..(37): Xaa can be any naturally occurring amino acid
  misc_feature (108)..(108): Xaa can be any naturally occurring amino acid
  misc_feature (122)..(122): Xaa can be any naturally occurring amino acid
  misc_feature (148)..(148): Xaa can be any naturally occurring amino acid
  Transcript Sequence Number=SeqID_20633
  Gene Ontology: Mol. function=sodium:dicarboxylate symporter activity; Cellular component=membrane
  Homolog annotation: Hit_ID=UPI0001A7B14A; Match level="QueryCoverage =94%, HitCoverage=25%, E-value=1e-53, Identity=50%"; Hit description =aminopeptidase
CTHALDNSAERDNDRAEFMKLCKRVEYTIRAWYLLQXFDDLMQLYALFDPVNGEKSLEQQGMTSNELDTLELNFLTYIFQIMEKSNFKLLSDEEYEVAQSGQYLLNLXPIKVDESRVDSKLXTRYFKDHPHDNLPAFADKYIVFRRGXIGIDRTTDYFFMEKLDVIISRAWRSLLRVTRIDRLFSKRQVPSNKDKKKSDEINEDAEEPDLYVERVRLEKMELS

SEQ ID NO: 86608 - protein, 216 aa, Setaria italica
  Transcript Sequence Number=SeqID_20634
  Gene Ontology: Mol. function=sodium:dicarboxylate symporter activity; Cellular component=plasma membrane
  Homolog annotation: Hit_ID=UPI0001A7B14A; Match level="QueryCoverage =91%, HitCoverage=24%, E-value=2e-54, Identity=51%"; Hit description =aminopeptidase
CTHALDNSAERDNDRAEFMKLCKRVEYTIRAWYLLQFDDLMQLYALFDPVNGEKSLEQQGMTSNELDTLELNFLTYIFQIMEKSNFKLLSDEEYEVAQSGQYLLNLPIKVDESRVDSKLLTRYFKDHPHDNLPAFADKYIVFRRGIGIDRTTDYFFMEKLDVIISRAWRSLLRVTRIDRLFSKRQVPSNKDKKKSDEINEDAEEPDLYVEALVYVT

SEQ ID NO: 86609 - protein, 271 aa, Setaria italica
  Transcript Sequence Number=SeqID_20635
  Gene Ontology: Mol. function=sodium:dicarboxylate symporter activity; Cellular component=plasma membrane
  Homolog annotation: Hit_ID=UPI0001A7B14A; Match level="QueryCoverage =94%, HitCoverage=31%, E-value=4e-87, Identity=58%"; Hit description =aminopeptidase
MWVVLKVPCQKLAVYPHDNLPAFADKYIVFRRGIGIDRTTDYFFMEKLDVIISRAWRSLLRVTRIDRLFSKRQVPSNKDKKKSDEINEDAEEPDLYVERVRLEKMELSIKNLLRKMTIQEPAFERMIVVYRKASTESKPDRGIYVKHFKHIPMADMELVLPEKKNPSLTPMDWVTFLISAVIGLVTLISSLEMPKADIWFVTAILSGLIGYCAKIYFTFQANMVTYQNLITKSMYDKQLDSGKGTLLHLCDDVIQQEVKEVIVSYYILMEE

SEQ ID NO: 86610 - protein, 69 aa, Setaria italica
  Transcript Sequence Number=SeqID_20636
RKNERSIYTEIAHSQLPQYQIWYERSFAFLCCQHLMLTQICLFHKTRILQPRFNGFTTFFLFFSATSSL

SEQ ID NO: 86611 - protein, 166 aa, Setaria italica
  misc_feature (22)..(22): Xaa can be any naturally occurring amino acid
  Transcript Sequence Number=SeqID_20637
  Gene Ontology: Mol. function=hydrolase activity, acting on acid anhydrides, in phosphorus-containing anhydrides
  Homolog annotation: Hit_ID=B9S2H8; Match level="QueryCoverage=98%, HitCoverage=15%, E-value=3e-70, Identity=73%"; Hit description =Helicase, putative
  Pfam annotation: Domain name=DEAD; Domain location=2-106; Score= -12.3; E_value=0.00032; Accession=PF00270.21; Description=DEADDEAH box helicase
RRLFYTTPLKALSNQKFRDFRXDSAINKDAQILIMTTEILRNMLYQSVGGTASEGRLFQVDVIVLDEVHYLSDISRGTVWEETVIYCPKEVQLICLSATVANPDELAGWISQIHGKTELVTSNKRPVPLTWHFSKKYALQPLLDGKGKKMNRKLRMSNFQNLASPK

SEQ ID NO: 86612 - protein, 60 aa, Setaria italica
  Transcript Sequence Number=SeqID_20638
MSLAKKEEVCSHRLVPRLGEPAVGVPIKKRPVLLSDRSVASSMPLSIKPPSPVKDMPVSA

SEQ ID NO: 86613 - protein, 129 aa, Setaria italica
  Transcript Sequence Number=SeqID_20639
  Gene Ontology: Cellular component=membrane
  Homolog annotation: Hit_ID=Q5JJV4; Match level="QueryCoverage=91%, HitCoverage=64%, E-value=1e-13, Identity=40%"; Hit description=YGGT family protein-like
  Subcellular localization annotation: CTP_CleavageSite=31; ConfidenceScore=5.02e-01
MEASLLLAPKPSMPRTVYSIVSASRRCLVVAAGHNKELGTHSSERRCSDGQVPVTTRARGGLLGAVAAAATTMSSTLAVLPCHASSSAALAVLGELDPATAKTVAGVAGPALSAFGFLFILRIVMSWYP

SEQ ID NO: 86614 - protein, 150 aa, Setaria italica
  misc_feature (10)..(10): Xaa can be any naturally occurring amino acid
  Transcript Sequence Number=SeqID_20640
  Homolog annotation: Hit_ID=Q53PH2; Match level="QueryCoverage=41%, HitCoverage=15%, E-value=8e-11, Identity=57%"; Hit description =Transcription factor PCF3
  Pfam annotation: Domain name=TCP; Domain location=1-80; Score=25.1; E_ value=5.4e-08; Accession=PF03634.5; Description=TCP family transcription factor
RMPALCAARXLGHNFDGETVQWLLQQAEPAIVATTGTMPASALASAAPSHIPVAASCSSSPRLRRWRASAQRCGGSTSPSTTRPSSSDGPLPPPPAPAVLGFLMDLSRLCFGGRFLVLFGMFLGSRGLAGRRKQGFCRSSMFAVLKISLF

SEQ ID NO: 86615 - protein, 221 aa, Setaria italica
  Transcript Sequence Number=SeqID_20641
  Gene Ontology: Mol. function=ATP-dependent helicase activity; Cellular component=endoplasmic reticulum membrane; Biological process=positive regulation of growth rate
  Homolog annotation: Hit_ID=B4FQC7; Match level="QueryCoverage=95%, HitCoverage=95%, E-value=1e-107, Identity=90%"; Hit description=PAS2
  Pfam annotation: Domain name=PTPLA; Domain location=55-219; Score =248.8; E_value=1.3e-71; Accession=PF04387.6; Description=Protein tyrosine phosphatase-like protein, PTPLA
MAGVGSALRRLYLSVYNWVVFFGWAQVLYYAVLALRESGHEAVYAAVERPLQFAQTAAIMEILHGLVGLVRSPVSATLPQIGSRLFLTWGVLWSFPETQSHILVSTLVISWSITEIIRYSFFGMKEAFGSAPSWLLWLRYSTFMLLYPTGISSEVGLIYTALPYMQATEKYSFRMPNKWNFSYDYLYTSILALVIYIPGSPHMFGYMLSQRKKALSKAKTA

SEQ ID NO: 86616 - protein, 125 aa, Setaria italica
  Transcript Sequence Number=SeqID_20642
LRCLGVSKNTNFSIINSTGLARNRLNNAATQIFFLQCAYQSSSNDCRKREKKKGKRRISALSEAWGPFIATTLYYRSGSAEKSAAPRRRRRRGSWTASASSRSSYRRRRSPRTSTAPASASSRSP

SEQ ID NO: 86617 - protein, 48 aa, Setaria italica
  Transcript Sequence Number=SeqID_20643
FSRAGQEVQKLRTAHKNRIICRPVKVVYFSPCLKNVHQLIERQKQQVR

SEQ ID NO: 86618 - protein, 52 aa, Setaria italica
  Transcript Sequence Number=SeqID_20644
LENLISYELRIICDYENVIPYFMHFIKIKYLFNYLKRKALNKYPNFYYFSRV

SEQ ID NO: 86619 - protein, 81 aa, Setaria italica
  misc_feature (21)..(21): Xaa can be any naturally occurring amino acid
  Transcript Sequence Number=SeqID_20645
  Gene Ontology: Mol. function=calcium ion binding; Cellular component =endoplasmic reticulum
  Homolog annotation: Hit_ID=B6U193; Match level="QueryCoverage=91%, HitCoverage=13%, E-value=9e-34, Identity=90%"; Hit description=EH -domain-containing protein 1
MRVYGALMWSLGKVLNTPEVXSRVYIGSFNDKPVNESAVGPLGKELFEREQDDLLSDLKDIPKKACDRRINEFVNVLSSLV

SEQ ID NO: 86620 - protein, 86 aa, Setaria italica
  Transcript Sequence Number=SeqID_20646
YKRNIIRDASLDCFGSLGRPKTHLIELIRISKQGKQDKNELTNGSLLHVCVTTCFPSIIQTSPINIKFKLIIYFMQILACGACNRC

SEQ ID NO: 86621 - protein, 544 aa, Setaria italica
  Transcript Sequence Number=SeqID_20647
  Gene Ontology: Mol. function=calcium ion binding; Cellular component =recycling endosome membrane; Biological process=endosome transport
  Homolog annotation: Hit_ID=B6U193; Match level="QueryCoverage=100%, HitCoverage=100%, E-value=0.0, Identity=85%"; Hit description=EH -domain-containing protein 1
  Pfam annotation: Domain name=Dynamin_N; Domain location=199-359; Score=111.5; E_value=2.9e-30; Accession=PF00350.15; Description =Dynamin family
  Pfam annotation: Domain name=GTP_EFTU; Domain location=194-429; Score= -76.2; E_value=0.002; Accession=PF00009.19; Description=Elongation factor Tu GTP binding domain
  Pfam annotation: Domain name=MMR_HSR1; Domain location=197-360; Score= 29.8; E_value=1.8e-06; Accession=PF01926.15; Description=GTPase of unknown function
  Pfam annotation: Domain name=efhand; Domain location=18-46; Score =16.2; E_value=0.14; Accession=PF00036.24; Description=EF hand
  Pfam annotation: Domain name=efhand; Domain location=52-80; Score =19.6; E_value=0.013; Accession=PF00036.24; Description=EF hand
  Pfam module annotation: Pfam domain module=Dynamin_N::GTP_EFTU::MMR _HSR1::efhand::efhand; Domain location=199-359::194-429::197-360::18 -46::52-80
MEIGQYPASGCSKEHQKIYQEWFALADSDGDGRITGPDAIKFFGMSKLSRPDLKQVWAIADSRRQGYLGFPEFVAAMQLVSLAQAGNEITQDSLKRDDLSSLNPPVMEGLDALLAKSKHVVKRVDPEMDGFPQEQSPLTNKWFSSKSSKKIPLTAVTSVIDGLKKLYIEKLKPLEVTYKFNDFVSPLLTSSDFDAKPMVMLLGQYSTGKTTFIKHLLRTSYPGAHIGPEPTTDRFVVVMSGSDERTIPGNTIAVQADMPFSGLTTFGTAFLSKFECSQMRHPLLEHITFVDTPGVLSGEKQRTQRSYDFTGVTSWFAAKCDLILLLFDPHKLDISDEFKRVIGSLRGHDDKIRVVLNKADQVDTQQLMRVYGALMWSLGKVLNTPEVSRVYIGSFNDKPVNESAVGPLGKELFEREQDDLLSDLKDIPKKACDRRINEFVKRARAAKIHAYIIGHLKKEMPTMMGKAKAQQRLIDNLQDEFAKVQREYHLPAGDFPYVEHFKEVLSGYSFDKFEKVKPKMIQAVDDMLGYDIPELLKNFRNPYE

SEQ ID NO: 86622 - protein, 858 aa, Setaria italica
  misc_feature (26)..(26): Xaa can be any naturally occurring amino acid
  Transcript Sequence Number=SeqID_20648
  Homolog annotation: Hit_ID=B9ST76; Match level="QueryCoverage=62%, HitCoverage=41%, E-value=3e-63, Identity=34%"; Hit description=DNA binding protein, putative
  Subcellular localization annotation: CTP_CleavageSite=52; ConfidenceScore=5.16e-01
SGIQQNVSYSAVGNDRVAGSPANFSXINPSISSPQSMIGYNDTANGLLSVKREMQDAPLQDPKRIKPTGGIDDVQQQHIRPQPLGGQEMQWKNPQLHPQLDVKGMQYASSLSGQRYPPSMMNNMQDSGSSFYFNQQGLRYGAKQEQMDGSDRSKDALQSMAPENSVLDQQQPQAQHLSQQSTARNNVPNMAQWQNTRFAAEKDLKKEEIIQRRKIAPSSRAPSGPMVQSPVSSKSGEISSSSMGGQFGSAVTSAVIGAQKDKFAANSNAAVGYPSVASSPSDSMHRIQQPAVAPSKRKTNSVPKTQPPVSAVGSPASVSNMHAPLNASSPSIGTAPMGDQAILDKFAKIDNLSHRYQLHSKKNKVDKIPQRKPMINASQDVARCLSSCFHTEDYIDTIRPLCNSMISGTINTCKTRVINFVSSNRMYQGHARPFQVVFKEMPDETVRMQYGDLEDFDGPNSYDCVFILPTKYYADLLAEQLIPLMLQDGHSKAEDKVVRGTPPANLNTLSGILPDNLASDVKQEGGVSQQLNAAAHANVAPGPPMQQLPVNRMLSSANSNQVLAMQQGYMQGAAMPPRSQQLDQTLVQQPQQQQPQQQPLQQNAQAQMQQPSSLPLNQMQRPQLLPTSPLSQMLGPGSNLPMGSSQMGNNKATPTSLQLQMLQQQAQQQQPMSRKVMMGLGSAMNMGNMVNNVVGLGGLGNVMGMGNVRPISSPMGSMSGLGNSSNTMNMGMASNLAAAGLRPGMNPAAIAKMRLAAQQRAAGMYPQTGMVGMPGSSSPILPSSAGLSMMGHPLNRSNLNPLQRAMMSSMGPPKMPGGNFQLNAQQQMQLQQQLQQQQQLQQNPQQQQQLQQNPTAAD

SEQ ID NO: 86623 - protein, 84 aa, Setaria italica
  Transcript Sequence Number=SeqID_20649
  Gene Ontology: Mol. function=cinnamyl-alcohol dehydrogenase activity; Biological process=lignin biosynthetic process
  Homolog annotation: Hit_ID=O24562; Match level="QueryCoverage=63%, HitCoverage=14%, E-value=5e-21, Identity=90%"; Hit description =Cinnamyl alcohol dehydrogenase
RRAPAGGCRIGDGGAGGGGARRRRRRCGGERVVLGVIGEPLSFVSPMVMLGRKSITGSFIGSVEETAETLQFCVDKGLTSQIEV

SEQ ID NO: 86624 - protein, 77 aa, Setaria italica
  Transcript Sequence Number=SeqID_20650
MGSLASERTVVGWAARDATGHLSPYTYTVRYALPPPSAGHGRLHRSGLRLSLPARSPFFETCTRRRIQEDEQILLRL

SEQ ID NO: 86625 - protein, 367 aa, Setaria italica
  Transcript Sequence Number=SeqID_20651
  Gene Ontology: Mol. function=cinnamyl-alcohol dehydrogenase activity; Biological process=lignin biosynthetic process
  Homolog annotation: Hit_ID=O24562; Match level="QueryCoverage=100%, HitCoverage=100%, E-value=1e-154, Identity=75%"; Hit description =Cinnamyl alcohol dehydrogenase
  Pfam annotation: Domain name=ADH_N; Domain location=34-149; Score =128.2; E_value=2.6e-35; Accession=PF08240.4; Description=Alcohol dehydrogenase GroES-like doma
  Pfam annotation: Domain name=ADH_zinc_N; Domain location=180-315; Score=116.2; E_value=1e-31; Accession=PF00107.18; Description=Zinc -binding dehydrogenase
  Pfam module annotation: Pfam domain module=ADH_N::ADH_zinc_N; Domain location=34-149::180-315
MGSLASERTVVGWAARDATGHLSPYTYTVRKTGPEDVVVKVLYCGICHTDIHQAKNQLGASKYPMVPGHEVVGEVVEVGPEVSRHRVGDIVGVGVIVGCCRECRPCKANVEQYCNKRIWSYNDVYTDGRPTQGGFASTMIVDQKFVVKIPAGLAPEQAAPLLCAGVTVYSPLKHFGLTTPGLRGGILGLGGVGHMGVKVAKAMGHHVTVISSSSRKRAEAMDHLGADAYLVSSDGDAMAGAADSLDYIIDTVPVHHPLEPYLALLKMDGKHVLLGVIGEPLSFVSPMVMLGRKSITGSFIGSVEETAETLQFCVDKGLTSQIEVVKMGYVNEALERLERNDVRYRFVVDVAGSNIEEAVAAAEAPSN

SEQ ID NO: 86626 - protein, 106 aa, Setaria italica
  misc_feature (102)..(102): Xaa can be any naturally occurring amino acid
  Transcript Sequence Number=SeqID_20652
  Homolog annotation: Hit_ID=B6UEW5; Match level="QueryCoverage=100%, HitCoverage=46%, E-value=8e-51, Identity=86%"; Hit description=Cupin, RmlC-type
SGGAFACLSLHVGQIQPGGLRGNHRHHTCNETFVIWGAKTKFRLENADVKDKGYGEAIIAADEVGIVASTRSTAHALINMDVQPTFFIGCQDTLINPNSSNXDYKV

SEQ ID NO: 86627 - protein, 428 aa, Setaria italica
  Transcript Sequence Number=SeqID_20653
  Gene Ontology: Mol. function=sequence-specific DNA binding; Cellular component=nucleus; Biological process=regulation of transcription, DNA-dependent
  Homolog annotation: Hit_ID=O24569; Match level="QueryCoverage=92%, HitCoverage=56%, E-value=1e-151, Identity=72%"; Hit description =HOX1B protein
  Pfam annotation: Domain name=PHD; Domain location=209-264; Score =70.5; E_value=6.1e-18; Accession=PF00628.21; Description=PHD-finger
PIEGNGEVENGVSSCLRLVRRQYKVLLSPSKTVQNNMGIRKNYKRAANRGKKGSQGLTDKAYTLRSSDNNVRVLRGTSSSKTTSTEHVQTPVQPAAKRRKRGRPSNKSLSSNKSSTDEFSQIRKRVRYILNRMNYEQSLIEAYASEGWKNQSLDKIRPEKELERAKAEILRCKLRIREVFQNLDSLLSKGKIDESLFDSEGEISCEDIFCANCGSKDVTLGNDIILCDGACDRGFHQNCLNPPLRTEDIPEGDEGWLCPACDCKIDCIDVINDLQGSDLSIDDSWEKVFPEAATMANGSNQDDAFDLPSDDSDDNDFEPNMPEEHVASKEEGSSEEEEDEDGGSDSDDSNFLTSSDSDDSEPLTAKKKVDDLGLPSEDSEEDGNEPAGFHSDKDIQKKESNSDESDFTSDSDDFCNLLTEIIRVRCKI

SEQ ID NO: 86628 - protein, 284 aa, Setaria italica
  misc_feature (144)..(144): Xaa can be any naturally occurring amino acid
  misc_feature (148)..(148): Xaa can be any naturally occurring amino acid
  Transcript Sequence Number=SeqID_20654
  Homolog annotation: Hit_ID=Q7XKX4; Match level="QueryCoverage=17%, HitCoverage=14%, E-value=2e-14, Identity=72%"; Hit description =OSJNBa0035I04.1 protein
VAADVWHTWQYEEANSTKALCKYGPRVVVRCTKPIIKGDEVCVTYIDLPQTKCDARDLNKPEDAVAAPTVEDLDDDLQQAISEYSLGDDAKACCDMIESMLSENLMRDLQKGELRGRKHILHPLHHLCFTAYMTLASAYRFRAXKFKXGSLHGEKSDDLFRMAKAAAAYSLVLAGATNHLFLSECSFMMPLSHFLIGAGQSLFFLVQSMKGEMRQYLSAAKFTFPSCPESSAKHDLVKYNEFRSTCEGFGKQMLSLSFHCLGSIVLVPKVLPFVPLVKSLIFLL

SEQ ID NO: 86629 - protein, 228 aa, Setaria italica
  misc_feature (9)..(9): Xaa can be any naturally occurring amino acid
  Transcript Sequence Number=SeqID_20655
  Gene Ontology: Cellular component=intracellular; Biological process =signal transduction
  Homolog annotation: Hit_ID=UPI0001A7B0E1; Match level="QueryCoverage =51%, HitCoverage=13%, E-value=6e-15, Identity=37%"; Hit description =REN1 (ROP1 ENHANCER 1); Rho GTPase activator/ Rho GTPase binding / phosphoinositide binding
AMNRVIYEXFPEPNRQLLQRILKMMQIVGSHKAVNRMSASALAACMAPLLLRPLLLGECEIDSDFSMAGDSSFQLLQAAAAANHAQAIVIIMLEEYDQIFDDIEDGSYSSDAYTESDIDKEYSTDNDIHEDDGSYGSGEDDVEEDLNDNTEHSSGNRGERDSNIRVGNADDQVISGPACDENDKVVQPPVRTTRVEHGVPTEESNQISSLQKVDETSQMESNLHPNQN

SEQ ID NO: 86630 - protein, 184 aa, Setaria italica
  Transcript Sequence Number=SeqID_20656
  Homolog annotation: Hit_ID=B9SGL2; Match level="QueryCoverage=80%, HitCoverage=15%, E-value=1e-25, Identity=51%"; Hit description =Bromodomain-containing protein, putative
QDLPPEKLDNVVQIIKKRNLSLSQHDDEIEVDIDSFDVETLWELDRFVTNYKKSITKNKRKAELSAVRPDEAEAEAEPDQELEKIEHVRQDEADQDQIPAVQEPIPEPEAVDVEPQQPKENAADDNERYVGESSPGHLEDQKGETAGRSSSSGSSSSDSGSSSSDTDTDSSSADGSDAPQSPRT

SEQ ID NO: 86631 - protein, 49 aa, Setaria italica
  Transcript Sequence Number=SeqID_20657
  Gene Ontology: Cellular component=chloroplast
EKDLRSQLLKDGLKPQQGCLLARYNDPRTKSFLMRNEVLIRLNDFTLEL

SEQ ID NO: 86632 - protein, 400 aa, Setaria italica
  Transcript Sequence Number=SeqID_20658
  Gene Ontology: Cellular component=chloroplast
  Homolog annotation: Hit_ID=A8JF62; Match level="QueryCoverage=77%, HitCoverage=74%, E-value=6e-65, Identity=41%"; Hit description=SOUL heme-binding protein
  Pfam annotation: Domain name=DUF2358; Domain location=85-195; Score =21.5; E_value=4.8e-06; Accession=PF10184.1; Description =Uncharacterized conserved protein (DUF2358)
  Pfam annotation: Domain name=SOUL; Domain location=227-394; Score =107.0; E_value=6.6e-29; Accession=PF04832.4; Description=SOUL heme -binding protein
  Pfam module annotation: Pfam domain module=DUF2358::SOUL; Domain location=85-195::227-394
  Subcellular localization annotation: CTP_CleavageSite=35; ConfidenceScore=5.64e-01
TTTSLRSRLLILPPPPASPTAVSLRLRPHAAVLPSCSRRRNLHLTARAAPPGGAVAPASSSSAPAEEKEKDEKGGGVGLSATDAEMLCEFLRADLPHLFDDVGIDRSAYDDRVRFRDPITRHDTIDGYLFNIRLLKLLFRPDFYLHAVKQTGPYELTTRWTMVMKFMLLPWKPELIFTGLSIMGVNPQNLKFNSHVDLWDSIQNNEYFSFEGLRDVFKQLRIYKTPDIETPNYLILKRTAHYEVRSYEPFLIVEAKGDKLTGSSGFNNVTGYIFGKNASSEKIPMTTPVFTQASDDTLSDVSIQIVLPMNKDLNSLPAPNTEAVTLRKVEGGIVAVKKFSGRPKEEIVLQKEKDLRSQLLKDGLKPQQGCLLARYNDPRTKSFLMRNEVLIRLNDFTLEL

SEQ ID NO: 86633 - protein, 78 aa, Setaria italica
  Transcript Sequence Number=SeqID_20659
  Homolog annotation: Hit_ID=B6TCH2; Match level="QueryCoverage=74%, HitCoverage=14%, E-value=8e-18, Identity=70%"; Hit description=BSD domain containing protein
  Pfam annotation: Domain name=BSD; Domain location=17-77; Score=40.1; E_value=9e-09; Accession=PF03909.9; Description=BSD domain
TSKISVIAFLYLNIVSIAFLDFELSDAQYVHALSVEHLVLGLSDLKVQICSTDMTEACFWKIYFVLLHSKLSKQDAEL

SEQ ID NO: 86634 - protein, 321 aa, Setaria italica
  Transcript Sequence Number=SeqID_20660
  Homolog annotation: Hit_ID=B6TCH2; Match level="QueryCoverage=73%, HitCoverage=56%, E-value=2e-60, Identity=56%"; Hit description=BSD domain containing protein
  Pfam annotation: Domain name=BSD; Domain location=90-150; Score=45.9; E_value=1.6e-10; Accession=PF03909.9; Description=BSD domain
  Subcellular localization annotation: CTP_CleavageSite=16; ConfidenceScore=5.03e-01
YSSGYSGSRTLVGSIRSGRVRVRSGFSMLQNNLAVAEISKIASSLLPFGQGEANEGEPVPGVTEEVVVFVRHISTRPETWLDFPLFISERYADDFELSDAQYVHALSVEHLVLGLSDLKVQICSTDMTEACFWKIYFVLLHSKLSKQDAELLSTPQILEAREQLLQSLQAQNKRVSKFTGETSENTNVSTAPAEEKVIQPSSIQDKAGTSEISSFEEPTSDITPEIESEKFPISTTEVEIVDKSVIEEELAVKNEGKTPPVQSKLRFEIDEDEVDEWPDDDPTEEEVGAAGSRTSLGREEDVSFSDLEDDEDEDANKRHGQ

SEQ ID NO: 86635 - protein, 128 aa, Setaria italica
  Transcript Sequence Number=SeqID_20661
RLLALRSAASASPVGAPPPAPAGNLLPDPDLAGDEATCQRPRPPQRFDYYTNPAAAFSSSYSGGATNPTWSHKRKSPPACYYPRPAPPPPAYGNYGDNNPPHQHHLAPSPIHSPPLIPRGVPGSCPWR

SEQ ID NO: 86636 - protein, 153 aa, Setaria italica
  Transcript Sequence Number=SeqID_20662
  Gene Ontology: Mol. function=sequence-specific DNA binding; Cellular component=nucleus; Biological process=regulation of transcription, DNA-dependent
  Homolog annotation: Hit_ID=Q5QMQ5; Match level="QueryCoverage=66%, HitCoverage=43%, E-value=5e-25, Identity=54%"; Hit description =Homeobox transcription factor-like
  Pfam annotation: Domain name=Homeobox; Domain location=48-104; Score =76.2; E_value=1.2e-19; Accession=PF00046.21; Description=Homeobox domain
MESSGDGGDEGAGAAAVGMGSPGPASAPAAVGGGGSGAGASGSGGKPPVKRVMKTPYQLEVLERTYAEDSYPNETKRAELSVQLGLTDRQLQMWFCHRRLKDRKPPAKRQQRDEEVTVPVIAPPPVLPPPLPHSEIMVGTVGTYGEQLLPYSR

SEQ ID NO: 86637 - protein, 34 aa, Setaria italica
  Transcript Sequence Number=SeqID_20663
MSYCGLVSTSNIVDDDKVTVTSDSDLIWTISLRH

SEQ ID NO: 86638 - protein, 150 aa, Setaria italica
  Transcript Sequence Number=SeqID_20664
  Gene Ontology: Mol. function=nucleic acid binding
  Homolog annotation: Hit_ID=B6T7Z7; Match level="QueryCoverage=62%, HitCoverage=13%, E-value=1e-13, Identity=46%"; Hit description=RNA recognition motif family protein
MDAADGGASFTAAGEELLRGRVREKLRELMMSEPDTSLLDYVMVLLKNRRCKEKAIKELHVFLGDDSEAFVSWLWEHLSLHLHLYVQAQEQNQQLKDDEAPKEVSEAPKEVAGRPKSSDALPESKGQTHSVHTTESSTATRGRNKREWKG

SEQ ID NO: 86639 - protein, 175 aa, Setaria italica
  Transcript Sequence Number=SeqID_20665
  Gene Ontology: Cellular component=nucleus; Biological process =regulation of transcription, DNA-dependent
  Homolog annotation: Hit_ID=B6SWF9; Match level="QueryCoverage=99%, HitCoverage=28%, E-value=1e-74, Identity=87%"; Hit description =Chitin-inducible gibberellin-responsive protein 2
  Pfam annotation: Domain name=GRAS; Domain location=1-175; Score= -65.7; E_value=8.7e-09; Accession=PF03514.6; Description=GRAS family transcription factor
PGEALAVNLAFALSRVADESVSPANPRDELLRRVRALGPRVVALVEQELNTNTAPLAARFADACAHYGAVLESLDATLARDSPQRARAEEALANKATNALAREGPDRMERCEVFGKWRARFGMAGLRPVAIGQGIADRVKARLGHARPGFDVKLDSGRLGVGWMGRVVTVASAWR

SEQ ID NO: 86640 - protein, 52 aa, Setaria italica
  Transcript Sequence Number=SeqID_20666
SLVLPIFWASFHHDRWAQPWQIICNDRSVERVSLVLPIFWASFHLLSFVTLW

SEQ ID NO: 86641 - protein, 103 aa, Setaria italica
  Transcript Sequence Number=SeqID_20667
GKSLLNTLILGLENMDLFLLDLVRILSFMAFTGCQNRLLLNSTWRTDIEARTKPLCQELLGKQKWFQAEPESKIQQRPTSRQESSRGPACTPGRCKDRKSIRW

SEQ ID NO: 86642 - protein, 102 aa, Setaria italica
  Transcript Sequence Number=SeqID_20668
  Subcellular localization annotation: CTP_CleavageSite=25; ConfidenceScore=5.47e-01
RAPPRQARPFYSLGTRPVVVRTAPQAAMRPSGEATGGLSRGQQRRRRRRLGVGGGRPAPGPVIPSRARPLFPPSSSGLLRGAVLCLLAVASCLGRALNELRE

SEQ ID NO: 86643 - protein, 99 aa, Setaria italica
  Transcript Sequence Number=SeqID_20669
  Gene Ontology: Mol. function=binding
  Homolog annotation: Hit_ID=B6SU80; Match level="QueryCoverage=89%, HitCoverage=35%, E-value=3e-26, Identity=69%"; Hit description=TPR domain containing protein
  Pfam annotation: Domain name=TPR_1; Domain location=43-76; Score =23.8; E_value=0.00073; Accession=PF00515.20; Description =Tetratricopeptide repeat
  Pfam annotation: Domain name=TPR_1; Domain location=9-42; Score=5.9; E_value=1.1; Accession=PF00515.20; Description=Tetratricopeptide repeat
  Pfam annotation: Domain name=TPR_2; Domain location=43-76; Score =23.3; E_value=0.00098; Accession=PF07719.9; Description =Tetratricopeptide repeat
  Pfam annotation: Domain name=TPR_2; Domain location=9-42; Score=13.9; E_value=0.63; Accession=PF07719.9; Description=Tetratricopeptide repeat
  Pfam module annotation: Pfam domain module=TPR_1::TPR_1::TPR_2::TPR _2; Domain location=43-76::9-42::43-76::9-42
GSWCWWWSVEVYRSRSKARLAIGDISGGVEDAEEALRIAPRFPQAHLLRGDALLAMGEYCAAEDAYADALDLDPSIRRSKSFKARVERLREKLVSATNP

SEQ ID NO: 86644 - protein, 85 aa, Setaria italica
  Transcript Sequence Number=SeqID_20670
  Homolog annotation: Hit_ID=B6UFI8; Match level="QueryCoverage=83%, HitCoverage=10%, E-value=3e-25, Identity=81%"; Hit description =Glycosyltransferase
MGMDGGGGGKLPYSYASVGHSDGKLVKSFSRVEPRKFGMGLVAGFLLVTCAYFSTAKFDAIHIAMISPISKDAAGIGSLVSGGAD

SEQ ID NO: 86645 - protein, 100 aa, Setaria italica
  Transcript Sequence Number=SeqID_20671
FFLNEPHKIVRASIDIAEKYKTTTLGGHNQEKKRKWKKNSASWIETSTWPHRSTQVQQPSGWIGTSTRQHHSTQQQLPTGWFGTSTQLKPLYSTTNIARM

SEQ ID NO: 86646 - protein, 311 aa, Setaria italica
  Transcript Sequence Number=SeqID_20672
  Gene Ontology: Mol. function=sequence-specific DNA binding; Cellular component=endoplasmic reticulum membrane; Biological process=lipid biosynthetic process
  Homolog annotation: Hit_ID=B6U2L0; Match level="QueryCoverage=90%, HitCoverage=90%, E-value=1e-138, Identity=85%"; Hit description=ASC1- like protein 1
  Pfam annotation: Domain name=TRAM_LAG1_CLN8; Domain location=78-284; Score=174.9; E_value=2.3e-49; Accession=PF03798.8; Description=TLC domain
MGLGAAAGRLLAEVDWERESYPAYDDFLALPAFVLFFPTVRFFLDRFVFERVARRLILGQGHQRTSNETEETRKKIRKFKESAWKCVYFLSGELLALSVTYNEPWFTNTRYFWVGPGEQVWPDQKIKLKLKAVYMYAAGFYTYSIFALIFWETRRSDFGVSMSHHVATVVLIVLSYVFRFARVGSIVLAIHDASDVFLEVGKMSKYSHCDWLANISFLLFVVSWILLRLTYFPFWILRSTSYEVLLTLDKKKHNFDGPIYYYVFNSLLFSLLVLHIYWWVLIYRMLVRQIRTRNVGDDVRSDSEEEDEHED

SEQ ID NO: 86647 - protein, 74 aa, Setaria italica
  Transcript Sequence Number=SeqID_20673
ALLSGMQMTTRSVLPLWGRASLRFNWGLRMPPELLADGGGGRSKGAARAPVSKMPLLVMSKLSIEQSPRADADS

SEQ ID NO: 86648 - protein, 184 aa, Setaria italica
  Transcript Sequence Number=SeqID_20674
  Gene Ontology: Mol. function=nucleoside-triphosphatase activity; Cellular component=membrane; Biological process=transport
  Homolog annotation: Hit_ID=Q7XI02; Match level="QueryCoverage=100%, HitCoverage=58%, E-value=3e-33, Identity=47%"; Hit description=ABC transporter family protein-like
  Subcellular localization annotation: CTP_CleavageSite=49; ConfidenceScore=5.86e-01
MAASPLPRWAPTPSPTRPLRVSSTGQTVMSSCSSWAVCSSFSSIFVPFRCSAAPPSPADAPANAADDGGGRVGCHPLDCVGARDRDLRPEDARPRVFLTWEDLTVTASSGKGSRAVILDRLSGCARPGEVLALMGPSGCGKTTLLDALAGRLGNDKKKTGSILINGRREKLAFGTSAYVTQETL

SEQ ID NO: 86649 - protein, 288 aa, Setaria italica
  misc_feature (101)..(101): Xaa can be any naturally occurring amino acid
  misc_feature (144)..(144): Xaa can be any naturally occurring amino acid
  misc_feature (230)..(230): Xaa can be any naturally occurring amino acid
  misc_feature (259)..(259): Xaa can be any naturally occurring amino acid
  Transcript Sequence Number=SeqID_20675
  Gene Ontology: Mol. function=aspartic-type endopeptidase activity; Biological process=DNA integration
  Homolog annotation: Hit_ID=Q6I5B6; Match level="QueryCoverage=100%, HitCoverage=23%, E-value=1e-109, Identity=73%"; Hit description =Putative polyprotein
  Pfam annotation: Domain name=RVT_2; Domain location=1-117; Score= -15.3; E_value=2.8e-16; Accession=PF07727.6; Description=Reverse transcriptase (RNA-dependent DNA pol
AWFERFSSVVTAAGFSASDHDPALFIHSSPCGRTLVLLYVDDMIITGDDSQFIAFVKARLCEQFLMSDLGPLRYFLGIEVSSSSDGFFLSQEKYIHDLLAXASLTDERTVDTPMELNLQLCPTDGEPLADPTRYRHLVGSLVYXDVHRPDISHAVHILSQFVSAHTHIHYSHLLRVLRYLRVTSSRRLFFPRSSSLQLRAYSDATWASDPSDRRSISAYCVFLGGSLIAXKTKKQTAVFCSSAEAELRAMALLTSELSXLRWLLEDFGVSLTGPTPLHSDSTGAINIA

SEQ ID NO: 86650 - protein, 98 aa, Setaria italica
  Transcript Sequence Number=SeqID_20676
  Gene Ontology: Mol. function=nucleic acid binding; Cellular component= cytoplasm; Biological process=nuclear-transcribed mRNA catabolic process, deadenylation-dependent decay
  Homolog annotation: Hit_ID=B6T2M0; Match level="QueryCoverage=93%, HitCoverage=28%, E-value=8e-44, Identity=84%"; Hit description =Nucleic acid binding f
  Pfam annotation: Domain name=zf-CCCH; Domain location=23-49; Score =52.1; E_value=2.1e-12; Accession=PF00642.16; Description=Zinc finger C-x8-C-x5-C-x3-H type (and similar)
  Pfam annotation: Domain name=zf-CCCH; Domain location=61-87; Score =28.1; E_value=3.5e-05; Accession=PF00642.16; Description=Zinc finger C-x8-C-x5-C-x3-H type (and similar)
  Pfam module annotation: Pfam domain module=zf-CCCH::zf-CCCH; Domain location=23-49::61-87
PGERTEMKLNSGLEFEVYSQGTLKTELCNKWEETGACPYGDQCQFAHGIAELRPVIRHPRYKTEICRMVLAGVLCPYGHRCHFRHSVSPADLFPQHDV

SEQ ID NO: 86651 - protein, 244 aa, Setaria italica
  Transcript Sequence Number=SeqID_20677
  Gene Ontology: Mol. function=nucleic acid binding; Cellular component= cytoplasm; Biological process=nuclear-transcribed mRNA catabolic process, deadenylation-dependent decay
  Homolog annotation: Hit_ID=B6T2M0; Match level="QueryCoverage=87%, HitCoverage=62%, E-value=2e-80, Identity=72%"; Hit description =Nucleic acid binding f
  Pfam annotation: Domain name=zf-CCCH; Domain location=168-194; Score =52.1; E_value=2.1e-12; Accession=PF00642.16; Description=Zinc finger C-x8-C-x5-C-x3-H type (and similar)
  Pfam annotation: Domain name=zf-CCCH; Domain location=206-232; Score =28.1; E_value=3.5e-05; Accession=PF00642.16; Description=Zinc finger C-x8-C-x5-C-x3-H type (and similar)
  Pfam module annotation: Pfam domain module=zf-CCCH::zf-CCCH; Domain location=168-194::206-232
DAAAAADRRHRLARLALQYQEVLARFELCLSYLADASNEAAALRRENDELRVANEDLARRIKMVGDKLADEFSGLRLAEGHGHPTPLRPLAPLPVVPALPKSISVRSPGYLKMNQNGKHRPSKPTKLGSQRVFVGMDGSVKEDGERKGGEEKKLNSGLEFEVYSQGTLKTELCNKWEETGACPYGDQCQFAHGIAELRPVIRHPRYKTEICRMVLAGVLCPYGHRCHFRHSVSPPTSSPSMTSD

SEQ ID NO: 86652 - protein, 344 aa, Setaria italica
  misc_feature (135)..(135): Xaa can be any naturally occurring amino acid
  Transcript Sequence Number=SeqID_20678
  Gene Ontology: Mol. function=DNA binding; Cellular component =mitochondrion
  Homolog annotation: Hit_ID=Q2HUF5; Match level="QueryCoverage=90%, HitCoverage=62%, E-value=2e-48, Identity=35%"; Hit description =Tetratricopeptide-like helical
  Pfam annotation: Domain name=PPR; Domain location=135-169; Score =34.1; E_value=5.8e-07; Accession=PF01535.12; Description=PPR repeat
  Pfam annotation: Domain name=PPR; Domain location=170-204; Score =32.3; E_value=2e-06; Accession=PF01535.12; Description=PPR repeat
  Pfam annotation: Domain name=PPR; Domain location=205-239; Score=8.1; E_value=0.99; Accession=PF01535.12; Description=PPR repeat
  Pfam annotation: Domain name=TPR_2; Domain location=238-271; Score =17.3; E_value=0.065; Accession=PF07719.9; Description=Tetratricopepti de repeat
  Pfam module annotation: Pfam domain module=PPR::PPR::PPR::TPR_2; Domain location=135-169::170-204::205-239::238-271
ELAQAQAQPRPRPQPQAQVAGPELRSLEPSWVPLYVRLSKLGSGRPPGSVAAELDAWVSKRRPISVVQIVAYVRKLRKFKKDACALELMDWMEARGAELGLIHHTLRLDLISKVHGIQAAEEYFWSLPDMFKSKXTYACLLNCYSAHGMEDQGLELYEKMKALNFVPDTLMYNSLMALYQKAGQPEKILTTFEEMRESGIMADKFTYFTLIESYIIMNDLDAAEKVLEELQDVAPVHWSLYTLMANSYIKLEQFGKAEAALKKAEKVMDRAELRSWHSLLSLYACSGNSTELKRIWESLRLAFKKCLNRSYRVMLQALSTVDDFDCLQQIFQEWQSSHEYLLTM

SEQ ID NO: 86653 - protein, 53 aa, Setaria italica
  Transcript Sequence Number=SeqID_20679
  Gene Ontology: Mol. function=oxidoreductase activity, acting on the CH-OH group of donors, NAD or NADP as acceptor; Cellular component =glycerol-3-phosphate dehydrogenase complex; Biological process =glycerol-3-phosphate catabolic process
  Homolog annotation: Hit_ID=B6TIZ1; Match level="QueryCoverage=83%, HitCoverage=9%, E-value=7e-17, Identity=86%"; Hit description =Glycerol-3-phosphate dehydrogenase
GSNKWRKPLAKFLRQAHFIVWDNSYLVTHEVMSGLKNVYAIGAGKTNLSIFIS

SEQ ID NO: 86654 - protein, 461 aa, Setaria italica
  Transcript Sequence Number=SeqID_20680
  Gene Ontology: Mol. function=oxidoreductase activity, acting on the CH-OH group of donors, NAD or NADP as acceptor; Cellular component =glycerol-3-phosphate dehydrogenase complex; Biological process =glycerol-3-phosphate catabolic process
  Homolog annotation: Hit_ID=B6TIZ1; Match level="QueryCoverage=92%, HitCoverage=92%, E-value=0.0, Identity=85%"; Hit description =Glycerol-3-phosphate dehydrogenase
  Pfam annotation: Domain name=NAD_Gly3P_dh_C; Domain location=272-432; Score=149.8; E_value=8.2e-42; Accession=PF07479.6; Description=NAD -dependent glycerol-3-phosphate deh
  Pfam annotation: Domain name=NAD_Gly3P_dh_N; Domain location=41-244; Score=-9.3; E_value=1.2e-05; Accession=PF01210.15; Description=NAD -dependent glycerol-3-phosphate deh
  Pfam module annotation: Pfam domain module=NAD_Gly3P_dh_C::NAD_Gly3P _dh_N; Domain location=272-432::41-244
SIAREMVGSVHMNGSVHGANGTEERLDELRRLLGKSEGDLLKIVSVGAGAWGSVFAALLQDAYGHFREKVQIRIWRRPGRTVDRSTAEHLFEVINSREDVLRRLIRRCAYLKYVEARLGDRTLYADEILKDGFCLNMIETPLCPLKVVTNLQEAVWDADIVVNGVPSTETREVFEEISKYWKERISVPVIISLAKGIEASLDPIPHIITPTQMISSATGVPTENILYLGGPNIASEIYNKEYANARICGSNKWRKPLAKFLRQPHFIVWDNSDLVTHEVMGGLKNVYAIGAGMVAALTNESATSKSVYFAHCTSEMIFITHLLTEQPEKLAGPLLADTYVTLLKGRNAWYGQMLAKGELSPDMGDSIKGKGMIQGISAVGAFFELLSQPSLSVQHPEENKQVAPAELCPILKRLYRILIKRELPARDILQALRDETMNDPRERIEMAQSHAFYRPSLLGKP

SEQ ID NO: 86655 - protein, 107 aa, Setaria italica
  Transcript Sequence Number=SeqID_20681
LPERGWGRAHSGRAGVHGGALAACYIPSIIPLIDATTCFPPSLSPREMRGSGNRIRTLERAPSNPTAPVHTPPLPPTLLSTTPTTTADRMMDGWREKQDERKRERGS

SEQ ID NO: 86656 - protein, 99 aa, Setaria italica
  misc_feature (31)..(31): Xaa can be any naturally occurring amino acid
  Transcript Sequence Number=SeqID_20682
  Gene Ontology: Mol. function=metal ion binding; Cellular component =cell wall; Biological process=metal ion transport
  Homolog annotation: Hit_ID=Q2QXS5; Match level="QueryCoverage=73%, HitCoverage=9%, E-value=5e-28, Identity=82%"; Hit description=Heavy metal-associated domain containing protein, expressed
  Pfam annotation: Domain name=HMA; Domain location=13-73; Score=39.1; E_value=1.8e-08; Accession=PF00403.18; Description=Heavy-metal -associated domain
MSKEDVLKVQTLVLRVNIHCDGCEKKVKKTXHKIDGVYQSSIDAEQGKVTVSGLLDPDTIIRKLNKAGKPALLLQQGPEGRRGVGSHNKGGGGGGGGKE

SEQ ID NO: 86657 - protein, 235 aa, Setaria italica
  Transcript Sequence Number=SeqID_20683
  Gene Ontology: Mol. function=metal ion binding; Cellular component =cell wall; Biological process=metal ion transport
  Homolog annotation: Hit_ID=Q2QXS5; Match level="QueryCoverage=31%, HitCoverage=9%, E-value=3e-20, Identity=68%"; Hit description=Heavy metal-associated domain containing protein, expressed
  Pfam annotation: Domain name=HMA; Domain location=12-71; Score=19.9; E_value=0.01; Accession=PF00403.18; Description=Heavy-metal -associated domain
QRIACVFLVGAYFVCQRVHGCEKKVKKTLHKIDGVYQSSIDAEQGKVTVSGLLDPDTIIRKLNKAGKPAQLWGAKPGAPQNGHHGGGGGKGQTKDVGGKGHSKDAGGGKGQKGGGGVGSHNKGGGGGGGGKDAKMMLPQSMPQPTPQQLQQLQHQMQMKGMKLPPELLGGKMPAFAAAAPLKDPKSVKFAIPEDNFDDEGSEFDDEFDDYDDEDDYDDDGLDDDFYDDPKMMMKP

SEQ ID NO: 86658 - protein, 192 aa, Setaria italica
  Transcript Sequence Number=SeqID_20684
  Gene Ontology: Cellular component=cytoplasm; Biological process =embryonic development ending in birth or egg hatching
  Homolog annotation: Hit_ID=B9RE42; Match level="QueryCoverage=75%, HitCoverage=28%, E-value=1e-70, Identity=83%"; Hit description=WD -repeat protein, putative
  Pfam annotation: Domain name=WD40; Domain location=22-60; Score=40.6; E_value=6.3e-09; Accession=PF00400.24; Description=WD domain, G-beta repeat
  Pfam annotation: Domain name=WD40; Domain location=70-109; Score=1.2; E_value=28; Accession=PF00400.24; Description=WD domain, G-beta repeat
  Pfam module annotation: Pfam domain module=WD40::WD40; Domain location=22-60::70-109
TEPKILSTSFDTTARVHGLKSGKMLKEFRGHNSYVNYAIFTTDGSRVITASSDCTVKVWDTKTTDCLHTFKPPPPLRGGDASVNSVHLFPKNTDHIVVCSKTSAIYIMTFQGQVVKTFSSGKREGGDFVAASVSPKGDWLYCVGEDMNMYCFSYQSGKLDHTIFGIGGNQIPVRMVRNSYDILVMDLHLDCI

SEQ ID NO: 86659 - protein, 517 aa, Setaria italica
  Transcript Sequence Number=SeqID_20685
  Gene Ontology: Cellular component=cytoplasm; Biological process =embryonic development ending in birth or egg hatching
  Homolog annotation: Hit_ID=B9RE42; Match level="QueryCoverage=89%, HitCoverage=89%, E-value=0.0, Identity=85%"; Hit description=WD -repeat protein, putative
  Pfam annotation: Domain name=WD40; Domain location=208-246; Score =26.9; E_value=8.2e-05; Accession=PF00400.24; Description=WD domain, G-beta repeat
  Pfam annotation: Domain name=WD40; Domain location=258-296; Score =40.0; E_value=9.3e-09; Accession=PF00400.24; Description=WD domain, G-beta repeat
  Pfam annotation: Domain name=WD40; Domain location=300-339; Score =28.1; E_value=3.5e-05; Accession=PF00400.24; Description=WD domain, G-beta repeat
  Pfam annotation: Domain name=WD40; Domain location=343-381; Score =40.6; E_value=6.3e-09; Accession=PF00400.24; Description=WD domain, G-beta repeat
  Pfam annotation: Domain name=WD40; Domain location=391-430; Score =1.2; E_value=28; Accession=PF00400.24; Description=WD domain, G-beta repeat
  Pfam annotation: Domain name=WD40; Domain location=478-516; Score =20.0; E_value=0.01; Accession=PF00400.24; Description=WD domain, G -beta repeat
  Pfam module annotation: Pfam domain module=WD40::WD40::WD40::WD40::WD4 0::WD40; Domain location=208-246::258-296::300-339::343-381::391 -430::478-516
MASSASTLEIEARDVVKIVLQFCKENSLQQTFQTLQNECQVSLNTVDSIDTFIADINAGRWDAVLPQVAQLKLPRKKLEDLYEQIVLEMAELRELDTARAILRQTQVMGVMKQEQPERYLRLEHLLVRTYFDPNEAYQESTKEKRRAQIAQAVASEVSVVPPSRLMALIGQALKWQQHQGLLPPGTQFDLFRGTAAMKQDEEETYPTTLSHQIKFGKKTHPECARFSPDGQYLVSCSVDGIIEVWDYISGKLKKDLQYQADESFMMHDDAVLCVDFSRDSEMLASGSQDGKIKVWRIRTGQCLRRLERAHSKGVTSVTFSRDGTQILSTSFDTTARVHGLKSGKMLKEFRGHNSYVNYAIFTTDGSRVITASSDCTVKVWDTKTTDCLHTFKPPPPLRGGDASVNSVHLFPKNTDHIVVCSKTSAIYIMTFQGQVVKTFSSGKREGGDFVAASVSPKGDWLYCVGEDMNMYCFSYQSGKLDHLMKVHDKDVIGITHHPHRNLVATYAEDCMMKIWKP

SEQ ID NO: 86660 - protein, 67 aa, Setaria italica
  Transcript Sequence Number=SeqID_20686
RLSAFASQNMCRVYSIFPVINVVKLVLEICITANSICHSVQDSGLTQHVLQCSPGSNKIRLHCNSCL

SEQ ID NO: 86661 - protein, 151 aa, Setaria italica
  Transcript Sequence Number=SeqID_20687
  Gene Ontology: Mol. function=drug transporter activity; Cellular component=membrane; Biological process=multidrug transport
  Homolog annotation: Hit_ID=B9SIJ1; Match level="QueryCoverage=98%, HitCoverage=24%, E-value=1e-41, Identity=57%"; Hit description=DNA -damage-inducible protein f, putative
AMIASSYALVDYKRVQKIAMFALQVGMVSGLALAVGLYASFGNIARLFTSDPEVLMVVKSCALFVCASQPINALAFIFDGLHYGVSDFNYVGQASIVVGVMSSLILLWAPSLFGLAGVWVGLTTLMGLRMAAGILRLLWKWGPWSFLHEAP

SEQ ID NO: 86662 - protein, 116 aa, Setaria italica
  misc_feature (108)..(108): Xaa can be any naturally occurring amino acid
  Transcript Sequence Number=SeqID_20688
  Gene Ontology: Mol. function=drug transporter activity; Cellular component=membrane; Biological process=multidrug transport
  Homolog annotation: Hit_ID=B9S6S4; Match level="QueryCoverage=96%, HitCoverage=25%, E-value=5e-32, Identity=59%"; Hit description=DNA -damage-inducible protein f, putative
  Subcellular localization annotation: CTP_CleavageSite=26; ConfidenceScore=5.45e-01
ISQTSLYSFTQASPMYKPAKVFLSMRALGAPANVLMLAVQGVFRGFKDTKTPVFYIGLGNLSAVILLPLLIYGFQLGITGAAISTVASQYIITILLLRSLSKRAVLLXPRIDQLEF

SEQ ID NO: 86663 - protein, 496 aa, Setaria italica
  Transcript Sequence Number=SeqID_20689
  Gene Ontology: Mol. function=drug transporter activity; Cellular component=membrane; Biological process=multidrug transport
  Homolog annotation: Hit_ID=UPI0001A7B127; Match level="QueryCoverage =98%, HitCoverage=90%, E-value=1e-130, Identity=49%"; Hit description= antiporter/ drug transporter
  Pfam annotation: Domain name=MatE; Domain location=294-450; Score =42.4; E_value=1.8e-09; Accession=PF01554.10; Description=MatE
  Pfam annotation: Domain name=MatE; Domain location=68-237; Score =49.0; E_value=1.9e-11; Accession=PF01554.10; Description=MatE
  Pfam module annotation: Pfam domain module=MatE::MatE; Domain location=294-450::68-237
  Subcellular localization annotation: CTP_CleavageSite=38; ConfidenceScore=5.09e-01
KVAFYKPGHTTPLASGQSPPGYSTDDFGQSLKPKDNVSFAAAKEAVIGISSGLNSVGARSELILLALPAVLGQAIDPMAQLMETAYIGRLGALELASAGIGVSIFNIVSKIFNIPLLSIATSFVAEDISKSAIKHPSSGKLELTSVSSALILAAGIGIIEALALFLGSGLFLKLMGVSPASPMYKPAKVFLSMRALGAPANVLMLAVQGVFRGFKDTKTPVFYIGLGNLSAVILLPLLIYGFQLGITGAAISTVASQYIITILLLRSLSKRAVLLPPRIDQLEFGVYLKSGGMLLGRTLSILLTMTIGTSMAARQGPTAMAAHQICLQVWLAVSLLADALAVSAQAMIASSYALVDYKRVQKIAMFALQVGMVSGLALAVGLYASFGNIARLFTSDPEVLMVVKSCALFVCASQPINALAFIFDGLHYGVSDFNYVGQASIVVGVMSSLILLWAPSLFGLAGVWVGLTTLMGLRMAAGILRLLWKWGPWSFLHEAP

SEQ ID NO: 86664 - protein, 45 aa, Setaria italica
  Transcript Sequence Number=SeqID_20690
  Subcellular localization annotation: CTP_CleavageSite=9; ConfidenceScore=5.30e-01
SSATPARPPAAPPSTRPPSPSPPPPPPPPPPKSPTATTRLARGNP

SEQ ID NO: 86665 - protein, 255 aa, Setaria italica
  misc_feature (13)..(14): Xaa can be any naturally occurring amino acid
  Transcript Sequence Number=SeqID_20691
  Gene Ontology: Mol. function=heat shock protein binding; Cellular component=plasma membrane
  Homolog annotation: Hit_ID=B9SF05; Match level="QueryCoverage=88%, HitCoverage=22%, E-value=5e-80, Identity=73%"; Hit description =Auxilin, putative
AAEARQRAANEAXXRAAAEARARENQQSTTEPDLESFFGMPSRSSSVPRSHTATTNPFDVQPQGNAGSGAVRRTSSGSVSPFTQPPPSNLVDDLSSVFGAPSSSAVFQEVRGESEERRKARLERHQRTMERAAKALAEKNERDLQAQREQEERHRIGESLDFEIKRWAAGKEGNLRALLSTLQYILWPECGWRPISLTDLITAASVKKEYRKATLCIHPDKVQQKGANLQQKYIAEKVFDLLKEAWNKFNSEELF

SEQ ID NO: 86666 - protein, 66 aa, Setaria italica
  Transcript Sequence Number=SeqID_20692
ATVCYNDMLTVFSLLLILANDELPCQLGVDRLKSLNFRENLLGVLHWSEIYGLLLRFINRLFLQKF

SEQ ID NO: 86667 - protein, 167 aa, Setaria italica
  Transcript Sequence Number=SeqID_20693
  Gene Ontology: Mol. function=single-stranded DNA binding; Biological process=DNA replication
  Homolog annotation: Hit_ID=Q9FYJ2; Match level="QueryCoverage=88%, HitCoverage=31%, E-value=2e-22, Identity=41%"; Hit description =F17F8.7
RPEDWNDHRPQKKNGSKSPKFPDFTNKVSKEALWLDSAQSTVLEKLDDVVFGSGYAACREDKPYSTDTQKGTSTNWSKFRKSPDASASSKQKIEEEELWRDLLDNPANWWDNRTDKRSPKSPDFKHKESGKALWIGFKTPQWAVDALPSLNFKGGSKGTRKQETLLS

SEQ ID NO: 86668 - protein, 32 aa, Setaria italica
  Transcript Sequence Number=SeqID_20694
  Pfam annotation: Domain name=Mpv17_PMP22; Domain location=1-32; Score= -10.1; E_value=0.076; Accession=PF04117.4; Description=Mpv17  PMP22 family
VNFGMIPLHARVTFMSTCSIFWNFYLSNTMNK

SEQ ID NO: 86669 - protein, 112 aa, Setaria italica
  Transcript Sequence Number=SeqID_20695
PPPPPSLRIFSPRCYTVLGWHLCRHGHGNVKLLARRLLVRSRCHPLEAEARRRTVPTQIHRNPSQFQPKSTAVPHKSTPVSNQPTDPESPHLHSPVYSLFLHQRDPSAAMVT

SEQ ID NO: 86670 - protein, 109 aa, Setaria italica
  Transcript Sequence Number=SeqID_20696
  Gene Ontology: Mol. function=catalytic activity; Biological process =metabolic process
  Homolog annotation: Hit_ID=B6TI00; Match level="QueryCoverage=84%, HitCoverage=35%, E-value=2e-44, Identity=96%"; Hit description =Protein SUR2
MGIGAVSDELLGTFVPIAVYWLYSGLYVALDGVGRLDGYRLHTREEAATKNVVSKATVVRGVLVQQAFQVAVSLTLFAVIGDESGTGQKQPPASTPRCRMSPYLLPRIL

SEQ ID NO: 86671 - protein, 117 aa, Setaria italica
  misc_feature (16)..(16): Xaa can be any naturally occurring amino acid
  misc_feature (25)..(25): Xaa can be any naturally occurring amino acid
  misc_feature (42)..(43): Xaa can be any naturally occurring amino acid
  Transcript Sequence Number=SeqID_20697
  Gene Ontology: Mol. function=pyridoxal phosphate binding; Cellular component=plasma membrane; Biological process=photorespiration
  Homolog annotation: Hit_ID=B9T1D1; Match level="QueryCoverage=100%, HitCoverage=24%, E-value=6e-50, Identity=78%"; Hit description =Alanine-glyoxylate aminotransferase, putative
GLAVLKVLDKEKRQAXCADVGAHLXERLKSLQEKHEIIGDVXXRGLMLGVELVTDRKEKTPAKAETTELFEKLKDLGILVGKGGLHGNVFRIKPPMCFSKDDADFLVDAMDYAMSGL

SEQ ID NO: 86672 - protein, 112 aa, Setaria italica
  misc_feature (87)..(87): Xaa can be any naturally occurring amino acid
  misc_feature (94)..(94): Xaa can be any naturally occurring amino acid
  Transcript Sequence Number=SeqID_20698
  Gene Ontology: Mol. function=pyridoxal phosphate binding; Cellular component=plasma membrane; Biological process=photorespiration
  Homolog annotation: Hit_ID=B9T1D1; Match level="QueryCoverage=91%, HitCoverage=20%, E-value=3e-43, Identity=79%"; Hit description =Alanine-glyoxylate aminotransferase, putative
GSKRPRSTICCLDVGAHLVERLKSLQEKHEIIGDVRGRGLMLGVELVTDRKEKTPAKAETTELFEKLKDLGILVGKGGLHGNVFRIXKPPMCFXKDDADFLVDAMDYAMSGL

SEQ ID NO: 86673 - protein, 232 aa, Setaria italica
  misc_feature (11)..(11): Xaa can be any naturally occurring amino acid
  Transcript Sequence Number=SeqID_20699
  Gene Ontology: Mol. function=pyridoxal phosphate binding; Cellular component=plasma membrane; Biological process=photorespiration
  Homolog annotation: Hit_ID=B9T1D1; Match level="QueryCoverage=98%, HitCoverage=47%, E-value=1e-114, Identity=85%"; Hit description =Alanine-glyoxylate aminotransferase, putative
  Pfam annotation: Domain name=Aminotran_3; Domain location=1-232; Score=-14.0; E_value=1.3e-13; Accession=PF00202.13; Description =Aminotransferase class-III
IVEFAEALTSXMPGNLKVAYFVNSGTEANELAMLMARLYSGNLSMVALRNAYHGGSAGTIGLTGLQTWKYPIPQGEIHHVMNPDPYRGTFGSDAAAYAKEVEEHITYGSSGRVAGFIAETFQGVGGAVELAPGYLKLAYDIVRKAGGVCIADEVQSGFGRTGSHYWGFQTQGVIPDIVTMAKGIGNGLPLGAVVTTPEIASVLSQKIQFNTFGGNPVCSAGGLAVLKVPHQA

SEQ ID NO: 86674 - protein, 272 aa, Setaria italica
  Transcript Sequence Number=SeqID_20700
  Gene Ontology: Mol. function=pyridoxal phosphate binding; Cellular component=plasma membrane; Biological process=photorespiration
  Homolog annotation: Hit_ID=Q940M2; Match level="QueryCoverage=83%, HitCoverage=47%, E-value=8e-98, Identity=71%"; Hit description =Alanine--glyoxylate aminotransferase 2 homolog 1, mitochondrial
  Pfam annotation: Domain name=Aminotran_3; Domain location=79-271; Score=-106.4; E_value=6.4e-08; Accession=PF00202.13; Description =Aminotransferase class-III
MAASLLRAAGRRRCPAEVLRRLVSSEAAPERAPSRTPPEMPPFDHQPRPYAGMGGAEIFEKRKAVLGPSLFHYYQKPLNIVEGKMQYLYDEHGKRYLDCFGGIVTVSCGHCHPDIVSAVVEQTKLLQHTTTIYLHHAIVEFAEALTSKMPGNLKVAYFVNSGTEANELAMLMARLYSGNLSMVALRNAYHGGSAGTIGLTGLQTWKYPIPQGEIHHVMNPDPYRGTFGSDAAAYAKEVEEHITYGVTRKETRTLHCNFPIKFIIVSFDFWHK

SEQ ID NO: 86675 - protein, 306 aa, Setaria italica
  Transcript Sequence Number=SeqID_20701
  Gene Ontology: Mol. function=pyridoxal phosphate binding; Cellular component=plasma membrane; Biological process=photorespiration
  Homolog annotation: Hit_ID=B9T1D1; Match level="QueryCoverage=100%, HitCoverage=63%, E-value=1e-157, Identity=84%"; Hit description =Alanine-glyoxylate aminotransferase, putative
  Pfam annotation: Domain name=Aminotran_3; Domain location=1-243; Score=43.1; E_value=3.8e-17; Accession=PF00202.13; Description =Aminotransferase class-III
MLMARLYSGNLSMVALRNAYHGGSAGTIGLTGLQTWKYPIPQGEIHHVMNPDPYRGTFGSDAAAYAKEVEEHITYGSSGRVAGFIAETFQGVGGAVELAPGYLKLAYDIVRKAGGVCIADEVQSGFGRTGSHYWGFQTQGVIPDIVTMAKGIGNGLPLGAVVTTPEIASVLSQKIQFNTFGGNPVCSAGGLAVLKVLDKEKRQAHCADVGAHLVERLKSLQEKHEIIGDVRGRGLMLGVELVTDRKEKTPAKAETTELFEKLKDLGILVGKGGLHGNVFRIKPPMCFSKDDADFLVDAMDYAMSGL

SEQ ID NO: 86676 - protein, 97 aa, Setaria italica
  Transcript Sequence Number=SeqID_20702
  Gene Ontology: Mol. function=binding; Biological process=DNA integration
  Homolog annotation: Hit_ID=Q6YYR7; Match level="QueryCoverage=97%, HitCoverage=24%, E-value=3e-25, Identity=60%"; Hit description =Ankyrin-like protein
  Pfam annotation: Domain name=TPR_1; Domain location=21-54; Score=1.1; E_value=4.4; Accession=PF00515.20; Description=Tetratricopeptide repeat
  Pfam annotation: Domain name=TPR_1; Domain location=55-88; Score =22.9; E_value=0.0013; Accession=PF00515.20; Description =Tetratricopeptide repeat
  Pfam annotation: Domain name=TPR_2; Domain location=21-54; Score=5.2; E_value=7.6; Accession=PF07719.9; Description=Tetratricopeptide repeat
  Pfam annotation: Domain name=TPR_2; Domain location=55-88; Score =29.5; E_value=1.3e-05; Accession=PF07719.9; Description =Tetratricopeptide repeat
  Pfam module annotation: Pfam domain module=TPR_1::TPR_1::TPR_2::TPR _2; Domain location=21-54::55-88::21-54::55-88
KEYAMASKIYTEVIDCDGLDATLYSNRSLCKLKLGDGKGALSDAYRCRTLRPDWAKACYRQAKAHMLLKEYKQACDALLDAQKLDPGNEEIERALSK

SEQ ID NO: 86677 - protein, 281 aa, Setaria italica
  Transcript Sequence Number=SeqID_20703
  Gene Ontology: Mol. function=hydrolase activity
  Homolog annotation: Hit_ID=B6TWW2; Match level="QueryCoverage=97%, HitCoverage=82%, E-value=1e-114, Identity=68%"; Hit description =Purple acid phosphatase 1
  Pfam annotation: Domain name=Metallophos; Domain location=1-207; Score=57.7; E_value=4.3e-14; Accession=PF00149.20; Description =Calcineurin-like phosphoesterase
VGDWGRRGAYNQSQVATQMGIVGEKMDIDFVVNVGDNFYKNGLTGVDDKAFEESFTHIYTAKSLQKPWYTILGNHDYRGDALAQLSPVLRKLESRWVCMKNFVVDSEIADFFFVDTTPFVLKYWTDPKKSKYDWRGVAPRETYIANVVKDLDAALKQSNAPWKIVVGHHAIRSSSQHGDTQELLQLLLPTLKAHGVDLYINGHDHCLEHISSRDSPIQYLTSGGGSKAWRGVFTPNSDKLEFFYDGQGFMSMRLTKAEAQVAFYDIAGTVLHTWGLTKGAH

SEQ ID NO: 86678 - protein, 163 aa, Setaria italica
  misc_feature (128)..(128): Xaa can be any naturally occurring amino acid
  Transcript Sequence Number=SeqID_20704
  Gene Ontology: Mol. function=protein serine/threonine kinase activity
YILSPLQETGSMDDSPAISGALEDLEKTLWRAHTLVEACQEKSTICLFCTAGKQSTQLRKVQEDITQKVMVVIFATNVQLTMILTRLDRPCPQTLVSLPGDSSVGHTLAFSRPARRAHPAPAPPQSSXPPPQPFAVPRRRRPPPFASTAAQDGRSRPPPSMST

SEQ ID NO: 86679 - protein, 203 aa, Setaria italica
  Transcript Sequence Number=SeqID_20705
  Gene Ontology: Mol. function=metal ion binding; Cellular component =microtubule associated complex; Biological process=microtubule-based movement
  Homolog annotation: Hit_ID=B9RE37; Match level="QueryCoverage=92%, HitCoverage=45%, E-value=2e-49, Identity=52%"; Hit description=X -linked inhibitor of apoptosis protein, xiap, putative
  Pfam annotation: Domain name=zf-C3HC4; Domain location=145-179; Score= 15.6; E_value=0.0017; Accession=PF00097.17; Description=Zinc finger, C3HC4 type (RING finger)
MHILIPMRAIFLPIILLQVAALSFAIWRFFDRLLTKLQDGIISQGHISVSSKVNELFMMIQYGSRLLHWWSIDEDSREEQAHLCYANNIGYSTFCSYPPEVVKEMPKKVLVKEVERLQLALEEQTEMANHSQQQCDRLKNERILCRICFERDICIVLLPCRHHVLCEPCSNKCQSCPICRLIIESRLSVKDAVLSANPLCDAV

SEQ ID NO: 86680 - protein, 100 aa, Setaria italica
  misc_feature (42)..(42): Xaa can be any naturally occurring amino acid
  Transcript Sequence Number=SeqID_20706
  Gene Ontology: Mol. function=transferase activity, transferring glycosyl groups; Biological process=sucrose metabolic process
  Homolog annotation: Hit_ID=Q42906; Match level="QueryCoverage=100%, HitCoverage=18%, E-value=6e-30, Identity=71%"; Hit description =Sucrose-phosphate synthase (Fragment)
KTWLRANAMRSPQEKNTRLENMTWRIWNLARKKKEVRLFALXEKEEANRLSKRRLETEKQRNDATADMSEDLFEGVKGEDAGDPSVAYGDSTTGNTPKIS

SEQ ID NO: 86681 - protein, 86 aa, Setaria italica
  Transcript Sequence Number=SeqID_20707
  Gene Ontology: Mol. function=transferase activity, transferring glycosyl groups; Biological process=sucrose metabolic process
  Homolog annotation: Hit_ID=A9QVI4; Match level="QueryCoverage=100%, HitCoverage=8%, E-value=5e-29, Identity=73%"; Hit description =Sucrose phosphate synthase II
GENMELGRDSDTGGQVKYVVELAKALSSSPGVYRVDLLTRQILAPNFDRGYGERDEMLASTSFKNLKCERGENSGAHIVRIPFGPK

SEQ ID NO: 86682 - protein, 40 aa, Setaria italica
  Transcript Sequence Number=SeqID_20708
AEESFARAFLCEGYIKEEAGRLRHFAIPSHRGKEAMPFCP

SEQ ID NO: 86683 - protein, 211 aa, Setaria italica
  misc_feature (190)..(190): Xaa can be any naturally occurring amino acid
  misc_feature (202)..(202): Xaa can be any naturally occurring amino acid
  Transcript Sequence Number=SeqID_20709
  Gene Ontology: Mol. function=transferase activity, transferring glycosyl groups; Biological process=sucrose metabolic process
  Homolog annotation: Hit_ID=Q9LKW4; Match level="QueryCoverage=88%, HitCoverage=30%, E-value=4e-86, Identity=82%"; Hit description =Sucrose-phosphate synthase (Fragment)
GLLKQGRQTREQINMTYKIMRRIEAEELSLDASEIVIASTRQEIEEQWNLYDGFEVMLARKLRALVKRGANCYGRYMPRMVIIPPGVEFGHMINDFDLYGDEDSPSPASEDPSIWFEIMRFFTNPRKPMILAIARPYAEKNITTLVKAFGECHALRELANLTLIMGNREAISKMNKVSAAVLTSVLTLIXEYDLYGQVAYPXHHKNSEVPD

SEQ ID NO: 86684 - protein, 336 aa, Setaria italica
  Transcript Sequence Number=SeqID_20710
  Gene Ontology: Mol. function=transferase activity, transferring glycosyl groups; Biological process=sucrose metabolic process
  Homolog annotation: Hit_ID=Q42906; Match level="QueryCoverage=100%, HitCoverage=69%, E-value=1e-126, Identity=65%"; Hit description =Sucrose-phosphate synthase (Fragment)
TDLYKTWLRANAMRSPQERNTRLENMTWRIWNLARKKKEFEKEEACRMLKRQPETEKTRADATADMSEDLFEGEKGEDAGDPSVAYGDSTTGSSPKTSSIDKLYIVLISLHGLVRGENMELGRDSDTGGQVKYVVELAKALSSSPGVYRVDLLTRQILAPNFDRSYGEPVELLVSTSGKNSKQERGENSGAYIIRIPFGPKDKYLAKEQLWPFIQEFVDGALSHIVKMSKAIGEEIGFRHPVWPAVIHGHYASAGIAAALLSGALNLPMAFTGHFLGKDKLEGLLKQGRKTREQINMTYKIMCRIEAEELSLDASEIVIASTRQEIEEQWNLYDGL

SEQ ID NO: 86685 - protein, 542 aa, Setaria italica
  Transcript Sequence Number=SeqID_20711
  Gene Ontology: Mol. function=transferase activity, transferring glycosyl groups; Cellular component=plasma membrane; Biological process=biosynthetic process
  Homolog annotation: Hit_ID=Q9LKW4; Match level="QueryCoverage=98%, HitCoverage=89%, E-value=0.0, Identity=77%"; Hit description=Sucrose- phosphate synthase (Fragment)
  Pfam annotation: Domain name=Glycos_transf_1; Domain location=35-218; Score=56.3; E_value=1.2e-13; Accession=PF00534.12; Description =Glycosyl transferases group 1
  Pfam annotation: Domain name=S6PP; Domain location=258-508; Score= -78.8; E_value=4.3e-05; Accession=PF05116.5; Description=Sucrose-6F -phosphate phosphohydrolase
  Pfam module annotation: Pfam domain module=Glycos_transf_1::S6PP; Domain location=35-218::258-508
QQLLHWHNGHMINDFDLYGDEDSPSPASEDPSIWFEIMRFFTNPRKPMILAIARPYAEKNITTLVKAFGECHALRELANLTLIMGNREAISKMNKVSAAVLTSVLTLIDEYDLYGQVAYPKHHKNSEVPDIYRLAARTKGAFVNVAYFEQFGVTLIEAAMHGLPVIATKNGAPVEIHQVLDNGLLVDPHDQHSIADALYKMLSEKQFWSRCRENGLKNIHQFSWPEHCKNYLSRILTLGPRHPAFGNKEEQKVPVNCRKHILVIAVDSVSKEDLVQIIRNSIEATRTGTLSGSTGFVLSTSLTIAELRSLIKCTGMHPTDFDAFICNSGSDIYYPSLPNNSHVTFALDNNYRSHIEYRWGGEGLRKYLVKWASSVVERRGRTEKQVIFEDSEHSSTYCLAFRVVNPNHLPPLKELQKLMRIQSLRCHALYNHGATRLSVIPIHASRSQALRYLSIRWGIELPDAMVVVGETGDSDYEELFGGLHKTIILKGGFNTPANRIHTVRRYPLQDVVALDSSNIIGIEGFSSGDIRSAMQQLGIPTQ

SEQ ID NO: 86686 - protein, 80 aa, Setaria italica
  Transcript Sequence Number=SeqID_20712
  Gene Ontology: Mol. function=microtubule motor activity; Cellular component=microtubule associated complex; Biological process =microtubule-based movement
  Homolog annotation: Hit_ID=Q01IR9; Match level="QueryCoverage=100%, HitCoverage=8%, E-value=8e-38, Identity=88%"; Hit description =OSIGBa0128P10.5 protein
CRVKPFPKSQSDQRSTVDHIGENGEIMIANPQKQGKDGRKVFTFNKIFGPNASQSEVFADTQPLIRSIMDGFNVCIFAYG

SEQ ID NO: 86687 - protein, 660 aa, Setaria italica
  Transcript Sequence Number=SeqID_20713
  Gene Ontology: Mol. function=zinc ion binding; Cellular component =intracellular
  Homolog annotation: Hit_ID=B9RR31; Match level="QueryCoverage=98%, HitCoverage=86%, E-value=0.0, Identity=58%"; Hit description=DNA binding protein, putative
  Pfam annotation: Domain name=ARID; Domain location=470-592; Score= -7.9; E_value=0.0011; Accession=PF05116.5; Description=ARIDBRIGHT DNA binding domain
  Pfam annotation: Domain name=PHD; Domain location=583-637; Score=9.3; E_value=0.0025; Accession=PF00628.21; Description=PHD-finger
  Pfam module annotation: Pfam domain module=ARID::PHD; Domain location= 470-592::583-637
LSSLISPPFPTIVYLEVPIGEKLAQSLHSQGIPYVIYWRNSFSMYAASHFRQALMSVIQSSCSHTWDAFQLAHASFRLYCVRNNHVQSVKLGPRLLGDAPKINIIPSENEVDEEEGGSEASLAIKIHDEDVNMKVLVCGLPCTLDACLLGALEDGLNALLNIEIRGSKLQNRVSAAPPPLQAETLSHGVVTMRCDITTCSSSHVSLLVSGSAQTCFDDQLLESHIKNEIIEKSQLVHALSNGEDNKPSSAEPLSSMCLACGASTFEVWMALPKWAAKVLKHLAPEISYRSLVALGIACVNGTPVSSFDRQDADRLLFFCSNQCKDQDIQNGPYAHLSRWSASLTKDRITGSLESKQISSGTNGVTEDRKHLTEGSSLSSLKPRLKPATMRPLPHSPKQQMHLFMGLPQSIIHDASQVKPSLPAPPPVKHSVVPVVPATQRKSSSWPPRVQPSVPLMNPLPMKKHGCDRLPIRICSEGDFLKDVMQFLLQRGHTRLIPQGGLAEFPDAVLNTKRLDLYNLYKEVVSRGGFYVGNGINWKGQVFSKMSNHTVTNKMTGVGNTLKRHYETYLLEYELAHDDVDGECCLICHSSALGDWVNCGLCGEWAHFGCDRRQGLGTFKDYAKTDGLEYICPQCCLAKNKKPPLPVRVGNGFVASADSAP

SEQ ID NO: 86688 - protein, 114 aa, Setaria italica
  Transcript Sequence Number=SeqID_20714
DSKEDPELDDEHKTESTIKSLKKNEQSYEDPELDDEHKTESTIESFKKNEQSYEVGCLDGNIALDSIGTNSAHIADMEEGSSGLVHQEEGEDHPNQFAIQLVSMEKAIESSSDK

SEQ ID NO: 86689 - protein, 117 aa, Setaria italica
  Transcript Sequence Number=SeqID_20715
  Gene Ontology: Mol. function=acid-amino acid ligase activity; Cellular component=intracellular; Biological process=ubiquitin -dependent protein catabolic process
  Homolog annotation: Hit_ID=B9S9V5; Match level="QueryCoverage=98%, HitCoverage=3%, E-value=3e-42, Identity=71%"; Hit description=E3 ubiquitin protein ligase upl2, putative
  Pfam annotation: Domain name=DUF913; Domain location=1-117; Score= -159.6; E_value=0.021; Accession=PF06025.4; Description=Domain of Unknown Function (DUF913)
VPDMQPSCSEALVLYNRKNLMKVLLRTISLATYVPGSSARVDGSEENVLPPCLCTIFRRGKDFGGGVFSLAANVMSDLIHKDPTCYSVLDAAGLPQAFLDAILDGVLYNSDAVSCIP

SEQ ID NO: 86690 - protein, 247 aa, Setaria italica
  misc_feature (219)..(219): Xaa can be any naturally occurring amino acid
  Transcript Sequence Number=SeqID_20716
  Homolog annotation: Hit_ID=UPI0001A7B09E; Match level="QueryCoverage =91%, HitCoverage=17%, E-value=2e-81, Identity=66%"; Hit description =SFR6 (SENSITIVE TO FREEZING 6)
HMMNAKTEDSGTTVRSGLGAAKVEDGQATRGGQFALGAKGPEENPIGKSVRIGSGNAGQGYTSDEVKVLFLILVDLCRRTSTLPHPLPASQVGSNNIIIRLHYIDGNYTVLPEVVEASLGPHMQNMPRPRGADAAGLLLRELELQPPAEEWHRRNMFGGPWSEPDDFGPLDNMPHSKASGSISPHLSDMEEDSSNSLGIQSLWPRKRRLSERDAAFGLXTSVGLGGYLGVMGSRRDVITAVWRTGLD

SEQ ID NO: 86691 - protein, 1205 aa, Setaria italica
  misc_feature (362)..(362): Xaa can be any naturally occurring amino acid
  misc_feature (1031)..(1031): Xaa can be any naturally occurring amino acid
  Transcript Sequence Number=SeqID_20717
  Homolog annotation: Hit_ID=UPI0001A7B09E; Match level="QueryCoverage =96%, HitCoverage=93%, E-value=0.0, Identity=62%"; Hit description =SFR6 (SENSITIVE TO FREEZING 6)
GVVAGGSGEAMEVDGGPGAGDAEAGGAAGGGGGSGAGGGAQQASPATVFRIRLKQSPASLRHKMRVPELCRNFSAVAWCGKLNAIACASETCARIPSSNSSPPFWIPIHILNPERPTECSVFNVKADSPRDFVQFIEWSPRSCPRALLVANFHGRITIWTQPNKGPVNLVRDASSWQCEHEWRQDLSVVTKWLSGISPYRWLPGNSTSSNLKTFEEKFLTQQPQSSAGWPSILCVCSVFSSGSVQLHWSQWPSQNSAQPRWFSTSKGLLGAGPSGIMAADAIVTENGALHVAGVPLVNPSTVVVWEVMPGLGNGIQATAKINATSSVPPSLNPPSWPGFAPLAAYLFSLQDYLVSEAAQTKXQTENETTEAASIHCCPVSNFSAYVSPEAAAQSATTTTWGSGVTSVAFDPTRGGSVITVVIVEGQYMSPYDPDEGPSITGWRVQCWESSLQPVVLHPIFGSPTSFGGQPPMQTVWSTRVNKSIPPTEDLKNPQTYVPMPTTSDERSSSECSVDRANRLSFDPYDLPNDVRQLAQIVYSAHGGEVAVAFLRGGVHIFSGPNFDQVDSYHVNVGSAIAPPAFSSSSCCLASVWHDTLKDRTILKIIRVLPPAILSTQTKVNSAAWERAIADRFWWSLLAGVDWWDAVGCTQSAAEDGIVSLNSVIAFLDADFHSLPTMQQRQQHCPNLDRIKCRLLEGTNAQDVRALVLDMQARLLLDMLGKGIESALINPSTLLPEPWQASSDMLSSIEPDKMTVEPALLPSIQGYVDAVLDLASHFITRLRRYASFCRTLASHVGPSSTTGTSRNMVTSPTNSSPSPSNNQGNQGGATSATGNSQMQEWVQGAIAKISNNSDGAATATPNPMSGRSSFMPISINTGTFPGTPAVRLIGDCHFLHRLCQLLLFCLLFRRRQSPRLLANAQKNQDSAIQKIHHMMNAKTEDSGTTVRSGLGAAKVEDGQATRGGQFALGAKGPEENPIGKSVRIGSGNAGQGYTSDEVKVLFLILVDLCRRTSTLPHPLPASQVGSNNIIIXNMPRPRGADAAGLLLRELELQPPAEEWHRRNMFGGPWSEPDDFGPLDNMPHSKASGSISPHLSDMEEDSSNSLGIQSLWPRKRRLSERDAAFGLKTSVGLGGYLGVMGSRRDVITAVWRTGLDGEWYKCVRCLRQTCAFAQPGAPNPTNEREAWWISRWSHACPMCGGSWVKVV

SEQ ID NO: 86692 - protein, 47 aa, Setaria italica
  misc_feature (47)..(47): Xaa can be any naturally occurring amino acid
  Transcript Sequence Number=SeqID_20718
  Subcellular localization annotation: CTP_CleavageSite=38; ConfidenceScore=5.23e-01
YFSCHFGQFMNLTCFPKTKTRSNPWLRSSRFSFFFYVSPEEKVAVPX

SEQ ID NO: 86693 - protein, 174 aa, Setaria italica
  Transcript Sequence Number=SeqID_20719
  Gene Ontology: Mol. function=microtubule motor activity; Cellular component=microtubule associated complex; Biological process =microtubule-based movement
  Homolog annotation: Hit_ID=Q9FME7; Match level="QueryCoverage=100%, HitCoverage=13%, E-value=7e-65, Identity=76%"; Hit description =Kinesin-like protein
  Pfam annotation: Domain name=Kinesin; Domain location=1-174; Score= -24.2; E_value=6.8e-14; Accession=PF00225.15; Description=Kinesin motor domain
LIRVSFIEIFKEEVFDLLDSNHAAARLDSVSVAKPSAPARVPIQIRETATGGITLAGVTEAEVKSKEEMASYLIRGSSSRATASTNMNRQSSRSHAIFTICVEQKRTSGISDKSASSDYDILSSKFHLVDLAGSERAKRTGADGHRLKEGIHINKGLLALGNVISALGDEKKGK

SEQ ID NO: 86694 - protein, 86 aa, Setaria italica
  misc_feature (75)..(75): Xaa can be any naturally occurring amino acid
  Transcript Sequence Number=SeqID_20720
  Gene Ontology: Mol. function=structural molecule activity; Cellular component=protein complex; Biological process=microtubule-based movement
  Homolog annotation: Hit_ID=Q53M52; Match level="QueryCoverage=80%, HitCoverage=15%, E-value=2e-29, Identity=94%"; Hit description =Tubulin alpha-2 chain
NLCLSNLLFVIIVVMQVISSLTASLRFDGALNVDVNEFQTNLVPYPRIHFMLSSYAPVISAEKAYHEQLSVAEIXTNSAFDAVLHD

SEQ ID NO: 86695 - protein, 75 aa, Setaria italica
  Transcript Sequence Number=SeqID_20721
  Gene Ontology: Mol. function=ATP-dependent helicase activity; Cellular component=nucleus; Biological process=nuclear-transcribed mRNA catabolic process, nonsense-mediated decay
  Homolog annotation: Hit_ID=Q5JKF2; Match level="QueryCoverage=53%, HitCoverage=5%, E-value=9e-15, Identity=95%"; Hit description=DEAD -box ATP-dependent RNA helicase 40
  Pfam annotation: Domain name=Helicase_C; Domain location=2-65; Score =6.2; E_value=0.014; Accession=PF00271.23; Description=Helicase conserved C-terminal domain
GGDKSQSEREKVLNHFRSGRSPILVATDVAARGLDIKDIRLDCHSMICYACLYVLIYNVVQFRNNGKANLLGHSS

SEQ ID NO: 86696 - protein, 100 aa, Setaria italica
  Transcript Sequence Number=SeqID_20722
  Gene Ontology: Mol. function=ATP-dependent helicase activity; Cellular component=nucleus; Biological process=nuclear-transcribed mRNA catabolic process, nonsense-mediated decay
  Homolog annotation: Hit_ID=Q5JKF2; Match level="QueryCoverage=86%, HitCoverage=10%, E-value=5e-41, Identity=91%"; Hit description=DEAD -box ATP-dependent RNA helicase 40
SHHHPAPAAVADDPSTEAYRRRHEITVTGDNVPAPMTSFEAGGFPPEILKEIQRAGFASPTPIQAQSWPIAMQSQDVVAIAKTGSGKTLGYLLPGFMHIK

SEQ ID NO: 86697 - protein, 83 aa, Setaria italica
  Transcript Sequence Number=SeqID_20723
  Gene Ontology: Mol. function=ATP-dependent helicase activity; Cellular component=nucleus; Biological process=nuclear-transcribed mRNA catabolic process, nonsense-mediated decay
  Homolog annotation: Hit_ID=Q5JKF2; Match level="QueryCoverage=100%, HitCoverage=10%, E-value=4e-38, Identity=91%"; Hit description=DEAD -box ATP-dependent RNA helicase 40
  Subcellular localization annotation: CTP_CleavageSite=75; ConfidenceScore=5.05e-01
IQRAGFASPTPIQAQSWPIAMQSQDVVAIAKTGSGKTLGYLLPGFMHIKRLQNSTRNGPTVLVLAPTRELATQILDEAVKFGR

SEQ ID NO: 86698 - protein, 194 aa, Setaria italica
  misc_feature (157)..(157): Xaa can be any naturally occurring amino acid
  Transcript Sequence Number=SeqID_20724
  Gene Ontology: Mol. function=ATP-dependent helicase activity; Cellular component=nucleus; Biological process=nuclear-transcribed mRNA catabolic process, nonsense-mediated decay
  Homolog annotation: Hit_ID=Q5JKF2; Match level="QueryCoverage=81%, HitCoverage=26%, E-value=3e-65, Identity=65%"; Hit description=DEAD -box ATP-dependent RNA helicase 40
  Pfam annotation: Domain name=DEAD; Domain location=40-189; Score =115.5; E_value=1.7e-31; Accession=PF00270.21; Description=DEADDEAH box helicase
MAERASRDSVRAFSTSPCVRKSTRCGHTLFIQRAGFASPTPIQAQSWPIAMQSQDVVAIAKTGSGKTLGYLLPGFMHIKRLQNSTRNGPTVLVLAPTRELATQILDEAVKFGRSARISCTCLYGGAPKGPQLRDLDRGVDVVVATPGRLNDILEMRXVRRIADDLLVHPVQVTIGSVDELVANSAITQVYGLAL

SEQ ID NO: 86699 - protein, 600 aa, Setaria italica
  Transcript Sequence Number=SeqID_20725
  Gene Ontology: Mol. function=ATP-dependent helicase activity; Cellular component=nucleus; Biological process=nuclear-transcribed mRNA catabolic process, nonsense-mediated decay
  Homolog annotation: Hit_ID=Q5JKF2; Match level="QueryCoverage=99%, HitCoverage=73%, E-value=1e-167, Identity=73%"; Hit description=DEAD- box ATP-dependent RNA helicase 40
  Pfam annotation: Domain name=DEAD; Domain location=2-137; Score =136.1; E_value=1.1e-37; Accession=PF00270.21; Description=DEADDEAH box helicase
  Pfam annotation: Domain name=Helicase_C; Domain location=206-282; Score=131.5; E_value=2.7e-36; Accession=PF00271.23; Description =Helicase conserved C-terminal domain
  Pfam module annotation: Pfam domain module=DEAD::Helicase_C; Domain location=2-137::206-282
SVPATRRLADTTRNGPTVLVLAPTRELATQILDEAVKFGRSARISCTCLYGGAPKGPQLRDLDRGVDVVVATPGRLNDILEMRRVSLKQVSYLVLDEADRMLDMGFEPQIRKIVKEIPHRRQTLMYTATWPKEVRRIADDLLVHPVQVTIGSVDELVANSAITQHVEVITPSEKLRRLEQILRSQDSGSKVLIFCTTKKMCDQLARTLTRQFGASAIHGDKSQSEREKVLNHFRSGRSPILVATDVAARGLDIKDIRVVINYDFPTGVEDYVHRIGRTGRAGATGVAYTFFCDQDSKYAADLIKILEGANQKVPRDLEDMASRGGGRGRKRNRWASRPDRGGSRSELDSRYSGRDASGRSPRGGRGRDDYGGRGRHDYGETDGRSRRSARGRSRSRSRSDSRSRSPSPKRARRHEATRSRTKSRSRSRTKSRSRSRSRSYTRNRRASRSRSRSPVGSRRYETAAAVSGSARPNSGHSEHKSPPRSQSGNDHHVNHSEDDHHMEDGKMEKVDLDRSPSPQDDKSAPYSPVYNGKASGSKSPNGQPDGNAKSVEASEKPNPASPVRHSKSREDEEEGVIDEDGEIAEDDPRSSAAATQNGDN

SEQ ID NO: 86700 - protein, 157 aa, Setaria italica
  Transcript Sequence Number=SeqID_20726
  Gene Ontology: Mol. function=phosphotransferase activity, for other substituted phosphate groups; Cellular component=integral to membrane; Biological process=phospholipid biosynthetic process
  Homolog annotation: Hit_ID=A9P3Q5; Match level="QueryCoverage=94%, HitCoverage=67%, E-value=5e-65, Identity=84%"; Hit description=CDP -diacylglycerol--inositol 3-phosphatidyltransferase 1
  Pfam annotation: Domain name=CDP-OH_P_transf; Domain location=43-157; Score=48.4; E_value=2.9e-11; Accession=PF01066.13; Description=CDP -alcohol phosphatidyltransferase
MPLPSAEKMLSVYLYIPNIIGYFRIIINFIAFAVCYSNKPLFAILYFFSFVLDGVDGWFARKFNQASTFGAVLDMVTDRVSTACLLALLSQCYRPGLVFLMLLGLDITSHWFQMYSSFLSGKSSHKDDVKHTGNWLLKLYYGYRPFMAFCCVSCEVY

SEQ ID NO: 86701 - protein, 115 aa, Setaria italica
  Transcript Sequence Number=SeqID_20727
  Gene Ontology: Mol. function=phosphotransferase activity, for other substituted phosphate groups; Cellular component=integral to membrane; Biological process=phospholipid biosynthetic process
  Homolog annotation: Hit_ID=A9P3Q5; Match level="QueryCoverage=76%, HitCoverage=40%, E-value=1e-44, Identity=98%"; Hit description=CDP -diacylglycerol--inositol 3-phosphatidyltransferase 1
  Pfam annotation: Domain name=CDP-OH_P_transf; Domain location=27-114; Score=15.3; E_value=0.0021; Accession=PF01066.13; Description=CDP -alcohol phosphatidyltransferase
MQTIYVCGSHILANYLCLWFSHPCKHVSFVLDGVDGWFARKFNQASTFGAVLDMVTDRVSTACLLALLSQFYRPGLVFLILLGLDITSHWFQMYSSFLSGKSSHKDVKHTGNWLL

SEQ ID NO: 86702 - protein, 86 aa, Setaria italica
  Transcript Sequence Number=SeqID_20728
  Gene Ontology: Mol. function=phosphotransferase activity, for other substituted phosphate groups; Cellular component=membrane; Biological process=phospholipid biosynthetic process
  Homolog annotation: Hit_ID=A9P3Q5; Match level="QueryCoverage=82%, HitCoverage=32%, E-value=8e-29, Identity=88%"; Hit description=CDP -diacylglycerol--inositol 3-phosphatidyltransferase 1
HNITSEANCLCALHPCGVLYIILFLFADEKSTSLLSVSRGILNQSPLIVLVFISTLVGWAVKQVTNVIQMKTAADACVVYDLKRGK

SEQ ID NO: 86703 - protein, 215 aa, Setaria italica
  Transcript Sequence Number=SeqID_20729
  Gene Ontology: Mol. function=phosphotransferase activity, for other substituted phosphate groups; Cellular component=integral to membrane; Biological process=phospholipid biosynthetic process
  Homolog annotation: Hit_ID=A9P3Q5; Match level="QueryCoverage=100%, HitCoverage=98%, E-value=1e-103, Identity=86%"; Hit description=CDP -diacylglycerol--inositol 3-phosphatidyltransferase 1
  Pfam annotation: Domain name=CDP-OH_P_transf; Domain location=35-157; Score=75.0; E_value=2.8e-19; Accession=PF01066.13; Description=CDP -alcohol phosphatidyltransferase
MPSVYLYIPNIIGYFRIIINFIAFAVCYSNKALFAILYFFSFVLDGVDGWFARKFNQASTFGAVLDMVTDRVSTACLLALLSQFYRPGLVFLILLGLDITSHWFQMYSSFLSGKSSHKDVKHTGNWLLKLYYGYRPFMAFCCVSCEVLYIILFLFADEKSTSLLSVSRGILNQSPLIVLVFISTLVGWAVKQVTNVIQMKTAADTCVEFDPKHSK

SEQ ID NO: 86704 - protein, 51 aa, Setaria italica
  Transcript Sequence Number=SeqID_20730
SDLVGYIGFFKIGYIGSVWEPWWQFYHSSSWLSYKCGYVVLLLLMAIAQST

SEQ ID NO: 86705 - protein, 87 aa, Setaria italica
  Transcript Sequence Number=SeqID_20731
  Gene Ontology: Cellular component=vacuole
  Subcellular localization annotation: CTP_CleavageSite=66; ConfidenceScore=5.24e-01
FSNTGDLLVGSAVQLSGFFMCLFGAARITHRAQRIVSIASQWHVSLVAMHHSSKSSPASTSASDVDASRVSGSSAAVSSQAEPGAAC

SEQ ID NO: 86706 - protein, 78 aa, Setaria italica
  misc_feature (21)..(21): Xaa can be any naturally occurring amino acid
  Transcript Sequence Number=SeqID_20732
  Gene Ontology: Mol. function=ATPase activity, coupled to transmembrane movement of ions, phosphorylative mechanism; Cellular component=integral to membrane; Biological process=phospholipid transport
  Homolog annotation: Hit_ID=B9I2N3; Match level="QueryCoverage=71%, HitCoverage=4%, E-value=1e-18, Identity=75%"; Hit description =Aminophospholipid ATPase (Fragment)
WRWSARSQRWWRRRRWWRSTXVLNAVLIFFFCITAFEDQAFRQDGQVAGLDALGVVMYTCVVWVVNCQMALSVNYFTI

SEQ ID NO: 86707 - protein, 251 aa, Setaria italica
  misc_feature (113)..(113): Xaa can be any naturally occurring amino acid
  misc_feature (238)..(238): Xaa can be any naturally occurring amino acid
  Transcript Sequence Number=SeqID_20733
  Gene Ontology: Mol. function=ATPase activity, coupled to transmembrane movement of ions, phosphorylative mechanism; Cellular component=integral to membrane; Biological process=phospholipid transport
  Homolog annotation: Hit_ID=B9HIU2; Match level="QueryCoverage=97%, HitCoverage=20%, E-value=2e-79, Identity=60%"; Hit description =Aminophospholipid ATPase
VQGCQTGVTEVERAMAMRKGARLDDDIENGDHKDKKVDDSPHVKGFNFKDPRIMDGNWTNEPNRDMIRDFFRLLAICHTCIAEIDETGKVSYEAESPDEAAFVIAARELGFEXFYKRSPTTIIVRERDPSQNVVEKRKYDLLNILEFSSSRKRMSVIVKEPEGRILLFSKGADSVMFKRLAPDGRKFEEDTRRHINEYSDSGLRTLVLAYRVLDEKEYKEFNEKLNDAKTSVSADRDXEKIEQAADALNRT

SEQ ID NO: 86708 - protein, 501 aa, Setaria italica
  misc_feature (24)..(24): Xaa can be any naturally occurring amino acid
  Transcript Sequence Number=SeqID_20734
  Gene Ontology: Mol. function=ATPase activity, coupled to transmembrane movement of ions, phosphorylative mechanism; Cellular component=integral to membrane; Biological process=phospholipid transport
  Homolog annotation: Hit_ID=B9I2N3; Match level="QueryCoverage=98%, HitCoverage=41%, E-value=0.0, Identity=74%"; Hit description =Aminophospholipid ATPase (Fragment)
MISNCCPYVNSVMFKRLAPDGRKXFEEDTRRHVNEYSDSGLRTLVLAYRVLDEKEYKEFNEKLNDAKTSVSADRDEKIEQAADSIEQDLILLGATAVEDKLQKGVPECIDKLAQAGIKIWVLTGDKMETAINIGFACSLLRQGMTQIIVTLEQPDIIALEKNGDKQAIAKASKQRVMDQIEDGIEKIPPSTQTSTASFALIIDGKSLTYALEDDVKFKFLDLAIKCASVICCRSSPKQKALVTRLVKEVTHKVTLAIGDGANDVGMLQEADIGVGISGAEGMQAVMASDVAVAQFRFLERLLLVHGHWCYRRISVMICYFFYKNVTFGVTIFLYEAFASFSGKPAYNDWFLSLYNVFFTSLPVIALGVFDQDVSARLCIQYPQLYQEGVQNILFSWRRILGWMLNGVMNAVLIFFFCITAFEDQAFRQDGQVAGLDALGVVMYTCVVWVVNCQMALSVNYFTIIQHIFIWGSIAVWYLFLLVYGAINPRFSTTAYMVFIEQ

SEQ ID NO: 86709 - protein, 215 aa, Setaria italica
  misc_feature (124)..(124): Xaa can be any naturally occurring amino acid
  Transcript Sequence Number=SeqID_20735
  Gene Ontology: Mol. function=ATPase activity, coupled to transmembrane movement of ions, phosphorylative mechanism; Cellular component=integral to membrane; Biological process=phospholipid transport
  Homolog annotation: Hit_ID=B9I2N3; Match level="QueryCoverage=86%, HitCoverage=15%, E-value=3e-59, Identity=58%"; Hit description =Aminophospholipid ATPase (Fragment)
FFTFFLVFFLFFGFFIFLLGWMLNGVMNAVLIFFFCITAFEDQAFRQDGQVAGLDALGVVMYTCVVWVVNCQMALSVNYFTIIQHIFIWGSIAVWYLFLLVYGAINPRFSTTAYMVFIEQLAPXALSFWLVTLFVVMATLVPYFSYAAIQIRFFPMFHNKIQWKRYLGKAEDPEVARQLSSRHRTSSQQRMVGISARRDGKAMQITRETELEVQE

SEQ ID NO: 86710 - protein, 97 aa, Setaria italica
  misc_feature (47)..(47): Xaa can be any naturally occurring amino acid
  Transcript Sequence Number=SeqID_20736
  Gene Ontology: Mol. function=isoleucine-tRNA ligase activity; Cellular component=cytoplasm; Biological process=tRNA aminoacylation for protein translation
  Homolog annotation: Hit_ID=Q9SV89; Match level="QueryCoverage=90%, HitCoverage=6%, E-value=2e-34, Identity=72%"; Hit description =Isoleucine-tRNA ligase-like protein
MEDVCEGKDFSFPAQEEGVLKLWAGLDAFHEQLRRTEGGEEFVFYDXGPPFATGLPHYGHILAGTIKDVVTRHQSMRGRHVSRRFGWDWPRASPVEF

SEQ ID NO: 86711 - protein, 88 aa, Setaria italica
  Transcript Sequence Number=SeqID_20737
  Subcellular localization annotation: CTP_CleavageSite=77; ConfidenceScore=5.59e-01
MPLPAPFRVFSPPSAAATAAAGPAGAQRALIYGRRAPLAGALLFFSIGAVSAAVACRTGCSFSHRRFPFLGARGLSSARMESASTTVP

SEQ ID NO: 86712 - protein, 532 aa, Setaria italica
  Transcript Sequence Number=SeqID_20738
  Gene Ontology: Mol. function=protein serine/threonine kinase activity; Biological process=protein amino acid phosphorylation
  Homolog annotation: Hit_ID=B6U7Q1; Match level="QueryCoverage=100%, HitCoverage=100%, E-value=0.0, Identity=86%"; Hit description =Serine/threonine-protein kinase Nek4
  Pfam annotation: Domain name=APH; Domain location=6-186; Score=-20.1; E_value=0.068; Accession=PF01636.15; Description=Phosphotransferase enzyme family
  Pfam annotation: Domain name=Pkinase; Domain location=4-257; Score =283.9; E_value=3.7e-82; Accession=PF00069.17; Description=Protein kinase domain
  Pfam annotation: Domain name=Pkinase_Tyr; Domain location=4-257; Score=38.6; E_value=2.7e-16; Accession=PF07714.9; Description =Protein tyrosine kinase
  Pfam module annotation: Pfam domain module=APH::Pkinase::Pkinase_Tyr; Domain location=6-186::4-257::4-257
MEQYEVVEQIGRGAYGSAYLVLHKAERKRYVMKKIRLSKQNDKFQRTAYQEMSLMASLSNPYIVEYKDGWVDEGTSVCIVTSHCEGGDMAERIKKARGVLFSEERVCRWFTQLLLALDYLHCNRVLHRDLKCSNILLTRDNNIRLADFGLAKLLMEDLASSVVGTPNYMCPEILADIPYGYKSDIWSLGCCMFEILAHRPAFKATDMAALVNKINRSSISPMPPMYSSALKQIVKSMLRKNPEHRPTAGELLRHPHLQPYLAESCSCSPIYLPVKPTKSNLGDKQSKKPSSGRKRTIKANGSNGTLETAAEHTVEGRDSSTNFSDASTIGTQEALILQMPVDLDARNKEPQSNEVLSFQHAEENLMATTDGQIDSTIRLKAIRTSNVKDEAPVSVSNQKPNEAPIPNEELTIGVVQEERKDVKPRSYQVPKPGSGDTTMTEGSSPISTLKLVHTESAPAEWDHLNIVQQRADALESLLELCAKLLEQERLEELAGVLRPFGEGAVSSRETAIWLTKSLMSPPKFGESPTKLL

SEQ ID NO: 86713 - protein, 104 aa, Setaria italica
  Transcript Sequence Number=SeqID_20739
  Gene Ontology: Mol. function=protein kinase activity; Cellular component=integral to membrane; Biological process=protein amino acid phosphorylation
  Homolog annotation: Hit_ID=Q5GAP9; Match level="QueryCoverage=83%, HitCoverage=12%, E-value=9e-33, Identity=77%"; Hit description =Leucine-rich repeat transmembrane protein kinase 1-like protein
  Pfam annotation: Domain name=LRR_1; Domain location=31-52; Score =11.8; E_value=1.7; Accession=PF00560.25; Description=Leucine Rich Repeat
  Pfam annotation: Domain name=LRR_1; Domain location=53-75; Score=5.2; E_value=30; Accession=PF00560.25; Description=Leucine Rich Repeat
  Pfam annotation: Domain name=LRR_1; Domain location=7-29; Score=14.9; E_value=0.33; Accession=PF00560.25; Description=Leucine Rich Repeat
  Pfam module annotation: Pfam domain module=LRR_1::LRR_1::LRR_1; Domain location=31-52::53-75::7-29
  Subcellular localization annotation: CTP_CleavageSite=33; ConfidenceScore=5.10e-01
MFNQLTNLTAMDLSYNNFSGNIPQSFNSLKSLKALYLQNNKFSGTVDVLADLPLTDLNIENNQFTGWVPDKLKGINNLQTSGNSFNDGPAPPPPPSPPSSYTPP

SEQ ID NO: 86714 - protein, 169 aa, Setaria italica
  misc_feature (162)..(162): Xaa can be any naturally occurring amino acid
  Transcript Sequence Number=SeqID_20740
  Homolog annotation: Hit_ID=B9S8J3; Match level="QueryCoverage=93%, HitCoverage=9%, E-value=3e-61, Identity=71%"; Hit description =Nucleotide binding protein, putative
MPEQTRSGAPMEWTTVQHLDLRHSGGRRGASARPMQPHAAAFRASQAIVAVAIGTHVVEFDALTGSKIASIDLGTRVVRMAYSPTTSHVVIAILEDATIRSCDFATEQTLVLHSPEKKSDHVSIDTEVHLALTPLEPIVFFGFHKRMSVTVVGTVEGGRPPXTKIKTDT

SEQ ID NO: 86715 - protein, 219 aa, Setaria italica
  misc_feature (60)..(60): Xaa can be any naturally occurring amino acid
  misc_feature (72)..(72): Xaa can be any naturally occurring amino acid
  Transcript Sequence Number=SeqID_20741
  Homolog annotation: Hit_ID=B9S8J3; Match level="QueryCoverage=87%, HitCoverage=12%, E-value=4e-46, Identity=53%"; Hit description =Nucleotide binding protein, putative
GPEWAGGNWEIKTPTNIKTIPQWELAGEVMPYMKTTDAGIPSVVADHIGVYLGVMKGRGXLSGRSCFGLKSXIAAASSENAQPVSSESAEKNKAIAGGDSVGDTLARQLGVQIASSDEQAKAAEEFKKTLYGVVDGASSDEDESTSKTKKIHIRIRDKPAASAVDVNKLKEATKQLGLGPPLSRTRSLSGTPQEFNQAPTQPGGPAAAVSPAIVLNYLS

SEQ ID NO: 86716 - protein, 850 aa, Setaria italica
  Transcript Sequence Number=SeqID_20742
  Homolog annotation: Hit_ID=B9S8J3; Match level="QueryCoverage=97%, HitCoverage=49%, E-value=0.0, Identity=68%"; Hit description =Nucleotide binding protein, putative
  Pfam annotation: Domain name=WD40; Domain location=152-190; Score =21.7; E_value=0.003; Accession=PF00400.24; Description=WD domain, G -beta repeat
  Pfam annotation: Domain name=WD40; Domain location=60-98; Score=2.3; E_value=21; Accession=PF00400.24; Description=WD domain, G-beta repeat
  Pfam module annotation: Pfam domain module=WD40::WD40; Domain location=152-190::60-98
YGSLVLLCCLVYFVLVKKILDHVSIDTEVHLALTPLEPIVFFGFHKRMSVTVVGTVEGGRPPTKIKTDLKKPIVNLACHPRLPVLYVAYAEGLIRAYNIQTYAVHYTLQLAVDSTIKLMGAGAFGFHPTLEWIFVGDRGGTLLAWDVSTERPSMIGITQAGSQPITSVSWLPTLRLLVTIAKDGSLQVWKTRVIINPNRQPMETHFFERAAIETMDITKILTLQGGEAVYPLPRIKNLAVHPKFNLAAVIFADMSGTEAAKNKAAYTREGRRQLFALLQGARGSTAAVLKEKLLALGSSGILAEHQLQAQLQEQHLKGQSQLTISDVARKAFLHSHFMEGHAKSGPISRLPLVTISDSSNLLRDVPVCQPYHLELNFFNKENRVVQYPVRAFYLDGFNLMAHNLSSGTDNLYKKLYSTIPSNMECHPKNISYSPKQHLFLVVFELSGPNGVAHEVVLYWEQTDLQTVNSKGSSIKGRDAAFLGPDDNQYAILEEDKTSLNLFSLKAVATKEALENNAAVLEENTFADNAANSTERQGPLHFTFESEVDRIFSSPLESTLLYVISGKHIGLAKLLQGYRLSTDNGLSITTKTDGKKFIKLKPNETVLQVHWQTTLRGPVVGILTTQRVLIASADLDILSSSSTKFDRGLPSYRSMLWVGPALIFSSATAISMLGWDNKVRSILSTSFPRSVLIGALNDRLLLVNPTDINPRQKKGVEIRSCLVGLLEPLLIGFATMQQHFEQKLDLSEVLYQITSRFDSLRITARSLDILAKGPPVCGDLAVSLSQAGPQFTQIMRCNYAIKALRFSTALSILKDEFLRSRDYPQCPPTSHLFQRFRELGYACINRSSMLS

SEQ ID NO: 86717 - protein, 822 aa, Setaria italica
  Transcript Sequence Number=SeqID_20743
  Homolog annotation: Hit_ID=B9S8J3; Match level="QueryCoverage=100%, HitCoverage=51%, E-value=0.0, Identity=65%"; Hit description =Nucleotide binding protein, putative
  Pfam annotation: Domain name=TPR_2; Domain location=109-142; Score =2.9; E_value=15; Accession=PF07719.9; Description=Tetratricopeptide repeat
  Pfam annotation: Domain name=TPR_2; Domain location=604-637; Score =14.0; E_value=0.61; Accession=PF07719.9; Description=Tetratricopeptid e repeat
  Pfam module annotation: Pfam domain module=TPR_2::TPR_2; Domain location=109-142::604-637
LLEPLLIGFATMQQHFEQKLDLSEVLYQITSRFDSLRITARSLDILAKGPPVCGDLAVSLSQAGPQFTQIMRCNYAIKALRFSTALSILKDEFLRSRDYPQCPPTSHLFQRFRELGYACIKYGQFDSAKETFEVIADHESMLDLFICHLNPSALRRLAQKLEESATDSELRRYLERILRVRSTGWTQGVFANFAAESMVPKGPEWAGGNWEIKTPTNIKTIPQWELAGEVMPYMKTTDAGIPSVVADHIGVYLGVMKGRGNVVEVSEKSLVKAIAAASSENAQPVSSESAEKNKAIAGGDSVGDTLARQLGVQIASSDEQAKAAEEFKKTLYGVVDGASSDEDESTSKTKKIHIRIRDKPAASAVDVNKLKEATKQLGLGPPLSRTRSLSGTPQEFNQAPTQPGGPAAAVSPAMPNTAIDLFGTNTLVQPQAPSGATGPVIAGMGVTAGPIPEDFFQNTIPSHQLAARLPPPGIVLSRMAQPAPGMYQGPPVPNQNMMANVGLPDGGVPPQAPPQQSQFPQQPGIPMDNIGLPDGGVPPQSQPLPSQPQTLPSQPQGFQPGIPTPSQPIDLSTLVEGPGAAKQAARPPAPTAVRPGQVPRGAPAAECYKMALAHLEQNQLTDALSCLDEAFLALAKDQSREADIKAQATICAQYKIAVALLQEIARLQRVQGAGTLSAKEEMARLSRHLASLPIQAKHRINCIRTAIKRNMEVQNYAYAKQMLDLLYSKAPPTKQDELKSLIDMCVQRGLTNKSIDPFEDPSQFCSVTLSRLSTIGHDVCDLCGAKFSALSAPGCVICGMGSIKRSDALAGGPGPAVPSPFG

SEQ ID NO: 86718 - protein, 274 aa, Setaria italica
  misc_feature (102)..(102): Xaa can be any naturally occurring amino acid
  Transcript Sequence Number=SeqID_20744
  Gene Ontology: Mol. function=transferase activity, transferring glycosyl groups; Cellular component=endoplasmic reticulum membrane; Biological process=GPI anchor biosynthetic process
  Homolog annotation: Hit_ID=B6T7F4; Match level="QueryCoverage=100%, HitCoverage=55%, E-value=1e-144, Identity=91%"; Hit description =Dolichyl-P-Man Man
ICIGFTVLIDSIMWRRILWPEFEVLWFNSVLNRSSEWGTHSIHWYFTSALPRSMLVAYPLCMVGALLDRRIVPYMLPVFLFVVLYSKLPHKELRFIIGSIPXFNVSASLAASRLYNNRKKAGWNLLYILMLGAFLVSLGYSAVTFMASYNNYPGGYALKALHEADSSVKEKMVHIDAFTAMSGVSRFCESEYPWRYSKEEQISIEEFQERNFTYLLNEHHSISGYKCLFAVDGFSRVKLQHQIPPLYLVKEPKVFAHGNLRDPDILSLNWPGCP

SEQ ID NO: 86719 - protein, 195 aa, Setaria italica
  misc_feature (159)..(159): Xaa can be any naturally occurring amino acid
  Transcript Sequence Number=SeqID_20745
  Gene Ontology: Mol. function=peptidase activity
  Homolog annotation: Hit_ID=B9TA47; Match level="QueryCoverage=92%, HitCoverage=46%, E-value=3e-80, Identity=77%"; Hit description =Protein bem46, putative
PYLRTDLPTEEEDGTEVVRLRTRRGNEIVGVYVRHARASATMLYSHGNAADLGQMYGLFVELSKRLRVNLFGYDYSGYGRSTGKPTECNTYADIEAAYNCLKEKYGVADEDIILYGQSVGSGPTIDLASRLPNLRAVVLHSPILSGLRVLYPVKRTFWXDIYKNIDKIGLVNCPVLVIHGTSDDVVDCSHGKQLW

SEQ ID NO: 86720 - protein, 77 aa, Setaria italica
  Transcript Sequence Number=SeqID_20746
QHWRLIPLCDNILLFKLYFYSSSSLSGCLFSWLFLAISTEIHHIIIRYGHFHFQFIVFLHIFEFLIYFKPYFFHYFF

SEQ ID NO: 86721 - protein, 74 aa, Setaria italica
  Transcript Sequence Number=SeqID_20747
LLVNLSVSLYSNLFRCKPFELTVNKGESWRFFSGRGGRPYVSKCSCQITKGKKGEFSTFFSSNGLVDHIRPYIL

SEQ ID NO: 86722 - protein, 99 aa, Setaria italica
  Transcript Sequence Number=SeqID_20748
RDHRCGCRSSCIVMIGTENKGLFWTAPLHVFQLHFGTLASIHDPSIHPSIRSSESVDRGRPKPTRQSRQAPPHSSQPLPPPVQGNGSAARRHSRDGDLN

SEQ ID NO: 86723 - protein, 128 aa, Setaria italica
  Transcript Sequence Number=SeqID_20749
  Gene Ontology: Mol. function=electron carrier activity; Biological process=chromatin modification
  Homolog annotation: Hit_ID=B6SXR1; Match level="QueryCoverage=100%, HitCoverage=15%, E-value=2e-68, Identity=97%"; Hit description =Flowering locus D
EDPRRRGEFFLFYSYATVAGGPLLMALVAGEAAHNFETTPPTDAVSSVLQILRGIYEPQGIEVPDPLQSVCTRWGTDSFSLGSYSHVAVGASGDDYDILAESVGDGRLFFAGEATTRRYPATMHGAFI

SEQ ID NO: 86724 - protein, 108 aa, Setaria italica
  Transcript Sequence Number=SeqID_20750
ELLSVIAEQHLIELLSNICRPAPMENYWRYNLELKCENLANHLGRLCSHWKPPAVLFRINLRHIIFPFHIETLNISTIHRAFGTYVPATVVFHSLIDKYMRKEPGFGE

SEQ ID NO: 86725 - protein, 89 aa, Setaria italica
  Transcript Sequence Number=SeqID_20751
TWLYGYSLPRCRIRKFCGTTCIAKSVDASFKFLIYHSYGRHGVENSCLCECFVLIDSNAPCQLPGDFSLFWFSSISFYYSYVHLLVCYV

SEQ ID NO: 86726 - protein, 84 aa, Setaria italica
  Transcript Sequence Number=SeqID_20752
FQCPVPCLVAMENYWRYNLELKCENLANHLGRLCSETLNISTIHRAFGTYVPATVVFHSLLFLKLSPLFPSTTCLEADREHLSR

SEQ ID NO: 86727 - protein, 162 aa, Setaria italica
  Transcript Sequence Number=SeqID_20753
  Subcellular localization annotation: CTP_CleavageSite=34; ConfidenceScore=5.09e-01
LSSPGSRSRRSAPPRRARTAGATPIPFSIPYPSQSAAAWSDGEGGRGRLQQPPWAVLRCRRHPGLVCWPMGTGRRLGGGGTVAADRSGSQGSSRAATRHARSATGLGRVTGYIRWLFLTESPSSGKIQTDLSAIQGGVFGITTSFPNSLQTQVDFESPLGFY

SEQ ID NO: 86728 - protein, 61 aa, Setaria italica
  Transcript Sequence Number=SeqID_20754
  Gene Ontology: Mol. function=protein dimerization activity; Cellular component=nucleus; Biological process=regulation of transcription, DNA-dependent
  Homolog annotation: Hit_ID=Q0DWF2; Match level="QueryCoverage=100%, HitCoverage=21%, E-value=4e-20, Identity=78%"; Hit description=Auxin- responsive protein IAA10
  Pfam annotation: Domain name=AUX_IAA; Domain location=3-61; Score= -96.8; E_value=0.018; Accession=PF02309.8; Description=AUXIAA family
MTLSGSAKSLNLLDSSSEYQLTYEDRDGDWMLVGDVPWEMFVGSVKRLKIMRTSDANNGLG

SEQ ID NO: 86729 - protein, 152 aa, Setaria italica
  Transcript Sequence Number=SeqID_20755
  Gene Ontology: Mol. function=protein dimerization activity; Cellular component=nucleus; Biological process=regulation of transcription, DNA-dependent
  Homolog annotation: Hit_ID=Q0DWF2; Match level="QueryCoverage=92%, HitCoverage=50%, E-value=1e-59, Identity=78%"; Hit description=Auxin- responsive protein IAA10
  Pfam annotation: Domain name=AUX_IAA; Domain location=5-138; Score =39.3; E_value=3.5e-12; Accession=PF02309.8; Description=AUXIAA family
GWYSSNCPLFVKKAADESGMQKDKESEKKGRVVGWVKVNMDGDIIGRKVDLNAHRSYKTLASALELMFMKPSIGLCTSSSAKSLNLLDSSSEYQLTYEDRDGDWMLVGDVPWEMFVGSVKRLKIMRTSDANNGLGPRFQGVHRSAACTRGRA

SEQ ID NO: 86730 - protein, 198 aa, Setaria italica
  misc_feature (192)..(192): Xaa can be any naturally occurring amino acid
  Transcript Sequence Number=SeqID_20756
  Gene Ontology: Mol. function=protein dimerization activity; Cellular component=nucleus; Biological process=regulation of transcription, DNA-dependent
  Homolog annotation: Hit_ID=Q0DWF2; Match level="QueryCoverage=68%, HitCoverage=48%, E-value=9e-35, Identity=60%"; Hit description=Auxin- responsive protein IAA10
MRGGAGPTVAFIAGDPPPDAAAAEEVEENSGGEEEEEQEDDELELGLCLGSKKQQQQQTPSPAPCRILTARDLQPGALSPDSSVSSSSPAAGAAAASKRAKADAAPNATTSPGTVASGHPQSSFGVVGWPPIRTFRMNNLFNQAKENASEAGTKKAADESGMQKDKESEKKGRVVGWVKVNMDGDINGRKVXLNAHRS

SEQ ID NO: 86731 - protein, 88 aa, Setaria italica
  Transcript Sequence Number=SeqID_20757
  Subcellular localization annotation: CTP_CleavageSite=99; ConfidenceScore=5.43e-01
GTTSPVSRGQAASQGLSLRPHCPPRPRFPLRPHGAADGPARLHLPSLPVPYSPPTAVPPSSPNTGAFLRATLRRRRRRPPPPRARRCG

SEQ ID NO: 86732 - protein, 65 aa, Setaria italica
  Transcript Sequence Number=SeqID_20758
GMYMIICSLFSSFTFKVCNRDFLFYLVQEDVQVISLFYRGLLFGSIQSYLNIVLKKNLGTEKIRI

SEQ ID NO: 86733 - protein, 76 aa, Setaria italica
  Transcript Sequence Number=SeqID_20759
KEHLQLRHNLSKISHRFRMFLLLLFISVTASQFAILFKTTAYIGPINFTNGGDIAVSITCLLHRHSVVCPPIYVNF

SEQ ID NO: 86734 - protein, 96 aa, Setaria italica
  Transcript Sequence Number=SeqID_20760
HVLQYLPQDFFSILTWWILPCFVVKVARELFRFSHIFQESVWRACVVFSASIMSWMYLTTIILSSCMLFHLVCNLQVIHFDDYGKLLEQDADPWSI

SEQ ID NO: 86735 - protein, 337 aa, Setaria italica
  Transcript Sequence Number=SeqID_20761
  Gene Ontology: Cellular component=vacuole
  Homolog annotation: Hit_ID=Q7XV19; Match level="QueryCoverage=81%, HitCoverage=64%, E-value=3e-34, Identity=29%"; Hit description =OSJNBa0064H22.7 protein
LAMYGLRKFLFVDPELGMRIRFQKEYVAKIQDFFSILTWWILPCFVVKVARELFRFSHIFQESVWRACVVFSASIMSWMYLTTIILSSCMLFHLVCNLQVIHFDDYGKLLEQDADPLVYLKEHLQLRHNLSKISHRFRMFLLLLFISVTASQFAILFKTTAYIGPINFTNGGDIAVSSVVQVVGLVLCLHAAAKISHRAQNISSIASRWHALATCSTDSNYVTTPNSSGNLMPFPAHLFLRDYSESDLESLESAASLHGNSQGTAQLASYMSSYHKRESLVLYLLANPGGITIFGWIVDRAFLNTILMLELTLVLFVLSKTVVIPSKTLMQSYIGLT

SEQ ID NO: 86736 - protein, 68 aa, Setaria italica
  Transcript Sequence Number=SeqID_20762
  Gene Ontology: Mol. function=structural constituent of ribosome; Cellular component=ribonucleoprotein complex; Biological process =translation
  Homolog annotation: Hit_ID=B6TM74; Match level="QueryCoverage=60%, HitCoverage=22%, E-value=1e-13, Identity=90%"; Hit description=50S ribosomal protein L27
NPNSYRARKREYFRMQRERKKARAEGYVEPQLVLAVVDENSEVSAEGYVEPQLVLAVVDENSEVSADC

SEQ ID NO: 86737 - protein, 191 aa, Setaria italica
  Transcript Sequence Number=SeqID_20763
  Gene Ontology: Mol. function=structural constituent of ribosome; Cellular component=ribonucleoprotein complex; Biological process =translation
  Homolog annotation: Hit_ID=O65037; Match level="QueryCoverage=100%, HitCoverage=100%, E-value=5e-78, Identity=77%"; Hit description=50S ribosomal protein L27, chloroplastic
  Pfam annotation: Domain name=Ribosomal_L27; Domain location=57-137; Score=197.3; E_value=4.3e-56; Accession=PF01016.11; Description =Ribosomal L27 protein
  Subcellular localization annotation: CTP_CleavageSite=55; ConfidenceScore=5.66e-01
MASMAFSLAGAFKGLSLASPSSSMRPSFLGGDRAALSVGGAAVGVPVPARRLTIQMAHKKGAGSTKNGRDSKGQRLGVKIYGDQVAKPGAIIIRQRGTRVYPGNNVGMGKDHTLFSLIDGLVKFEKYGPDKKKVSVYPYEKQPENPNSYRARKREYFRMQRERKKARAEGYVEPQLVLAVVDENSEVSADC

SEQ ID NO: 86738 - protein, 127 aa, Setaria italica
  Transcript Sequence Number=SeqID_20764
GNGSGNWVCSETIDMTSPLPMRVLKMHASAKVRLEIFHGKSGMLVLWIEGEGLFLFSLSDRSMRKIDNEHVTKKHRFCPYEIDWLSCLAVINLVIDGSLPLDAGRKRLSADGGLWWQRIYRKAARHE

SEQ ID NO: 86739 - protein, 112 aa, Setaria italica
  Transcript Sequence Number=SeqID_20765
  Subcellular localization annotation: CTP_CleavageSite=69; ConfidenceScore=5.15e-01
HYTHHQSSPPTEVPLAPPHLPRPDPSRAPQAAPRTDRIAPAPLASIGPHRKRPPNRRAPEPSGGEGTAAAATRESSQPPAGDVGGADRGGKAGRRAGLGIRRGERSGGGEVP

SEQ ID NO: 86740 - protein, 87 aa, Setaria italica
  Transcript Sequence Number=SeqID_20766
  Gene Ontology: Mol. function=small protein activating enzyme activity
  Homolog annotation: Hit_ID=B6TS17; Match level="QueryCoverage=58%, HitCoverage=15%, E-value=9e-15, Identity=72%"; Hit description =Ubiquitin-like 1-activating enzyme E1A
FSYCFLLITFLKLCLHSCFQKKPGGETEQQELTYPSLQETISTPWNNLPRKMTKLYFAMRGKVNKIEDSAAIKKSSLFSFYLPNDGT

SEQ ID NO: 86741 - protein, 331 aa, Setaria italica
  Transcript Sequence Number=SeqID_20767
  Gene Ontology: Mol. function=small protein activating enzyme activity; Cellular component=nucleus; Biological process=metabolic process
  Homolog annotation: Hit_ID=B6TS17; Match level="QueryCoverage=96%, HitCoverage=95%, E-value=1e-170, Identity=89%"; Hit description =Ubiquitin-like 1-activating enzyme E1A
  Pfam annotation: Domain name=ThiF; Domain location=35-172; Score=9.3; E_value=5.1e-07; Accession=PF00899.13; Description=ThiF family
MDSGGGAEGELTAQETALYDRQIRVWGVDAQKRLSKAHVLVCGMNGTTTEFCKNIVLAGVGSLSLMDDHMVTEDDLNANFLIPPDESIYGGRSLAEVCCESLKDFNPMVRVSVEKGDPSLIDGEFLDKFDIIVVSGASLKTKLFINENCRKRSKRIAFYAIDCKDSCGEIFVDLQKHSYVQKKPGGESEPQELTYPSLQEAISVSWNNLPRRTAKLYFAMRVLENYELSEGRSPGETTLSDIPAVLARRKDMCDNMSLSESQIPTALIERLVAAGKKEHPPVCAILGGILGQEVIKSISCKGDPIKNFFYFDAADGKGVIEDIPPPPPSVN

SEQ ID NO: 86742 - protein, 139 aa, Setaria italica
  Transcript Sequence Number=SeqID_20768
  Homolog annotation: Hit_ID=O64533; Match level="QueryCoverage=94%, HitCoverage=9%, E-value=3e-31, Identity=52%"; Hit description =YUP8H12R.20
VGSLTGSCLSAATPLLSSTKETACLVALDVVENAIISITKVEEAYKCENQSKGIIEESIQFLSFDELLDGTDASEDADENRLLPAMNKLWPYLIICLRNKISVPVVRKCTEVLSRAISMSGGDFYVRRFHKDLLPSLFP

SEQ ID NO: 86743 - protein, 136 aa, Setaria italica
  Transcript Sequence Number=SeqID_20769
  Gene Ontology: Mol. function=two-component response regulator activity; Cellular component=nucleus; Biological process=two -component signal transduction system (phosphorelay)
  Homolog annotation: Hit_ID=B6SHA1; Match level="QueryCoverage=100%, HitCoverage=18%, E-value=2e-63, Identity=83%"; Hit description=Two -component response regulator-like PRR73
  Pfam annotation: Domain name=Response_reg; Domain location=3-111; Score=59.0; E_value=1.8e-14; Accession=PF00072.16; Description =Response regulator receiver domain
LRVLLVEIDDSTRQVVSALLLIPAENGLHAWQHLEDLQNNIDLVLTEVFMPCLSGIGLLSKITSHKVCKDIPVIMMSSNDSMSMVFKCLSKGAVDFLVKPLRKNELKNLWQHVWRRCHSSSGSGSESGIQTQKCAK

SEQ ID NO: 86744 - protein, 69 aa, Setaria italica
  Transcript Sequence Number=SeqID_20770
CQLGRCYPFNLIQRARAQQWFVQLEGVHRWWSTSYVGVRNAYAESNNESARKTYRNQRPIRPEHKTCSE

SEQ ID NO: 86745 - protein, 175 aa, Setaria italica
  misc_feature (83)..(83): Xaa can be any naturally occurring amino acid
  misc_feature (92)..(92): Xaa can be any naturally occurring amino acid
  Transcript Sequence Number=SeqID_20771
  Homolog annotation: Hit_ID=B6SHA1; Match level="QueryCoverage=75%, HitCoverage=16%, E-value=8e-51, Identity=80%"; Hit description=Two -component response regulator-like PRR73
LHLFSISSNPTHGVSLRYENHDPYHFQRASWQGNQGQQAVQVADAPDCPAKMPVGNDKDHDSHIEVTPHELGLKRLKTNGATXEIHDEWNIXLRRSDLSAFTRYHTSVASNQGGAGFGESSSPQDNSSEAVKTDSTCKMKSNSDAAPIKQGFLIGLVSNNNDMGSSTKNVVAKPS

SEQ ID NO: 86746 - protein, 93 aa, Setaria italica
  Transcript Sequence Number=SeqID_20772
EKFYLLTPTVLCVCDAQIQLLPIQIWYELTERQKQQSPFNPTNTPPLGACGDSGRGVVALRRRSGASGMGCALLRETRPRGTYARVETRTSRA

SEQ ID NO: 86747 - protein, 84 aa, Setaria italica
  Transcript Sequence Number=SeqID_20773
KDTPRQTKPKQEKLVKQTAHFELVSTEETAAPPSRSTRGNGLAEIHQIRASGTLPYRQPPKPAKFEGEKISTAKKRLNAVEFAS

SEQ ID NO: 86748 - protein, 127 aa, Setaria italica
  Transcript Sequence Number=SeqID_20774
  Homolog annotation: Hit_ID=B6SHA1; Match level="QueryCoverage=89%, HitCoverage=15%, E-value=3e-33, Identity=62%"; Hit description=Two -component response regulator-like PRR73
  Subcellular localization annotation: CTP_CleavageSite=66; ConfidenceScore=5.06e-01
QQQPSIDRGSSDAQCGSSNVFDPPVEGHAANYSVNGAVSGGHNGSNGQNGSSAGPNIARPNMESVNGTMSKNVAGGGSGSGSGNGTYQNRFPQREAALNKFRLKRKDRNFGKKVACFQLHACCSSKS

SEQ ID NO: 86749 - protein, 729 aa, Setaria italica
  misc_feature (553)..(553): Xaa can be any naturally occurring amino acid
  Transcript Sequence Number=SeqID_20775
  Gene Ontology: Mol. function=two-component response regulator activity; Cellular component=nucleus; Biological process=two -component signal transduction system (phosphorelay)
  Homolog annotation: Hit_ID=B6SHA1; Match level="QueryCoverage=100%, HitCoverage=100%, E-value=0.0, Identity=71%"; Hit description=Two -component response regulator-like PRR73
  Pfam annotation: Domain name=CCT; Domain location=674-718; Score =82.0; E_value=2.2e-21; Accession=PF06203.6; Description=CCT motif
  Pfam annotation: Domain name=CCT_2; Domain location=672-698; Score =16.9; E_value=0.023; Accession=PF09425.2; Description=Divergent CCT motif
  Pfam annotation: Domain name=Response_reg; Domain location=83-197; Score=77.8; E_value=4e-20; Accession=PF00072.16; Description =Response regulator receiver domain
  Pfam module annotation: Pfam domain module=CCT::CCT_2::Response_reg; Domain location=674-718::672-698::83-197
MGSTCQAGTDGPSHKDVRGIANGATANGYHGAEADADEWREKEDDLPNGHSGPPGAQQVDEQKDQQGQTIQWERFLPVKTLRVLLVEIDDSTRQVVSALLRKCCYEVIPAENGLHAWQHLEDLQNNIDLVLTEVFMPCLSGIGLLSKITSHKVCKDIPVIMMSSNDSMSMVFKCLSKGAVDFLVKPLRKNELKNLWQHVWRRCHSSSGSGSESGIQTQKCAKPNTGDEYENNSASSHDDDENDDEEDDDLSVGLNARDGSDNGSGTQSSWTKRAVEIDSPQQMSPDQLADPPDSTCAQVIHPKSEICSNKWLPAANKGQQEQKENKDESMGKYLEIGAPRNSTAEYQSSLNDTSVNPTEKRHEVHIPQCKSKKKVMEEDDCTNMLSEPNTETADLISSIARNTEGQQAVQVADAPDCPAKMPVGNDKDHDSHIEVTPHELGLKRLKTNGATTEIHDEWNILRRSDLSAFTRYHTSVASNQGGAGFGESSSPQDNSSEAVKTDSTCKMKSNSDAAPIKQGSNGSSNNNDMGSSTKNVVAKPSGNRERVTSPSAXKVGHPAEVPQSCVQHHHHVHYYLHVMTQQQPSIDRGSSDAQCGSSNVFDPPVEGHAANYSVNGAVSGGHNGSNGQNGSSAGPNIARPNMESVNGTMSKNVAGGGSGSGSGNGTYQNRFPQREAALNKFRLKRKDRNFGKKVRYQSRKRLAEQRPRVRGQFVRQSGQEDQAGQDIER

SEQ ID NO: 86750 - protein, 649 aa, Setaria italica
  misc_feature (270)..(270): Xaa can be any naturally occurring amino acid
  misc_feature (481)..(481): Xaa can be any naturally occurring amino acid
  misc_feature (608)..(608): Xaa can be any naturally occurring amino acid
  Transcript Sequence Number=SeqID_20776
  Gene Ontology: Mol. function=two-component response regulator activity; Cellular component=nucleus; Biological process=two -component signal transduction system (phosphorelay)
  Homolog annotation: Hit_ID=B6SHA1; Match level="QueryCoverage=97%, HitCoverage=82%, E-value=0.0, Identity=74%"; Hit description=Two -component response regulator-like PRR73
  Pfam annotation: Domain name=CCT; Domain location=588-633; Score =72.8; E_value=1.3e-18; Accession=PF06203.6; Description=CCT motif
  Pfam annotation: Domain name=Response_reg; Domain location=1-79; Score=2.5; E_value=0.00073; Accession=PF00072.16; Description =Response regulator receiver domain
  Pfam module annotation: Pfam domain module=CCT::Response_reg; Domain location=588-633::1-79
ADRCQIDNIDLVLTEVFMPCLSGIGLLSKITSHKVCKDIPVIMMSSNDSMSMVFKCLSKGAVDFLVKPLRKNELKNLWQHVWRRCHSSSGSGSESGIQTQKCAKPNTGDEYENNSASSHDDDENDDEEDDDLSVGLNARDGSDNGSGTQSSWTKRAVEIDSPQQMSPDQLADPPDSTCAQVIHPKSEICSNKWLPAANKRNSKKQKENKDESMGKYLEIGAPRNSTAEYQSSLNDTSVNPTEKRHEVHIPQCKSKKKVMEEDDCTNMLSXPNTETADLISSIARNTEGQQAVQVADAPDCPAKMPVGNDKDHDSHIEVTPHELGLKRLKTNGATTEIHDEWNILRRSDLSAFTRYHTSVASNQGGAGFGESSSPQDNSSEAVKTDSTCKMKSNSDAAPIKQGSNGSSNNNDMGSSTKNVVAKPSGNRERVTSPSAVKSNQHPMPHQISPANVVGKDKTDEGISNAVKVGHPAEVPQSCVQXHHHHVHYYLHVMTQQQPSIDRGSSDAQCGSSNVFDPPVEGHAANYSVNGAVSGGHNGSNGQNGSSAGPNIARPNMESVNGTMSKNVAGGGSGSGSGNGTYQNRFPQREAALNKFRLKRKDRNFGKKXVRYQSRKRLAEQRPRVRGQFVRQSGQEDQSRPRLLVVVLYY

SEQ ID NO: 86751 - protein, 185 aa, Setaria italica
  misc_feature (171)..(171): Xaa can be any naturally occurring amino acid
  Transcript Sequence Number=SeqID_20777
GDALFRWQKELDDPHTFVDLLVSTSNPLLQLRSLSSEVPFGAWLVGRKGSLTAGVQYKPISGSKNPMPFTELENWNCAISYGVGSTSPLSPSFIFSLELARSTQLTASFYQHLVVQRRVKNPFEDDQVVGITNYIDFGLELAARVDKDKATENGSSLFQLAASWQANKNFXLKGKLGPSKSSVAL

SEQ ID NO: 86752 - protein, 126 aa, Setaria italica
  misc_feature (105)..(105): Xaa can be any naturally occurring amino acid
  misc_feature (120)..(120): Xaa can be any naturally occurring amino acid
  Transcript Sequence Number=SeqID_20778
QLTASFYQHLVVQRRVKNPFEDDQVVGITNYIDFGLELAARVDKDKATENGSSLFQLAASWQANKNFLLKGKLGPSKSSVALAFKSWWRPSFTFSVTAVNDHTMXEHRMDFGLRVEDLRXASYQRA

SEQ ID NO: 86753 - protein, 117 aa, Setaria italica
  misc_feature (7)..(7): Xaa can be any naturally occurring amino acid
  Transcript Sequence Number=SeqID_20779
VSAAADXNSGTEVKGDALFRWQKELDDPHTFVDLLVSTSNPLLQLRSCAYDPNYRIGAFGTLPLLMGNRVRSKDYGVMGVRYGSENLSVGASFVPIPLSSEVPFGAWLVGRKGSLTA

SEQ ID NO: 86754 - protein, 226 aa, Setaria italica
  misc_feature (221)..(221): Xaa can be any naturally occurring amino acid
  Transcript Sequence Number=SeqID_20780
  Gene Ontology: Mol. function=nucleotide binding; Biological process =defense response
  Homolog annotation: Hit_ID=Q2R8J8; Match level="QueryCoverage=98%, HitCoverage=23%, E-value=7e-68, Identity=61%"; Hit description=NB -ARC domain containing protein, expressed
VKILPTEVIQLPYLIHLFGKFKLRDKAMQDELQKFLASGKCKLQTLGGFLVDESEGFAELMGYMKKMRKVKIWCESSATSTKLTTLQKAIQEFIHDEKDASNDPRSLSLYFDGCSEDFLKDLKAPCYLRSLKLQGRLLELPGFVTALRRLRELYLQSTKMTADLLTALTNLTHLQYLKLIADELEDIHIKDKALPRLLGLCFVLQRPTFPKVEKGALPFLXSLQLL

SEQ ID NO: 86755 - protein, 74 aa, Setaria italica
  Transcript Sequence Number=SeqID_20781
  Gene Ontology: Mol. function=6-phosphofructokinase activity; Cellular component=6-phosphofructokinase complex; Biological process=glycolysis
  Homolog annotation: Hit_ID=B6SVM3; Match level="QueryCoverage=74%, HitCoverage=9%, E-value=3e-27, Identity=100%"; Hit description=6 -phosphofructokinase
FVLTTCPGIWQEHFFLSNADPTYMIRAIPSNASDNVYCTLLAHSAIHGAMAGYSFTVGMVNGRHAYIPFHRVTS

SEQ ID NO: 86756 - protein, 109 aa, Setaria italica
  Transcript Sequence Number=SeqID_20782
MDRGAGIPMDAGQDLWDWEVLPDERTFSMGHGSVHLNDQETEEHILPPPSGDAAEAEPDVQCKDIGVVPDESKPVLSVADLMASDKNEEEKVFQSPDDLMASDKNEEKV

SEQ ID NO: 86757 - protein, 203 aa, Setaria italica
  Transcript Sequence Number=SeqID_20783
  Homolog annotation: Hit_ID=Q9SRW4; Match level="QueryCoverage=46%, HitCoverage=35%, E-value=2e-10, Identity=39%"; Hit description =F20H23.8 protein
MPDQETEEHILPPPSGDAAEAEPDVQCKDIGVVPDESKPVLSVADLMASDKNEEEKVFQSPDDLMASDKNEEEKVFQSPDAKEADDDKFSEEEEDVKKDNNKARPECVVFSVGKLKVNGIGALCSFGVAAATVCIFLIGGRVQHHHRQQQQQKIQLQFYGDDKRIQQVVQQTSRLNQAMSSVMGAGGASTRANISFGGFYDGF

SEQ ID NO: 86758 - protein, 235 aa, Setaria italica
  misc_feature (17)..(17): Xaa can be any naturally occurring amino acid
  Transcript Sequence Number=SeqID_20784
  Gene Ontology: Mol. function=nucleotide binding; Biological process =defense response
  Homolog annotation: Hit_ID=B9GTE7; Match level="QueryCoverage=98%, HitCoverage=25%, E-value=1e-33, Identity=36%"; Hit description=Cc -nbs-lrr resistance protein
  Pfam annotation: Domain name=LRR_1; Domain location=148-169; Score =16.1; E_value=0.15; Accession=PF00560.25; Description=Leucine Rich Repeat
  Pfam annotation: Domain name=LRR_1; Domain location=171-192; Score =10.7; E_value=2.7; Accession=PF00560.25; Description=Leucine Rich Repeat
  Pfam module annotation: Pfam domain module=LRR_1::LRR_1; Domain location=148-169::171-192
IAEGLVEDREDGTTMEXVAKYYLTELTQRCLLRVTECNACGRPRTFVMHDLVREVTSVIAKKEKFGIAYRDAGITKVSHEARRLSIQKGAQSLNSLTSSRLRSFILFDPEVPSSWIYDVLSQFRLLRVLCLRFANIEQVPGMVTELYNLRYLDFSHTKVKHIPVSFKKLRNLQVLDLRFSYVEELPLEITTLINLRHLYVIVIHDLQQRSLDCFSAVKILGNICHLKNLQTLHIV

SEQ ID NO: 86759 - protein, 97 aa, Setaria italica
  Transcript Sequence Number=SeqID_20785
  Gene Ontology: Cellular component=endoplasmic reticulum
  Homolog annotation: Hit_ID=B6TUJ8; Match level="QueryCoverage=100%, HitCoverage=42%, E-value=3e-16, Identity=40%"; Hit description=Seed maturation protein
  Pfam annotation: Domain name=Reticulon; Domain location=2-97; Score= -16.8; E_value=0.0014; Accession=PF02453.9; Description=Reticulon
IWTNASSFFNLPVPRIPETLLSERATRQAIQDGHRRLSRLVETLYYIACGKDIKMFILTVFSLYIASVIADCFSSLTSSFFVVLGTMTLPALYERYH

SEQ ID NO: 86760 - protein, 75 aa, Setaria italica
  Transcript Sequence Number=SeqID_20786
  Subcellular localization annotation: CTP_CleavageSite=39; ConfidenceScore=5.72e-01
ASPPAPPMGSPASAPSASVPAMSPLGGGLGDALPPAGASAMTPAAAPATEKSAAASAAAASFVSVAGAVVAAVVF

SEQ ID NO: 86761 - protein, 330 aa, Setaria italica
  Transcript Sequence Number=SeqID_20787
  Gene Ontology: Mol. function=sequence-specific DNA binding; Cellular component=nucleus; Biological process=regulation of transcription, DNA-dependent
  Homolog annotation: Hit_ID=Q657C0; Match level="QueryCoverage=95%, HitCoverage=78%, E-value=1e-115, Identity=64%"; Hit description=Heat stress transcription factor A-6a
  Pfam annotation: Domain name=HSF_DNA-bind; Domain location=21-192; Score=173.4; E_value=6.6e-49; Accession=PF00447.9; Description=HSF -type DNA-binding
GPRRRAAPGRSLRHDPGSGMPAPFVAKTYEMVADAATDAVVSWAPGGAGNSFVVWDPQALAVGLLPRFFKHANFASFIRQLNIYGFRKVNPDRWEFAHESFLAGQKHLLRKIKRRRAPKPQMEAHPRNGASICFKQPKDSGEVESLKRDRAALRAEVLTLKQQYSSCKSQLVALEERILNNERNQQKAIAFFAKVLSNPTFVQQVLLNYAANKELYSTAKRKRLMENEEQRVGTLKNGLEPTLATEASASAASSDGSAVAKHEPMPEWNYQEMDNIWEDVWDELDAIPGAEMDQEDKAAAGFEVEEFTGRPCGWVDDCPYLVEQMQFVEH

SEQ ID NO: 86762 - protein, 81 aa, Setaria italica
  Transcript Sequence Number=SeqID_20788
  Subcellular localization annotation: CTP_CleavageSite=25; ConfidenceScore=5.49e-01
SRSLSPSPLPPWRPAATPFLCARINSSNRDQVTKARRLPLEGRRDQISRARLRGLLLLLASLCCLLASSVSARARSGLLVT

SEQ ID NO: 86763 - protein, 131 aa, Setaria italica
  Transcript Sequence Number=SeqID_20789
  Homolog annotation: Hit_ID=B6UI65; Match level="QueryCoverage=25%, HitCoverage=18%, E-value=4e-11, Identity=88%"; Hit description =GTPase activating protein
  Subcellular localization annotation: CTP_CleavageSite=27; ConfidenceScore=5.13e-01
YSFLNEVWCTLDLTTSSSFLSFFHRTLQTAKTKVINSCLNPVWNEEMIFSMKEPVGVIKFVSIYYILHDELLHTKRQRSMHILPFGPLVSLRLVSCLFFMKRHVSCLKKSSLVNVLTKKYGHTMLCSIIAV

SEQ ID NO: 86764 - protein, 170 aa, Setaria italica
  Transcript Sequence Number=SeqID_20790
  Gene Ontology: Mol. function=ARF GTPase activator activity; Cellular component=plasma membrane; Biological process=regulation of ARF GTPase activity
  Homolog annotation: Hit_ID=B6UI65; Match level="QueryCoverage=98%, HitCoverage=94%, E-value=4e-76, Identity=80%"; Hit description =GTPase activating protein
  Pfam annotation: Domain name=C2; Domain location=13-92; Score=91.6; E_ value=2.7e-24; Accession=PF00168.22; Description=C2 domain
MEEAGRGRGCGLLKVVVARGRSLAVRDFTSSDPYVIVRAADTTAKTKVINSCLNPVWNEEMIFSMKEPVGVIKFEVFDWDRFKYDDKMGHAFLDLQPVAVATKLRRALRLTAGETKLRKVAPDADNCLLSDSFVTYANGEVALDAWLRLRDVESGELFITVKWIEAEDTK

SEQ ID NO: 86765 - protein, 35 aa, Setaria italica
  Transcript Sequence Number=SeqID_20791
QLANFFCFGTVFKLVCLLQHLKLIHMLFFLFLGRR

SEQ ID NO: 86766 - protein, 113 aa, Setaria italica
  Transcript Sequence Number=SeqID_20792
  Gene Ontology: Mol. function=kinase activity; Cellular component =alpha-glucosidase II complex; Biological process=N-glycan processing
  Homolog annotation: Hit_ID=B9SBM9; Match level="QueryCoverage=69%, HitCoverage=11%, E-value=3e-25, Identity=66%"; Hit description =Glucosidase II beta subunit, putative
  Pfam annotation: Domain name=Ldl_recept_a; Domain location=30-74; Score=3.2; E_value=0.071; Accession=PF00057.10; Description=Low -density lipoprotein receptor domain
GLQTKGSFPRSRLNDGYCDCADGTDEPGTSACPEGKFYCRNIGDTPHLLFSSFVNDKICDCCDGSDEYESGVHCQNTCRNRNDIAEADNGGVKLSVTRLDATNEFTNKHTIDI

SEQ ID NO: 86767 - protein, 194 aa, Setaria italica
  misc_feature (41)..(41): Xaa can be any naturally occurring amino acid
  Transcript Sequence Number=SeqID_20793
  Gene Ontology: Mol. function=kinase activity; Cellular component =alpha-glucosidase II complex; Biological process=protein kinase cascade
  Homolog annotation: Hit_ID=B9SGN0; Match level="QueryCoverage=56%, HitCoverage=60%, E-value=2e-19, Identity=43%"; Hit description =Glucosidase II beta subunit, putative
MWTPSPGRRVVSSAPATLLLRLLLLAGAADAAPPLVGVSPXDEAYFATQVIACRDGSGSFPRSRLNDGYCDCADGTDEPGTSACPEDCCDGSDEYESGVHCQNTCRNRNDIAEADNGGVKLSVTRLDATNEFTNKHTIDIENLVHNHINKDLIQKLRGLRMALVIELGLVVCIFVFCVARRRTRTRRRQHILKR

SEQ ID NO: 86768 - protein, 311 aa, Setaria italica
  misc_feature (90)..(90): Xaa can be any naturally occurring amino acid
  Transcript Sequence Number=SeqID_20794
  Gene Ontology: Mol. function=electron carrier activity; Cellular component=integral to membrane; Biological process=oxidation reduction
  Homolog annotation: Hit_ID=B6U7K2; Match level="QueryCoverage=100%, HitCoverage=60%, E-value=1e-151, Identity=81%"; Hit description =Cytochrome P450 CYP721B4
  Pfam annotation: Domain name=p450; Domain location=1-308; Score= -12.0; E_value=4.5e-11; Accession=PF00067.14; Description=Cytochrome P450
IDVHKGFHTLSADVISCVAFGSSYEEGKRIFQLQEEQMKLALLAMRTVYVPGFRFVPTKKNRTRQKLNTEIQCSLRKLIEINGRKCEDSXNLLGLMLSASKAGSEFKMGIDEIIHECKTFYFAGKETTANLLTWAALLLALHQEWQDKAREEVLKVCGKYEHPNADNLSNLKIITMVLKETLRLYPPAVFINRTATKDIKLGKLDIPGGTRFDFPIIDIHHDHDVWGNDADEFNPLRFADGKSYHLGAYLPFGIGPTICVGQNLAMVEAKVALAMTLQRFAFTVSPSYVHAPMMLFTLQPQYGAQVLVQKM

SEQ ID NO: 86769 - protein, 117 aa, Setaria italica
  Transcript Sequence Number=SeqID_20795
SNNGAFFHRFSCAVNRINHGVFNTLTNSEIQYNLVIRLIGLRISTRQYKTNGSFLDNHHLNPNTTRRFCLANTSSSSITNIFIGFNCHCSSCRRIIPRLQGAALPIHVSILWKSRGG

SEQ ID NO: 86770 - protein, 55 aa, Setaria italica
  Transcript Sequence Number=SeqID_20796
VSISATESSFICFSELLTPSPGEDAVFCCSELCASTPNKTISPANDEHVQDYYGS

SEQ ID NO: 86771 - protein, 119 aa, Setaria italica
  Transcript Sequence Number=SeqID_20797
VHSSEQQTETVSDAQIDTLCVQETAIVDHGETRGTVDLNDISTQTPALPGSGLFGVEAHSSEQQKTASSPEIETADVKETAIADHEETGDESGVSTHAPLLTESGEKGSPGTDLHDFEG

SEQ ID NO: 86772 - protein, 146 aa, Setaria italica
  Transcript Sequence Number=SeqID_20798
PFLGKLYCKIVVLSICPPSSGEAMVEISSEPLSQEAKEAASTGPPGNNENAKVQEATVAAQVLLSTEHAPDGETSRLAGGDTELQLTPAGQAMVDISSEPPSSQEVNEAPISDALGNDENIKTADTGFACLSVLASPSSVFSLPGA

SEQ ID NO: 86773 - protein, 1099 aa, Setaria italica
  Transcript Sequence Number=SeqID_20799
  Homolog annotation: Hit_ID=Q656N0; Match level="QueryCoverage=44%, HitCoverage=12%, E-value=9e-28, Identity=32%"; Hit description =Putative STH1 protein
SVASQNQEHVKTGKDHLAVCSEVPASHLAMASANPASDHKSESAQFDRSASLLQNSGKEPTVVPSEVDIAAPNKAPGSRRKGSARESRSRSNSATAASERRARLTGSKQVEDISAKPTTTVCVSSVEQQRTDSLRAEVTAASVCEAQKNPGSHVSSDISIPVGSHASGAAVTEETTMMTQTPVMAKSEETKLPGDLQGIEFKSSVPQTNMVSAAESAPANDEHLQGAEVNSSEQTKVVSAAEPAPSNDEHVQGVEVDSSEQPTKTVSAAESAPSNDEEHTTHEVRLKTSDVNILTSSAATDILQDKIDTSVACQSDAPCTDEIARQSDASLLDSKAPHDGSAKYSRGSTKEDDYVLRSEATGVDVTGSKQDDVKVDDTQVDDTSRASSSHLAATSQSTQSDQPPDQVEIVENRNEQVKMEETLDKSSGDNQTHSQNHETSHDTALLRNSPSEYLNEHCSAQVDGDTFKSKENIVEIHAAMNIDGPEEALDASSMQSQKEGSTTDVGLSTDGDTSETKETTVETHAAMNADGPEEAQDALSTQSDKEASMAEVDVPTDSSPTVCKAHNDLEGQVSCEETLVRADADNRTHSNTNDDSNNKDEDTMVNPVDSTREPMEESTIIASEISDLNKQSCTSHFGNDPPSSMQATVESNKVTSDAEMVCPGRLESSVIETGTVGIQETVIGDLERSEKTGDLDEKTGSPQRDVLGTSCSMMGLVCEKTPIEDLTAGSHLEAPVEPTQETTVANAVVFMDACNTEPDGDSTVAEGQKQTVEMVHSPENQSAASEHVETQAKPTVICGPMLNESQTAGLEDDFSILKHGGPTASSELVVESNPTSEISAIQVETEATKSDGYCTVEDGNASSETVMELEPNKETTIPMQEDTTETNDTIATYKACNDSESHSFGEAVMEMQSSEIKAASSIQSGAGNISTQAPAMPDGTEQTNMASTSEVAPENDKEHMPGTEVHSSDQQTKTISPANDEHVQDIMVHSSEQQTETVSDAQIDTLCVQETAIVDHGETRGTVDLNDISTQTPALPGSGLFGVEAHSSEQQKTASSPGDGVNSSEKQIKLDSVAEIETADVKETAIADHEETGDESGVS

SEQ ID NO: 86774 - protein, 928 aa, Setaria italica
  Transcript Sequence Number=SeqID_20800
MVESDKDTCDAEIVSAGKLESSGGGDIGTVSVQEAADDADHEGTQGKGIEAHGSEQMEMVSVAQAASNLALVGYSSSEDSMLDDSARAADGGDFVDSKGAGVDSQETTSTQTTSTLPENTDMDWQSCPLQSGNDSPATTAVTVESDKDIGDAGTACVGKTESSSGVGIEMMVVQETSIADQQGAIGTGDLNEENDSLRRGDDCGTSCSTLVTACEKAPSVEGVIVADHSEVPTSVELIAAQSTQEATISNQEEIVAHEKATSVEGLTVDSRSDAPASMVLVGVESTQEAMSNQEQIIDAVGSMHESNSTASGDAATASGADLTEEVVKAPEEQPILFQLVDSQAKAAEISGPMQEESIANLENDVSEPKDGSPTASSERVAEPKPVDETSVMQVALTTSTGDECAAEDHNVVPSETVMESEPIQEIAVPMQEDGKEANDAHTAREVCRDLEGHASGAVSMPVESEIVARQGDDAEANDTTIISEVCKGTESHVSGEVPIPVESSPLKVELANETDDSQGLNRGTGFDEREMQCTTQPVAVADVPIIVGDEVLNTESTPGGANAKSDGADTEQKLLPSSVEPMVDVSSELPSQEVKEAPSTDLSGNDEDVKMEEAPAAQGQLNTDAAYGGENAKLGEAALELQLPPSSGEAIVEISSEPLSQEAKEAASTNPPGNDENELQLPPSSGEAMVEISSEPLSQEAKEAASTNPPGNDENELQLPPSSGEAMVEISSEPLSQEAKEAASTGPPGNNENAKVQEATVAAQVLLSTEHAPDGETSRLAGGDTELQLTPAGQAMVDISSEPPSSQEVNEAPISDALGNDENIKTENTADAEPAPGSENTELGEANTERQAKPVSAVVMVESSSELPSQEGKEAATTDLSGDDEKAKSARAAVVAELFGDATEGGSDQPLPSPRGEGEDADGDGGVE

SEQ ID NO: 86775 - protein, 229 aa, Setaria italica
  Transcript Sequence Number=SeqID_20801
  Homolog annotation: Hit_ID=Q10A51; Match level="QueryCoverage=93%, HitCoverage=84%, E-value=1e-22, Identity=36%"; Hit description=F-box domain containing protein, expressed
RRTGDQGHVHGACHSSPFQVIFLGRCGDEIIVWVYSSETGTWGDAISIMWLSPFDPDDFACCNTLVGNSIYWLFNESSMTILEFDLDTQRLATLEVPPEVIDLDTSVRDECQFLLMPTEDGELGFLILEGFNARIWKRKAKSDGDTGWVLRNTIKLHLPLKRWAHGYPSEIIGFAEDCNVVFIATGGGVVFMVHLESAQFKKLPQKLGYRTCYPFTSFCAAGKYPACSF

SEQ ID NO: 86776 - protein, 45 aa, Setaria italica
  Transcript Sequence Number=SeqID_20802
  Homolog annotation: Hit_ID=Q7XKX4; Match level="QueryCoverage=100%, HitCoverage=12%, E-value=9e-13, Identity=80%"; Hit description =OSJNBa0035I04.1 protein
MAMEMRARESVNMSEDLTGAIAPYAIALHDVFLHSHCSSCFSELP

SEQ ID NO: 86777 - protein, 57 aa, Setaria italica
  Transcript Sequence Number=SeqID_20803
NSLEDQLYIRGSSIECTVVSISNMGLTGYACTLVRHFILMERVVHKLVDVMRIQLLL

SEQ ID NO: 86778 - protein, 47 aa, Setaria italica
  Transcript Sequence Number=SeqID_20804
  Subcellular localization annotation: CTP_CleavageSite=24; ConfidenceScore=5.49e-01
PSCSSSSSSSSSSSSSSSLDPSPSSSSEPPSSSDSSSASPPSRSASP

SEQ ID NO: 86779 - protein, 80 aa, Setaria italica
  Transcript Sequence Number=SeqID_20805
  Gene Ontology: Mol. function=oxidoreductase activity, acting on paired donors, with incorporation or reduction of molecular oxygen, 2-oxoglutarate as one donor, and incorporation of one atom each of oxygen into both donors
  Homolog annotation: Hit_ID=B4FLB6; Match level="QueryCoverage=48%, HitCoverage=12%, E-value=9e-14, Identity=94%"; Hit description =Oxidoreductase
MASSPCKRSRPPALARLLLLFLLALLAGRGGAAGGGGKGSSVYPAAVVYPHHSRQISWKPRVFLYQHFLSDDEDNHLISL

SEQ ID NO: 86780 - protein, 73 aa, Setaria italica
  Transcript Sequence Number=SeqID_20806
DDNALIPFPLSHQYKGKYIILLSPFSIISVIKKGTSEILGIKGRLITQAQGGEIALMILGKQGLNFLMSLYLI

SEQ ID NO: 86781 - protein, 79 aa, Setaria italica
  misc_feature (46)..(46): Xaa can be any naturally occurring amino acid
  Transcript Sequence Number=SeqID_20807
MLTCLTRLHTRPSRVCVQHLHALAMHVKQRPNQTPPPMPPPAPPPXPPPPPEPTPPPAPAPQPPPAPAPPPPPSPPPPP

SEQ ID NO: 86782 - protein, 90 aa, Setaria italica
  misc_feature (70)..(70): Xaa can be any naturally occurring amino acid
  Transcript Sequence Number=SeqID_20808
  Gene Ontology: Mol. function=binding
  Homolog annotation: Hit_ID=Q10D20; Match level="QueryCoverage=87%, HitCoverage=2%, E-value=2e-24, Identity=70%"; Hit description=WD-40 repeat family protein, putative, expressed
AASPIGGIPRYGRLSGDVYICNQCTIGDTVQTVGGMPVVLALVEAAETRDMLHMALELLALSLQQSHQNXVKNMQALEGLSFFLLLFLHR

SEQ ID NO: 86783 - protein, 56 aa, Setaria italica
  Transcript Sequence Number=SeqID_20809
FFLDRPINSSVIKIFSEVPNFAGCQQSTNVGALSDYKRRYPLVITDKLNSKLRDEP

SEQ ID NO: 86784 - protein, 95 aa, Setaria italica
  Transcript Sequence Number=SeqID_20810
  Gene Ontology: Mol. function=nucleic acid binding; Cellular component= intracellular
  Homolog annotation: Hit_ID=B6T9I0; Match level="QueryCoverage=97%, HitCoverage=23%, E-value=8e-25, Identity=69%"; Hit description =Splicing factor 45
  Subcellular localization annotation: CTP_CleavageSite=62; ConfidenceScore=5.46e-01
MLGGLYGDLPPPSSSAGDDDKASTASVWSSATKMAPPTLRKPSTTFAPPPSLLRNQHLRPPKAAPASAAPAVVAAEPALAPAASFQPAFVAVQSV

SEQ ID NO: 86785 - protein, 432 aa, Setaria italica
  Transcript Sequence Number=SeqID_20811
  Gene Ontology: Mol. function=protein serine/threonine kinase activity; Cellular component=vacuole; Biological process=protein amino acid phosphorylation
  Homolog annotation: Hit_ID=Q7XIW5; Match level="QueryCoverage=99%, HitCoverage=99%, E-value=1e-161, Identity=69%"; Hit description=CBL -interacting protein kinase 29
  Pfam annotation: Domain name=APH; Domain location=7-213; Score=-20.0; E_value=0.067; Accession=PF01636.15; Description=Phosphotransferase enzyme family
  Pfam annotation: Domain name=NAF; Domain location=313-370; Score =48.4; E_value=2.8e-11; Accession=PF03822.6; Description=NAF domain
  Pfam annotation: Domain name=Pkinase; Domain location=27-283; Score =309.8; E_value=5.9e-90; Accession=PF00069.17; Description=Protein kinase domain
  Pfam annotation: Domain name=Pkinase_Tyr; Domain location=27-281; Score=0.3; E_value=9.5e-14; Accession=PF07714.9; Description=Protein tyrosine kinase
  Pfam module annotation: Pfam domain module=APH::NAF::Pkinase::Pkinase_ Tyr; Domain location=7-213::313-370::27-283::27-281
MSPATGAVASAAPGEESPAGTVLLGRYELGGLLGRGASAKVYLARDLLTGESVAIKSFPNPRASGGAEEGRRPAAIEREAAILRRLRHRHVVRLHEILATRKKVHFVLDLAAGGELFSLVDASGRMTEDLARHYFRQLISAVRYCHARGVFHRDIKPENLLLDEAGALKVADFGLGAVADGGNLRHTLCGTPAYVAPEILSRKGYDPAKVDIWSCGVVLFVLAAGYLPFNDASLVNMYRKIYAGKFRCPSWFSPALRDLLRRVLHPNPDARIDADGIVAHPWFCDGASDEELARLMVGGHEEAWFKPEFKEDMAREMTAFDILSFSPGSDLSALFGAGPGKERVFVSEPAADVLSRVEAAGRKEGYRVRREGKRGTGPVYLEEESGGIVAKVSVFKLADAVCVVEVVKGDGAEAALFWTERLQPAVKPPVLS

SEQ ID NO: 86786 - protein, 66 aa, Setaria italica
  Transcript Sequence Number=SeqID_20812
  Pfam annotation: Domain name=DPM3; Domain location=19-66; Score=9.6; E_value=0.00014; Accession=PF08285.3; Description=Dolichol-phosphate mannosyltransferase subun
LSIAFSYILYCRKAHHSQMKHIFKIVAILVAISSIWIALLETSTIPRSYTWLLPIYLVVALGCYGL

SEQ ID NO: 86787 - protein, 146 aa, Setaria italica
  Transcript Sequence Number=SeqID_20813
  Pfam annotation: Domain name=DPM3; Domain location=74-145; Score =96.7; E_value=8.3e-26; Accession=PF08285.3; Description=Dolichol -phosphate mannosyltransferase subun
VPGIPVSAIAQRTIPPDLADARLPKDPATGARRLEFRSCCRCPPPPARCCCPRCADRSGPGLIHPLWKAHHSQMKHIFKIVAILVAISSIWIALLETSTIPRSYTWLLPIYLVVALGCYGLFMVGFGLMFFPTCPQEAILLQQDIC

SEQ ID NO: 86788 - protein, 206 aa, Setaria italica
  Transcript Sequence Number=SeqID_20814
  Gene Ontology: Mol. function=catalytic activity
SWCRRRKHPSVLPTTSAKRRRVEARTTPQLQLTRLPIEKEEEEDVTQVTQQELAQEHSGSDSSPIREPQPPLVPIWTSSAGKVYYGLTSDRLALNSYYESYQKYSEKQARQEQLPTLRSSLTVSSITESYGPKQKEILLNASKSILSLSAYIDDKEINRCTGIAVEWDDEKGCGIVLTSACLITSKKPFNDWSDKEYASNAKFLDT

SEQ ID NO: 86789 - protein, 315 aa, Setaria italica
  misc_feature (17)..(17): Xaa can be any naturally occurring amino acid
  misc_feature (48)..(48): Xaa can be any naturally occurring amino acid
  Transcript Sequence Number=SeqID_20815
  Homolog annotation: Hit_ID=Q9SRT1; Match level="QueryCoverage=40%, HitCoverage=43%, E-value=3e-28, Identity=46%"; Hit description =F21O3.6 protein
  Pfam annotation: Domain name=DUF506; Domain location=1-228; Score =274.2; E_value=2.9e-79; Accession=PF04720.4; Description=Protein of unknown function (DUF506)
MVLSFMEDSAAVAERPXRGRCAGNCFNGNQDGSDDEDFDFLPSASAPXVAPAATGDRSSASQGLVQCASTAERNLLADASRIAERCGKGGGGSGRKKADVRRAVADGLRALGYDAAVCVSRWDKAPSHPAGEHEYIDAVVAGSGAASVRLVVEVDFRSEFEVARPTKVYRAALQALPPLFVGTPDRLGRVVALVADAARQSLRKRGLHFPPWRKPEYMRAKWLSPHARAGVPDTPPLTTTLATPVSAASFSGEFELRFDEKPKAPDGTAREDGEEKITVVVSPSPSPWHPVEAEASATSPPQAKGKVVTGLASVL

SEQ ID NO: 86790 - protein, 148 aa, Setaria italica
  Transcript Sequence Number=SeqID_20816
  Pfam annotation: Domain name=DUF506; Domain location=19-147; Score= -34.2; E_value=2e-06; Accession=PF04720.4; Description=Protein of unknown function (DUF506)
AAPAGGEKDELSEPSSLCLDGMVRSFLEDGVGGGGGERGAAARCCNCFHAGDTSDDEDGPASADAAAADIAETIKGLVHCASLRERNLLADVSTQVERHRASGARKRDLLRLLAESLRAAGHDAAVCLSRWDKSSSHLAGEHAYLDVL

SEQ ID NO: 86791 - protein, 113 aa, Setaria italica
  Transcript Sequence Number=SeqID_20817
  Gene Ontology: Mol. function=metal ion binding; Biological process =metal ion transport
  Homolog annotation: Hit_ID=Q10LJ9; Match level="QueryCoverage=38%, HitCoverage=11%, E-value=7e-09, Identity=72%"; Hit description=Heavy metal-associated domain containing protein, expressed
  Subcellular localization annotation: CTP_CleavageSite=4; ConfidenceScore=5.14e-01
MSSRASPVRMHFVVFWLNRGGFWLLVFFSGVQSVTVDAAQHKVTVTGTVDASTLVQRLHKSGKKGVPWDCHPPANKTEAAGPPAAKPAGDAGKDAAAAAAADKKPEEAVKEPK

SEQ ID NO: 86792 - protein, 137 aa, Setaria italica
  Transcript Sequence Number=SeqID_20818
  Gene Ontology: Mol. function=metal ion binding; Cellular component =cell wall; Biological process=metal ion transport
  Homolog annotation: Hit_ID=Q10LJ9; Match level="QueryCoverage=48%, HitCoverage=17%, E-value=7e-24, Identity=80%"; Hit description=Heavy metal-associated domain containing protein, expressed
  Pfam annotation: Domain name=HMA; Domain location=15-75; Score=51.2; E_value=4e-12; Accession=PF00403.18; Description=Heavy-metal -associated domain
MASGAAAAPAVQTVVLRVSIHCHGCKKKVRKVLRSIEGVQSVTVDAAQHKVTVTGTVDASTLVQRLHKSGKKGVPWDCHPPANKTEAAPAPAPAPEALPPPAAKPAGDAGKDAAAAAAADKKPEEAVKEPKAESPEK

SEQ ID NO: 86793 - protein, 77 aa, Setaria italica
  Transcript Sequence Number=SeqID_20819
HKSSVLSMLLFIVLFSVFLSQEMAGESTFLFSKIGDFPFDKTSVSISLIHFGTGHLPSAYFAPCSYSVCFHSYAWHW

SEQ ID NO: 86794 - protein, 169 aa, Setaria italica
  misc_feature (82)..(82): Xaa can be any naturally occurring amino acid
  Transcript Sequence Number=SeqID_20820
  Gene Ontology: Mol. function=DNA binding; Biological process =regulation of transcription
  Homolog annotation: Hit_ID=Q6NQK2; Match level="QueryCoverage=56%, HitCoverage=21%, E-value=4e-30, Identity=65%"; Hit description=NAC domain-containing protein 8
  Pfam annotation: Domain name=NAM; Domain location=4-64; Score=-29.3; E_value=0.00011; Accession=PF02365.7; Description=No apical meristem (NAM) protein
TRKRRKINTDDLADVRWHKTGKTKPVLVEGKHLGCKKIMVLYTSTTKGGKAEKTNWVMHQYHLGTGEDEKEGEYVVSKLFFXQQFKPGEKNAQELTTADGLESMAAEADIPDFTTLPSEELVGTIQEIAQNPDHNPYQVNENCEINIQENAAEETVVLPPSEKPEGGDN

SEQ ID NO: 86795 - protein, 93 aa, Setaria italica
  misc_feature (30)..(30): Xaa can be any naturally occurring amino acid
  misc_feature (43)..(43): Xaa can be any naturally occurring amino acid
  Transcript Sequence Number=SeqID_20821
  Gene Ontology: Mol. function=oxidoreductase activity, acting on the CH-OH group of donors, NAD or NADP as acceptor; Cellular component =cytoplasm; Biological process=cellular carbohydrate metabolic process
  Homolog annotation: Hit_ID=Q6XEB8; Match level="QueryCoverage=95%, HitCoverage=39%, E-value=7e-42, Identity=91%"; Hit description =Malate dehydrogenase (Fragment)
PRKEGMERKDVMSKNVSIYKGQASALEAHXAPNCKVLVVANPXNTNALILKEFAPSIPERNVTCLTRLDHNRALGQISERLNVQVSDVKEIVN

SEQ ID NO: 86796 - protein, 66 aa, Setaria italica
  Transcript Sequence Number=SeqID_20822
LCRVFNKCPANQAKKELQASYTLGEASNAPAPRCAAVLGEGIYERRWSFFIQSISVAIAIQSLLEA

SEQ ID NO: 86797 - protein, 200 aa, Setaria italica
  misc_feature (21)..(21): Xaa can be any naturally occurring amino acid
  misc_feature (35)..(35): Xaa can be any naturally occurring amino acid
  misc_feature (53)..(53): Xaa can be any naturally occurring amino acid
  Transcript Sequence Number=SeqID_20823
  Gene Ontology: Mol. function=oxidoreductase activity, acting on the CH-OH group of donors, NAD or NADP as acceptor; Cellular component =cytoplasm; Biological process=cellular carbohydrate metabolic process
  Homolog annotation: Hit_ID=Q6XEB8; Match level="QueryCoverage=66%, HitCoverage=56%, E-value=6e-58, Identity=85%"; Hit description =Malate dehydrogenase (Fragment)
  Pfam annotation: Domain name=Ldh_1_N; Domain location=1-85; Score= -37.1; E_value=0.0031; Accession=PF00056.15; Description =lactatemalate dehydrogenase, NAD bin
VVEACTGVNVCRFYWLGGFPXKEGMERKDVMSKNXVSIYKGQASALEAHAAPXTCKVLVVANPANTNALILKEFAPSIPERNVTCLTRLDHNRALGQISERLNVQVSDVKNVIIWGNHSSSQYPDVNHATSLTWTLSLSEIWPRALLWSRRVKQVTFLSGIDGAKFFQDKSIGICWVGNNQNLAVVGRMSFEGRCLTFVD

SEQ ID NO: 86798 - protein, 248 aa, Setaria italica
  Transcript Sequence Number=SeqID_20824
  Gene Ontology: Mol. function=oxidoreductase activity, acting on the CH-OH group of donors, NAD or NADP as acceptor; Cellular component =cytoplasm; Biological process=cellular carbohydrate metabolic process
  Homolog annotation: Hit_ID=Q9SML8; Match level="QueryCoverage=79%, HitCoverage=59%, E-value=2e-94, Identity=84%"; Hit description =Malate dehydrogenase, cytoplasmic
  Pfam annotation: Domain name=Ldh_1_C; Domain location=43-217; Score =198.8; E_value=1.5e-56; Accession=PF02866.10; Description =lactatemalate dehydrogenase, alphabeta C-t
LFPLNFVLKVFFGLFVLTLANTNALILKEFAPSIPERNVTCLTRLDHNRALGQISERLNVQVSDVKNVIIWGNHSSSQYPDVNHATVKTSSGDKPVRELVADDEWLNGEFITTVQQRGAAIIKARKFSSALSAASSACDHIRDWVLGTPEGTFVSMGVYSDGSYGVPAGLIYSFPVTCSGGEWKIVQGLPIDEFSRKKMDATAQELSEEKALAYSIDLRSKTLEIRQIRLTNLNKNFKKIKRKTNQRT

SEQ ID NO: 86799 - protein, 152 aa, Setaria italica
  Transcript Sequence Number=SeqID_20825
  Gene Ontology: Mol. function=oxidoreductase activity, acting on the CH-OH group of donors, NAD or NADP as acceptor; Cellular component =cytoplasm; Biological process=cellular carbohydrate metabolic process
  Homolog annotation: Hit_ID=Q4LAW9; Match level="QueryCoverage=98%, HitCoverage=81%, E-value=1e-69, Identity=83%"; Hit description =Malate dehydrogenase (Fragment)
  Pfam annotation: Domain name=Ldh_1_C; Domain location=2-151; Score =126.7; E_value=7.4e-35; Accession=PF02866.10; Description =lactatemalate dehydrogenase, alphabeta C-t
LFIIWGNHSSSQYPDVNHATVKTSSGDKPVRELVADDEWLNGEFITTVQQRGAAIIKARKFSSALSAASSACDHIRDWVLGTPEGTFVSMGVYSDGSYGVPAGLIYSFPVTCSGGEWKIVQGLPIDEFSRKKMDATAQELSEEKALAYSCLE

SEQ ID NO: 86800 - protein, 67 aa, Setaria italica
  Transcript Sequence Number=SeqID_20826
  Gene Ontology: Mol. function=sugar:hydrogen symporter activity; Cellular component=integral to membrane
  Homolog annotation: Hit_ID=Q941R4; Match level="QueryCoverage=71%, HitCoverage=14%, E-value=3e-13, Identity=70%"; Hit description=GDP -mannose transporter
TILSLPLGIILILGFNEVEYLLETSLLRMPEFWVVITGSGVLGLGISFTSLWFLHQTSATTYRYQIH

SEQ ID NO: 86801 - protein, 400 aa, Setaria italica
  Transcript Sequence Number=SeqID_20827
  Gene Ontology: Mol. function=sugar:hydrogen symporter activity; Cellular component=integral to membrane; Biological process =carbohydrate transport
  Homolog annotation: Hit_ID=Q941R4; Match level="QueryCoverage=82%, HitCoverage=98%, E-value=1e-120, Identity=68%"; Hit description=GDP -mannose transporter
  Pfam annotation: Domain name=TPT; Domain location=243-391; Score= -15.3; E_value=0.005; Accession=PF03151.8; Description=Triose -phosphate Transporter family
  Subcellular localization annotation: CTP_CleavageSite=49; ConfidenceScore=5.24e-01
MGSSRVLQLDISADSEASPRRNVPGSVSSPLKNGEKGVFRNQNAGFTALASPVRREIGNRSMTRSFCVDDNDLEDGKPSKERDGSLQLLKLPTIQNQALLSGLAYCISSCSMILVNKFVLSGYGFNAPIFLMLYQNIVSVSIVSTLSLSGAIPTEPLTWNLIKVWLPVNIIFVGMLITSMFSLKYINVAMLTILKNVANVLTASGETYFFKKQHGIQVWIALMLMIISAVAGGITDLSFHAVGYTWQTLNCFLTASYSLTLRHVMDSAKQATKSGNLNELSMVLLNNILSLPLGIILILGFNEVEYLLETSLLRMPEFWVVITGSGVLGLGISFTSLWFLHQTSATTYSLVGSLNKIPLSVAGIVLFNVRTSLQNSMSILFGLLAGVFFARAKLRDNSPS

SEQ ID NO: 86802 - protein, 78 aa, Setaria italica
  Transcript Sequence Number=SeqID_20828
  Gene Ontology: Mol. function=oxidoreductase activity; Cellular component=cytoplasm; Biological process=oxidation reduction
  Homolog annotation: Hit_ID=Q41767; Match level="QueryCoverage=100%, HitCoverage=20%, E-value=4e-39, Identity=97%"; Hit description=Adh2 -N protein
APGDHVLPVFTGECKECAHCKSEESNMCDLLRINVDRGVMIGDGKSRFSINGQPIFHFVGTSTFSEYTVIHVGCLAKI

SEQ ID NO: 86803 - protein, 51 aa, Setaria italica
  Transcript Sequence Number=SeqID_20829
  Gene Ontology: Cellular component=nucleus; Biological process =regulation of transcription, DNA-dependent
  Homolog annotation: Hit_ID=Q69VG1; Match level="QueryCoverage=100%, HitCoverage=8%, E-value=3e-17, Identity=80%"; Hit description=Chitin- inducible gibberellin-responsive protein 1
MDLHQLLKYRLTGANVFYEFPTENNLANNPWPGTPLKSEFSNSPYTPLSAQ

SEQ ID NO: 86804 - protein, 64 aa, Setaria italica
  Transcript Sequence Number=SeqID_20830
  Gene Ontology: Cellular component=nucleus; Biological process =regulation of transcription, DNA-dependent
  Homolog annotation: Hit_ID=Q69VG1; Match level="QueryCoverage=100%, HitCoverage=11%, E-value=4e-20, Identity=78%"; Hit description =Chitin-inducible gibberellin-responsive protein 1
SGILWENTQVRPDHLYTTSRHNMQHALRKIETVLMAPDADDAATSTKHEFEEHKPAPLMRQRSR

SEQ ID NO: 86805 - protein, 98 aa, Setaria italica
  Transcript Sequence Number=SeqID_20831
  Gene Ontology: Cellular component=nucleus; Biological process =regulation of transcription, DNA-dependent
  Homolog annotation: Hit_ID=Q69VG1; Match level="QueryCoverage=90%, HitCoverage=15%, E-value=1e-40, Identity=92%"; Hit description =Chitin-inducible gibberellin-responsive protein 1
STDRYCITLIQALAARPGGPPHVRITGIDDPVSEYARGEGLDLVGKMLKSMSEEFRIPLEFTPLPGVYATQVTKEMLDIRPGEALAVNFTLQLHHALF

SEQ ID NO: 86806 - protein, 570 aa, Setaria italica
  Transcript Sequence Number=SeqID_20832
  Gene Ontology: Cellular component=nucleus; Biological process =regulation of transcription, DNA-dependent
  Homolog annotation: Hit_ID=Q69VG1; Match level="QueryCoverage=100%, HitCoverage=100%, E-value=0.0, Identity=89%"; Hit description=Chitin- inducible gibberellin-responsive protein 1
  Pfam annotation: Domain name=GRAS; Domain location=199-570; Score =583.7; E_value=2e-172; Accession=PF03514.6; Description=GRAS family transcription factor
MDLHQLLKYRLTGANVFYEFPTENNLANNPWPGTPLKSEFSNSPYTPLSAQLECDNLSAISNTPDNQSSTETISAQPISPLEVDSSNRQAGILWENTQVRPDHLYTTSRHNMQHALRKIETVLMAPDADDAATSTKHEFEEHKPAPLMRQRSRTWSHELRQPSPGVVRTQFASGYPTASYEFRPEKRQRELREDPQSMVKQLLTKCAEALSEERIEEFLKLVQQARGVVSITGEPIQRLGAYLLEGLVARHGNSGTNIYRALKCREPESNELLSYMKILYNICPYFKFGYMAANGAIAEALRNEDKIHIVDFQIAQGTQWITLIQALAARPGGPPHVRITGIDDPVSEYARGEGLDLVGKMLKSMSEEFRIPLEFTPLPGVYATQVTKEMLDIRPGEALAVNFTLQLHHTPDESVDVNNPRDGLLRMVKGLSPKVTTLVEQESHTNTTPFLMRFSETMDYYSAMFESIDANLPRDSKERINVEQHCLAKDIVNIIACEGKDRVERHELLGKWKSRLTMAGFKPYPLSSYVNSVIRKLLACYSDKYTLEEKDGAMLLGWKSRKLISASAWH

SEQ ID NO: 86807 - protein, 73 aa, Setaria italica
  misc_feature (7)..(7): Xaa can be any naturally occurring amino acid
  misc_feature (23)..(23): Xaa can be any naturally occurring amino acid
  Transcript Sequence Number=SeqID_20833
  Gene Ontology: Mol. function=transcription factor activity; Cellular component=plastid; Biological process=regulation of transcription, DNA-dependent
  Homolog annotation: Hit_ID=O24348; Match level="QueryCoverage=100%, HitCoverage=14%, E-value=2e-32, Identity=94%"; Hit description =Plastid RNA polymerase sigma factor
  Pfam annotation: Domain name=Sigma70_r4; Domain location=9-59; Score =38.3; E_value=3e-08; Accession=PF04545.8; Description=Sigma-70, region 4
EVNNLIXNSTLNERERDIIRLYXGIGKQCHTWEDISRQFGLSRERVRQVGLVAMEKLKHAARRKHLDALLEDY

SEQ ID NO: 86808 - protein, 97 aa, Setaria italica
  misc_feature (83)..(83): Xaa can be any naturally occurring amino acid
  misc_feature (86)..(86): Xaa can be any naturally occurring amino acid
  misc_feature (93)..(93): Xaa can be any naturally occurring amino acid
  misc_feature (96)..(97): Xaa can be any naturally occurring amino acid
  Transcript Sequence Number=SeqID_20834
ADQDICQHNHQGDPTRREAAFFLEASQNFCNICICNVSFSALISRATTSMSWICILLQLHKKKCLQDYEANNSSITKKKKKKXKKXKKKKKKXKKXX

SEQ ID NO: 86809 - protein, 92 aa, Setaria italica
  Transcript Sequence Number=SeqID_20835
  Homolog annotation: Hit_ID=B9T6B3; Match level="QueryCoverage=73%, HitCoverage=8%, E-value=8e-23, Identity=75%"; Hit description=Actin binding protein, putative
  Subcellular localization annotation: CTP_CleavageSite=71; ConfidenceScore=5.75e-01
VSNSGPSNGSTANPPRPPPPPPPPKFSSKSTGVMKRAPQVAELYHSLMRRDSKKDTSSGGVCEAANSANVRSSMIGEIENRSSHLQAIKADV

SEQ ID NO: 86810 - protein, 81 aa, Setaria italica
  Transcript Sequence Number=SeqID_20836
  Gene Ontology: Mol. function=structural constituent of ribosome; Cellular component=intracellular; Biological process=protein modification process
  Homolog annotation: Hit_ID=A8NSV0; Match level="QueryCoverage=61%, HitCoverage=25%, E-value=3e-19, Identity=94%"; Hit description =Ubiquitin, putative
  Pfam annotation: Domain name=ubiquitin; Domain location=38-81; Score =20.4; E_value=0.0026; Accession=PF00240.15; Description=Ubiquitin family
PQFFPNHLVVSRVAVPRDASGSSLDSDLRPSKMQIFVKTLTGKTITLEVESSDTIDNVKAKIQDKEGTPPGQQRLIFAGKQ

SEQ ID NO: 86811 - protein, 117 aa, Setaria italica
  misc_feature (22)..(22): Xaa can be any naturally occurring amino acid
  Transcript Sequence Number=SeqID_20837
  Gene Ontology: Mol. function=ATPase activity, coupled to transmembrane movement of substances; Cellular component=integral to membrane; Biological process=transport
  Homolog annotation: Hit_ID=B9I784; Match level="QueryCoverage=90%, HitCoverage=14%, E-value=1e-27, Identity=54%"; Hit description=ABC transporter family of the mitochondria family
LIVLLTAGKPVDKVPKDASKKXVDEQIADSQILKNLGKYLLLNDSPDFRFRLVLSLGLLVGAKVINVQVPFLFKLAIDWLAALGGAEASLASFTETNATLLALFASPAAVLIGYGIA

SEQ ID NO: 86812 - protein, 740 aa, Setaria italica
  misc_feature (117)..(117): Xaa can be any naturally occurring amino acid
  Transcript Sequence Number=SeqID_20838
  Gene Ontology: Mol. function=ATPase activity, coupled to transmembrane movement of substances; Cellular component=integral to membrane; Biological process=transport
  Homolog annotation: Hit_ID=B9T3V9; Match level="QueryCoverage=83%, HitCoverage=85%, E-value=0.0, Identity=70%"; Hit description =Transporter ATM1, mitochondrial, putative
  Pfam annotation: Domain name=AAA; Domain location=518-694; Score= -32.4; E_value=0.017; Accession=PF00004.21; Description=ATPase family associated with various cellular activities (AAA)
  Pfam annotation: Domain name=ABC_membrane; Domain location=150-444; Score=87.9; E_value=3.6e-23; Accession=PF00664.15; Description=ABC transporter transmembrane region
  Pfam annotation: Domain name=ABC_tran; Domain location=516-700; Score= 222.3; E_value=1.2e-63; Accession=PF00005.19; Description=ABC transporter
  Pfam module annotation: Pfam domain module=AAA::ABC_membrane::ABC _tran; Domain location=518-694::150-444::516-700
  Subcellular localization annotation: CTP_CleavageSite=26; ConfidenceScore=5.33e-01
MRPSSRILAAGNLLRGSRFNPQTAAPAAAGFRRLNGANRPGVPKPLFSPFLGGFGPNCGVPPGNGGPFGRLGSFLPDSTYPPHGARLTRDTRVHAFSTSANAVTAGKPVDKVPKDAXKKDVDEQIADSQILKNLGKYLLLNDSPDFRFRLVLSLGLLVGSTCLKTVINVQVPFLFKLAIDWLAALGGAEASLASFTETNATLLALFASPAAVLIGYGIARSGVSACTELRNALFSKVTLRAIRSVSRMVFSHLHELDLRYHLSRQTGALNRIIDRGSRAINYILTVMVFNVVPTILEIGMVSSILAYKFGSTFAWITSVSVATYIAFTLAVTQWRTKFRTAMNKADNASSTVAVDSLLNYETVKYFNNEQFEVAKYDKYLRNYEDAALKTQSSLAYLNFGQNVIFSSALSTAMVLSSYGVMSGALTVGDLVMVNGLLFQLSLPLNFLGSVYRESRQSLIDMKSMFQLLEEKPGIKDEPHAQPLQFKGGCIEFENVHFGYVPERKILDGATFTVPAGQSIAIVGTSGSGKSTILRLLFRFFDSTSGSIRIDGQDIRGVTLESLRKHLGVVPQDTVLFNDTIKHNIQYGRLSAKDEEVYDAARRAAIHDTIMNFPDKYDTVVGERGLKLSGGEKQRVSIARVFLKEPSILLCDEATSALDSTTEASILNSLKSLSVDRTSIFIAHRLTTAMQCDQIIVLENGKVVEQGPHDVLLSKGGRYAELWFQQNNSDAVDPAAVTLQV

SEQ ID NO: 86813 - protein, 61 aa, Setaria italica
  Transcript Sequence Number=SeqID_20839
  Gene Ontology: Mol. function=nucleotide binding
  Homolog annotation: Hit_ID=Q84N64; Match level="QueryCoverage=100%, HitCoverage=7%, E-value=9e-14, Identity=63%"; Hit description =Dynamin-like protein
LRQDLELAFEDELDSIFDVTQMRQSLGQKKRELEIEVKRIKRLKEKFGEINKKLNSLQVRQ

SEQ ID NO: 86814 - protein, 82 aa, Setaria italica
  Transcript Sequence Number=SeqID_20840
  Gene Ontology: Mol. function=nucleotide binding; Biological process =catabolic process
  Homolog annotation: Hit_ID=B9SRI2; Match level="QueryCoverage=96%, HitCoverage=10%, E-value=3e-27, Identity=72%"; Hit description=GTP binding protein, putative
TFYGFVRTACVIAVAKARDAFEPFLHQLGFRLLYILKRLIPTSVYLLEKDGERFSSHEVLVRRVQAEFKRFAESTEQSCRER

SEQ ID NO: 86815 - protein, 498 aa, Setaria italica
  misc_feature (2)..(2): Xaa can be any naturally occurring amino acid
  Transcript Sequence Number=SeqID_20841
  Gene Ontology: Mol. function=nucleotide binding; Biological process =catabolic process
  Homolog annotation: Hit_ID=B9SRI2; Match level="QueryCoverage=99%, HitCoverage=66%, E-value=0.0, Identity=67%"; Hit description=GTP binding protein, putative
DXPLFLSVPSGRVGSCHEAVFRSNEEFKKAISSRESEDIVSIEDKLGRSLTTEEKERIGVSNLRLFLEELLRKRYIESVPLIIPLLEKEHRNATRKLREISQEISDLDEAKLKEKAQLFHDSFLTKLSLLLKGMVVAPPDKFGETLINERINGGTFTGSENFQLPNKMMPNAGMRLYGGAQYHRAMAEFRLVVGSIKCPPITREEIVNACGVEDIHDGTNYSRTACVIAVAKARDAFEPFLHQLGFRLLYILKRLIPISVYLLEKDGERFSSHEVLVRRVQAEFKRFAESTEQSCRERCMEDLESTTRYVTWSLHNKNRAGLRHFLDSFAAPEQLSVNTLHEQLPVLNENKQDRPKGDPKSNHSSDTNSSGAVPETRLVDLLDSTLWNRRLVPSSERLVYALVHQIFHGIKEHFLVTTELKFNCFLLMPIVDKLPALLRQDLELAFEDELDSIFDVTQMRQSLGQKKRELEIEVKRIKRLKEKFGEINKKLNSLQVRQ

SEQ ID NO: 86816 - protein, 154 aa, Setaria italica
  Transcript Sequence Number=SeqID_20842
  Gene Ontology: Mol. function=transporter activity; Cellular component= integral to membrane; Biological process=transport
  Homolog annotation: Hit_ID=Q9ATM3; Match level="QueryCoverage=92%, HitCoverage=57%, E-value=2e-57, Identity=75%"; Hit description =Aquaporin SIP1-1
  Pfam annotation: Domain name=MIP; Domain location=1-138; Score=-93.6; E_value=0.0013; Accession=PF00230.12; Description=Major intrinsic protein
FSVALRFPAQAAGAVGGALAISELMPEQYKHTLAAAGPALKVDPHTGAVAEGVLTFVITLAVLWIIVKGPRNPVLKTMLLSVSIVSLILAGAEYTGPSMNPANAFGWAYVNNWHNTWEQLYVYWICPFIGAMLAGWVFRAVFLPSAPKPKTKKA

SEQ ID NO: 86817 - protein, 77 aa, Setaria italica
  Transcript Sequence Number=SeqID_20843
MAMRSVLASLPARLRAPSAPAAACGRRLLSDGKGRLLSEEERAKESVYIQKMERERQEKLKKKLEQEKANADKTKPA

SEQ ID NO: 86818 - protein, 231 aa, Setaria italica
  Transcript Sequence Number=SeqID_20844
  Gene Ontology: Mol. function=structural molecule activity; Cellular component=chloroplast envelope
  Homolog annotation: Hit_ID=B6TKH9; Match level="QueryCoverage=91%, HitCoverage=96%, E-value=1e-100, Identity=87%"; Hit description=PAP fibrillin family protein
  Pfam annotation: Domain name=PAP_fibrillin; Domain location=59-228; Score=20.1; E_value=5.2e-08; Accession=PF04755.4; Description=PAP _fibrillin
  Subcellular localization annotation: CTP_CleavageSite=46; ConfidenceScore=5.45e-01
RGPAITTRSAEHKKCLLPPAAVSPALRFSSATPLHRPLRRRLPSVRCSLAAAPGVRAPPELVDSILSKVNGTDRGALLPKDGHQEVADVALQLGKYCIDEPVKSPLIFGEWEVVYCSVATSPGGLYRTPLGRLIFKTDEMIQVVEAPDVIRNKVSFSVFGLEGAVSLKGKLNVLDSKWIQVIFEAPELKVGSLGFQYGGESEVKLEITYVDEKIRLGKGSRGSLFVFLRRG

SEQ ID NO: 86819 - protein, 63 aa, Setaria italica
  Transcript Sequence Number=SeqID_20845
DSNSFMPLWSFTEHECNVGPEQMVKLTPTAIEIMLRGIGIPMSTLHQPPLLTSQVSTSNYTTN

SEQ ID NO: 86820 - protein, 140 aa, Setaria italica
  Transcript Sequence Number=SeqID_20846
NRETKLNVTNELTYNPYDVRPKERQDAPGGESRTVRLTRVKLLKPKETLLLGHVYRLITTQEVTKAVQARKEEKQRKAQQQLLESRPGKARGAAEEEDDDEAALDASLDQLARQDNGNRSSSARHRQWRPSLQSIDEATS

SEQ ID NO: 86821 - protein, 102 aa, Setaria italica
  Transcript Sequence Number=SeqID_20847
  Gene Ontology: Cellular component=anchored to membrane; Biological process=cell wall catabolic process
  Homolog annotation: Hit_ID=B6SSR0; Match level="QueryCoverage=71%, HitCoverage=18%, E-value=4e-28, Identity=88%"; Hit description =Erwinia induced protein 1
LAELAALFAADPLAILAANAIDFAAPDPADRVLPAGLPLHVPVPCACSDGIRKATSVRYVARAGDTLDSVAGSVYGGLTTADWIRDSNGMPEGAALDAGTTL

SEQ ID NO: 86822 - protein, 53 aa, Setaria italica
  Transcript Sequence Number=SeqID_20848
  Gene Ontology: Cellular component=integral to membrane; Biological process=protein transport
  Homolog annotation: Hit_ID=Q75IC6; Match level="QueryCoverage=86%, HitCoverage=16%, E-value=4e-12, Identity=67%"; Hit description =Putative secretory carrier membrane protein
RHSLRIMYFMGFAIFVLEVLLSMWVFQRVYWFFRGKGTEAQMRPDAASRAPPF

SEQ ID NO: 86823 - protein, 241 aa, Setaria italica
  Transcript Sequence Number=SeqID_20849
LPRHPVAATATAASASVLDDLIAQADVQAELLKKASQLCDEINALCDAHEAAIVDHIAVLPVWGNPRELVASLYSPDPHEQAEPGTSGLDEGNGGFQSLSSQPGKRAIGVASAAVERVKIIGDKRIQSPSPCKRCSHFGCGGKNCCETRAELGDELLPPVLAENRKKKGAASPLSSNSVAAQASNKRKSQKTSGNKSMPSGTPGSTTRRKAASIPRAPDTSRSPGPTTRRRAAAQHASPRS

SEQ ID NO: 86824 - protein, 248 aa, Setaria italica
  misc_feature (186)..(186): Xaa can be any naturally occurring amino acid
  Transcript Sequence Number=SeqID_20850
  Gene Ontology: Mol. function=protein serine/threonine kinase activity; Cellular component=chromatin; Biological process=protein amino acid phosphorylation
  Homolog annotation: Hit_ID=Q8H8M5; Match level="QueryCoverage=87%, HitCoverage=46%, E-value=3e-77, Identity=71%"; Hit description =Putative kinase
  Pfam annotation: Domain name=Pkinase_Tyr; Domain location=1-156; Score=-150.2; E_value=0.00096; Accession=PF07714.9; Description =Protein tyrosine kinase
RHPIIKSANILLDNNFEAKVADFGLAKLTSDNNTHVSTRVMGTFGYLAPEYASSGKLTEKSDVFSYGVMLLELLTGRRPVDTGGTATSFLEDSLVDWARPALSRALADGDYDGVADPRLHGNYGPVEMARLVASAAAAVRHSAKKRPKMSQIVRALEGDMSLEDLNEGVRPGQSMTFGPAAPVGGXASYNANRAPGQYTSDMERIRQAPMAIPEYSGTVTGFGRPSPIESEGSFSDDDLSPVKGQSRR

SEQ ID NO: 86825 - protein, 109 aa, Setaria italica
  misc_feature (83)..(83): Xaa can be any naturally occurring amino acid
  Transcript Sequence Number=SeqID_20851
  Gene Ontology: Mol. function=sucrose synthase activity; Biological process=sucrose metabolic process
  Homolog annotation: Hit_ID=B9SJX1; Match level="QueryCoverage=74%, HitCoverage=9%, E-value=1e-30, Identity=71%"; Hit description =Sucrose synthase, putative
GGLLACIANLIKFLSPCDLPGNVAQLSSREFCNSKEKPGQYESHYAFTMPGRCRFATGINVFDPKFNIAAPGADQSVYFPFTXKQKRLTDLHPQIEELVYSKEDNDEHM

SEQ ID NO: 86826 - protein, 97 aa, Setaria italica
  Transcript Sequence Number=SeqID_20852
NGIVSFTKYQPTLFLQDLHDRHHGVIAVPPNLARHDPSSSIQHDEPFLYWNMGRCRRNTTTSSITPISVAPANFGTKRNADSNSFLPLKLRKLSRAT

SEQ ID NO: 86827 - protein, 183 aa, Setaria italica
  Transcript Sequence Number=SeqID_20853
  Subcellular localization annotation: CTP_CleavageSite=33; ConfidenceScore=5.63e-01
WDAAASGASVGGSGVGGGPPMLSPFFRLPAPPPVTQVSDFGEVAPVRPLIGLGSHSGSSGFPGLSPPMVGGGDASATWLLGRAAGAAYPSHALDMVPIRTLDDLHDRHHGVIAVPPNLARHDPSSSIQHDEPFLYWNMGRCRRNTTTSSITPISVAPANFGTKRNADSNSFLPLKLRKLSRAT

SEQ ID NO: 86828 - protein, 65 aa, Setaria italica
  Transcript Sequence Number=SeqID_20854
LDVNKLSNSYYDDMSIQNFTSCIFQNMRPLGTELSSSSSQIWCPLILIYNATSSLVGWSSLSFLL

SEQ ID NO: 86829 - protein, 97 aa, Setaria italica
  Transcript Sequence Number=SeqID_20855
  Subcellular localization annotation: CTP_CleavageSite=56; ConfidenceScore=5.56e-01
MLHSGLSKSHPFPLLAAASSPRRILLAGLLRAGYLSKHPASSPVPRPASTARASSRAATSPGDPSRFGLGGRVSFSTAPDGSASAGGGRALPWLAAE

SEQ ID NO: 86830 - protein, 190 aa, Setaria italica
  misc_feature (12)..(12): Xaa can be any naturally occurring amino acid
  Transcript Sequence Number=SeqID_20856
  Gene Ontology: Mol. function=transferase activity, transferring hexosyl groups; Biological process=metabolic process
  Homolog annotation: Hit_ID=B6TSL5; Match level="QueryCoverage=100%, HitCoverage=40%, E-value=1e-95, Identity=88%"; Hit description =Indole-3-acetate beta-glucosyltransferase
PCSVDVVYGRCXAGRLPLPVTDGRELFTRGLLGVELGPDDVPPFAARPDWCPAFLNVSVRQFEGLEDADDVLVNSFHDMEPKEADYMALTWRAKTIGPTLPSFYLDDDRLPFNKTYGFNLFSSSVSCLAWLDKQLPCSVVLVSYGTVSDYDETQLEELGNGLCNSGKPFLWVVRSNEEHKLSCELRDKCK

SEQ ID NO: 86831 - protein, 96 aa, Setaria italica
  Transcript Sequence Number=SeqID_20857
  Gene Ontology: Mol. function=protein dimerization activity; Cellular component=nucleus; Biological process=regulation of transcription, DNA-dependent
  Homolog annotation: Hit_ID=Q0D9R7; Match level="QueryCoverage=60%, HitCoverage=4%, E-value=9e-16, Identity=74%"; Hit description=Auxin response factor 19
  Subcellular localization annotation: CTP_CleavageSite=17; ConfidenceScore=5.10e-01
PDLQQNSIQFSSSKLPQQMQPVNELSKATLPLNQLGMGTKLQEQIHDPSNLQRQQQSMNQLLPLSQSQTNLVQAQVLVQNQMQQQQQPPSMTQNQQ

SEQ ID NO: 86832 - protein, 81 aa, Setaria italica
  Transcript Sequence Number=SeqID_20858
LFEYKYCTVDKQQFDPRFVFLKHTYKYYHGVFLSGEISYLKSITDYFSQHIWVVAQSSTGALMLFLCGSFCLPTHVTEQTF

SEQ ID NO: 86833 - protein, 149 aa, Setaria italica
  Transcript Sequence Number=SeqID_20859
  Gene Ontology: Mol. function=metal ion binding
  Pfam annotation: Domain name=DUF1117; Domain location=19-142; Score =234.6; E_value=2.5e-67; Accession=PF06547.4; Description=Protein of unknown function (DUF1117)
GAGGARAAAGDGAAEEEATVGLTIWRLPGGGFAVGRFAGGRRPEERELPVVYTEMDGGFNNGGAPRRISWGSRQSPSTERGAIRRILRSVFACFGRGHSSSRASSSQSQMMPELNDAASDRSAAFSHGSRSRSTSWRLEDGHADAMVQR

SEQ ID NO: 86834 - protein, 151 aa, Setaria italica
  Transcript Sequence Number=SeqID_20860
  Gene Ontology: Mol. function=acyltransferase activity; Cellular component=integral to membrane; Biological process=triacylglycerol metabolic process
  Homolog annotation: Hit_ID=Q688L6; Match level="QueryCoverage=76%, HitCoverage=23%, E-value=7e-57, Identity=90%"; Hit description =Putative diacylglycerol acyltransferase
SLQPFPLLWIPLATVRCQAWAWESGIQDHWLANWISKMVDNELSAADIDNLQPPTLGSLIYFMMAPTLCYQPSYPRTTHIRKGWLIRQIILYLIFTGLQGFIIEQYINPIVVNSQHPLKGGLLNAVETVLKLSLPNVYLWLCMFYCLFHLW

SEQ ID NO: 86835 - protein, 92 aa, Setaria italica
  Transcript Sequence Number=SeqID_20861
  Gene Ontology: Mol. function=acyltransferase activity; Cellular component=integral to membrane
  Homolog annotation: Hit_ID=Q5I396; Match level="QueryCoverage=98%, HitCoverage=15%, E-value=5e-33, Identity=78%"; Hit description =Diacylglycerol acyltransferase
AATSLHIFLTTSEIVYPVLVILMCDSAVLSGFVLMFIACIVWLKLVSFAHTNHDIRKLITSGKKPTVRKMVDNELSAADIDNLQPPTLGSLI

SEQ ID NO: 86836 - protein, 105 aa, Setaria italica
  Transcript Sequence Number=SeqID_20862
  Gene Ontology: Mol. function=acyltransferase activity; Cellular component=integral to membrane
  Homolog annotation: Hit_ID=Q5I396; Match level="QueryCoverage=65%, HitCoverage=12%, E-value=8e-30, Identity=86%"; Hit description =Diacylglycerol acyltransferase
MLEVPISLVFCPVIIICCSESQLCLFCCRKLLFFISFFVSAVLHELCVAAPCRILKFWAFLGIMLQIPLIILTSYLKNKFRDTMVGNMIFWYLFCIYGQPMCVTN

SEQ ID NO: 86837 - protein, 411 aa, Setaria italica
  Transcript Sequence Number=SeqID_20863
  Gene Ontology: Mol. function=acyltransferase activity; Cellular component=integral to membrane; Biological process=triacylglycerol biosynthetic process
  Homolog annotation: Hit_ID=Q5I396; Match level="QueryCoverage=100%, HitCoverage=76%, E-value=0.0, Identity=88%"; Hit description =Diacylglycerol acyltransferase
  Pfam annotation: Domain name=MBOAT; Domain location=117-400; Score =67.9; E_value=3.7e-17; Accession=PF03062.11; Description=MBOAT family
KESPLSSDAIFKQSHAGLFNLCIVVLVAVNSRLIIENLMKYGLLIRSGFWFNTTSLRDWPLLMCCLSLPAFPLGAFAVETLAFRNLITDAAATSLHIFLTTSEIVYPVLVILMCDSAVLSGFVLMFIACIVWLKLVSFAHTNHDIRKLITSGKKVDNELSAADIDNLQPPTLGSLIYFMMAPTLCYQPSYPRTTHIRKGWLIRQIILYLIFTGLQGFIIEQYINPIVVNSQHPLKGGLLNAVETVLKLSLPNVYLWLCMFYCLFHLWLNILAEILRFGDREFYKDWWNAKTIDEYWRKWNMPVHKWIVRHIYFPCMRNGISKEVAVFISFFVSAVLHELCVAAPCRILKFWAFLGIMLQIPLIILTSYLKNKFRDTMVGNMIFWFFFCIYGQPMCVLLYYHDVMNRIEKTK

SEQ ID NO: 86838 - protein, 44 aa, Setaria italica
  Transcript Sequence Number=SeqID_20864
AKYKVKVLLSVLDELKAQQDSYNVMVGGITPTPLGNLAFLIENV

SEQ ID NO: 86839 - protein, 360 aa, Setaria italica
  misc_feature (12)..(12): Xaa can be any naturally occurring amino acid
  misc_feature (57)..(57): Xaa can be any naturally occurring amino acid
  Transcript Sequence Number=SeqID_20865
  Gene Ontology: Mol. function=RNA binding
  Homolog annotation: Hit_ID=Q01DX7; Match level="QueryCoverage=99%, HitCoverage=53%, E-value=1e-36, Identity=30%"; Hit description =Putative RNA-binding protein (ISS)
  Pfam annotation: Domain name=PUF; Domain location=109-144; Score =13.8; E_value=0.31; Accession=PF00806.11; Description=Pumilio-family RNA binding repeat
  Pfam annotation: Domain name=PUF; Domain location=252-287; Score =16.8; E_value=0.089; Accession=PF00806.11; Description=Pumilio -family RNA binding repeat
  Pfam annotation: Domain name=PUF; Domain location=289-323; Score=8.3; E_value=1.4; Accession=PF00806.11; Description=Pumilio-family RNA binding repeat
  Pfam module annotation: Pfam domain module=PUF::PUF::PUF; Domain location=109-144::252-287::289-323
HFSDIFKTFMSXEMLHNAKADIATLRIDKNSSLVLQTALKLSCGDDNELRHIISILXGYDEDGTVEMRDYSEKKEEIVTLLEESAYSHLLEVIVEVAPDELRNGMLLGTLKSALFPISSHHCGNYVVQALISSAKTSDQMSQIWEELGSKIKELLELGKTGVVASILAACQRLETYRLESSQALSAALSSDSESPDSIVAHMLFLENYLRERSYWKWPLGAKMSVLGCLMLQSIFQYPHQYIRPYVASLLAMEDDQILQISKDSGGSRVLEAFLGSSATAKRKFKVFGKLQGHYGEIAMNPSGSFLVEKCFTASNFSHKEAIVAELLAAQSELSKTRHGFHLLKKLDVDRYARRPEQWRA

SEQ ID NO: 86840 - protein, 294 aa, Setaria italica
  Transcript Sequence Number=SeqID_20866
  Gene Ontology: Mol. function=RNA binding
  Homolog annotation: Hit_ID=Q01DX7; Match level="QueryCoverage=39%, HitCoverage=17%, E-value=4e-15, Identity=36%"; Hit description =Putative RNA-binding protein (ISS)
SRVLEAFLGSSATASLKDSGGSRVLEAFLGSSATAKRKFKVFGKLQGHYGEIAMNPSGSFLVEKCFTASNFSHKEAIVAELLAAQSELSKTRHGFHLLKKLDVDRYARRPEQWRASQTSKETTLRQFEVEFGSNSKSVAQTFEEKFLSQSPSKKRKQGKSDKITEDASYNKPDFSQTGNSKRPKSAKSTSEKEFSSKKLAREGTSMAFLKDSGKRKSPGFLSDKPSLKKQKHQWPTSGKPDGKRFGQGSSSSMPFVKNTGKPKRSIAELADLAGKEKLTAAEVRKLLKPEMSKS

SEQ ID NO: 86841 - protein, 42 aa, Setaria italica
  Transcript Sequence Number=SeqID_20867
KKNKTRTTLAQKSAHHVKNELLNWRQSPVHNINMITKLYYFA

SEQ ID NO: 86842 - protein, 131 aa, Setaria italica
  Transcript Sequence Number=SeqID_20868
  Gene Ontology: Mol. function=protein dimerization activity; Cellular component=nucleus; Biological process=regulation of transcription, DNA-dependent
  Homolog annotation: Hit_ID=B6TRT6; Match level="QueryCoverage=77%, HitCoverage=43%, E-value=7e-32, Identity=67%"; Hit description=IAA13- auxin-responsive Aux/IAA family member
  Pfam annotation: Domain name=AUX_IAA; Domain location=1-117; Score= -12.8; E_value=1.8e-08; Accession=PF02309.8; Description=AUXIAA family
LNLCVYIRAQAVGWPPVRSYRRNVMTVQTVKSKKEEEPEKQQPAANASSNSSAFVKVSMDGAPYLRKVDLKMYNSYKDLSIALKEMFSTFTTGNNMNDGKLVDPVSGMNSFMLFPVVKVLNISFRAMERSL

SEQ ID NO: 86843 - protein, 56 aa, Setaria italica
  Transcript Sequence Number=SeqID_20869
  Homolog annotation: Hit_ID=B6TJN4; Match level="QueryCoverage=62%, HitCoverage=15%, E-value=2e-11, Identity=94%"; Hit description=IAA13- auxin-responsive Aux/IAA family member
MIRMRSRCSDFSFLCWIVNYNPCRMFVESCKRLRIMKSSEAIGLAPRTKDKCKNKS

SEQ ID NO: 86844 - protein, 67 aa, Setaria italica
  Transcript Sequence Number=SeqID_20870
DANSIWSAGCRAYDNILKTVSNDGCPFGITQQLIETFQKLRGSYVVRITGRLYPCGVDMAGLKGIPT

SEQ ID NO: 86845 - protein, 233 aa, Setaria italica
  Transcript Sequence Number=SeqID_20871
  Gene Ontology: Mol. function=protein dimerization activity; Cellular component=nucleus; Biological process=regulation of transcription, DNA-dependent
  Homolog annotation: Hit_ID=B6TRT6; Match level="QueryCoverage=100%, HitCoverage=100%, E-value=1e-71, Identity=61%"; Hit description =IAA13-auxin-responsive Aux/IAA family member
  Pfam annotation: Domain name=AUX_IAA; Domain location=10-225; Score =294.1; E_value=3e-85; Accession=PF02309.8; Description=AUXIAA family
MASADVDVGTELSLGLPGGGAEAAKAAKRGFEDTIDLKLKLPTAGMEEAAAGKPEPAAEKAKRPAEAVAADAEKPPAPKAQAVGWPPVRSYRRNVMTVQTVKSKKEEEPEKQQPAANASSNSSAFVKVSMDGAPYLRKVDLKMYNSYKDLSIALKEMFSTFTTGNNMNEGKLVDPVSGADVVTTYEDKDGDWMLVGDVPWEMFVESCKRLRIMKSSEAIGLAPRTKDKCKNKS

SEQ ID NO: 86846 - protein, 51 aa, Setaria italica
  Transcript Sequence Number=SeqID_20872
HSSKEYDESFFGVKDPFKRVQFQLYHLSLAEQSIPCFAAWVKTFSLFLLVK

SEQ ID NO: 86847 - protein, 107 aa, Setaria italica
  Transcript Sequence Number=SeqID_20873
  Gene Ontology: Mol. function=UDP-glucose 4-epimerase activity; Biological process=galactose metabolic process
  Homolog annotation: Hit_ID=B6TQ45; Match level="QueryCoverage=81%, HitCoverage=20%, E-value=1e-35, Identity=79%"; Hit description=UDP -glucose 4-epimerase GEPI48
RQEKGRLKLGKDKNNRTIRKKMCRDQWNWASKNPYGYGSPDTTKQNGHQTNGSADSPRQNGHHTNGSVGSPKRNGHYAYGSADSPRRNGHYAYGSSDSRQNGNGRLH

SEQ ID NO: 86848 - protein, 427 aa, Setaria italica
  Transcript Sequence Number=SeqID_20874
  Gene Ontology: Mol. function=UDP-glucose 4-epimerase activity; Biological process=galactose metabolic process
  Homolog annotation: Hit_ID=B6TQ45; Match level="QueryCoverage=99%, HitCoverage=99%, E-value=0.0, Identity=92%"; Hit description=UDP -glucose 4-epimerase GEPI48
  Pfam annotation: Domain name=3Beta_HSD; Domain location=21-307; Score= -51.1; E_value=9.7e-07; Accession=PF01073.11; Description=3-beta hydroxysteroid dehydrogenaseisomerase family
  Pfam annotation: Domain name=ADH_zinc_N; Domain location=16-142; Score=-22.1; E_value=0.053; Accession=PF00107.18; Description=Zinc -binding dehydrogenase
  Pfam annotation: Domain name=Epimerase; Domain location=20-283; Score= 255.6; E_value=1.2e-73; Accession=PF01370.13; Description=NAD dependent epimerasedehydratase family
  Pfam annotation: Domain name=NAD_binding_4; Domain location=22-246; Score=-55.7; E_value=1.7e-05; Accession=PF07993.4; Description=Male sterility protein
  Pfam annotation: Domain name=Polysacc_synt_2; Domain location=20-257; Score=-157.9; E_value=0.00065; Accession=PF02719.7; Description =Polysaccharide biosynthesis protein
  Pfam annotation: Domain name=RmlD_sub_bind; Domain location=18-348; Score=-140.3; E_value=0.00019; Accession=PF04321.9; Description=RmlD substrate binding domain
  Pfam annotation: Domain name=adh_short; Domain location=18-160; Score= -6.8; E_value=3.8e-05; Accession=PF00106.17; Description=short chain dehydrogenase
  Pfam module annotation: Pfam domain module=3Beta_HSD::ADH_zinc _N::Epimerase::NAD_binding_4::Polysacc_synt_2::RmlD_sub_bind::adh _short; Domain location=21-307::16-142::20-283::22-246::20-257::18 -348::18-160
MAVEKTVPGAGAGSAAGRTVLVTGGAGYIGSHAVLQLLLAGFRAVVVDNLNNSSELAVRRVAALAGDHSRNLSFHKVDLRDKGALEMVFASTRFDAVVHFAGLKAVGESVQKPLLYYDNNVIGTINLLEVMSAHGCKKLVFSSSAAVYGSPKNSPCTEEFPLTPNNPYGKTKLVVEDICRDIYRSDPEWKIILLRYFNPVGAHPSGYLGEDPCGIPNNLMPYVQQVAVGRRPALTVLGNDYATRDGTGVRDYIHVVDLADGHIAALQKLFENSSIGCEAYNLGTGRGTSVLEIVKAFEKASGKKIPLIFGARRPGDAEILFSVTAKAERELNWKAKYGIEEMCRDQWNWASKNPYGYGSPDTTKQNGHQTNGSADSPRQNGHHTNGSVGSPKRNGHYAYGSADSPRRNGHYAYGSSDSRQNGNGRLH

SEQ ID NO: 86849 - protein, 188 aa, Setaria italica
  Transcript Sequence Number=SeqID_20875
  Subcellular localization annotation: CTP_CleavageSite=47; ConfidenceScore=5.11e-01
MSSPGSVGMPGSKKFRQAILKNLLLGLRRGGAASRGMGFHERRSAIRRAADAALATARGAAPRWSRSLAAELSPQGRLPPATSAPSSSECKLPSKMSCAKRIPRRRLRARPKSRATAKQAAGALARVMVRKRARALREIVPGGRGMDECTLLGETLDYAVSLKAQVEAMQLLLRTLQDPKNPSLLKHQ

SEQ ID NO: 86850 - protein, 90 aa, Setaria italica
  Transcript Sequence Number=SeqID_20876
LHDEMKPSILHIISLQARDDQTTARRRHMILFASLLSSLECMVRLGGNHCACRCNDASSSLARQPHVRCAPACKWGQRGKLRGAPNGRRG

SEQ ID NO: 86851 - protein, 113 aa, Setaria italica
  Transcript Sequence Number=SeqID_20877
  Gene Ontology: Mol. function=sequence-specific DNA binding; Cellular component=nucleus; Biological process=regulation of transcription, DNA-dependent
  Homolog annotation: Hit_ID=Q6IEQ3; Match level="QueryCoverage=100%, HitCoverage=33%, E-value=2e-28, Identity=65%"; Hit description=WRKY transcription factor 28
EMLRAVVAKYTELQGQVNDIVAAAGNNNRQSSTSEGGSAASPSRKRIRSDSLDRKLSPPFAIPVSADQMECTSAAAAAVFHEPGRRIREECKPKVSRRYVHADPADLSLVVKE

SEQ ID NO: 86852 - protein, 164 aa, Setaria italica
  misc_feature (28)..(28): Xaa can be any naturally occurring amino acid
  misc_feature (147)..(147): Xaa can be any naturally occurring amino acid
  misc_feature (150)..(150): Xaa can be any naturally occurring amino acid
  Transcript Sequence Number=SeqID_20878
  Gene Ontology: Mol. function=protein binding
  Homolog annotation: Hit_ID=Q9LNB2; Match level="QueryCoverage=95%, HitCoverage=30%, E-value=5e-40, Identity=50%"; Hit description =F5O11.6
MYQDFENPAFQRSGSPRCLDPAEGRRQXSFAAFVALRNLSWNEVLRKGTKYYSEDFSRFCDRKMSGVVATMGWSRPWPEQLLQCFFVAAKCVWLLHLLAFSFGPPLTIMRVEDGRAFDQMYMEDILQDRQQVQGPCQVKIMVMPGFXVQXRVLKCRVLTTRSAA

SEQ ID NO: 86853 - protein, 201 aa, Setaria italica
  Transcript Sequence Number=SeqID_20879
  Gene Ontology: Mol. function=sequence-specific DNA binding; Cellular component=nucleus; Biological process=regulation of transcription, DNA-dependent
  Homolog annotation: Hit_ID=B3GAV8; Match level="QueryCoverage=93%, HitCoverage=80%, E-value=7e-35, Identity=48%"; Hit description =WRKY11 transcription factor (Fragment)
  Pfam annotation: Domain name=WRKY; Domain location=65-127; Score =103.0; E_value=9.9e-28; Accession=PF03106.7; Description=WRKY DNA -binding domain
MSRTIETAKAAAAAEEGSEGQSEVTCAGSAGGGGKRKAAGGGDKRSTCRRRAQNSSTVTVTIKDIEDGHAWRKYGQKEIQNSKHPKAYFRCTHKYDQQCAAQRQVQRCDDDPDAFRVTYIGVHTCRDPASVAPVVLHSAGIADELHAGSHLISFAPNASATTSGNTSQQTDQKDAALLAGLRPLKLEAVGGSGEQEEVLSS

SEQ ID NO: 86854 - protein, 350 aa, Setaria italica
  misc_feature (21)..(21): Xaa can be any naturally occurring amino acid
  Transcript Sequence Number=SeqID_20880
  Gene Ontology: Mol. function=hydrolase activity, hydrolyzing O -glycosyl compounds; Cellular component=cytosol; Biological process =carbohydrate metabolic process
  Homolog annotation: Hit_ID=B0FLE9; Match level="QueryCoverage=98%, HitCoverage=38%, E-value=0.0, Identity=91%"; Hit description=Starch branching enzyme III
  Pfam annotation: Domain name=Alpha-amylase; Domain location=1-313; Score=-53.5; E_value=2.2e-06; Accession=PF00128.16; Description =Alpha amylase, catalytic domain
VKSFTYSFQEFTSKVLPHIKXAGYNAVQLIGVVEHKDYSSVGYKVTNYFAVSSRFGTPDDFKKLVDEAHGLGLVVLLDIVHSYASADELVGLSLFDGSNDCYFHSGKRGHHKYWGTRMFKYDDVDVLHFLLSNLNWWVTEYRIDGFQFHSLSSMLYTHNGFSTFTGTMEEYCNQYVDKDAIIYLILANEMLHDLHPDIITIAEDATFYPGLCEPTTQGGLGFDYCVNLSVPEMWLWHLENVPEREWSMNKIMKVLVSSDQKMLSYVENHNQSISGRKSLAEIILNSGKFSVGSVDDDLIRASLLKIIKLITFTTSGGAYLNFMGNEFAHPKRVEFPMSSNDYSFQLANRQ

SEQ ID NO: 86855 - protein, 169 aa, Setaria italica
  Transcript Sequence Number=SeqID_20881
  Gene Ontology: Mol. function=cation transmembrane transporter activity; Cellular component=integral to membrane
  Homolog annotation: Hit_ID=Q259F9; Match level="QueryCoverage=100%, HitCoverage=6%, E-value=3e-47, Identity=64%"; Hit description =H0124B04.17 protein
DGPLEGTKGSGEVNDDEATSSDSDDEKGGGGREVDVDGLKEMLQRSRNELEVARLNSTMFEEKAQRISESAIALKDQADNAQRDVSAAVALVQEIISKEDDAKEAVQKSTMALSMAEARLQLAAEALEAKRGSVGPMEVSFEGVEEESLASAQEEIKDCRAVLSKCEEE

SEQ ID NO: 86856 - protein, 52 aa, Setaria italica
  misc_feature (4)..(4): Xaa can be any naturally occurring amino acid
  Transcript Sequence Number=SeqID_20882
  Subcellular localization annotation: CTP_CleavageSite=14; ConfidenceScore=5.13e-01
CLVXFSPYAACWLQQSAFSAFLLGLRLFNNTCVTVTDSLTVTNPCGFQTGST

SEQ ID NO: 86857 - protein, 87 aa, Setaria italica
  Transcript Sequence Number=SeqID_20883
  Subcellular localization annotation: CTP_CleavageSite=51; ConfidenceScore=5.42e-01
SDRAAARRAVAAMKGGRSSNGAATDLLVCFPSRAHLALMPPKAICSPSRPSASEPVKRRHSTSRAPPSGLYKSATARNPSRRAAAAE

SEQ ID NO: 86858 - protein, 509 aa, Setaria italica
  Transcript Sequence Number=SeqID_20884
  Gene Ontology: Mol. function=protein serine/threonine kinase activity; Biological process=protein amino acid phosphorylation
  Homolog annotation: Hit_ID=Q8H643; Match level="QueryCoverage=97%, HitCoverage=98%, E-value=0.0, Identity=83%"; Hit description=Calcium- dependent calmodulin-independent protein kinase CDPK-like
  Pfam annotation: Domain name=Pkinase; Domain location=39-297; Score =328.9; E_value=1e-95; Accession=PF00069.17; Description=Protein kinase domain
  Pfam annotation: Domain name=Pkinase_Tyr; Domain location=39-295; Score=-2.8; E_value=1.5e-13; Accession=PF07714.9; Description =Protein tyrosine kinase
  Pfam module annotation: Pfam domain module=Pkinase::Pkinase_Tyr; Domain location=39-297::39-295
MAAAGWVGGGDAKYNSYKAPGLRGALLEAAHVSCLEDRYALGPQLGWGQFGVIRSCSDLVTGEALACKSIAKDRLVSPDDVRGVKLEIEVMARLSGHPNVVDLKAVYEDEDSVHLVMELCAGGELFHRLEERGCFSEHEAAVLFRYLMEVVAHCHSKGIVHRDLKPENILLVSKSLSSPIKLADFGLATYIQPGRSLSGMVGSPFYIAPEVLSGGYNEAADVWSAGVILYILLSGFPPFWGKTKSKIFECIRSTELRFPSDPWDRVSDSAKELVTGMLRRDPRQRLTAKQVLDHSWMQEHAEQSQDSCSHCHEIGLRREDLGSCSFSTPLASRSRDVSFNTGGPVSCQGMAGEDEACSPTFACRSSFSAFVADMAPSCSTSGFSFGEACEPSGGAFLPPPVASMPSFSFFCAQECDEPEPSGSSGQNAPAEATVAAAPFSSLRTVEATTTRTARGSTSRGGVGINSRRNHTIGAGEREHLDVAVAESVIRWASCTNLSTTHSLRASLVC

SEQ ID NO: 86859 - protein, 102 aa, Setaria italica
  Transcript Sequence Number=SeqID_20885
  Gene Ontology: Mol. function=hydrolase activity; Biological process =lipid catabolic process
  Homolog annotation: Hit_ID=Q9XE79; Match level="QueryCoverage=100%, HitCoverage=23%, E-value=3e-44, Identity=82%"; Hit description =Patatin-like protein
  Pfam annotation: Domain name=Patatin; Domain location=25-101; Score= -3.8; E_value=0.00055; Accession=PF01734.14; Description=Patatin-like phospholipase
MASNGATSTTVPQPPPSKGKLITILSIDGGGIRGLIPATIIACLEAKLQELDGPEARIADYFDVIAGTSTGALITAMLAAPDEKKRPLFAAKDITTFYLENG

SEQ ID NO: 86860 - protein, 210 aa, Setaria italica
  Transcript Sequence Number=SeqID_20886
  Gene Ontology: Mol. function=hydrolase activity; Biological process =lipid catabolic process
  Homolog annotation: Hit_ID=Q9XE77; Match level="QueryCoverage=51%, HitCoverage=26%, E-value=2e-48, Identity=88%"; Hit description =Patatin-like protein
  Pfam annotation: Domain name=Patatin; Domain location=122-210; Score =18.1; E_value=1.8e-05; Accession=PF01734.14; Description=Patatin -like phospholipase
MTRLLIGSNESIIFQWHESLHVECQQMKICIEIAQICAEYDPSKRPTIADIILKLNKTETMVQKVPPDVNEPRNDPRSSLYQVVKRFWALPTQTLHEYSSNGATSTTVPQPPPSKGKLITILSIDGGGIRGLIPATIIACLEAKLQELDGPDARIADYFDVIAGTSTGALLTMMLAAPDEKKRPLFAAKDITTFYLENGPKIFPQRKIGF

SEQ ID NO: 86861 - protein, 100 aa, Setaria italica
  Transcript Sequence Number=SeqID_20887
ESRGHCFGLDCESGMDCGKCYTGQEGGWHCSRMSLTCFENLMIIVCTRVVWSTHTRSQSPQSAPSLFPWSPPPPPARPNAPTDCSSTMPFLRDMERSGVE

SEQ ID NO: 86862 - protein, 143 aa, Setaria italica
  Transcript Sequence Number=SeqID_20888
  Homolog annotation: Hit_ID=Q9ZSI3; Match level="QueryCoverage=67%, HitCoverage=31%, E-value=2e-24, Identity=54%"; Hit description =T15B16.3 protein
  Pfam annotation: Domain name=Polyketide_cyc; Domain location=47-137; Score=7.2; E_value=0.014; Accession=PF03364.12; Description =Streptomyces cyclasedehydrase
SLFPQEPAPVDVADDDCSAADQRIGFEIQVSKIGKRNRRLVRARVRVDAPLEAVWATLTDYEGLADFIPGLSECRLLDQAQGFARLYQVGEQDLALGFKFNAKGTIDCYEGDLESLPDAQGNARRREIAFNMIDGDFKVFQGK

SEQ ID NO: 86863 - protein, 53 aa, Setaria italica
  Transcript Sequence Number=SeqID_20889
QPSHFGGDISKGPKTMIFQLRIHSLLFELTMYQCLSISVPCTLLEAAQQRLNQ

SEQ ID NO: 86864 - protein, 88 aa, Setaria italica
  Transcript Sequence Number=SeqID_20890
MVVSVLNFLKQLIENMLLILWVHTLQIILHSQALEIILHSQTLDIVMLEASRSFRGPNQVQLTQFQHSVSFQHPMPQHNNVQGLGMQI

SEQ ID NO: 86865 - protein, 52 aa, Setaria italica
  Transcript Sequence Number=SeqID_20891
MSAIELTKLNFLSFLSLICLIDATYEVLPRLCQIRFDHGVIDEYLYFDSPNE

SEQ ID NO: 86866 - protein, 300 aa, Setaria italica
  misc_feature (288)..(288): Xaa can be any naturally occurring amino acid
  Transcript Sequence Number=SeqID_20892
  Gene Ontology: Cellular component=spliceosome; Biological process =mRNA processing
  Homolog annotation: Hit_ID=B6TYH0; Match level="QueryCoverage=48%, HitCoverage=37%, E-value=6e-66, Identity=85%"; Hit description=Pre -mRNA processing factor
  Pfam annotation: Domain name=PRP38; Domain location=1-102; Score =24.6; E_value=2.8e-09; Accession=PF03371.7; Description=PRP38 family
KMLQIQPDKDIVVEFIKNEDYKYVRVLGAFYLRLTGTVADVYQYLEPLYNDYRKLRHKLSDGQFALTHVDEFIDELLTKDYSCDTALPRIQKRWVLEASGTLEPRRSALEDDFEEEEEDKEEQPMEIDQPNGHEKDNHRGRSPARDRDRDRDRDRKHERHHRDRDHDRDRDYDRDYGRGRDRDRDRDRERDRNRDRDRDRHRLRDDDYSRDRDRDRERDGREREHRDRDRGRHRSRSRSRDRRDRDREDGEYRRRRDRGSVSPRGRGEDGATREEPKRKKERREEGEXNAPDPNDPEIIE

SEQ ID NO: 86867 - protein, 396 aa, Setaria italica
  Transcript Sequence Number=SeqID_20893
  Gene Ontology: Cellular component=spliceosome; Biological process =mRNA processing
  Homolog annotation: Hit_ID=B6TYH0; Match level="QueryCoverage=100%, HitCoverage=100%, E-value=1e-113, Identity=85%"; Hit description=Pre- mRNA processing factor
  Pfam annotation: Domain name=PRP38; Domain location=1-177; Score =257.0; E_value=4.6e-74; Accession=PF03371.7; Description=PRP38 family
MANRTDPLAKSIHGTNPQNLVEKIVRSKIYQSTYWKEQCFGLTAETLVDKAMELDHTGGTYGGNRKPTPFLCLALKMLQIQPDKDIVVEFIKNEDYKYVRVLGAFYLRLTGTVADVYQYLEPLYNDYRKLRHKLSDGQFALTHVDEFIDELLTKDYSCDTALPRIQKRWVLEASGTLEPRRSALEDDFEEEEEDKEEQPMEIDQPNGHEKDNHRGRSPARDRDRDRDRDRDRDRDRKHERHHRDRDHDRDRDYDRDYGRGRDRDRDRDRERDRNRDRDRDRHRLRDDDYSRDRDRDRERDGRERERRDRDRGRHRSRSRSRDRRDRDREDGEYRRRRDRGSVSPRGRGEDGATREEPKRKKEKKEKKGEPNAPDPNDPEIIEMNKLRASLGLKPLK

SEQ ID NO: 86868 - protein, 770 aa, Setaria italica
  Transcript Sequence Number=SeqID_20894
  Gene Ontology: Mol. function=protein binding; Cellular component =nucleus; Biological process=regulation of transcription, DNA -dependent
  Homolog annotation: Hit_ID=B9R9G2; Match level="QueryCoverage=48%, HitCoverage=53%, E-value=1e-115, Identity=53%"; Hit description =Transcriptional corepressor SEUSS, putative
  Pfam annotation: Domain name=LIM_bind; Domain location=168-610; Score= -178.4; E_value=0.0099; Accession=PF01803.8; Description=LIM-domain binding protein
  Subcellular localization annotation: CTP_CleavageSite=37; ConfidenceScore=5.37e-01
RSLLVISSYVPCFCLRFFEVMTDANSSFSGGAKLQPSTSMNTDSFMRVPASPISFSSNNISGSSVIDGSIVQQSPPQDQVQKRRSSSVTSHPMIEAGGALHAQKKSRIDVRQGDILQQQQLIQQLLHGQSSLHLQGQHAWIQQQKLAQMQQRQQPQLLQPFAQIQQSQIGIPRQPQLRPPLAQPGMQLAGPVRTPVDSGLCSRRLLQYLYHKRHRPENNPITYWRKLVEEYFAPRARERWCVSSYEKRANGSVSTPQTALDSWRCDICNTHGGKGYEATYEVLPRLCQIRFDHGVIDEYLFLDMPNEFRLPNGLMLLEHTKVVQKSVYEHLHVTHEGHLRIIFTPELKIMSWEFCSRRHEEYITRRVLAPQVNNLLQVAQKYQAAASESGPAGVSNNDAQTICNMFVTASRQLAKNLEHHTLNEHGLSKRYVRCLQISEVVNHMKDLIEFTNKTNLGPIEGLKNYPKPNVLKLPGQNTHEAKQIMAAAGLPNDQNTTKAMGVKQEIRAHVDNITSGVGAVGNCAPQNSAALNSYQNILRSSSANQSLLQQEASSVFKGPAAMHNGIQLEASRSFRGPNQVQLTQFQHSVSFQHPMPQHNNVQGLGMQNNLQGLGVQNNLQGVNPQYQQHVFNQLLQEVKNTNNHALVQQPPPDNPNVNSGLVSGAANTNSAATGEQAQHINNSTAKGAATVGTGPSNVINNSTASIIPSRSNSFKSVSSNPAAATGGNAATSKAEPFHELEDLDNLIANELVESGLFMGDQGGNGFSWNM

SEQ ID NO: 86869 - protein, 788 aa, Setaria italica
  misc_feature (263)..(263): Xaa can be any naturally occurring amino acid
  Transcript Sequence Number=SeqID_20895
  Gene Ontology: Mol. function=protein binding; Cellular component =nucleus; Biological process=regulation of transcription, DNA -dependent
  Homolog annotation: Hit_ID=Q6H974; Match level="QueryCoverage=71%, HitCoverage=63%, E-value=1e-104, Identity=40%"; Hit description=SEU1 protein
  Subcellular localization annotation: CTP_CleavageSite=23; ConfidenceScore=5.53e-01
MNGAHPWTSMSGGACSNLGLVAREMNGSVPISTMNSSGPSIGVSSLVTDANSSLSGGAQLQPSTSMNGDSFMRVPASPMSFSSNNISGSSVIDGSIMQQSPPQDQVQKRRSSSVTSQPVIDAGGALHAQKKSRTDVSQGDIVQQQLIQQLVHGQNPLHFQGQQNPQLQALIQQHKLAQLQQRQQQHLLQPFSQMQQPQVGIPRQPQLRPPLAQPGMQLGGPVRTPIENGICSRRILQYLFHKRHRPENNSITYWRKLVEEYFXAPRARERWCVSSYENRGSSSAAAPQRALDTWRCDICNTHGGKGYDATYEVLPRLCQIRFDHGVIDEYLYFDSPNEFRLPNGQMVLEHAKVVQKSVYEHLHVIHEGHLRIIFTPELKIMSWEFCSRRHEEYTTRKTIAPQVNNLLQVAQKYQTAVNESGPAGISNNDAQTICNMFATASRQLAKNLEHHTLNEHGLSKRYVRCLQISEVVNHMKDLIEFSHKNNLGPKESLNSYSKTIAKFQNMHDSRQLMAAASLANNQSNTKVMGVQQEASASVNNQTPGVGAIGISTLQNATALNSYQNILRSSSANQILLQQEASSIFRGSAAMQNGIQLEAARSFHGPGQAQLAQFQHPASFQQPMLQQNNLQGFGASPQYQQHVLNQLLQEVKKNNNRSIAQQPPPDAPNASSGRASGPATPNVAASGEQAQRISNNNSNNNSAVKSAAPAGTGPSNVINNNTASIVPSRNNSFKSVSSNPAVVATGGNAANSKVDDSFHELEDLDHLIANELVESGLFGAGQGSNALPW

SEQ ID NO: 86870 - protein, 138 aa, Setaria italica
  misc_feature (17)..(17): Xaa can be any naturally occurring amino acid
  Transcript Sequence Number=SeqID_20896
  Gene Ontology: Mol. function=metal ion binding; Cellular component =integral to membrane; Biological process=ubiquitin-dependent protein catabolic process
  Homolog annotation: Hit_ID=B6SHE6; Match level="QueryCoverage=78%, HitCoverage=76%, E-value=6e-38, Identity=72%"; Hit description=RING -H2 finger protein ATL1G
  Pfam annotation: Domain name=DUF1272; Domain location=25-82; Score= -4.8; E_value=0.041; Accession=PF06906.3; Description=Protein of unknown function (DUF1272)
  Pfam annotation: Domain name=zf-C3HC4; Domain location=31-72; Score =44.3; E_value=4.9e-10; Accession=PF00097.17; Description=Zinc finger, C3HC4 type (RING finger)
  Pfam module annotation: Pfam domain module=DUF1272::zf-C3HC4; Domain location=25-82::31-72
HESFLLLTFAPALLFCXLCFASEQLIIVARCSVCLADYQPDERLQRIPPCGHTFHINCIDHWLSKNTTCPLCRVSLLPAPKATSTDLDLEAQTAVEESLNVHHQEGLADGNTPQEDQASEEGGAGGSQAEEPRSDIDS

SEQ ID NO: 86871 - protein, 33 aa, Setaria italica
  Transcript Sequence Number=SeqID_20897
LECGLKEEMREMLPVVIFKESFLIRETQSVIYF

SEQ ID NO: 86872 - protein, 229 aa, Setaria italica
  Transcript Sequence Number=SeqID_20898
  Gene Ontology: Mol. function=metal ion binding; Cellular component =integral to membrane; Biological process=ubiquitin-dependent protein catabolic process
  Homolog annotation: Hit_ID=B6SHE6; Match level="QueryCoverage=57%, HitCoverage=93%, E-value=6e-39, Identity=69%"; Hit description=RING -H2 finger protein ATL1G
  Pfam annotation: Domain name=DUF1272; Domain location=92-150; Score= -7.0; E_value=0.074; Accession=PF06906.3; Description=Protein of unknown function (DUF1272)
  Pfam annotation: Domain name=zf-C3HC4; Domain location=99-140; Score =44.3; E_value=4.9e-10; Accession=PF00097.17; Description=Zinc finger, C3HC4 type (RING finger)
  Pfam module annotation: Pfam domain module=DUF1272::zf-C3HC4; Domain location=92-150::99-140
MSCTSPDPPDYCSAESPELKLYQAFIFSVPVFFTFVLLLFFYLFYLRRRRANWQSLRMRTDNLIRGDNPRLECGLKEEMREMLPVVIFKESFLIRETQCSVCLADYQPDERLQRIPPCGHTFHINCIDHWLSKNTTCPLCRVSLLPAPKATSTDLDLEAQTAVEESLNVHHQEGLADGNTPQEDQASEEGGAGGSQAEEPRSDMIESLTVRVVVEPQADAEGSPSTTCR

SEQ ID NO: 86873 - protein, 45 aa, Setaria italica
  Transcript Sequence Number=SeqID_20899
LNLVCVMSKLVVMSTVYGASRWARRHLARFCESIYSVYGRCLDLR

SEQ ID NO: 86874 - protein, 97 aa, Setaria italica
  misc_feature (74)..(74): Xaa can be any naturally occurring amino acid
  Transcript Sequence Number=SeqID_20900
  Gene Ontology: Mol. function=hydrolase activity, acting on glycosyl bonds; Cellular component=vacuole; Biological process=cell wall organization and biogenesis
  Homolog annotation: Hit_ID=Q6L5C5; Match level="QueryCoverage=96%, HitCoverage=19%, E-value=2e-20, Identity=52%"; Hit description =Putative polygalacturonase
SVRGGYIRNVTVDNVRMSRVRSGVRIAGDAGDHPDGRFSQRAVPMVDAVRIRNVWGVGIQQPGSLEGIRNSPFXTRICLDNVKLFGWRTGAAWRCRG

SEQ ID NO: 86875 - protein, 130 aa, Setaria italica
  misc_feature (37)..(37): Xaa can be any naturally occurring amino acid
  misc_feature (121)..(121): Xaa can be any naturally occurring amino acid
  Transcript Sequence Number=SeqID_20901
  Homolog annotation: Hit_ID=Q9SSM5; Match level="QueryCoverage=90%, HitCoverage=19%, E-value=4e-21, Identity=48%"; Hit description =F3N23.22 protein
WGWGREEGKGPVEEATGFEVGIVVPKLSRAAAAAGPXEDCVVRLVRELESAGLLVERVRGVPAEFIKLAAPMGTLGRAAAEMQMKKLTYIGMELQFEWDQVAAFVRQPDGSLFSWRERYFXFRYLIYGIV

SEQ ID NO: 86876 - protein, 143 aa, Setaria italica
  Transcript Sequence Number=SeqID_20902
  Gene Ontology: Mol. function=hydrolase activity, acting on acid anhydrides, catalyzing transmembrane movement of substances; Cellular component=integral to membrane; Biological process=calcium ion transport
  Homolog annotation: Hit_ID=Q6ETP2; Match level="QueryCoverage=97%, HitCoverage=13%, E-value=8e-44, Identity=63%"; Hit description =Putative calcium-transporting ATPase
  Pfam annotation: Domain name=E1-E2_ATPase; Domain location=1-143; Score=-29.7; E_value=0.0022; Accession=PF00122.12; Description=E1-E2 ATPase
YKDCCKVADGYGTMLVTAVGINTEWGLLMASISEDSGEETPLQVRLNGIATFIGMVGLSVALAVLIVLLARYFTGHTYNPDGTVQYVKGKMGVGQTIGGVVIIFTVAVTIVVVAVPEGLPLAVTLTLAFSMRKMMKDKALVRR

SEQ ID NO: 86877 - protein, 1070 aa, Setaria italica
  misc_feature (410)..(410): Xaa can be any naturally occurring amino acid
  Transcript Sequence Number=SeqID_20903
  Gene Ontology: Mol. function=hydrolase activity, acting on acid anhydrides, catalyzing transmembrane movement of substances; Cellular component=integral to membrane; Biological process=calcium ion transport
  Homolog annotation: Hit_ID=B9RWZ4; Match level="QueryCoverage=98%, HitCoverage=95%, E-value=0.0, Identity=66%"; Hit description=Cation -transporting atpase plant, putative
  Pfam annotation: Domain name=Cation_ATPase_C; Domain location=851 -1029; Score=187.1; E_value=4.9e-53; Accession=PF00689.13; Description=Cation transporting ATPase, C-terminus
  Pfam annotation: Domain name=Cation_ATPase_N; Domain location=86-164; Score=55.0; E_value=2.9e-13; Accession=PF00690.18; Description=Cation transporterATPase, N-terminus
  Pfam annotation: Domain name=E1-E2_ATPase; Domain location=178-452; Score=244.0; E_value=3.7e-70; Accession=PF00122.12; Description=E1 -E2 ATPase
  Pfam annotation: Domain name=Hydrolase; Domain location=456-790; Score=69.3; E_value=1.4e-17; Accession=PF00702.18; Description =haloacid dehalogenase-like hydrolase
  Pfam module annotation: Pfam domain module=Cation_ATPase_C::Cation _ATPase_N::E1-E2_ATPase::Hydrolase; Domain location=851-1029::86 -164::178-452::456-790
GQAALVLNASRRFRYTLDLKKEEQKEEIRRKIRAQAHVIRAAFRFKEAGRVHGQSKEPAVPHPDGALGFGIKEDQLTALTRDHNYSALQQYGGISGVAKMLTTDTEKGISGDDTDLMARRNAFGSNTYPRKKGRSFLAFVWDACKDLTLIILMVAAAVSLALGITTEGIKEGWYDGASIAFAVLLVVFVTAISDYKQSLQFQNLNEEKQNIRLEVVRGGRRIMVSIYDLVVGDVVPLKIGDQVPADGILISGHSLSIDESSMTGESKIVHKDQKSPFLMSGCKVADGYGTMLVTAVGINTEWGLLMASISEDSGEETPLQVRLNGIATFIGMVGLSVALAVLIVLLARYFTGHTYNPDGTVQYVKGKMGVGQTIGGVVRIFTVAVGIGFSGYLCCFGVYSFYLIMLRCNXVTIVVVAVPEGLPLAVTLTLAFSMRKMMKDKALVRRLSACETMGSATTICSDKTGTLTLNQMTVVEAYFGGKKMESPDNAQVLSADVTSLIVEGIAQNTSGSIFEPEQGGQEPEVTGSPTEKAILSWGLKLGMKFNETRSKSSILHVFPFNSEKKRGGVAVHLGGSEVHIHWKGAAEIILDSCTSWLDTDGSKHSMTPEKVAEFKKFIEDMAAASLRCVAFAYRTYEIDDVPNEDLRAEWKLPEDNLIMLGIVGIKDPCRPGLRDSVRLCQAAGIKVRMVTGDNLQTARAIALECGILDDPNVSEPVIIEGKTFRALSDLEREEAAEKISVMGRSSPNDKLLLVKALRKRGHVVAVTGDGTNDAPALHEADIGLSMGIQGTEVAKESSDIIILDDNFASVVRVVRWGRSVYANIQKFIQFQLTVNVAALIINVVAAISSGNVPLNAVQLLWVNLIMDTLGALALATEPPTNHLMEKPPVGRREPLVTNIMWRNLIIMALFQVSVLLTLNFKGISLLQLKNDDRAHADKVKNTFIFNTFVLCQVFNEFNARKPDELNIFKGILGNHLFIGIIAITVILQALIVEFLGKFASTVKLSWQLWLVSIGLAFFSWPLAFVGKLIPVPKRPLGEFFACCCKGSKQASDDATSDDNKGNKSEHRDIV

SEQ ID NO: 86878 - protein, 269 aa, Setaria italica
  Transcript Sequence Number=SeqID_20904
  Gene Ontology: Mol. function=protein binding; Cellular component =plasma membrane; Biological process=protein amino acid phosphorylation
  Homolog annotation: Hit_ID=B6TSY5; Match level="QueryCoverage=92%, HitCoverage=90%, E-value=1e-95, Identity=72%"; Hit description =BRASSINOSTEROID INSENSITIVE 1-associated receptor kinase 1
  Pfam annotation: Domain name=LRRNT_2; Domain location=21-67; Score =12.1; E_value=0.054; Accession=PF08263.4; Description=Leucine rich repeat N-terminal domain
  Pfam annotation: Domain name=LRR_1; Domain location=118-140; Score =12.3; E_value=1.3; Accession=PF00560.25; Description=Leucine Rich Repeat
  Pfam annotation: Domain name=LRR_1; Domain location=142-164; Score =13.8; E_value=0.7; Accession=PF00560.25; Description=Leucine Rich Repeat
  Pfam annotation: Domain name=LRR_1; Domain location=166-187; Score =12.5; E_value=1.2; Accession=PF00560.25; Description=Leucine Rich Repeat
  Pfam annotation: Domain name=LRR_1; Domain location=94-116; Score =17.5; E_value=0.056; Accession=PF00560.25; Description=Leucine Rich Repeat
  Pfam module annotation: Pfam domain module=LRRNT_2::LRR_1::LRR_1::LRR_ 1::LRR_1; Domain location=21-67::118-140::142-164::166-187::94-116
MSRRHLAAAFAAALFLLCAADPDDERCLSHLHQSLSDPAGGLRNWTKASFSAPCDGFFSHLQGVTCNNGRVYKLALPGLSLGGTIPPELSNCTNLQSLDLSANALSGAIPPELSALLNLAVLNLSANALSGAIPRELASCAYLNIIDLHGNQLSGPIPDELGLLVRLSTLDVSYNRLSGPIPALLANRTGSVGFNASSFVGNKNLYGYPLPPMRTRGLSVLAIVGIGLGSGLLSLVLSFSAVCLWLRATDRTATTPGEEGKISQLMPDY

SEQ ID NO: 86879 - protein, 94 aa, Setaria italica
  Transcript Sequence Number=SeqID_20905
APPCLLCSRVDRLFQADGGEAGGARWLRDALCGDHAAEISALGYCLRHRRLAEGREMCEDCLSSTKEKTRDAAEKSARACACCKAVVRTSSREL

SEQ ID NO: 86880 - protein, 60 aa, Setaria italica
  Transcript Sequence Number=SeqID_20906
KLSDSCLTRRIMHGEGREPGEITWQLAEISFPSEPTIFYLGTHETSRPRSARPAGAPAMP

SEQ ID NO: 86881 - protein, 413 aa, Setaria italica
  Transcript Sequence Number=SeqID_20907
  Gene Ontology: Mol. function=ferredoxin hydrogenase activity; Cellular component=periplasmic space
  Homolog annotation: Hit_ID=Q94CL6; Match level="QueryCoverage=99%, HitCoverage=87%, E-value=1e-169, Identity=67%"; Hit description=Narf- like protein
  Pfam annotation: Domain name=Fe_hyd_SSU; Domain location=346-403; Score=47.6; E_value=4.9e-11; Accession=PF02256.9; Description=Iron hydrogenase small subunit
  Pfam annotation: Domain name=Fe_hyd_lg_C; Domain location=30-341; Score=248.2; E_value=2e-71; Accession=PF02906.6; Description=Iron only hydrogenase large subunit, C-terminal domain
  Pfam module annotation: Pfam domain module=Fe_hyd_SSU::Fe_hyd_lg_C; Domain location=346-403::30-341
DFLKDCLACSGCITSAETVMLEKQSLGDFIARINSGKTVIVSVSPQSRASLAAFFGLSQSQVLRKLTALFKSMGVKAVYDTSSSRDLSLIEACNEFVSRYQKNQSSSGQEAGASLPMISSACPGWICYAEKTLGSYILPYISSVKSPQQAIGAAIKHHVVEKLGLKPYDVYHVTVMPCYDKKLEAVRDDFVFSVDGKEVTEVDSVLTTGEVLDLIQSKSIDFKTLEESSLDRLLTNVDEEGHLYGVSGGSGGYAEIVFRHAARAIYKREIEGPLDFRTLRNSDFREITLEVEGKPVLKFALCYGFRNLQNIVRKIKMGKCEYHFIEVMACPSGCLNGGGQIKPVQGQSAKELIQQLESVYTQDVSISDPFDNPITKRLYDEWLGQPGSENAKKYLHTDYHPVVKSVASQLQNW

SEQ ID NO: 86882 - protein, 77 aa, Setaria italica
  Transcript Sequence Number=SeqID_20908
HGDPRSSSISLSFHRHFLDAAGLLLFTWFHVKLASDHHEKSKGNGNNTMPCQLQCYTFFFGSRGFCSAFFLTPFLAS

SEQ ID NO: 86883 - protein, 62 aa, Setaria italica
  Transcript Sequence Number=SeqID_20909
MASMKAAKVTGAGAQAKEPAPKLSETATKPSAAKNGVKKKAEQKPREPKKKVKSSKPAASKK

SEQ ID NO: 86884 - protein, 76 aa, Setaria italica
  Transcript Sequence Number=SeqID_20910
  Gene Ontology: Biological process=protein modification process
  Homolog annotation: Hit_ID=Q336W1; Match level="QueryCoverage=73%, HitCoverage=11%, E-value=1e-20, Identity=83%"; Hit description =Ubiquitin family protein, expressed
  Pfam annotation: Domain name=ubiquitin; Domain location=24-76; Score =14.2; E_value=0.011; Accession=PF00240.15; Description=Ubiquitin family
MGGGDAGADPGAEPAAAQATLHIRCTNGSKFAVRADLGATVGAFKAIVAESCDVPAPQQRLIYKGRILKDEETLAS

SEQ ID NO: 86885 - protein, 272 aa, Setaria italica
  misc_feature (29)..(29): Xaa can be any naturally occurring amino acid
  Transcript Sequence Number=SeqID_20911
  Gene Ontology: Mol. function=nucleic acid binding; Cellular component= intracellular
  Homolog annotation: Hit_ID=B9S3N2; Match level="QueryCoverage=68%, HitCoverage=36%, E-value=2e-40, Identity=49%"; Hit description=RNA binding protein, putative
  Pfam annotation: Domain name=zf-RanBP; Domain location=15-51; Score =18.5; E_value=0.006; Accession=PF00641.10; Description=Zn-finger in Ran binding protein and others
  Pfam annotation: Domain name=zf-RanBP; Domain location=92-121; Score =25.8; E_value=0.00017; Accession=PF00641.10; Description=Zn-finger in Ran binding protein and others
  Pfam module annotation: Pfam domain module=zf-RanBP::zf-RanBP; Domain location=15-51::92-121
RGRGRGDGPGKAWQQDGDWMCPNTRSVMXGCGNVNFAFRGVCNRCGAARPAGVGGAGGGGGGRGRGRGSADARGSSRAGTAAAVGGPPGLFGPNDWPCPMCGNINWAKRTKCNICNTSKPGTNEGGVRGGRGGGYKELDEEELEEVKKRRKEVEEDDGEIYDEFGNLKKKFRAKSQHTESVQTLPGSGRAGWEVEQRGSSEREGRERSRDRGRVDYDEKESRNRDRGDHGRERRRSRSRSRSRDHDRERGRDRGRDHDYERSRERDRDRRHR

SEQ ID NO: 86886 - protein, 111 aa, Setaria italica
  Transcript Sequence Number=SeqID_20912
  Gene Ontology: Mol. function=methyltransferase activity; Cellular component=plasma membrane; Biological process=metabolic process
  Homolog annotation: Hit_ID=B9T5F3; Match level="QueryCoverage=98%, HitCoverage=27%, E-value=1e-27, Identity=47%"; Hit description =ATRAD3, putative
LANATVVTTTMNLGAPYSEAAAARGVVPLHAPLQQRFPVGDGTMDVVRAGHAVNRWIPEAALEFLWYDADRALRPGGLLWVDHFWCRRNDLEGVYAAMLRRLGYKTIKWAV

SEQ ID NO: 86887 - protein, 94 aa, Setaria italica
  Transcript Sequence Number=SeqID_20913
  Subcellular localization annotation: CTP_CleavageSite=79; ConfidenceScore=5.10e-01
GKNIVSGQSRTCVKFNITCPKWINGFAFLLESFLLTQNSCSSFLILRAILPFFESPHTKSTFARSLALRRKKRGRVLVGAGRVGKGGNALVGWG

SEQ ID NO: 86888 - protein, 85 aa, Setaria italica
  misc_feature (18)..(18): Xaa can be any naturally occurring amino acid
  Transcript Sequence Number=SeqID_20914
  Gene Ontology: Mol. function=small conjugating protein ligase activity; Biological process=regulation of protein metabolic process
  Homolog annotation: Hit_ID=Q6AU62; Match level="QueryCoverage=72%, HitCoverage=17%, E-value=2e-16, Identity=64%"; Hit description =Ubiquitin-conjugating enzyme family protein
MISSYARTEHGIGSDDLXLFNQFDVVQDFSDHHYAKNIARKGHQDWVKAIQSEWNLLQKNLPGQFICLFDKFVHLSNYQYFNTEC

SEQ ID NO: 86889 - protein, 371 aa, Setaria italica
  Transcript Sequence Number=SeqID_20915
  Gene Ontology: Mol. function=small conjugating protein ligase activity; Biological process=regulation of protein metabolic process
  Homolog annotation: Hit_ID=Q9LUQ5; Match level="QueryCoverage=59%, HitCoverage=36%, E-value=9e-80, Identity=60%"; Hit description =Probable ubiquitin carrier protein E2 25
  Pfam annotation: Domain name=UQ_con; Domain location=119-268; Score =118.4; E_value=2.4e-32; Accession=PF00179.18; Description=Ubiquitin -conjugating enzyme
  Subcellular localization annotation: CTP_CleavageSite=59; ConfidenceScore=5.31e-01
MALKIKKLLQLFCVSKKDSKKKGKSIDPLWTASTPHSSLSVTANKSHLDPCSSGTGTVLSMQKPKPECTSMISSYARTEHGIGSDDYMLFNQFDVVQDFSDHHYAKTSPGKATKDWVKAIQSEWNLLQKNLPESVYVRVYEDRIDLLRAAIVGPAGTPYHDGLFFFDVRFPAEYPKCPPKVHYHSGGLRLNPNLYESGKVCLSLLNTWWGNGCEKWGKSNSTMLQVLVSIQGLVLNDKPYFNEPGNKNSAKTTAGEKNSMAYNQTAFVLSCKTMLYSLRKPPKHFETLVARHFHERERAILDACSAYMSGAVVGSSAGSGARYACDKCFADFKKSLTLYTEHLRTEFAANRSCLLELERQSSVVDEIVPAS

SEQ ID NO: 86890 - protein, 118 aa, Setaria italica
  Transcript Sequence Number=SeqID_20916
  Gene Ontology: Mol. function=hydrolase activity
  Homolog annotation: Hit_ID=B9HLL5; Match level="QueryCoverage=64%, HitCoverage=22%, E-value=1e-26, Identity=69%"; Hit description=Mtn21- like protein
ALASPRRTTAPPRAATALELLRVCRELQGRFEEVELPLLVVHGGDDTVCDPACVEELFRRAGSKDKTLRVYPGMWHQIIGEPEENVEKVFDEIIAWLKARSSASVSAGSATADAQEQQ

SEQ ID NO: 86891 - protein, 140 aa, Setaria italica
  Transcript Sequence Number=SeqID_20917
  Gene Ontology: Mol. function=electron carrier activity; Cellular component=nucleus; Biological process=oxidation reduction
  Homolog annotation: Hit_ID=Q6K6E3; Match level="QueryCoverage=96%, HitCoverage=31%, E-value=8e-32, Identity=48%"; Hit description =Putative cytochrome P450
GVGVGALVRYAHRIIDEQYMRRRRGRDAGQPRKDDMMDVAIDKEKEWEEEGSEMNYGAIKGLITDLFVGGSETVSSTVEWAMAELLQCSESMKMVREELKTVIGTKGQVVESDISQLPYLQAVVKETLRLHPAITLAFLV

SEQ ID NO: 86892 - protein, 156 aa, Setaria italica
  misc_feature (75)..(75): Xaa can be any naturally occurring amino acid
  Transcript Sequence Number=SeqID_20918
  Gene Ontology: Mol. function=metal ion binding; Cellular component =integral to membrane; Biological process=ubiquitin-dependent protein catabolic process
  Homolog annotation: Hit_ID=A8E124; Match level="QueryCoverage=91%, HitCoverage=60%, E-value=5e-37, Identity=51%"; Hit description=NEP1 -interacting protein
  Pfam annotation: Domain name=zf-C3HC4; Domain location=119-152; Score= 9.1; E_value=0.0092; Accession=PF00097.17; Description=Zinc finger, C3HC4 type (RING finger)
RGTGVGGLTGALVSMEVVDSYLAMWRSDEPAIWSAVYVLDVIWSLLTGRLVREKVDPAVLSAVESQMSAEEAPVXHGDGADIFETGGSSGMPRAAIDALPVVRFAVSGNVDAGGELTVCSVCLQEFEAGESARSLPVCRHTFHLPCIDGWLLRHAS

SEQ ID NO: 86893 - protein, 157 aa, Setaria italica
  Transcript Sequence Number=SeqID_20919
SRIIIGRPGVTSTCYTHRHYSTLQLLFLIPPPQREQHQKTQKQRVYDKSRCYFRVRKRTASALSSGQTPRHLPSTDGSGGEPSRPLPPTNGSGGEPGSAPPIHGRKWRRRPRVSTSLPRTEAAASRRRELPACDDAPAQTSADGSGGGAPAQTSCGR

SEQ ID NO: 86894 - protein, 300 aa, Setaria italica
  misc_feature (229)..(229): Xaa can be any naturally occurring amino acid
  Transcript Sequence Number=SeqID_20920
  Gene Ontology: Mol. function=rRNA N-glycosylase activity; Biological process=negative regulation of translation
  Homolog annotation: Hit_ID=Q2QX14; Match level="QueryCoverage=83%, HitCoverage=76%, E-value=2e-41, Identity=38%"; Hit description =Ribosome inactivating protein
  Pfam annotation: Domain name=RIP; Domain location=39-294; Score= -62.4; E_value=0.0047; Accession=PF00161.11; Description=Ribosome inactivating protein
MSMCVTCAGNTRSTDYNSALTIWSENDKSLVFLCNMQWIPSVDIDAMDPSLQGYEHVMNWLAQRDLDRAGPGQDNLFPDVPLTSATEGWRRVNFLFPDRPTVSILVDEIDSYLVAIRRGDGKWLKFSDHCIPLPADHPAVESMGLVSSYSRLTRGFDREQLVFGTPVLTNLYHVLFHFNPKLGLMNPEMTRQRKALVQLIVLFCEAVRFRRMRARLLEIMEDGQSVTLXPKMWSWLQEWSSASVFALSCKEREGRGNMQDNPRLLPRVEGLEINSREDVPGFLGLILRTAVVPTAQAVVR

SEQ ID NO: 86895 - protein, 359 aa, Setaria italica
  Transcript Sequence Number=SeqID_20921
  Homolog annotation: Hit_ID=B6UBF1; Match level="QueryCoverage=99%, HitCoverage=99%, E-value=7e-87, Identity=51%"; Hit description=GAGA -binding protein
  Pfam annotation: Domain name=DUF1004; Domain location=1-359; Score =480.0; E_value=3.3e-141; Accession=PF06217.4; Description=Protein of unknown function (DUF1004)
MDDDGSLGIRNWGFYETVKGNLGLQLMSSVPPDRDTKPLLPNGGNFLQHHGHHNAPHQHQHQHHTQHPHHPRGGGGGSGAPSGMPTEPPAVHMDFVRNEAWLHPSQHHHQHHHQHQHPRQPKVLHHLPVGPAGHAGHPGHGGHAVHHHPTGYGMMADAHGVHTLQMMQPQAQQQPQPQPQPQDPPPPKEESMPQPLIEDHPVLKNEPPVKKRQQGRQPKSPKPKKPKKVAAPQENGAPNKPAPRPRGPRKTVGMVINGIDLDLSRIPTPVCSCTGTPQQCYRWGAGGWQSACCTTSISTYPLPMSTKRRGARIAGRKMSQGAFKKVLEKLAGEGYNLANPIDLKTFWAKHGTNKFVVIR

SEQ ID NO: 86896 - protein, 97 aa, Setaria italica
  misc_feature (14)..(14): Xaa can be any naturally occurring amino acid
  misc_feature (90)..(90): Xaa can be any naturally occurring amino acid
  Transcript Sequence Number=SeqID_20922
  Homolog annotation: Hit_ID=B6TUA3; Match level="QueryCoverage=95%, HitCoverage=19%, E-value=2e-47, Identity=93%"; Hit description =Rhodopsin-like receptor
SSGRPSRLRDPSRXFHALRLRANATRPHGLELCFHRNATVGPCKCAASQWQKMPKSGLWVQAISPYDHRILDFRMPADPSRSVVVYTEEXFLLHRVV

SEQ ID NO: 86897 - protein, 85 aa, Setaria italica
  Transcript Sequence Number=SeqID_20923
MSSQRPGRHQRRASQSVFVLPENLATLDVDAAAEAGGKAGSDGAGAEQQAARPPAGRHRRAMSVAVASRDLELIKEDLGSYKLGA

SEQ ID NO: 86898 - protein, 74 aa, Setaria italica
  Transcript Sequence Number=SeqID_20924
QLCNKRYVPIFRYNFVHQVSRDAFLAAYSGERVGEQRAEQSTQLGSHCTCTGDASGSQSDATSCFLSGMGRRYS

SEQ ID NO: 86899 - protein, 190 aa, Setaria italica
  Transcript Sequence Number=SeqID_20925
  Pfam annotation: Domain name=SPT2; Domain location=94-189; Score =32.2; E_value=9.2e-07; Accession=PF08243.3; Description=SPT2 chromatin protein
  Subcellular localization annotation: CTP_CleavageSite=75; ConfidenceScore=5.78e-01
RQQQVSQGQRPQQSLQSQRTQQSLQSQRPQQSSHVQKLQSSQTHRPQSQSNRSQSLQGQRPLSSQCQYSEQRRLQASDRVKQVERQIRPPSKAMPSRPISSNGIRDDHAKRKQVAKRRFDEDEDEEDPLAMIRNMFGYDPRRYAGRDEDDSDMEADFATIEREEKRSARIARQEDEEQLRLIEEEERRRT

SEQ ID NO: 86900 - protein, 539 aa, Setaria italica
  misc_feature (456)..(456): Xaa can be any naturally occurring amino acid
  Transcript Sequence Number=SeqID_20926
  Pfam annotation: Domain name=SPT2; Domain location=432-533; Score =56.7; E_value=8.6e-14; Accession=PF08243.3; Description=SPT2 chromatin protein
MRGYEYETNGYHRAMEDEYGDEYYDQDEYEEDGSGAGDEYVEEEEPLEGQKEILELRERLKEQIRRKAKAAAASAAGRSSSSHDRILPTRENKFGSFFGPSKPVISRRVIEERKSLKELHSTISRDPRPSGVHRDMPSSSKVQNKGNGHQHKPKMVNEVKKKAEALKDNRDYSFLLSDDADLSSSPKEKPANRSSLTQKADRVVMHSAAKSKAPTSQPARLSNGYGSKNTLSTQRHAEGRVDSMRKEVFSNRERSVSRDNERMNSIVRNGSNQANTSKITSQKLPTKGPTPNRHPSRDLNDPALRKGNVVSRHEIDRPKSSQSQRMQSAVQRPQLSSHGQRPHQSMQQRPQQSLQNRRPQQVSQGQRPQQSLQSQRTQQSLQSQRPQQSSHVQKLQSSQTHRPQSQSNRSQSLQGQRPLSSQCQYSEQRRLQPSRPISSNGIRDDHAKRKQVAKRXFDEDEDEEDPLAMIRNMFGYDPRRYAGRDEDDSDMEADFATIEREEKRSARIARQEDEEQLRLIEEEERREQERKRRKMARGR

SEQ ID NO: 86901 - protein, 112 aa, Setaria italica
  Transcript Sequence Number=SeqID_20927
  Gene Ontology: Mol. function=transcription factor activity; Cellular component=nucleus; Biological process=regulation of transcription, DNA-dependent
  Homolog annotation: Hit_ID=Q3T5M5; Match level="QueryCoverage=63%, HitCoverage=25%, E-value=7e-34, Identity=95%"; Hit description=TmCBF7
  Pfam annotation: Domain name=AP2; Domain location=27-78; Score=79.2; E_value=1.5e-20; Accession=PF00847.12; Description=AP2 domain
  Subcellular localization annotation: CTP_CleavageSite=45; ConfidenceScore=5.52e-01
SGGSKAQAASAAGGAARSSSRSGYKHPSYRGVRRRSWGKWVSEIREPRKKSRIWLGTFPTAEMAARAHDVAALAIKGRAAHLNFPHLAHELPRPASASPADIQAAAAEAAAA

SEQ ID NO: 86902 - protein, 88 aa, Setaria italica
  misc_feature (20)..(20): Xaa can be any naturally occurring amino acid
  misc_feature (37)..(37): Xaa can be any naturally occurring amino acid
  misc_feature (64)..(64): Xaa can be any naturally occurring amino acid
  misc_feature (74)..(74): Xaa can be any naturally occurring amino acid
  Transcript Sequence Number=SeqID_20928
  Gene Ontology: Mol. function=RNA-directed DNA polymerase activity; Cellular component=nucleus; Biological process=RNA-dependent DNA replication
  Homolog annotation: Hit_ID=Q6L4A6; Match level="QueryCoverage=97%, HitCoverage=42%, E-value=1e-21, Identity=52%"; Hit description =Putative reverse transcriptase, identical
MRCDFGTTTHEERDVNLESXAVPRKDTFRYLGSMLQXSGDIDEDVSHRIKAGWMKWRQASGIYXDKRVPLKLKXRTTIRPAMLYGAEC

SEQ ID NO: 86903 - protein, 125 aa, Setaria italica
  misc_feature (42)..(42): Xaa can be any naturally occurring amino acid
  misc_feature (71)..(71): Xaa can be any naturally occurring amino acid
  Transcript Sequence Number=SeqID_20929
  Homolog annotation: Hit_ID=Q00XD3; Match level="QueryCoverage=85%, HitCoverage=19%, E-value=3e-14, Identity=38%"; Hit description=LMBR1 integral membrane family protein-like (ISS)
KRCILKENRAEATWAFTVLWGLLGTAAFAFFCFYLLIAVIAXGEMMLGLKLVFITIHLMKWGGTLMNSFLXNVGLILLCSISVIQFGATAFAYYAQATAAQEIFGHTLQSLRGIKYLYKYNVFQY

SEQ ID NO: 86904 - protein, 65 aa, Setaria italica
  misc_feature (15)..(15): Xaa can be any naturally occurring amino acid
  Transcript Sequence Number=SeqID_20930
ESKIAGQLDQKPFLXACRRRPSEGDLQLDAVKLCQSGKKKLKIQNWHPIKVVEVDGKEPERINRG

SEQ ID NO: 86905 - protein, 78 aa, Setaria italica
  misc_feature (59)..(59): Xaa can be any naturally occurring amino acid
  Transcript Sequence Number=SeqID_20931
  Gene Ontology: Mol. function=RNA-directed DNA polymerase activity; Cellular component=nucleus; Biological process=RNA-dependent DNA replication
  Homolog annotation: Hit_ID=Q1AKH8; Match level="QueryCoverage=100%, HitCoverage=24%, E-value=2e-12, Identity=41%"; Hit description =Reverse transcriptase family member
KNEDICDRLGVAPIEEKLIQHRLRWFGHVQRRPPKAPVRSGTLRHDSNVKRGRGRPKLXKDLALDRSAWKTAIHVPEP

SEQ ID NO: 86906 - protein, 46 aa, Setaria italica
  Transcript Sequence Number=SeqID_20932
YGFVALAILTLFYYAIFGWRKRKPTGRFQLSNSICCLALAKELQPV

SEQ ID NO: 86907 - protein, 65 aa, Setaria italica
  Transcript Sequence Number=SeqID_20933
  Gene Ontology: Mol. function=pyridoxamine-phosphate oxidase activity; Biological process=pyridoxine biosynthetic process
  Homolog annotation: Hit_ID=B9RJT5; Match level="QueryCoverage=78%, HitCoverage=9%, E-value=6e-16, Identity=76%"; Hit description =Pyridoxamine 5-phosphate oxidase, putative
  Pfam annotation: Domain name=Pyridox_oxidase; Domain location=3-63; Score=43.0; E_value=1.2e-09; Accession=PF01243.12; Description =Pyridoxamine 5'-phosphate oxidase
AGLREPNAMALTTVNKEGKPSSRMVLLKGVDKQGFVWYTNYGGRKAHDLSENPNAALLFFWNLLN

SEQ ID NO: 86908 - protein, 86 aa, Setaria italica
  misc_feature (23)..(23): Xaa can be any naturally occurring amino acid
  Transcript Sequence Number=SeqID_20934
  Gene Ontology: Mol. function=RNA-directed DNA polymerase activity; Cellular component=nucleus; Biological process=RNA-dependent DNA replication
  Homolog annotation: Hit_ID=Q6L4B3; Match level="QueryCoverage=100%, HitCoverage=9%, E-value=3e-26, Identity=62%"; Hit description =Polyprotein, putative
YNNVVIRVRTSDGDTNNFSIRIXLHQGFALSPYLFALVMDEVTRDIQGDIPWCMLFADDIVLVDESQAGVNRKLELWREILESKGF

SEQ ID NO: 86909 - protein, 54 aa, Setaria italica
  Transcript Sequence Number=SeqID_20935
  Gene Ontology: Mol. function=RNA-directed DNA polymerase activity; Cellular component=nucleus; Biological process=RNA-dependent DNA replication
  Homolog annotation: Hit_ID=Q6L4B3; Match level="QueryCoverage=96%, HitCoverage=5%, E-value=4e-12, Identity=57%"; Hit description =Polyprotein, putative
CLRWICGHTRRDRVRNENTRDRLGVAPIEKKLIQHRLRWFGHIQRMPPEAPVRS

SEQ ID NO: 86910 - protein, 114 aa, Setaria italica
  misc_feature (55)..(55): Xaa can be any naturally occurring amino acid
  Transcript Sequence Number=SeqID_20936
  Gene Ontology: Mol. function=methyltransferase activity; Cellular component=nucleus; Biological process=intracellular signaling cascade
  Homolog annotation: Hit_ID=B9GU95; Match level="QueryCoverage=97%, HitCoverage=9%, E-value=3e-42, Identity=72%"; Hit description=SET domain protein
  Pfam annotation: Domain name=SET; Domain location=4-114; Score=39.0; E_value=1.9e-08; Accession=PF00856.20; Description=SET domain
LLEKSRIHGFGVFAKVAHKAGDMMIEYIGEIVRPPISDIRERRIYNSLVELVHIXHATQPTTKGAGTYMFRIDDEHVVDATRAGSIAHLINHSCEPNCYSRAITVNGDEHIIIF

SEQ ID NO: 86911 - protein, 37 aa, Setaria italica
  Transcript Sequence Number=SeqID_20937
RPAIVSIDVPSGWHVEEGDVDGGIKPDMLVSILFRSF

SEQ ID NO: 86912 - protein, 137 aa, Setaria italica
  misc_feature (37)..(37): Xaa can be any naturally occurring amino acid
  misc_feature (68)..(68): Xaa can be any naturally occurring amino acid
  misc_feature (76)..(76): Xaa can be any naturally occurring amino acid
  misc_feature (88)..(88): Xaa can be any naturally occurring amino acid
  misc_feature (95)..(95): Xaa can be any naturally occurring amino acid
  Transcript Sequence Number=SeqID_20938
  Gene Ontology: Mol. function=RNA-directed DNA polymerase activity; Cellular component=nucleus; Biological process=RNA-dependent DNA replication
  Homolog annotation: Hit_ID=Q1AKH8; Match level="QueryCoverage=98%, HitCoverage=34%, E-value=3e-31, Identity=49%"; Hit description =Reverse transcriptase family member
KAEWMKWHQASGMLLGILYDKRVPLKLNGKFHRTAIXPVMLYGAEYWPTKRRHVQQISVAEMHMLRWXCGHTRRDXVRNKDIRDRLGXVPIEEKXLIQHQLRWFGHVQRRFPEAPMRSGILMHDSNMKRERGRSKLI

SEQ ID NO: 86913 - protein, 72 aa, Setaria italica
  Transcript Sequence Number=SeqID_20939
SPLIPTPLSIWLILDANLIMRFVGGYYFHVIILSLMLLDMSLNLVPIEEKLIQHRLRWFGHVQRRPPGGTTT

SEQ ID NO: 86914 - protein, 91 aa, Setaria italica
  Transcript Sequence Number=SeqID_20940
LLLIRISTAVSQIGLPNIATYTITLAFHSKRMTRIIRIPRMNSAIFQNLTVGTGKYIIQACGISQPILSWKLKGKVHRTAIRLAMLYGAEC

SEQ ID NO: 86915 - protein, 50 aa, Setaria italica
  misc_feature (13)..(13): Xaa can be any naturally occurring amino acid
  misc_feature (43)..(43): Xaa can be any naturally occurring amino acid
  Transcript Sequence Number=SeqID_20941
VRVAPIEEKLIQXTRLRWFGHVQRRPPQAPVRSGTLRHDSNGXRGRGRPN

SEQ ID NO: 86916 - protein, 113 aa, Setaria italica
  misc_feature (77)..(77): Xaa can be any naturally occurring amino acid
  Transcript Sequence Number=SeqID_20942
  Gene Ontology: Mol. function=RNA-directed DNA polymerase activity; Cellular component=nucleus; Biological process=RNA-dependent DNA replication
  Homolog annotation: Hit_ID=Q6L4B3; Match level="QueryCoverage=96%, HitCoverage=12%, E-value=1e-33, Identity=58%"; Hit description =Polyprotein, putative
SKGFRLSRTKTKYVRCDFGTTTNEEGDVSLESQVVPRKDTFRYLGSKLQRDGDIDEDVSHRIKAGWMKWHQASGIFXDKRVPLKLKGKFYRTAIRPTMLYGAECWPTKSMSSK

SEQ ID NO: 86917 - protein, 157 aa, Setaria italica
  misc_feature (26)..(26): Xaa can be any naturally occurring amino acid
  misc_feature (37)..(37): Xaa can be any naturally occurring amino acid
  misc_feature (73)..(73): Xaa can be any naturally occurring amino acid
  misc_feature (86)..(86): Xaa can be any naturally occurring amino acid
  misc_feature (140)..(140): Xaa can be any naturally occurring amino acid
  Transcript Sequence Number=SeqID_20943
  Gene Ontology: Mol. function=RNA-directed DNA polymerase activity; Cellular component=nucleus; Biological process=RNA-dependent DNA replication
  Homolog annotation: Hit_ID=Q1AKH8; Match level="QueryCoverage=98%, HitCoverage=40%, E-value=2e-35, Identity=49%"; Hit description =Reverse transcriptase family member
MILYDKKVQLKLKGKFYRTMIRPAMXYGAECWHTKRXHVQQISVAEMRMLHWICGYTKRDRVRNEDIRDRLGXAPIEEKLIQYRLXRWFGHVQRRPSWTAPVHSGTLRRDSNVKRGRGRLKLTWEEAIKGDLKGWNISKXLVLNRSARKTSIHVLES

SEQ ID NO: 86918 - protein, 70 aa, Setaria italica
  misc_feature (13)..(13): Xaa can be any naturally occurring amino acid
  Transcript Sequence Number=SeqID_20944
  Gene Ontology: Mol. function=zinc ion binding; Cellular component =intracellular
  Homolog annotation: Hit_ID=Q52VR0; Match level="QueryCoverage=68%, HitCoverage=7%, E-value=9e-11, Identity=62%"; Hit description =Embryonic flower 2
CTLTELEGQCFWXKIPKDLLCSSLENCVDLSLGRTKQFALSITMSPGFVEVCNKVLKVYIVHILKVNVFL

SEQ ID NO: 86919 - protein, 107 aa, Setaria italica
  misc_feature (15)..(15): Xaa can be any naturally occurring amino acid
  misc_feature (74)..(74): Xaa can be any naturally occurring amino acid
  Transcript Sequence Number=SeqID_20945
  Homolog annotation: Hit_ID=Q5ZE06; Match level="QueryCoverage=100%, HitCoverage=30%, E-value=8e-31, Identity=57%"; Hit description =Putative transcription factor X1
  Pfam annotation: Domain name=XH; Domain location=1-107; Score=145.9; E_value=1.3e-40; Accession=PF03469.6; Description=XH domain
LDAVKLCSKWQEEVXNSNWHPIKVVEVDGKEPERIIEDDAKLRELKQEYGQEVYEAVTKALLEMDEYNASGRYXKPVVWNFKADRRALLKEGVQFIVKQWQSRKRKR

SEQ ID NO: 86920 - protein, 60 aa, Setaria italica
  Transcript Sequence Number=SeqID_20946
  Subcellular localization annotation: CTP_CleavageSite=44; ConfidenceScore=5.16e-01
TLLFTLFSTFQGNNPPALQLPNIVVYSLFNFSKDRREKDFLNCSCRTVPCGFLTRSQHHQ

SEQ ID NO: 86921 - protein, 67 aa, Setaria italica
  Transcript Sequence Number=SeqID_20947
  Subcellular localization annotation: CTP_CleavageSite=5; ConfidenceScore=5.22e-01
ASTASANSLTTWTMRATFPEYVVALTTIVGSVLFTIFGGVAISCPCSRFSLLGEGLQPLSSTPWPSF

SEQ ID NO: 86922 - protein, 207 aa, Setaria italica
  misc_feature (69)..(69): Xaa can be any naturally occurring amino acid
  misc_feature (78)..(78): Xaa can be any naturally occurring amino acid
  misc_feature (117)..(117): Xaa can be any naturally occurring amino acid
  misc_feature (134)..(134): Xaa can be any naturally occurring amino acid
  misc_feature (158)..(158): Xaa can be any naturally occurring amino acid
  misc_feature (167)..(167): Xaa can be any naturally occurring amino acid
  misc_feature (194)..(194): Xaa can be any naturally occurring amino acid
  Transcript Sequence Number=SeqID_20948
  Gene Ontology: Mol. function=RNA-directed DNA polymerase activity; Cellular component=nucleus; Biological process=RNA-dependent DNA replication
  Homolog annotation: Hit_ID=Q6L4B3; Match level="QueryCoverage=100%, HitCoverage=23%, E-value=5e-70, Identity=59%"; Hit description =Polyprotein, putative
DMHNNVVTRVRTSDGDTDDFPIRIGLHQGSALSPYLFALVMDEVTRDIQGDIPWCMLFADNVVLVDESXAGVNRKLEXWRETLESKGFRLSRTKTEYMRCDFGTTTHEERDVNLESXAVPRKDTFRYLGSMLQXDGDIDEDVSHRIKAGWMEWRQASXILYDKRYHXKLKGKFYRKTIRRAMLCGAECWLTKRXHVQQISVAEIRML

SEQ ID NO: 86923 - protein, 104 aa, Setaria italica
  misc_feature (18)..(18): Xaa can be any naturally occurring amino acid
  Transcript Sequence Number=SeqID_20949
  Homolog annotation: Hit_ID=Q5VNS6; Match level="QueryCoverage=95%, HitCoverage=48%, E-value=6e-14, Identity=43%"; Hit description=X1 -like
RFRIKEKMDKLTKVLKEXEDKLGKLQSDTNALIVKDKESNAMLEKARKELEKGFDDLSTSGRAHIGIKIAGQLDQKPFLNACRRRPSEGDLQLDAVKLCSKLAK

SEQ ID NO: 86924 - protein, 143 aa, Setaria italica
  misc_feature (56)..(56): Xaa can be any naturally occurring amino acid
  Transcript Sequence Number=SeqID_20950
  Gene Ontology: Mol. function=RNA-directed DNA polymerase activity; Cellular component=nucleus; Biological process=RNA-dependent DNA replication
  Homolog annotation: Hit_ID=Q2HVM1; Match level="QueryCoverage=96%, HitCoverage=26%, E-value=1e-42, Identity=59%"; Hit description=RNA -directed DNA polymerase (Reverse transcriptase)
VFIDLEKAYDKIPKNVMWWALDKHKVPTKYVGLIKDMYNNVVTRVRTSDGNTDDFXIRIGPHQGSALSPYLFSLVMDEVTRDIQGDIPWCMLFADDVVLVDESRAGVNRKLELWRETLESKGFRLSRTKTEYMRCDFSTTTHE

SEQ ID NO: 86925 - protein, 90 aa, Setaria italica
  misc_feature (23)..(23): Xaa can be any naturally occurring amino acid
  misc_feature (28)..(28): Xaa can be any naturally occurring amino acid
  misc_feature (58)..(58): Xaa can be any naturally occurring amino acid
  Transcript Sequence Number=SeqID_20951
AWRANVEPSHSNGDETHRLRWFXGHVQXRPPEAPVRSGTLRRDSNVKRGRGRPKLDMXEAIKGDLNGWNIPKDLALDRSAWKTAIHVPEP

SEQ ID NO: 86926 - protein, 149 aa, Setaria italica
  misc_feature (28)..(28): Xaa can be any naturally occurring amino acid
  misc_feature (57)..(57): Xaa can be any naturally occurring amino acid
  misc_feature (142)..(142): Xaa can be any naturally occurring amino acid
  Transcript Sequence Number=SeqID_20952
  Gene Ontology: Mol. function=RNA-directed DNA polymerase activity; Cellular component=nucleus; Biological process=RNA-dependent DNA replication
  Homolog annotation: Hit_ID=Q6L4B3; Match level="QueryCoverage=100%, HitCoverage=17%, E-value=6e-39, Identity=52%"; Hit description =Polyprotein, putative
QRDGDIDEDVSHRIKAGWMKWRQASGIXMTRKTIDAKRQVYRTAIKPAMLYGAKTLXLKKRHVQQISVAEMRMLRWICGHTRRDRVRNEDIRDRLGVAPIEEKLIQHQLRWFGHVQRRPPEAPVRSGTLRRDNNVKRGRGRXPKLTWEE

SEQ ID NO: 86927 - protein, 66 aa, Setaria italica
  Transcript Sequence Number=SeqID_20953
  Gene Ontology: Mol. function=pyridoxamine-phosphate oxidase activity; Biological process=pyridoxine biosynthetic process
  Homolog annotation: Hit_ID=Q9LTX3; Match level="QueryCoverage=80%, HitCoverage=10%, E-value=5e-16, Identity=69%"; Hit description =Similarity to pyridoxamine 5-phosphate oxidase
  Pfam annotation: Domain name=PNPOx_C; Domain location=22-66; Score =85.5; E_value=1.8e-22; Accession=PF10590.1; Description=Pyridoxine 5'-phosphate oxidase C-terminal d
SFVNPLAVLCNCSSLIPKPEYWGGYRLTPTLFEFWQGQQSRLHDRLQYSQREVDGSTAWHIERLSP

SEQ ID NO: 86928 - protein, 147 aa, Setaria italica
  Transcript Sequence Number=SeqID_20954
RALFYGALTFRFCCQSIKHNLLHFYLVQLFERKLRLCCLNIAGPKPLVKEEGCDRLGEPTLNLAILMGLMKPKRNPLGHNLLSDAPYRNPGMVLNEQGPGRLHRGDAPCRDLGMVSSEQGSDRHFLSGALHRRPGVVKMSKGLHISL

SEQ ID NO: 86929 - protein, 88 aa, Setaria italica
  misc_feature (26)..(26): Xaa can be any naturally occurring amino acid
  Transcript Sequence Number=SeqID_20955
  Gene Ontology: Mol. function=RNA-directed DNA polymerase activity; Cellular component=nucleus; Biological process=RNA-dependent DNA replication
  Homolog annotation: Hit_ID=Q6L4B3; Match level="QueryCoverage=94%, HitCoverage=9%, E-value=2e-11, Identity=43%"; Hit description =Polyprotein, putative
KDIGGVEGLKEKLIQQRLRWFGHVQXRPPEVPVRSGTLRRDSNMKRGRGRPKLTWEEAIKGDLKGWNIPKDLALDRSVLKTAIHVPEP

SEQ ID NO: 86930 - protein, 136 aa, Setaria italica
  misc_feature (39)..(39): Xaa can be any naturally occurring amino acid
  Transcript Sequence Number=SeqID_20956
MFYYEGDQDKSVGKKLRAALLWVVASAVVCGLVLGILYXLVGKVNFTVRHLSSSVQPFPNSFSGFSSGQPCFNQLPRQCAASTTPANSQTTWTMRATFPEYVVALTTIVGSVLFTIFGGVGIACRTNENISPNGRQ

SEQ ID NO: 86931 - protein, 229 aa, Setaria italica
  Transcript Sequence Number=SeqID_20957
  Gene Ontology: Mol. function=zinc ion binding; Cellular component =intracellular; Biological process=regulation of transcription, DNA -dependent
  Homolog annotation: Hit_ID=Q0ZQJ9; Match level="QueryCoverage=97%, HitCoverage=37%, E-value=5e-64, Identity=57%"; Hit description=EMF2
MSCQALPDGVAMNTGCIYGSSSSSDKMHHSQSRDELPPDCAEKIHALYCKHVILSDIIQKRANVKPSFLQRNLRYKIHAKQKKRIQITLSLPGSLNPEVRAQNIFPLYALFAKPISSVLHEGHSPVYQFTRACLLTCFDESGCDSHTEATFIIQDLRTLANIILVSCGQIGQTPDENNFSNNDLENSSLQKLEGQCFWGKIPKDLLCSSLENCVDLSLGRTKQFALSIT

SEQ ID NO: 86932 - protein, 122 aa, Setaria italica
  misc_feature (31)..(31): Xaa can be any naturally occurring amino acid
  misc_feature (58)..(58): Xaa can be any naturally occurring amino acid
  Transcript Sequence Number=SeqID_20958
  Homolog annotation: Hit_ID=Q00XD3; Match level="QueryCoverage=81%, HitCoverage=17%, E-value=3e-18, Identity=49%"; Hit description=LMBR1 integral membrane family protein-like (ISS)
NVSIAWVEHIVISLLIDPPLSSFLNEVFIKXLDGVWGLLGTAAFAFFCFYLLIAVIAXGEMMLGLKLVFITIHLMKWGGTLMNSFLFNVGLILLCSISVIQFGATAFAYYAQATAAQEIFGH

SEQ ID NO: 86933 - protein, 125 aa, Setaria italica
  misc_feature (63)..(63): Xaa can be any naturally occurring amino acid
  misc_feature (92)..(92): Xaa can be any naturally occurring amino acid
  Transcript Sequence Number=SeqID_20959
  Gene Ontology: Mol. function=RNA-directed DNA polymerase activity; Cellular component=nucleus; Biological process=RNA-dependent DNA replication
  Homolog annotation: Hit_ID=Q1AKH8; Match level="QueryCoverage=92%, HitCoverage=30%, E-value=1e-26, Identity=50%"; Hit description =Reverse transcriptase family member
  Pfam annotation: Domain name=AT_hook; Domain location=82-94; Score =14.3; E_value=0.091; Accession=PF02178.11; Description=AT hook motif
LILNISCTLNIYCVAEMRMLRWICGHTRRDRVRNEDIRDRLGVAPIVEKFIQHQLKWFGHVQXRPPEVPVRNGTLRRDSNVKRGRGRPKLTXEEAMKGDLKGWNIHKDLALDRSAWKTAIHVLEP

SEQ ID NO: 86934 - protein, 311 aa, Setaria italica
  misc_feature (46)..(46): Xaa can be any naturally occurring amino acid
  misc_feature (152)..(152): Xaa can be any naturally occurring amino acid
  Transcript Sequence Number=SeqID_20960
  Gene Ontology: Mol. function=RNA-directed DNA polymerase activity; Cellular component=nucleus; Biological process=RNA-dependent DNA replication
  Homolog annotation: Hit_ID=Q6L4B3; Match level="QueryCoverage=99%, HitCoverage=35%, E-value=2e-96, Identity=54%"; Hit description =Polyprotein, putative
MYNNVVTRVRTSDSDIDDFPIRIGLHQGSALRPYLFALVMDEVTRXIQEDIPWCMLFADDVMLVDESRAGVNRKLELWRETIESKDFRLNRIKTEYMRCDFGTTTHEEGDVSLESQVVPRKNTFRYLGSMLQCDGDIDEDVSHRIKAGWMKXRQVLGILYDKRVPLKLKDQFYRTAIRLAMLYGAECWPTKRRHVQQIIVAEMHMMRWICSHTRRDRVRNEDICDRLGVAPIEEKLIQHWLRWFGHVQRRPPEAPVHSGTLRCESIVKRGRGRPKLTWEDAIKGDLKGWNIPKDLALDRSAWETAIHMPEP

SEQ ID NO: 86935 - protein, 377 aa, Setaria italica
  misc_feature (260)..(260): Xaa can be any naturally occurring amino acid
  misc_feature (290)..(290): Xaa can be any naturally occurring amino acid
  misc_feature (332)..(332): Xaa can be any naturally occurring amino acid
  Transcript Sequence Number=SeqID_20961
  Gene Ontology: Mol. function=RNA-directed DNA polymerase activity; Cellular component=nucleus; Biological process=RNA-dependent DNA replication
  Homolog annotation: Hit_ID=Q1AKH8; Match level="QueryCoverage=99%, HitCoverage=98%, E-value=1e-105, Identity=49%"; Hit description =Reverse transcriptase family member
  Pfam annotation: Domain name=RVT_1; Domain location=3-194; Score= -35.5; E_value=0.018; Accession=PF00078.19; Description=Reverse transcriptase (RNA-dependent DNA pol
MLIDAMEAIFLIRQVMERYREKKKELHMVFIDLEKAYDKIPRNAMLWALDKHKVPTKHVGLIKDMYNNVVTRVRTSDGDIDDFKIRIGLHEGFALSPYLFALVMDEVTGDIQGDIAWCMLFADVVLVDESRAGVNRKLELWQETLESKGFRLSRTKTENMRCDFGTTTHEKRDVSLESQVVPRKDTFRYLGSMLQRDGDIDEDVSHRIKVGWMKWRQASGILYDKRVPLKLEVKVYGTAIRPAILYGVECWPKRDDMSSXISVAEMRMLHWICGHMRRDRVQNEDIHDRXGVVPIEEKLIQHRLRWFGHVQRRPPEAPVRSGTLRRDSNVKXVKRGRGRPKLTLEEAIKGDLKGWNIPKDLSMDRSAWKTAIHVPEP

SEQ ID NO: 86936 - protein, 187 aa, Setaria italica
  misc_feature (114)..(114): Xaa can be any naturally occurring amino acid
  Transcript Sequence Number=SeqID_20962
  Gene Ontology: Mol. function=zinc ion binding; Cellular component =COPII vesicle coat; Biological process=ER to Golgi vesicle-mediated transport
  Homolog annotation: Hit_ID=B9SKJ9; Match level="QueryCoverage=82%, HitCoverage=16%, E-value=5e-49, Identity=66%"; Hit description =Protein transport protein sec23, putative
  Pfam annotation: Domain name=Sec23_helical; Domain location=26-149; Score=53.5; E_value=8e-13; Accession=PF04815.7; Description =Sec23Sec24 helical domain
MNMFPVIKCCQLAGVIDCFCFWNLNILNISSCFIQADFDPIRWLDRALISLCSKFGEYHKETPSSFSLSPRLSIFPQFMFNLRRSQFVQVKHFPWFVEKFSSTDHVESYFSVHXLILFPIQVSNNSPDETAYFTMMLNRENVANAVVMIQPSLISYSFQSGPEPVLLDVTAIAADRILLLDSYFTVV

SEQ ID NO: 86937 - protein, 330 aa, Setaria italica
  Transcript Sequence Number=SeqID_20963
  Gene Ontology: Mol. function=zinc ion binding; Cellular component =COPII vesicle coat; Biological process=ER to Golgi vesicle-mediated transport
  Homolog annotation: Hit_ID=B9SKJ9; Match level="QueryCoverage=100%, HitCoverage=43%, E-value=1e-160, Identity=80%"; Hit description =Protein transport protein sec23, putative
  Pfam annotation: Domain name=Gelsolin; Domain location=197-287; Score= 79.9; E_value=9.2e-21; Accession=PF00626.14; Description=Gelsolin repeat
  Pfam annotation: Domain name=Sec23_BS; Domain location=1-73; Score =72.4; E_value=1.6e-18; Accession=PF08033.4; Description=Sec23Sec24 beta-sandwich domain
  Pfam annotation: Domain name=Sec23_helical; Domain location=88-188; Score=151.1; E_value=3.5e-42; Accession=PF04815.7; Description =Sec23Sec24 helical domain
  Pfam module annotation: Pfam domain module=Gelsolin::Sec23_BS::Sec23 _helical; Domain location=197-287::1-73::88-188
DTIVGQGNTSAWKMCGLDRKTSLCLIFDIAKKDGSDSIGQSANDQFYFQFLTYYQHHEGQMRLRATTLSRKWVAGSGGVQELIAGFDQEAAAAVMARLVSFKMEAEADFDPIRWLDRALISLCSKFGEYHKETPSSFSLSPRLSIFPQFMFNLRRSQFVQVSNNSPDETAYFTMMLNRENVANAVVMIQPSLISYSFQSGPEPVLLDVTAIAADRILLLDSYFTVVIFHGVTIAQWRKAGYQDQEGHEAFAQLLQAPKEEADAVIKERFPVPRLVVCDQYGSQARFLLAKLNPSVTYNSDNPPPPGGDVLFTDDVSFQVFMDHLQRLAVQ

SEQ ID NO: 86938 - protein, 640 aa, Setaria italica
  misc_feature (596)..(596): Xaa can be any naturally occurring amino acid
  Transcript Sequence Number=SeqID_20964
  Gene Ontology: Mol. function=methyltransferase activity; Cellular component=nucleus; Biological process=intracellular signaling cascade
  Homolog annotation: Hit_ID=B9SP39; Match level="QueryCoverage=96%, HitCoverage=57%, E-value=0.0, Identity=64%"; Hit description=Phd finger protein, putative
  Pfam annotation: Domain name=C1_1; Domain location=172-221; Score= -0.1; E_value=0.032; Accession=PF00130.14; Description=Phorbol estersdiacylglycerol binding do
  Pfam annotation: Domain name=C1_3; Domain location=180-211; Score =9.1; E_value=0.051; Accession=PF07649.4; Description=C1-like domain
  Pfam annotation: Domain name=FYRC; Domain location=80-163; Score =98.7; E_value=1.9e-26; Accession=PF05965.6; Description=FY rich C -terminus
  Pfam annotation: Domain name=FYRN; Domain location=22-75; Score=65.0; E_value=2.8e-16; Accession=PF05964.6; Description=FY-rich N-terminus
  Pfam annotation: Domain name=PHD; Domain location=181-230; Score =35.1; E_value=2.7e-07; Accession=PF00628.21; Description=PHD-finger
  Pfam annotation: Domain name=PHD; Domain location=293-330; Score=0.6; E_value=0.023; Accession=PF00628.21; Description=PHD-finger
  Pfam annotation: Domain name=SET; Domain location=470-600; Score =167.7; E_value=3.4e-47; Accession=PF00856.20; Description=SET domain
  Pfam module annotation: Pfam domain module=C1_1::C1_3::FYRC::FYRN::PHD ::PHD::SET; Domain location=172-221::180-211::80-163::22-75::181 -230::293-330::470-600
NLSEDRAVQNGEDYAEMTQIELGNLRVSNLGRIVSDSDHFHNKKHIWPEGYTAFRKFMSIIDPNSVTSYKMEVLRNSDTKARPLFRVISEDGVQIDGSTPNACWKEIYCRIKQKQCSAVTELERNVCQRSGSYMFGFSNPQIRQLIQELPNARSCLKYFDNSGDTILGYRAVHVNWKDLDFCNVCDMDEEYEDNLFLQCDKCRMMVHARCYGELKQLDGGLWLCNLCRPGAPRMSPKCCLCPVTGGAMKPTTDGRWAHLACAIWIPETCLKDVKRMEPIDGLSRINKDRWKLVCSICGVSYGVCIQCSHPTCRVAYHPLCARAADLCVELEDDDKIHHMLLDEDEDPCIRLLSYCKKHRQPSAERPYLESDPAEPSQLVQTDMASSSGCARTEPYNFHRRRGQKQPQVMATASLKRLYVENRPYIVSGYCQNRVGNHTCSESLQPVGLSDAVQHEAFGNVSSMVEKYTSMKATFRKRLTFGKSRIHGFGVFAKVAHKAGDMMIEYIGEIVRPPISDIRERRIYNSLVGAGTYMFRIDDEHVVDATRAGSIAHLINHSCEPNCYSRAITVNGDEHIIIFAKRDIDPWEELTYDYRFXSSDQRLPCYCGFPKCRGVVNDVEAEEQAAKIRVKRSELFQKRDN

SEQ ID NO: 86939 - protein, 258 aa, Setaria italica
  misc_feature (140)..(140): Xaa can be any naturally occurring amino acid
  misc_feature (236)..(236): Xaa can be any naturally occurring amino acid
  Transcript Sequence Number=SeqID_20965
  Homolog annotation: Hit_ID=Q00XD3; Match level="QueryCoverage=97%, HitCoverage=44%, E-value=5e-39, Identity=33%"; Hit description=LMBR1 integral membrane family protein-like (ISS)
  Pfam annotation: Domain name=LMBR1; Domain location=1-233; Score= -47.5; E_value=0.00026; Accession=PF04791.8; Description=LMBR1-like membrane protein
LGKKKGTRELKKAAEALHQEERSGNKGRKWRKNVKALEKELLLLEDDMKALEEMYPQGEQAEATWAFTVLGYIDKLIFGVVGLIVSIAWVEHIVISLLIDPPLSSFLNEVFIKLDGVWGLLGTAAFAFFCFYLLIAVIAXGEMMLGLKLVFITIHLMKWGGTLMNSFLFNVGLILLCSISVIQFGATAFAYYAQATAAQEIFGHTLQSLRGIKYLYKYNVFQYGFVALAFLTLFYXAIFGWRKRKARATKPYWKTLYL

SEQ ID NO: 86940 - protein, 647 aa, Setaria italica
  misc_feature (602)..(602): Xaa can be any naturally occurring amino acid
  Transcript Sequence Number=SeqID_20966
  Gene Ontology: Mol. function=zinc ion binding; Cellular component =COPII vesicle coat; Biological process=ER to Golgi vesicle-mediated transport
  Homolog annotation: Hit_ID=B9SKJ9; Match level="QueryCoverage=100%, HitCoverage=91%, E-value=0.0, Identity=70%"; Hit description=Protein transport protein sec23, putative
  Pfam annotation: Domain name=Gelsolin; Domain location=576-647; Score= 24.6; E_value=0.0004; Accession=PF00626.14; Description=Gelsolin repeat
  Pfam annotation: Domain name=Sec23_BS; Domain location=400-506; Score= 180.7; E_value=4.2e-51; Accession=PF08033.4; Description=Sec23Sec24 beta-sandwich domain
  Pfam annotation: Domain name=Sec23_trunk; Domain location=122-390; Score=412.6; E_value=6.6e-121; Accession=PF04811.7; Description =Sec23Sec24 trunk domain
  Pfam annotation: Domain name=zf-Sec23_Sec24; Domain location=53-92; Score=76.6; E_value=8.8e-20; Accession=PF04810.7; Description =Sec23Sec24 zinc finger
  Pfam module annotation: Pfam domain module=Gelsolin::Sec23_BS::Sec23 _trunk::zf-Sec23_Sec24; Domain location=576-647::400-506::122-390::53- 92
MSEFLDLEAQDGIRMAWNVIPGTKQDAINCVVPVSAIFTPLKPNPTIPVLPYAPLRCRMCRSILNPFSVVDFVAKIWVCPFCFQRNHFPQHYYTISENNLPAELFPQFTTVEYASTAETGPVVPPVFLFVVDTCMIEEEIGYLKSALAQAIELLPDQSLVGFITFGTYVQVHELGFGLLPKSYVFKGTKEVTKEQILDQMSFFAGKTKPTTGVIAGARDGLSTESIARFLLPASECEFVLNSVIEELQRDPWPVPADKRSSRCTGVALSVAASLLGVCVPGSGARIMAFVGGPSTEGPGSIVSKSLSEPIRSHKDLNKGSAPLYNKAVKFYEDISKQLVNQGHVLDLFACALDQVGVAEMKVAVERTGGIVVLAESFGHSVFKDSLRRIFQSSDNDLDLSFNGIFEINCSKDVKIQGIIGPCTSLEKKSPLSSDTIVGQGNTSAWKMCGLDRKTSLCLIFDIAKKDGSDSIGQSANDQFYFQFLTYYQHHEGQMRLRATTLSRKWVAGSGGVQELIAGFDQEAAAAVMARLVSFKMEAEVSNNSPDETAYFTMMLNRENVANAVVMIQPSLISYSFQSGPEPVLLDVTAIAADRILLLDSYXTVVIFHGVTIAQWRKAGYQDQEGHEAFAQLLQAPKEEADAVIKER

SEQ ID NO: 86941 - protein, 320 aa, Setaria italica
  Transcript Sequence Number=SeqID_20967
  Gene Ontology: Cellular component=chloroplast
  Homolog annotation: Hit_ID=P73200; Match level="QueryCoverage=78%, HitCoverage=98%, E-value=2e-21, Identity=29%"; Hit description =Slr1702 protein
  Pfam annotation: Domain name=DUF1995; Domain location=70-286; Score =241.8; E_value=1.7e-69; Accession=PF09353.2; Description=Domain of unknown function (DUF1995)
LLPTPPLAFTLHAPARLRPLLRLRRAPPPCGAKFGKFDASDAPAEAEAAEAVADAEVAQAQPAAEEDSCLPSDLEGAIRQSGKASADFVNSGGLRAIAELLIPQLEFLNEEGAQAELWALSKIFLDTLVQETGQKVTAIFPDAGAAALLKYQWKDAEFKCASLSDRKPVGPEDEVAVMIIPDHQMLESVERIASQLSDDPIRPLVMWNPRLVSGDVGVGFNVRNLRRNFLSTFTTVYSMRPLPTGAVFRCYPGKWKVFYDDPSRPNRYLLARELTSKPDATDIERIFGGADEQSEESPSLMNNVMGVFSSVSRFMRVISR

SEQ ID NO: 86942 - protein, 700 aa, Setaria italica
  misc_feature (403)..(403): Xaa can be any naturally occurring amino acid
  Transcript Sequence Number=SeqID_20968
  Gene Ontology: Mol. function=zinc ion binding; Cellular component =COPII vesicle coat; Biological process=ER to Golgi vesicle-mediated transport
  Homolog annotation: Hit_ID=B9SKJ9; Match level="QueryCoverage=99%, HitCoverage=91%, E-value=0.0, Identity=75%"; Hit description=Protein transport protein sec23, putative
  Pfam annotation: Domain name=Gelsolin; Domain location=568-658; Score= 74.0; E_value=5.7e-19; Accession=PF00626.14; Description=Gelsolin repeat
  Pfam annotation: Domain name=Sec23_BS; Domain location=338-444; Score= 178.5; E_value=1.9e-50; Accession=PF08033.4; Description=Sec23Sec24 beta-sandwich domain
  Pfam annotation: Domain name=Sec23_helical; Domain location=459-559; Score=159.9; E_value=7.6e-45; Accession=PF04815.7; Description =Sec23Sec24 helical domain
  Pfam annotation: Domain name=Sec23_trunk; Domain location=60-328; Score=404.4; E_value=2e-118; Accession=PF04811.7; Description =Sec23Sec24 trunk domain
  Pfam annotation: Domain name=zf-Sec23_Sec24; Domain location=3-30; Score=28.2; E_value=3.4e-05; Accession=PF04810.7; Description =Sec23Sec24 zinc finger
  Pfam module annotation: Pfam domain module=Gelsolin::Sec23_BS::Sec23 _helical::Sec23_trunk::zf-Sec23_Sec24; Domain location=568-658::338 -444::459-559::60-328::3-30
TTNPFSIVDYVAKIWVCPFCFQRNQFPQHYSLISENNLPAELFPQYTTVEYLSSMETGPIVPPVFIFVVDTCMIEEEIGYLKSALAQAVELLPDNSLVGFITFGTYVQVHELGFGLLPKSYVFKGTKEVTKEQILDQMCFFAGKQKPTTGVIAGTRDGLSSESIARFLLPASECEFVLNSVIEEMQKDPWPVPVDQRASRCTGVALSVAANLIGVCVPGSGARIMAFVGGPSTEGPGSIVSKSLSEPIRSHKDLDKDSAPLYDKAIKFYDQIAKQLVHQGHVLDLFACAVDQVGVAEMKVAIEKTGGVVVLAESFGHSVFKDSLLRIFQSADDNLGLSFNGILEINCSKDVKVQGIIGPCTSLEKKSPLSSDTVIGQGNTSAWKMCGLDRKTSLCFVYDIAKXDGPDSIGQSTSNQFYFQFLTYYQHNEGQMRLRSTTISRRWVSGVDNVEELVAGFDQEAAAAVMARLVSFKMETEVDFDPVRWLDRALIRICSKFGDYQKETPSSFSLSPRLSIFPQFIFNLRRSQFVQVFNNSPDETAYFRMMMDRENVANALVMIQPSLISYLFQSGPEPVLLDATAVASDKILLLDSYFTVVIFHGITIAQWRNAGYQDQEGHEAFAQLLKAPHEEAGSIIKERFPVPRLVVCDQYGSQARFLLAKLNPSVTYNSDNPSPGGDVIFTDDVSFEVFMDHLQRLAVQ

SEQ ID NO: 86943 - protein, 487 aa, Setaria italica
  misc_feature (235)..(235): Xaa can be any naturally occurring amino acid
  Transcript Sequence Number=SeqID_20969
  Gene Ontology: Mol. function=pyridoxamine-phosphate oxidase activity; Cellular component=extracellular region; Biological process =biological_process
  Homolog annotation: Hit_ID=B9RJT5; Match level="QueryCoverage=93%, HitCoverage=83%, E-value=0.0, Identity=72%"; Hit description =Pyridoxamine 5-phosphate oxidase, putative
  Pfam annotation: Domain name=PNPOx_C; Domain location=443-487; Score =85.5; E_value=1.8e-22; Accession=PF10590.1; Description=Pyridoxine 5'-phosphate oxidase C-terminal d
  Pfam annotation: Domain name=Pyridox_oxidase; Domain location=303 -389; Score=123.7; E_value=6.1e-34; Accession=PF01243.12; Description= Pyridoxamine 5'-phosphate oxidase
  Pfam annotation: Domain name=YjeF_N; Domain location=51-226; Score =172.8; E_value=9.9e-49; Accession=PF03853.7; Description=YjeF -related protein N-terminus
  Pfam module annotation: Pfam domain module=PNPOx_C::Pyridox _oxidase::YjeF_N; Domain location=443-487::303-389::51-226
PILPAAPFLPLPPRRGMASLAASAAAAASAEVTHLTQRDAAEIDEQLMGPLGFSVDQLMELAGLSVAEAVAEVYKLSEHTRVLIICGPGNNGGDGLVAARHLYHFGYRPSVCYPKRTPKPLYSGLVTQLESLSIPFITAEDLPDDLSREFDIIIDAMFGFSFHGTPRPPFDDLIQRLVSLAVVGNSDKRPAIVSIDVPSGWHVEEGDVDGGIKPDMLVSLTAPKLCAKKFTGPHXFLGGRFIPPPILNKYGLQLPPYPGTSMCVRIGKAPSVDISSLRENYISPELLESQVMPDPFDQFRKWFDEAVTAGLREPNAMALTTVNKEGKPSSRMVLLKGVDKQGFVWYTNYGGRKAHDLSENPNAALLFYWNEMNRQVRVEGSVEKVPEEESEKYFHSRPRGSQLGAIVSKQSTVIAGREVLQQAYKELEQKYSDGSLIPKPEYWGGYRLTPTLFEFWQGQQSRLHDRLQYSQREVDGSTAWHIERLSP

SEQ ID NO: 86944 - protein, 219 aa, Setaria italica
  Transcript Sequence Number=SeqID_20970
  Homolog annotation: Hit_ID=Q00XD3; Match level="QueryCoverage=89%, HitCoverage=35%, E-value=5e-35, Identity=37%"; Hit description=LMBR1 integral membrane family protein-like (ISS)
  Pfam annotation: Domain name=LMBR1; Domain location=1-198; Score= -110.7; E_value=0.011; Accession=PF04791.8; Description=LMBR1-like membrane protein
KAVEKELLLLEDDMKALEEMYPQGEQAEATWAFTVLGYIGKLIFGVVGLIISIAWVAHIIIYLLIDPPLSSFLNEVFIKLDGVWGLLGTAAFAFFCFYLLIAVIAGEMMLGLKLVFITIHPMKWGGTLMNSFLFNVGLILLCSISVIQFCATAFAYYAQATAAQEIFGHTLQSLRGIKYLYKYNVFQYGFVALAILTLFYYAIFGWRKRKPTGRFQLSN

SEQ ID NO: 86945 - protein, 496 aa, Setaria italica
  misc_feature (476)..(476): Xaa can be any naturally occurring amino acid
  Transcript Sequence Number=SeqID_20971
  Homolog annotation: Hit_ID=Q00XD3; Match level="QueryCoverage=93%, HitCoverage=86%, E-value=5e-82, Identity=35%"; Hit description=LMBR1 integral membrane family protein-like (ISS)
  Pfam annotation: Domain name=LMBR1; Domain location=11-489; Score =587.8; E_value=1.1e-173; Accession=PF04791.8; Description=LMBR1-like membrane protein
MGDFNLALVIVAVVVSVLVLLVSVYLLVNYQHPDDANQAYFPKLVVVFGLTVAVLSILMLPADVANRQACRKAVYNGACNLTLPMRTLWLVVYIVDAVLVFLVIPFAMFYYEGDQDKSVGKRLKTALIWVVASAVVCGLVLGILYGLVGKVDFTVRHLSSSVETFPNSFSGFSSGQPCISSLPRQCAASTASANSLTTWTMRATFPEYVVALTTIVGSVLFTIFGGVGIACLPLGLIFSFVRRPKAVITRSQYIKEATELGKKARELKKAAEALHQEERSGNKGRKWRKNVKAVEKELLLLEDDMKALEEMYPQGEQAEATWAFTVLGYIGKLIFGVVGLIISIAWVAHIIIYLLIDPPLSSFLNEVFIKLDGVWGLLGTAAFAFFCFYLLIAVIAGEMMLGLKLVFITIHPMKWGGTLMNSFLFNVGLILLCSISVIQFCATAFAYYAQATAAQEIFGHTLQSLRGIKYLYKYNXFQYGFVALAILTLFYYAIFG

SEQ ID NO: 86946 - protein, 152 aa, Setaria italica
  misc_feature (124)..(124): Xaa can be any naturally occurring amino acid
  misc_feature (139)..(139): Xaa can be any naturally occurring amino acid
  Transcript Sequence Number=SeqID_20972
  Gene Ontology: Cellular component=nucleus
  Homolog annotation: Hit_ID=B9SFG7; Match level="QueryCoverage=97%, HitCoverage=7%, E-value=2e-14, Identity=37%"; Hit description=ATP binding protein, putative
IDNLKQLERMSETNTQLEKSLSSAATELEGLREKKVALEESCMHLKSKIATHQSERAVLVAQIEVVSQTMEDLLEKNVFLENSLSDANAELESLRRKLKELKESSQALQNQNSILQYEKKTLAXQVDSITVTLLNLKGXYKELERRHFGSAE

SEQ ID NO: 86947 - protein, 68 aa, Setaria italica
  Transcript Sequence Number=SeqID_20973
MASTSSKQLQAPTLLLVAVLLFLVCATRVQAARPEPRAKDHMPQAELAVSAATVVGDEKSCSGPGMEM

SEQ ID NO: 86948 - protein, 57 aa, Setaria italica
  Transcript Sequence Number=SeqID_20974
  Pfam annotation: Domain name=SEC-C; Domain location=38-57; Score =21.2; E_value=0.0023; Accession=PF02810.7; Description=SEC-C motif
KDQLEPLPKTFNEIQNLMGSTPMDVGQSNLAKSGQISRNALCPCGSKKRYKRCCGAS

SEQ ID NO: 86949 - protein, 205 aa, Setaria italica
  misc_feature (117)..(117): Xaa can be any naturally occurring amino acid
  misc_feature (152)..(152): Xaa can be any naturally occurring amino acid
  Transcript Sequence Number=SeqID_20975
  Pfam annotation: Domain name=SEC-C; Domain location=186-205; Score =21.2; E_value=0.0023; Accession=PF02810.7; Description=SEC-C motif
MASRRALHLLTANRRISSTPHLASLGWFDKIKSTFTGKKPDAASEADSFTLIKFADTMETARKMGAFKNFVAGRASEATVVNAFEKHSAVLRYLGAIDPTGEKLQNSDKINATKHCXNCTIADVEHILAKYTWAKEAQKKMAKLKEEGKELXPTCSMTFNEIQNLVGSTPMDIGQSNLAKSGQISRNALCPCGSKKRYKRCCGAS

SEQ ID NO: 86950 - protein, 148 aa, Setaria italica
  Transcript Sequence Number=SeqID_20976
  Gene Ontology: Mol. function=magnesium ion binding; Cellular component=chloroplast; Biological process=photosynthesis, light harvesting
  Homolog annotation: Hit_ID=B6SZR1; Match level="QueryCoverage=89%, HitCoverage=52%, E-value=3e-74, Identity=99%"; Hit description =Chlorophyll a-b binding protein 4
  Pfam annotation: Domain name=Chloroa_b-bind; Domain location=10-145; Score=178.2; E_value=2.3e-50; Accession=PF00504.13; Description =Chlorophyll A-B binding protein
MLLCFDCCRSLPGDNGFDPLGLAEDPENLRWFVQAELVNGRWAMLGVAGMLIPEVLTKAGLINAPQWYDAGKSEYFASSSTLFVIEFILFHYVEIRRWQDIKNPGSVNQDPIFKSYSLPPHECGYPGSVFNPLNFAPTLEAKGEGASA

SEQ ID NO: 86951 - protein, 163 aa, Setaria italica
  Transcript Sequence Number=SeqID_20977
  Gene Ontology: Mol. function=protein binding; Cellular component =polytene chromosome band; Biological process=protein modification process
  Homolog annotation: Hit_ID=Q0WRN6; Match level="QueryCoverage=100%, HitCoverage=99%, E-value=5e-88, Identity=91%"; Hit description =Polyubiquitin 4 UBQ4
  Pfam annotation: Domain name=ubiquitin; Domain location=6-74; Score =138.0; E_value=2.9e-38; Accession=PF00240.15; Description=Ubiquitin family
  Pfam annotation: Domain name=ubiquitin; Domain location=82-150; Score= 138.0; E_value=2.9e-38; Accession=PF00240.15; Description=Ubiquitin family
  Pfam module annotation: Pfam domain module=ubiquitin::ubiquitin; Domain location=6-74::82-150
MQIFVKTLTGKTITLEVESSDTIDNVKAKIQDKEGIPPDQQRLIFAGKQLEDGRTLADYNIQKESTLHLVLRLRGGMQIFVKTLTGKTITLEVESSDTIDNVKAKIQDKEGIPPDQQRLIFAGKQLEDGRTLADYNIQKESTLHLVLRLRGGMQIFVKTLTGK

SEQ ID NO: 86952 - protein, 261 aa, Setaria italica
  misc_feature (251)..(251): Xaa can be any naturally occurring amino acid
  Transcript Sequence Number=SeqID_20978
  Gene Ontology: Mol. function=protein serine/threonine kinase activity; Cellular component=plasma membrane; Biological process =protein amino acid phosphorylation
  Homolog annotation: Hit_ID=B6SP14; Match level="QueryCoverage=98%, HitCoverage=27%, E-value=1e-118, Identity=85%"; Hit description =Receptor protein kinase-like
  Pfam annotation: Domain name=LRR_1; Domain location=129-152; Score =6.8; E_value=15; Accession=PF00560.25; Description=Leucine Rich Repeat
  Pfam annotation: Domain name=LRR_1; Domain location=154-176; Score =6.0; E_value=21; Accession=PF00560.25; Description=Leucine Rich Repeat
  Pfam annotation: Domain name=LRR_1; Domain location=178-199; Score =16.1; E_value=0.14; Accession=PF00560.25; Description=Leucine Rich Repeat
  Pfam annotation: Domain name=LRR_1; Domain location=201-222; Score =15.5; E_value=0.22; Accession=PF00560.25; Description=Leucine Rich Repeat
  Pfam annotation: Domain name=LRR_1; Domain location=224-247; Score =13.2; E_value=0.92; Accession=PF00560.25; Description=Leucine Rich Repeat
  Pfam annotation: Domain name=LRR_1; Domain location=27-49; Score =11.3; E_value=2.1; Accession=PF00560.25; Description=Leucine Rich Repeat
  Pfam annotation: Domain name=LRR_1; Domain location=3-25; Score=4.9; E_value=35; Accession=PF00560.25; Description=Leucine Rich Repeat
  Pfam annotation: Domain name=LRR_1; Domain location=51-73; Score =10.9; E_value=2.5; Accession=PF00560.25; Description=Leucine Rich Repeat
  Pfam annotation: Domain name=LRR_1; Domain location=75-97; Score =12.2; E_value=1.4; Accession=PF00560.25; Description=Leucine Rich Repeat
  Pfam annotation: Domain name=LRR_1; Domain location=99-120; Score =9.8; E_value=4; Accession=PF00560.25; Description=Leucine Rich Repeat
  Pfam module annotation: Pfam domain module=LRR_1::LRR_1::LRR_1::LRR _1::LRR_1::LRR_1::LRR_1::LRR_1::LRR_1::LRR_1; Domain location=129 -152::154-176::178-199::201-222::224-247::27-49::3-25::51-73::75 -97::99-120
NGRVTSLNLFGMSMSGTLSDDIGSLTELRILDLSSNSLDGPLPAVIGKLVKLEYLALIGCGFTGPVPSELGNLSQLKFFALNSNKLTGSIPPSLGKLSNVIWLDLADNMLTGSLPNSKDNGTGLDQLVKAEHFHFNGNMLEGSIPTNLFNSSMHLKHILFDINRFTGPIPTSIGVIPYLEVLRLNNNGFTGKVPAFNNLTKLHVLMLSNNKLSGPIPNLTGMGSLENVDISNNSFDPSNVPSWFSDLKSIXTLTMQSGRVF

SEQ ID NO: 86953 - protein, 79 aa, Setaria italica
  Transcript Sequence Number=SeqID_20979
SDDLEIRWSTTAPDSLPGDQPAGKSHGAVFEFHFFSLSRDKQEDSAHVTSHLIDAGNTRIHLGLLFKNFWRSRHPLTFP

SEQ ID NO: 86954 - protein, 67 aa, Setaria italica
  misc_feature (56)..(56): Xaa can be any naturally occurring amino acid
  misc_feature (63)..(63): Xaa can be any naturally occurring amino acid
  Transcript Sequence Number=SeqID_20980
  Gene Ontology: Mol. function=transferase activity, transferring glycosyl groups; Cellular component=dolichol-phosphate-mannose synthase complex; Biological process=protein amino acid C-linked glycosylation via 2'-alpha-mannosyl-L-tryptophan
  Homolog annotation: Hit_ID=B9R8M8; Match level="QueryCoverage=92%, HitCoverage=26%, E-value=4e-23, Identity=80%"; Hit description =Dolichol-phosphate mannosyltransferase, putative
MEAAAGSKRAYSIIVPTYNERLNVALIVYLIFKHLPDVNFEIIIVDDGSPDGTQDXVKQLQQXYGED

SEQ ID NO: 86955 - protein, 106 aa, Setaria italica
  Transcript Sequence Number=SeqID_20981
  Gene Ontology: Mol. function=nucleotide binding; Cellular component =myosin complex; Biological process=protein amino acid phosphorylation
  Homolog annotation: Hit_ID=Q6UAL2; Match level="QueryCoverage=100%, HitCoverage=6%, E-value=1e-38, Identity=81%"; Hit description=Myosin heavy chain class XI E2 protein
QSARISSSGLGVTSGYSGMVGRPDTASMVEAKYPAIRFKQQLTAYVEKIYGTIRDNLKKEISPFLTLCIQAPRANRMRPSRGSLKSIHSNALSRQASSVHWQSIVK

SEQ ID NO: 86956 - protein, 344 aa, Setaria italica
  Transcript Sequence Number=SeqID_20982
  Gene Ontology: Mol. function=nucleotide binding; Cellular component =myosin complex; Biological process=protein amino acid phosphorylation
  Homolog annotation: Hit_ID=B0CN60; Match level="QueryCoverage=98%, HitCoverage=25%, E-value=1e-120, Identity=54%"; Hit description =Myosin XI-F
  Pfam annotation: Domain name=DIL; Domain location=161-268; Score =187.7; E_value=3.2e-53; Accession=PF01843.11; Description=DIL domain
AACIVYKSLLHWHSFEAEKTNIFDRIIQTISRMVQSARISSSGLGVTSGYSGMVGRPDTASMVEAKYPAIRFKQQLTAYVEKIYGTIRDNLKKEISPFLTLCIQAPRANRMRPSRGSLKSIHSNALSRQASSVHWQSIVKCLDHTLEIMKNNHVPPMIIKKTFSQVYAYLNVQLFNSLLLRRECCSFSNGEFLKAGLQELEQWCSRTTEEYAGASWDELQHIRQAVGFLVLHQKSHKNLEEIMNELCPVLSITQIYRIATMFWDDKYGAQGLSQEVIGKMRTMTTDDSITTPNSSFLLDDDSSIPISLDDIARLMLDIDPSDVEPPPLLRQNSQFHFLLQQHTD

SEQ ID NO: 86957 - protein, 60 aa, Setaria italica
  misc_feature (13)..(13): Xaa can be any naturally occurring amino acid
  misc_feature (26)..(26): Xaa can be any naturally occurring amino acid
  Transcript Sequence Number=SeqID_20983
  Gene Ontology: Mol. function=dihydrofolate reductase activity; Biological process=one-carbon compound metabolic process
  Homolog annotation: Hit_ID=Q2R481; Match level="QueryCoverage=100%, HitCoverage=11%, E-value=2e-15, Identity=71%"; Hit description =Bifunctional dihydrofolate reductase-thymidylate synthase, putative, expressed
AHVYRTHVRALEXQIQKMPKPFPIFXKINPSKKDIDSFVASDFKLVGYDPHQKIEMKMAI

SEQ ID NO: 86958 - protein, 145 aa, Setaria italica
  Transcript Sequence Number=SeqID_20984
SHFTMDQKIVTSALLHHHSCFMQAAQLEPQPMSSAKFVDCYYIFKINRTWHQLVFGDGAACSFNWEIFPTSPIWGCTQAAYLNSTGPAPLLSGAGVVASELLPGNALFQRVDWRVPRDDVLSVSLNSFYLLKLVNCFDALKKKKK

SEQ ID NO: 86959 - protein, 146 aa, Setaria italica
  Transcript Sequence Number=SeqID_20985
  Gene Ontology: Mol. function=dihydrofolate reductase activity; Biological process=one-carbon compound metabolic process
  Homolog annotation: Hit_ID=O81395; Match level="QueryCoverage=95%, HitCoverage=26%, E-value=2e-78, Identity=97%"; Hit description =Thymidylate synthase
  Pfam annotation: Domain name=Thymidylat_synt; Domain location=1-146; Score=154.4; E_value=3.3e-43; Accession=PF00303.11; Description =Thymidylate synthase
VINSLIDRRIVLSAWNPSDLKKMALPPCHMFAQFYVENGELSCQMYQRSADMGLGVPFNIASYSLLTYMIAQVCDLSPGDFVHVIGDAHVYRTHVRALEEQIQKMPKPFPILKINPSKKDIDSFVASDFKLVGYDPHQKIEMKMAI

SEQ ID NO: 86960 - protein, 526 aa, Setaria italica
  Transcript Sequence Number=SeqID_20986
  Gene Ontology: Mol. function=dihydrofolate reductase activity; Biological process=nucleotide biosynthetic process
  Homolog annotation: Hit_ID=O81395; Match level="QueryCoverage=83%, HitCoverage=83%, E-value=0.0, Identity=94%"; Hit description =Thymidylate synthase
  Pfam annotation: Domain name=DHFR_1; Domain location=106-283; Score =284.5; E_value=2.3e-82; Accession=PF00186.11; Description =Dihydrofolate reductase
  Pfam annotation: Domain name=Thymidylat_synt; Domain location=325 -526; Score=404.9; E_value=1.3e-118; Accession=PF00303.11; Description=Thymidylate synthase
  Pfam module annotation: Pfam domain module=DHFR_1::Thymidylat_synt; Domain location=106-283::325-526
  Subcellular localization annotation: CTP_CleavageSite=53; ConfidenceScore=5.38e-01
PAHGFTLSICPTPPKPPFLLAHTLSRPLRPAVPARARILYGCAPPDLQPPVARFSSIGCSFISQVKRHQILDVSNKISSFLFSQPRPISMATAPANGDSQSGPQRNYQVVVAATRDMGIGKDGVLPWKLLGDLKFFKEVTLSTSDPAKKNAVIMGRKTWESIPVKSRPLPGRLNVILTRSGSFDFATVENVVICGSMKSALELLASTPYCLSIEKVFVIGGGQVLREYLNRPACEAIHLTDIQSSIECDTFIPPIDFSVFQPWYSSFPVVESNIRHSFVTFVRVRKSLAETHESNGKESTEVDTKNDKFETENFSFLPKMIFDRHEEYHYLNLVEDIIRSGAQKNDRTGTGTLSKFGCQMRFNLRKNFPLLTTKRVFWRGVVEELLWFISGSTNAKVLQEKGIHIWDGNASREYLDSVGLAHREEGDLGPVYGFQWRHFGAEYTDMHADYTGKGFDQLMDVIDKIKNNPDDRRIVLSAWNPSDLKKMALPPCHMFAQFYVENGELSCQMYQRSADMGLGVPFNIAS

SEQ ID NO: 86961 - protein, 71 aa, Setaria italica
  Transcript Sequence Number=SeqID_20987
SRKDLFDAIFGVLYKEEQLLETDPILNKVEGKAPAAAPASKTAAGKAAAAAEQSGGNGGFLGGLFNNSKKG

SEQ ID NO: 86962 - protein, 328 aa, Setaria italica
  Transcript Sequence Number=SeqID_20988
NRIRTKVGSILEVRPSKRSPWVSGSVLGRNVNLNLENSEGSSHVEKSWITDTQAHHSSAAHILNKPVEESSSMKITDFLGVGTSASQNQHYVSQGVNLNLLSSEGKLKEKCVGKISSSRFFGANEDIRHSNSFQQRKDDSNANMGWYNQNRTGSSMGHYSPSARTFNHLIFAPPSFNHALNPPWQINSTSYLTKSHYGAAETSTAKHALSSGFSVDCTPNAPYHHSLKIHEEAQHRKLPPLHHNLKDIDLNDAPVDTAATWEQGSEKSMVDISWKQVSLMKSEVPSSYANCHYQILPSPTFNSQNKTPTRVPTFPNSVGTEKDSRCSP

SEQ ID NO: 86963 - protein, 164 aa, Setaria italica
  Transcript Sequence Number=SeqID_20989
  Gene Ontology: Mol. function=transferase activity, transferring glycosyl groups; Cellular component=integral to membrane; Biological process=cellulose biosynthetic process
  Homolog annotation: Hit_ID=B6SW15; Match level="QueryCoverage=100%, HitCoverage=22%, E-value=2e-70, Identity=73%"; Hit description=CSLE6- cellulose synthase-like family E
NPTRAAFVGVGPTTHAQTMLQHKRWSEGNLSIFLSKYCPFIFGNGKISLQHQMAYSVYGLWAMNSLPTLYYVIIPSLGLLKGIRLFPEITSPWIMPYIYVSVVKNIYSAYEALLYGDTLRGWWNGQRMWMIRRITSYLYGTIDTIRKLLGLSKMRFEVSPKVSD

SEQ ID NO: 86964 - protein, 110 aa, Setaria italica
  misc_feature (39)..(39): Xaa can be any naturally occurring amino acid
  Transcript Sequence Number=SeqID_20990
  Gene Ontology: Mol. function=transferase activity, transferring groups other than amino-acyl groups
  Homolog annotation: Hit_ID=B6TJD6; Match level="QueryCoverage=100%, HitCoverage=24%, E-value=5e-37, Identity=70%"; Hit description =Transferase
HFPAPAVRALLASLESGTTPFAALAALFWLRIAGAAGGXRELTLALDFRKRMYAPLPWGYYGSVVHFTRARADLAAGLPAVAAALDRHVSGVPEDELWHAVEWLQARQQQ

SEQ ID NO: 86965 - protein, 60 aa, Setaria italica
  Transcript Sequence Number=SeqID_20991
HLSSMTFLSYVFLRHFWMLHNSFISIEIMLVELKKCDYSVKIFSVCLAVRNAGSVIFNIF

SEQ ID NO: 86966 - protein, 326 aa, Setaria italica
  misc_feature (30)..(30): Xaa can be any naturally occurring amino acid
  misc_feature (315)..(315): Xaa can be any naturally occurring amino acid
  Transcript Sequence Number=SeqID_20992
  Gene Ontology: Mol. function=phosphotransferase activity, alcohol group as acceptor; Cellular component=cytoplasm; Biological process =metabolic process
  Homolog annotation: Hit_ID=UPI0000162BDC; Match level="QueryCoverage =99%, HitCoverage=30%, E-value=1e-108, Identity=59%"; Hit description= GHMP kinase-related
  Pfam annotation: Domain name=Fucokinase; Domain location=1-323; Score= 396.1; E_value=5.8e-116; Accession=PF07959.4; Description=L-fucokinase
LCPPTLDVAANHGVVVASKDGGIDQESYSXYLLINLLQKPTVSELVEGHAILDDGRALLDTGIIAARGKAWQDLVTLAHSSSQTMIKELMTSNKELSLYEDLVAAWVPAKHEWLRNRPLGKELIDALGKQRIFSFCSYDFSFLHFGTSAEVLDHLAGSYSGLVGRRHMCSLPETTACDIAATAIILSTKISSGVSIGEDSLVYDSVLCGRIRIGSQSIVVGVNISEFHGCSPQIINGSTCFTLPDRHCLWEVPLVNSAGRVLVYCGLHDNPKVSIKRDGTFCGKPWINVLEDLRIQDTDLWNSTSQDQCLWTARXFPVMSLPEMLN

SEQ ID NO: 86967 - protein, 166 aa, Setaria italica
  Transcript Sequence Number=SeqID_20993
  Subcellular localization annotation: CTP_CleavageSite=65; ConfidenceScore=5.02e-01
MPESTDGRRAALADLSGGAGGGGFFIRRVASPGSLAARGIRKPLARRYISPSRNKENLLPVWALRATPKKRRSPLPEWYPRTPLRDITAIAKAIQRSRLRIAAAQQQSQRPEQSPQSVNVTTPGQAEQDAPHSAEASMAVASGSGSTERETVASPATVLAGDNLKV

SEQ ID NO: 86968 - protein, 108 aa, Setaria italica
  Transcript Sequence Number=SeqID_20994
GGCNSMNMQLSQLPLDCKRPTYDALEGANVTPTSFYNIGNLEIQDNLARVWVDIGIHEPLLLDILLNALTTISSDHVGIKQVQFGGLEFVNWNEDLKTEEVGYSVRKI

SEQ ID NO: 86969 - protein, 240 aa, Setaria italica
  Transcript Sequence Number=SeqID_20995
  Gene Ontology: Mol. function=nucleotide binding; Biological process =defense response
  Homolog annotation: Hit_ID=A0SEC2; Match level="QueryCoverage=100%, HitCoverage=70%, E-value=6e-92, Identity=66%"; Hit description=Pib (Fragment)
MEATALSVGKSVLDGALGYAKSAVAEEVALQLGIQRHHAFIRDELAMMQAFLRAAHGERDNHEVLMTWVKQVRDVAYDAEDCLQNFSIHLHNQSWWHLPRTLRDRRRIAKQMKELRARVEDVSQRNLRYRLIRSASSKAVTSADEKPNITAAGIFGINDAWRAGKQDNSKVDLVQLINQEGEDLRIIAVWGTSSDLGQTSIIKAAYNNPDIKGKFAYRAWVRVMHPFNAKDFVQSLVKQF

SEQ ID NO: 86970 - protein, 33 aa, Setaria italica
  Transcript Sequence Number=SeqID_20996
MESAAVSAFLKTVMGRLFLLLEKEYSKHRGLAQ

SEQ ID NO: 86971 - protein, 331 aa, Setaria italica
  misc_feature (32)..(32): Xaa can be any naturally occurring amino acid
  Transcript Sequence Number=SeqID_20997
  Gene Ontology: Mol. function=hydrolase activity; Cellular component =chloroplast
  Homolog annotation: Hit_ID=B6TE59; Match level="QueryCoverage=94%, HitCoverage=78%, E-value=1e-162, Identity=88%"; Hit description =Hydrolase, NUDIX family protein
  Pfam annotation: Domain name=NUDIX; Domain location=142-269; Score =84.1; E_value=5.1e-22; Accession=PF00293.20; Description=NUDIX domain
  Pfam annotation: Domain name=NUDIX-like; Domain location=9-104; Score= 17.7; E_value=0.032; Accession=PF09296.3; Description=NADH pyrophosphatase-like rudimentary
  Pfam annotation: Domain name=zf-NADH-PPase; Domain location=106-139; Score=45.6; E_value=2e-10; Accession=PF09297.3; Description=NADH pyrophosphatase zinc ribbon domai
  Pfam module annotation: Pfam domain module=NUDIX::NUDIX-like::zf-NADH- PPase; Domain location=142-269::9-104::106-139
LPRHPPPAPAWRLAWLPPSRVPGVAPDAFVFXGAHAEGDGKEAAAYWAVDVSEGEGPRVDGGSGDGDGSAFVDLRTLMVATDWSDKDAMGDLAIAGHARALLEWHNTAKFCGACGAKAVPKEAGRRKQCSNESCKKRIYPRVDPVVIMLVIDKENDRALLSRQSRFVPRMWSCLAGFIEPGESLEEAVRRETWEETGIEVGQVIYHSSQPWPVGPNTMPCQLMVGFFAYAKSLEIRVDKQELEDAQWHSREDIRKALTFAEYEKAQRTNALKVNQMCKGAEKGQSITDDFKVDSGEPVPMFVPGPFAIAHHLISAWAFEGAPKLPSSFSNL

SEQ ID NO: 86972 - protein, 96 aa, Setaria italica
  Transcript Sequence Number=SeqID_20998
MAAGGETMMTREQLLHLFSRFSFLTSLPEVKQRIADAVRDKQEAVAVTTEIQEEILREMGIDPSFGIGCLGKVNVVYENDKDLMIKFYQFVAKEEM

SEQ ID NO: 86973 - protein, 66 aa, Setaria italica
  Transcript Sequence Number=SeqID_20999
MAAGGETMMTREQLLHLFSRFSFLTSLPEVKQRIADAVRDKQEAVAVTTEIQEEILREMGIEMIRF

SEQ ID NO: 86974 - protein, 109 aa, Setaria italica
  misc_feature (18)..(18): Xaa can be any naturally occurring amino acid
  misc_feature (24)..(24): Xaa can be any naturally occurring amino acid
  Transcript Sequence Number=SeqID_21000
LFFLGSKGIGCLGKVNVXDKDLMXFYQLVDREEMAIDEAELGPREMAEKLHAQRILQEQQLNMLVEMRKYSPESQSVILGTLRKQLEEANFDINASILSPDQIQEIIQK

SEQ ID NO: 86975 - protein, 72 aa, Setaria italica
  Transcript Sequence Number=SeqID_21001
AVSASPDPRVSCTITVLPAVTNAYNTLHGGVVAAVAEAVGMACVWAAAGDKEMFLGELSTAYLAAARLDVRF

SEQ ID NO: 86976 - protein, 169 aa, Setaria italica
  Transcript Sequence Number=SeqID_21002
  Pfam annotation: Domain name=4HBT; Domain location=77-154; Score =62.0; E_value=2.2e-15; Accession=PF03061.14; Description =Thioesterase superfamily
MAEGEPRQKLSPADSRMVALAFIRALGADVRLPAAADQPDAYSALVRAILSSIAVSASPDPRVSCTITVLPAVTNAYNTLHGGVVAAVAEAVGMACVWAAAGDKEMFLGELSTAYLAAARLDSEVDVEAKILRKGRSVVVTTIDFTLKDTKKLCYTSRATFYILPAASL

SEQ ID NO: 86977 - protein, 207 aa, Setaria italica
  Transcript Sequence Number=SeqID_21003
  Gene Ontology: Cellular component=integral to membrane; Biological process=transport
  Homolog annotation: Hit_ID=B9RVI6; Match level="QueryCoverage=99%, HitCoverage=35%, E-value=8e-78, Identity=67%"; Hit description=Gd2b, putative
  Pfam annotation: Domain name=DUF580; Domain location=1-204; Score =32.1; E_value=8.7e-10; Accession=PF04515.4; Description=Protein of unknown function, DUF580
SFQRALSYNLGSACLGSLFVPTIEALRILARGLNLLEGEDEFMFSCAHCCLHVMNGVFSFGNSWAFVHIAAYGRGFVQASRSTWGQFEALPGMAALVDSDITSSVCFLTGVTSGALCVALAGSWAFATHRHYTATVSLLAFFVGYLMTRIGMALPQACVGCYYVCYAENPTSQLFDNTIPAQMRKMQEGCDPVVVPTPRFPQQRASA

SEQ ID NO: 86978 - protein, 79 aa, Setaria italica
  Transcript Sequence Number=SeqID_21004
  Homolog annotation: Hit_ID=A6N1F2; Match level="QueryCoverage=100%, HitCoverage=100%, E-value=7e-23, Identity=70%"; Hit description=Imp biosynthesis protein
MSVKMRTTCTWTERPYEALLFPGIGFGPFLRSLGGRRRRPPSGGARAISEIPLWKSSDSNLVSDPRAKGQSQVDSFYGA

SEQ ID NO: 86979 - protein, 139 aa, Setaria italica
  Transcript Sequence Number=SeqID_21005
  Gene Ontology: Mol. function=phospholipase A2 activity; Biological process=phospholipid metabolic process
  Homolog annotation: Hit_ID=B6TUU4; Match level="QueryCoverage=91%, HitCoverage=81%, E-value=1e-64, Identity=93%"; Hit description =Phospholipase A2
RLRGRRPRTRPTALDIGIQSAGDGVSKQQACSRTCESDHCTTAPFLRYGKYCGILYSGCPGEAPCDALDACCMHHDNCVQAKKDYLSTGCNEALLDCLARLREGTSTFEGNKCMIDEVIDVITLVIEAAVVAGRVLHKP

SEQ ID NO: 86980 - protein, 247 aa, Setaria italica
  misc_feature (37)..(37): Xaa can be any naturally occurring amino acid
  misc_feature (110)..(110): Xaa can be any naturally occurring amino acid
  misc_feature (112)..(112): Xaa can be any naturally occurring amino acid
  misc_feature (215)..(215): Xaa can be any naturally occurring amino acid
  Transcript Sequence Number=SeqID_21006
  Homolog annotation: Hit_ID=B6TZ17; Match level="QueryCoverage=99%, HitCoverage=61%, E-value=2e-67, Identity=53%"; Hit description=mTERF family protein
  Pfam annotation: Domain name=mTERF; Domain location=2-206; Score= -75.9; E_value=0.0042; Accession=PF02536.6; Description=mTERF
NLEFWISVFGSLDQFLQALKINGALLSKSIEKVAKPXLALLEECGISVSDVTNPNAFLYRMLTTSPKHLQEALTRVHEFGIHPSSSAFSRGLRTFAVLSSEKLTKNIQLXSXLGWSRDAISLAVRREPTILGLTEERVRRSLEFLIGDVGLEIPYIARMPALMNYSIDRRLLPRNCLMNFLKAKGLFSAEFSFFSIATISNEKFLHKYVRPYEEXFFPGLAAAFASSCAGKHQWEQLYETTCKKRNS

SEQ ID NO: 86981 - protein, 102 aa, Setaria italica
  Transcript Sequence Number=SeqID_21007
  Homolog annotation: Hit_ID=A3BT52; Match level="QueryCoverage=38%, HitCoverage=4%, E-value=4e-13, Identity=87%"; Hit description=DEAD -box ATP-dependent RNA helicase 29
MARLTPAKSRSTRKPKPSSSSGMDAAAEPNPEPQRRPKQDRSAGGGGGKKAKSGGSKKAKSGGFESMGLCEEVYRGVRHKGYRVPSRIQRKTMPLILAGVDV

SEQ ID NO: 86982 - protein, 78 aa, Setaria italica
  Transcript Sequence Number=SeqID_21008
  Gene Ontology: Cellular component=endoplasmic reticulum membrane; Biological process=GPI anchor biosynthetic process
  Homolog annotation: Hit_ID=B6T4P5; Match level="QueryCoverage=96%, HitCoverage=16%, E-value=4e-31, Identity=92%"; Hit description=GPI transamidase subunit PIG-U family protein
MATRFYWPMVAAAVGFRLVLVLFGGDLHLASRPEVSTPLTSLRRLAEGYWLKQASMSPYSGSMYHGSPLLLIVLGLKH

SEQ ID NO: 86983 - protein, 132 aa, Setaria italica
  Transcript Sequence Number=SeqID_21009
  Gene Ontology: Mol. function=electron carrier activity; Biological process=oxidation reduction
  Homolog annotation: Hit_ID=Q5ZE54; Match level="QueryCoverage=95%, HitCoverage=22%, E-value=2e-45, Identity=67%"; Hit description =Cytochrome P450-like
CCTELIDRWENKLAGSDGSYEVDIWPEFQNLTGDVISRTAFGSSFMEGRRIFQLQAEQAERIIKAFQYMYIPGFLFLPTQNNRRMKEINGEIEGILRGMIEKRERAIENGEASGNDLLGLLLQSNMDSGKAA

SEQ ID NO: 86984 - protein, 526 aa, Setaria italica
  Transcript Sequence Number=SeqID_21010
  Gene Ontology: Mol. function=electron carrier activity; Biological process=oxidation reduction
  Homolog annotation: Hit_ID=Q8S9F0; Match level="QueryCoverage=95%, HitCoverage=95%, E-value=0.0, Identity=61%"; Hit description =Cytochrome P450
  Pfam annotation: Domain name=p450; Domain location=82-522; Score =257.8; E_value=2.6e-74; Accession=PF00067.14; Description=Cytochrome P450
MDDIVVAAAAASPSPWSLLQGLLALLVVWGAYRAAERYWLRPRRLDRALRAQGLSGTEYRFPAGDLQENARLNDEARSRPMPQCHDVVPRIMPHLFDTVKEHGNVCITWFGPIPRVIITEAELVRDILSNKFGHIEKFTNKRLGKLLALGLASHDGEKWAKHRRILNPAFHLEKLKRMLPAFSTCCTELIDRWENKLAGSDGSYEVDIWPEFQNLTGDVISRTAFGSSFMEGRRIFQLQAEQAERIIKAFQYMYIPGFLFLPTQNNRRMKEINGEIEGILRGMIEKRERAIENGEASGNDLLGLLLQSNMDSGKGSLRMSTEDMIEECKLFYFAGMETTSVLLTWTLVILGMHPEWQDRAREEVLRVFGKDDKPNLDSLSRLKTVTMILYEVLRLYPPAVTLNRRTFKDMQIGGITYPAGVILELPIIVVHHNPDVWGTDAHEFKPERFAEGISKATKDDQPAFFPFGWGPRICIGQNFALLEAKMALSMILQRFEFQLSPSYTHAPYTVITLHPQHGAPIIVKKI

SEQ ID NO: 86985 - protein, 480 aa, Setaria italica
  misc_feature (337)..(337): Xaa can be any naturally occurring amino acid
  Transcript Sequence Number=SeqID_21011
  Gene Ontology: Mol. function=1,3-beta-glucan synthase activity; Cellular component=1,3-beta-glucan synthase complex; Biological process=1,3-beta-glucan biosynthetic process
  Homolog annotation: Hit_ID=B9SKY2; Match level="QueryCoverage=97%, HitCoverage=24%, E-value=0.0, Identity=70%"; Hit description =Transferase, transferring glycosyl groups, putative
ISSFEAKVANGNGEQTLSRDIYRLGRRFDFYRMLSFYFTTVGFYFSSMVTVLTVYVFLYGRLYLVMSGLEKSILMDPRNQQNVKALENALASQSVFQLGLLLVLPMIMEVGLEKGFRTALGEFIIMQLQLASMFFTFQLGTKTHYYGRTILHGGAIYRPTGRGFVVYHAKFTENYRLYSRSHFVKGLELLILLVVYLVYGSSYRSSNLYIFVTCSIWFLVASWLFAPFIFNPSCFEWQKTVDDWTEWRKWMGNRGGIGMSVEKSWEAWWISEQDHLRKTSIRALLLEIIISLRFLIYQYGIVYHLNIAVARHNKSIMVYALSWVVMLLVLVVLKMVXSIGRQKFGTDLQLMFRILKGLLFLGFVSVMAVLFVVLNLTIADVFASILGFLPTGWCILLIGQACSPLLRRTVLWDSIMELGRSYENIMGLILFLPIGFLSWFPFVSEFQTRLLFNQAFSRGLQISRILAGQEVDIGDESESE

SEQ ID NO: 86986 - protein, 111 aa, Setaria italica
  Transcript Sequence Number=SeqID_21012
  Subcellular localization annotation: CTP_CleavageSite=27; ConfidenceScore=5.04e-01
SSSSTAPGRCVSCCKWRRQARGSNCIPCKKKNRFLAIPMIFLQVVQLLSQACCLPLPELLKVKAQLSNAKSREAKRFSHTDLWSDDLSGGEKLNCFCAPKRYQIVVNIQLS

SEQ ID NO: 86987 - protein, 436 aa, Setaria italica
  Transcript Sequence Number=SeqID_21013
  Homolog annotation: Hit_ID=B9SYA4; Match level="QueryCoverage=54%, HitCoverage=27%, E-value=1e-13, Identity=29%"; Hit description =Phosphatidylinositol n-acetylglucosaminyltransferase subunit p, putative
  Subcellular localization annotation: CTP_CleavageSite=37; ConfidenceScore=5.14e-01
MSDFSHQLVRSVKRSASTKMGLTSANSSLSEKMSLLRQPRYGGNHQDQNCISTLNRRHKIVNPRGVNDLLNTEEVHDQLDYSLGGYSQALLNNALVREKQMYCSTVLNQKATEELWSPADSESEKIVCFSSGDSIDDLQVSSSSDTSDSSNLSSLGAVANNQWKMTFKKVYCPHAARLDSTSVIYRKEIGQASPISVLEPPSEDSSDSENIRREPADLYDLQLRLELGTFAPAETAAEASSVGRTSDYLSSEVESNNNEPTQLVENILEEFEDEEERDFSYLLDILIASGIHGTAEDQLYKVCQSLDCPASYDVFEKLENKYKVVTWSRSDRKFLFDMVNTVLSQILAPCLNMQPWVNTARNLAPLWGSEGLLEKVLQVLDQRREELAPSKTKPEMKRFDQKWPDLADGIDRVGRDIEKLIKDDLLEELVLELLSS

SEQ ID NO: 86988 - protein, 165 aa, Setaria italica
  Transcript Sequence Number=SeqID_21014
  Gene Ontology: Mol. function=protein serine/threonine kinase activity; Biological process=protein amino acid phosphorylation
  Homolog annotation: Hit_ID=P17840; Match level="QueryCoverage=95%, HitCoverage=35%, E-value=2e-36, Identity=49%"; Hit description=S -locus-specific glycoprotein S13
  Pfam annotation: Domain name=B_lectin; Domain location=7-122; Score =128.9; E_value=1.6e-35; Accession=PF01453.16; Description=D-mannose binding lectin
  Subcellular localization annotation: CTP_CleavageSite=70; ConfidenceScore=5.04e-01
NSILEPRPTVVWVANRQSPLVDSPGILRVSAGGRLVVLDGNNGTVWSSAAPTLNVTTGATARLLDDGNLVLSADGSGSEQSVAWQSFDYPTDTLLPGMKLGVDARHGITRNITAWRSESDPSPGDVTFKLVLSSGLPQFFLMRGSKRIYTSGPWNGDILTGVPYL

SEQ ID NO: 86989 - protein, 158 aa, Setaria italica
  misc_feature (70)..(70): Xaa can be any naturally occurring amino acid
  Transcript Sequence Number=SeqID_21015
  Gene Ontology: Mol. function=zinc ion binding
  Pfam annotation: Domain name=zf-C3HC4; Domain location=73-110; Score =13.2; E_value=0.0032; Accession=PF00097.17; Description=Zinc finger, C3HC4 type (RING finger)
GESALGFLGIVPPSREPSAPRTDDDATKTSTSKDAITGPKDGTNAPRFVEFISPEGEIFVCTADVESGPXHQQDHLVDLGCSCKNELALAHYACALKWFISHGSTVCEICGSVAANVRPDDFNKVLASLKDYEALRERTSTGELSYLQHVPGTGVDPD

SEQ ID NO: 86990 - protein, 163 aa, Setaria italica
  misc_feature (20)..(20): Xaa can be any naturally occurring amino acid
  Transcript Sequence Number=SeqID_21016
  Gene Ontology: Mol. function=protein dimerization activity; Cellular component=nucleus; Biological process=regulation of transcription, DNA-dependent
  Homolog annotation: Hit_ID=B4F831; Match level="QueryCoverage=99%, HitCoverage=52%, E-value=7e-32, Identity=53%"; Hit description=BZIP transcription factor
TLSSKTVDEVWRNLVRDEPXQGVWYGGGQQQAHRQSTLGEMTLEEFLVRAGVVRENPAPAAAPAPPPMLPPRPVPVAPKSTAFLGNFPGADDAAAAVALGFAPIGMGDPALGNGLMPPRAAGMGGSAMAVQTAVNQLDSGGKGYSDLLSPTEPLPYSFEGMIR

SEQ ID NO: 86991 - protein, 152 aa, Setaria italica
  Transcript Sequence Number=SeqID_21017
  Pfam annotation: Domain name=Pollen_Ole_e_I; Domain location=36-147; Score=-23.9; E_value=0.0052; Accession=PF01190.9; Description=Pollen proteins Ole e I family
MAAALPRRWPLLLQLGFAIAVLLAAAPAAEAWTGEIRGRVVCDVCGDAAIGPEDHALEGAEVAVLCITKSGEVINYQAFTNSKGTYTIAETMPESDRWESCLARPISSFHQHCTRRGDAHSGVKFTYSKPSGNSHTVKTFLYKPVNAPLYCS

SEQ ID NO: 86992 - protein, 77 aa, Setaria italica
  Transcript Sequence Number=SeqID_21018
  Subcellular localization annotation: CTP_CleavageSite=30; ConfidenceScore=5.23e-01
PIRHLLGVSPLLLSFHSGSVGLDVSPSSSSAAASSDLSRKRRWEQEMQQQQQQQQYQQQMAGYTQSQMPGTVWMVPS

SEQ ID NO: 86993 - protein, 266 aa, Setaria italica
  Transcript Sequence Number=SeqID_21019
  Gene Ontology: Cellular component=anchored to membrane
  Homolog annotation: Hit_ID=B6TZU8; Match level="QueryCoverage=84%, HitCoverage=83%, E-value=3e-66, Identity=59%"; Hit description =Fasciclin-like arabinogalactan protein 8
  Pfam annotation: Domain name=Fasciclin; Domain location=46-181; Score= 94.0; E_value=5.3e-25; Accession=PF02469.14; Description=Fasciclin domain
MEMASHTVLSLLLLLPFLFAAAADVAPGPSPPGELNLTGILENGGQYSTLLRLLQTTRIAQQLTEQLKNSYDGLTFFAPNDDAFTKLKTGTLNGLSDQQKIQLLLYHVLPRYYSVTTFQTASNPLPTEGSGPGGMYTVNVTTTTSSHLVNMSTGVVDVPISSTLVARFPLAVYSIDAVLLPEQLFGASRKAVAPAPAGQAAGAAAGKAAARKKGGVPKSDVAAEPSAAGKETEDSTKAAAACRGMSAGWTTIAAFALMAVVNLVGA

SEQ ID NO: 86994 - protein, 230 aa, Setaria italica
  misc_feature (51)..(51): Xaa can be any naturally occurring amino acid
  Transcript Sequence Number=SeqID_21020
  Gene Ontology: Mol. function=protein kinase activity; Cellular component=integral to membrane; Biological process=protein amino acid phosphorylation
  Homolog annotation: Hit_ID=Q8L4U4; Match level="QueryCoverage=98%, HitCoverage=28%, E-value=1e-67, Identity=61%"; Hit description =Leucine Rich Repeat family protein, expressed
  Pfam annotation: Domain name=LRR_1; Domain location=118-140; Score =12.8; E_value=1.1; Accession=PF00560.25; Description=Leucine Rich Repeat
  Pfam annotation: Domain name=LRR_1; Domain location=142-165; Score =2.0; E_value=1.3e+02; Accession=PF00560.25; Description=Leucine Rich Repeat
  Pfam annotation: Domain name=LRR_1; Domain location=190-210; Score =1.7; E_value=1.4e+02; Accession=PF00560.25; Description=Leucine Rich Repeat
  Pfam annotation: Domain name=LRR_1; Domain location=20-42; Score=1.2; E_value=1.8e+02; Accession=PF00560.25; Description=Leucine Rich Repeat
  Pfam annotation: Domain name=LRR_1; Domain location=44-66; Score =11.8; E_value=1.7; Accession=PF00560.25; Description=Leucine Rich Repeat
  Pfam annotation: Domain name=LRR_1; Domain location=69-91; Score =12.5; E_value=1.2; Accession=PF00560.25; Description=Leucine Rich Repeat
  Pfam module annotation: Pfam domain module=LRR_1::LRR_1::LRR_1::LRR _1::LRR_1::LRR_1; Domain location=118-140::142-165::190-210::20 -42::44-66::69-91
RPSGNPCDFVGVTCGGASGPVQRLRIHGAGLAGALSPSLARLPALESISLXGNALTGGVPPSFRALAPTLRKLNLSRNALGGEIPPFLGTLPLLRLLVSAYNAFAGGIPPALFDPCLRLRYVSLAHNDLTGPVPPGIANCPRLAGFDFSYNRLSGEFPDRVCAPPEMNYISVRSNSLYGDLAGKVASCSSIDLFDVGSNRFSGAAPFALLGTVNITYFNVSSNDFDGEIP

SEQ ID NO: 86995 - protein, 241 aa, Setaria italica
  Transcript Sequence Number=SeqID_21021
  Gene Ontology: Mol. function=metal ion binding
  Homolog annotation: Hit_ID=B9RTT7; Match level="QueryCoverage=98%, HitCoverage=64%, E-value=5e-75, Identity=57%"; Hit description =Mahogunin, putative
  Pfam annotation: Domain name=zf-C3HC4; Domain location=186-224; Score= 29.6; E_value=1.2e-05; Accession=PF00097.17; Description=Zinc finger, C3HC4 type (RING finger)
DKKVKNYVNLHKDTIRLEPDAADPDRRLVAFTFDAVTDGSVAIYYFAKEGKDCSFSSVYPELQTPTKIPFQKGLAQRFIQPSGSGVDLGFFSLDELSNSSGEVFPLVVYAEAYPSPEEGGTSVNSTRAQITLAVLEKHNDDLRVKVVKQILWIDGVRYELQEIFGLVNSTETDVADADADDTGKECVICLTEPRDTAVMPCRHLCLCSECAKTLRFQSNKCPICRQPVEKLMEIRVRGPEP

SEQ ID NO: 86996 - protein, 99 aa, Setaria italica
  misc_feature (25)..(25): Xaa can be any naturally occurring amino acid
  Transcript Sequence Number=SeqID_21022
LDKRVGVRVQLLTDAFPWQGLVPTXFSQKRCVPQIHQENLFTRKKVLMFLDGIYYCSPLIEFFQGLKEAATWISFWPQPTHQHNTTTGAESMLQSHAVP

SEQ ID NO: 86997 - protein, 103 aa, Setaria italica
  Transcript Sequence Number=SeqID_21023
  Subcellular localization annotation: CTP_CleavageSite=10; ConfidenceScore=5.27e-01
EPALSRRRARAATATPTGAGATPPAAADWRLPPRPSAQPAGQVANAASVIPSGVAEPRPGPRPPAARTAEPPSAPPPPRIRPLLPAAASPRLRPSTPADLIPR

SEQ ID NO: 86998 - protein, 132 aa, Setaria italica
  misc_feature (44)..(44): Xaa can be any naturally occurring amino acid
  Transcript Sequence Number=SeqID_21024
  Homolog annotation: Hit_ID=B6TQ15; Match level="QueryCoverage=81%, HitCoverage=41%, E-value=6e-41, Identity=73%"; Hit description =Protein CCC1
  Pfam annotation: Domain name=DUF125; Domain location=2-128; Score =62.3; E_value=1.8e-15; Accession=PF01988.11; Description=Integral membrane protein DUF125
RSCRRYGLEPHEYGPVIDGLRRNPQAWLEFMMRFELGLEKPDPXRALQSACTIALSYVIGGLVPLLPYMFISTAQNAMLTSVGVTLVALLFFGYIKGRFTGNRPFTSAVQTAIIGALASAAAYGMAKAVQAR

SEQ ID NO: 86999 - protein, 91 aa, Setaria italica
  Transcript Sequence Number=SeqID_21025
  Gene Ontology: Mol. function=RNA-directed DNA polymerase activity
  Homolog annotation: Hit_ID=Q2QRF1; Match level="QueryCoverage=89%, HitCoverage=7%, E-value=1e-27, Identity=66%"; Hit description =Transposon protein, putative, CACTA, En/Spm sub-class
GTIMDIPDKTKDNVKARVDQARLCNRPKLNMAPPRAGKSWRKPKADFVLTRVQRREVLEWFQTLMFPDGYATNLKRGVNLATYCVIQRAQE

SEQ ID NO: 87000 - protein, 429 aa, Setaria italica
  misc_feature (22)..(22): Xaa can be any naturally occurring amino acid
  Transcript Sequence Number=SeqID_21026
  Gene Ontology: Mol. function=nucleotide binding; Biological process =defense response
  Homolog annotation: Hit_ID=Q6Z010; Match level="QueryCoverage=66%, HitCoverage=44%, E-value=5e-53, Identity=43%"; Hit description =Disease resistance protein RPM1-like
KLGLNLLYSSHSDGSDGLKQIXLNLSFNDLQPHLRTCLLYLSIFPENSEVDTERLVRRWIAEGFIAEGRNISAQETALGYLNELIVRNLVQPLDLNHDDAPRRCRVHPVIHDFIVCKSMEENFATLMDSQHVPNNGTTVRRLSLKNSSKKHQPAARNESTDLSHARSITVFGHASAAPSLNDLKVVRVLDLEGCDGPVCLDGLCKLVLLRYLSLKGTDASELPPAIGDLRCLETLDVRFTKVKELPPSIVRLEKLMHLLAGSAKLPGGIAEMKALQTLSCGGTTKGSVKFIEGISKQDKLRELELYFDATETHEKRVKFPACGFRSVKKLCIQCSSPSVTFEPNALPAIQVLELRFQKGLADQSSGVSGIEHLSSLKHVLLEFEKHDAGAMATVDAVRNSAQRVLPDQYITIKVDGNLRGATNTLQSIE

SEQ ID NO: 87001 - protein, 121 aa, Setaria italica
  Transcript Sequence Number=SeqID_21027
  Gene Ontology: Mol. function=translation initiation factor activity
  Homolog annotation: Hit_ID=B6TE93; Match level="QueryCoverage=76%, HitCoverage=42%, E-value=9e-31, Identity=78%"; Hit description=GTP binding protein
  Subcellular localization annotation: CTP_CleavageSite=62; ConfidenceScore=5.60e-01
GDAADAAAGKAKPLLSVRRHVSLKASSKTLAHVTPMASAATSAAFVVEGSYGRRACAVRDARGDAVAEVRRKESVGDDVFRLVADPRLGAPLAMGLVIALDEMFAGGRGSARSLLRRTWSA

SEQ ID NO: 87002 - protein, 164 aa, Setaria italica
  Transcript Sequence Number=SeqID_21028
  Gene Ontology: Mol. function=metal ion binding; Cellular component =integral to membrane; Biological process=establishment of protein localization
  Homolog annotation: Hit_ID=B4FNS6; Match level="QueryCoverage=93%, HitCoverage=48%, E-value=1e-35, Identity=54%"; Hit description =Palmitoyltransferase ZDHHC20
  Pfam annotation: Domain name=zf-DHHC; Domain location=1-46; Score =39.4; E_value=1.4e-08; Accession=PF01529.12; Description=DHHC zinc finger domain
SFTRFLDHAGNRCVLKMDHHCIWVVNCVGARNYKYFLLFLVYTFAETVLDTLVLLPNFIEFFQDESRRSSSPGDIAILFLAFVLNLAFVLSLLCFIGMHTSLVTSNTTSIEVYERKKSVSWKYDLGWRRNLEQVFGTKKLFWFVPLYSAEDLHNIPALGGLEFP

SEQ ID NO: 87003 - protein, 316 aa, Setaria italica
  Transcript Sequence Number=SeqID_21029
  Gene Ontology: Mol. function=nucleotide binding; Biological process =defense response
  Homolog annotation: Hit_ID=Q2QZF2; Match level="QueryCoverage=98%, HitCoverage=31%, E-value=1e-56, Identity=43%"; Hit description =Leucine Rich Repeat family protein
  Pfam annotation: Domain name=LRR_1; Domain location=18-39; Score =12.6; E_value=1.2; Accession=PF00560.25; Description=Leucine Rich Repeat
  Pfam annotation: Domain name=LRR_1; Domain location=41-62; Score =13.1; E_value=0.93; Accession=PF00560.25; Description=Leucine Rich Repeat
  Pfam annotation: Domain name=LRR_1; Domain location=64-85; Score=9.5; E_value=4.6; Accession=PF00560.25; Description=Leucine Rich Repeat
  Pfam annotation: Domain name=LRR_1; Domain location=87-109; Score =4.9; E_value=36; Accession=PF00560.25; Description=Leucine Rich Repeat
  Pfam module annotation: Pfam domain module=LRR_1::LRR_1::LRR_1::LRR _1; Domain location=18-39::41-62::64-85::87-109
QLDTEVAELPREMKNLERLETLDVSRTKVTELPRWIEKLQSLKTLDVSSTKVTELPLEIKNLERLETLDISETLVRELPKEIWQLQHLRTLDIRGTNVRQLSCSKDTNPLLSVVVNMDKLMSPLGVISSSGAEEVISSSSEANCRDDLSILILFNHFGLRCEVLPVRMLRVAGRHMKVPQWVKQDLCNVCSLDITIYKLVHEDLEFLKTQMPNLQALQLRFEVLPREPVAITDGGFSKLETFYVDCRLPRVTFGEGAMPKLKHLEFNFVYTGTVSQDYYMGIKHLDSLEKVVFRCSEYNRSDSPGIRETKFVIVNL

SEQ ID NO: 87004 - protein, 89 aa, Setaria italica
  Transcript Sequence Number=SeqID_21030
  Gene Ontology: Mol. function=DNA binding; Cellular component=nucleus; Biological process=regulation of transcription
  Homolog annotation: Hit_ID=B4FMQ3; Match level="QueryCoverage=80%, HitCoverage=23%, E-value=4e-35, Identity=98%"; Hit description=MYB transcription factor TaMYB1
  Pfam annotation: Domain name=Myb_DNA-bind_2; Domain location=22-76; Score=-4.3; E_value=0.016; Accession=PF08914.3; Description=Rap1 Myb domain
  Pfam annotation: Domain name=Myb_DNA-binding; Domain location=23-68; Score=49.1; E_value=1.7e-11; Accession=PF00249.23; Description=Myb -like DNA-binding domain
  Pfam module annotation: Pfam domain module=Myb_DNA-bind_2::Myb_DNA -binding; Domain location=22-76::23-68
DPGRSGKSCRLRWCNQLSPQVERRPFTPEEDAAILAAHARLGNRWAAIARLLPGRTDNAVKNHWNSSLKRKLSTATTAAAEEEGPEAER

SEQ ID NO: 87005 - protein, 60 aa, Setaria italica
  Transcript Sequence Number=SeqID_21031
NTVDDSRAVFRLQRLQLGLLLKHDAKYTTTWYISCKALKCTLDLLQCNGFVVRCTLVCRS

SEQ ID NO: 87006 - protein, 245 aa, Setaria italica
  Transcript Sequence Number=SeqID_21032
  Gene Ontology: Mol. function=phosphatidylcholine-sterol O -acyltransferase activity; Cellular component=integral to membrane
  Homolog annotation: Hit_ID=A6MH02; Match level="QueryCoverage=33%, HitCoverage=20%, E-value=9e-23, Identity=57%"; Hit description =Hemolysin III-related family protein (Fragment)
MVPCLDELHNHIAVVLCARKKGQGRPLHQPSLQPRGAGELGGGTSPMASSPTTTSSCIPWNGGADDGKKEKQSKKCELIGYEALPEWLKDNEFIHGYYRCEWPMKETILSIFSIHNETLNVWSHLIGFLLFLCLTIFTAMVIPRDGNNNSSWSSSGSRAAYWGDLVEMANMTVALRHEALAACFLLPPSAAAEAGLSEDGQQIPTSCPPNTSSSHVHHGIQIQVLVKFLSFLCLLINNQYVLFSL

SEQ ID NO: 87007 - protein, 62 aa, Setaria italica
  Transcript Sequence Number=SeqID_21033
  Gene Ontology: Cellular component=integral to membrane
IRQRLHLQDTNGTATDALVAAGAAGEPVTRWPLFAYLAGAMVCLLTSSACHLILCHSERTAY

SEQ ID NO: 87008 - protein, 133 aa, Setaria italica
  Transcript Sequence Number=SeqID_21034
  Gene Ontology: Mol. function=electron carrier activity; Biological process=oxidation reduction
  Homolog annotation: Hit_ID=Q6K5G7; Match level="QueryCoverage=78%, HitCoverage=21%, E-value=2e-15, Identity=43%"; Hit description =Putative cytochrome P450 71D8 (P450 CP7)
REELLKCVAQAVKIGSGFNACDLFPSSRLVCAIDGTVRKARAFTRKTFELVDYAIEQHRERRSGASATDVAEDEDLLGVLLRTQEEGGFGCPLDVGDIKAILAVSTLFFRDSLIYIYISVYCIYLSLINHRFH

SEQ ID NO: 87009 - protein, 444 aa, Setaria italica
  Transcript Sequence Number=SeqID_21035
  Gene Ontology: Mol. function=serine-type carboxypeptidase activity; Cellular component=extracellular region; Biological process =proteolysis
  Homolog annotation: Hit_ID=B9SJ52; Match level="QueryCoverage=91%, HitCoverage=91%, E-value=1e-124, Identity=53%"; Hit description =Vitellogenic carboxypeptidase, putative
  Pfam annotation: Domain name=Peptidase_S10; Domain location=30-428; Score=396.8; E_value=3.8e-116; Accession=PF00450.14; Description =Serine carboxypeptidase
  Subcellular localization annotation: CTP_CleavageSite=47; ConfidenceScore=5.13e-01
MAPASPVVVLVFFAVTVPLSAAAGATLVFPKEALPTKSGYLPIPPANASLFFAFYEATQPLTAPASTPLLLWLQGGPGCSSLLGNFFELGPYFVTPDAETLSPNPFAWNRRFGLLFIDSPLGTGFSAAPSPADIPTNQSVIAAHILAALQSFLALDPSFHARPFFLAGESYAGKYVPATGAHILDVNPTLPEARRVNLRGVAIGNGLTHPVAQVATHADSAYFTGLINARQKRELEELQAEAVALTRAERWREASDARGRVLSRLQNMTGLATLYDAAKQRPYQTEPVAAFLNRAEAKAALGARGDVAWEECSDAVGAAMHADVMRSVRPEAESLLRRTRVLLYQGVRDLMDGVVSTEAWLGGVGWHGLHAFLDADRAVWRTRGDGELAGYVQCSGALSHAVVYGAGHLVPADNGRAAQEMIEDWVLQAGPFGRRGGDGLRCAA

SEQ ID NO: 87010 - protein, 88 aa, Setaria italica
  Transcript Sequence Number=SeqID_21036
  Gene Ontology: Mol. function=transferase activity, transferring glycosyl groups; Biological process=metabolic process
  Homolog annotation: Hit_ID=B6TY52; Match level="QueryCoverage=97%, HitCoverage=17%, E-value=3e-18, Identity=60%"; Hit description =Cytokinin-O-glucosyltransferase 2
MAAADPMAPHALLLPYPAQGHVIPLMELAHRLLDRGFAVTFVNTEFNHRRVVGAAAAGASSSAGGRRLRLVGVADGMDDGEDRDNLLR

SEQ ID NO: 87011 - protein, 131 aa, Setaria italica
  Transcript Sequence Number=SeqID_21037
RLPPGSAAAEEEEEDDGGGEAVGGRAAAPGHGRRRGLRRRFRGPPDKGDEEEEDGCLWRRRQRRRGGHGRPPQGGGGGGGGHNRGGGQERLLRSIQRSMEVPALRLDAPLEWSMHRLYPQPSRILPNYEEY

SEQ ID NO: 87012 - protein, 48 aa, Setaria italica
  Transcript Sequence Number=SeqID_21038
PTSIYCPVHTVLPNVVPKYSVGKKQFCCVVFLCNYDSDLCQPARRCFE

SEQ ID NO: 87013 - protein, 145 aa, Setaria italica
  Transcript Sequence Number=SeqID_21039
HSRQGWGIAHLTDAEKLGGGRYAASMHCQICHPHTSDWSVAVQKKKANQERTSGYIAHWSAQASELLTVRNRRATSPRPASELAGDGLQRRHEQLWVSASVERPPGTRFGAGELDLEDLHRRRERREVGAGAEEALRELDLERRT

SEQ ID NO: 87014 - protein, 261 aa, Setaria italica
  Transcript Sequence Number=SeqID_21040
  Homolog annotation: Hit_ID=B6T9D3; Match level="QueryCoverage=33%, HitCoverage=28%, E-value=1e-13, Identity=46%"; Hit description=RNA binding protein
VDFIQPREFHISCLRIPHAYHSKQLTVADRVSELSKPVRLVNHSSHHSKFVMEQDHRAYEDDDHNTKRKAANFCASTSARTVKRKLEASTMPPSDLVRRTGKKQKVAAYEVRQVTKNVLPLKMSARNDIGGDRFCRPLSGKCNDLAKSNNTKRKPDCKVLPSSEIPLHIREENECSVASCSVNYMEYCTNDDEQSVRICGCFPDDAMSACPSMSAQENNDDNGSGLHMNIHELELQAYQSTVRAFHAAGPLTWEQESLLTN

SEQ ID NO: 87015 - protein, 216 aa, Setaria italica
  Transcript Sequence Number=SeqID_21041
  Gene Ontology: Mol. function=heat shock protein binding
  Homolog annotation: Hit_ID=Q2R250; Match level="QueryCoverage=71%, HitCoverage=24%, E-value=6e-10, Identity=35%"; Hit description=DnaJ domain containing protein, expressed
MFSRQKHGVCNPQFQNSKLHKTGGNVDSEPMMHAEEMDEHVEWDCRPDGDQEGSCTGTRSEVVESSTINLIHSPAPSVNKCTSRMMPDPPDPYFVATQHMSREDASTTLNTAGSDSLVRSGKRKQDDGADNCHSRDSCNNKRKRVEKYNSLSDADSGDDKISSVNVAGADSQSAKNHLSKVDSQGDGDAMRKGNANSSDDKIFDDNVAGADSQSAE

SEQ ID NO: 87016 - protein, 131 aa, Setaria italica
  Transcript Sequence Number=SeqID_21042
  Gene Ontology: Mol. function=electron carrier activity; Biological process=electron transport chain
  Homolog annotation: Hit_ID=B6T2E5; Match level="QueryCoverage=71%, HitCoverage=71%, E-value=5e-35, Identity=76%"; Hit description =Chemocyanin
  Pfam annotation: Domain name=Cu_bind_like; Domain location=46-124; Score=119.5; E_value=1.1e-32; Accession=PF02298.9; Description =Plastocyanin-like domain
MARGRGRASGGGLAAALLIIALLVATSSAPIAEAAASHMVGDYGGWKFNVDRWTKGRTFRAGDQLVFRYNRAVHDVAVVDAAAYRSCVVPRGAKVLRSGRDKVRLGRGTHYFVCTVRGHCQAGMKIAVRAV

SEQ ID NO: 87017 - protein, 89 aa, Setaria italica
  Transcript Sequence Number=SeqID_21043
  Homolog annotation: Hit_ID=Q852E1; Match level="QueryCoverage=39%, HitCoverage=9%, E-value=6e-11, Identity=91%"; Hit description =Putative regulatory protein
PTSPPSSTGNSTASTDDLRLASSADSGVADGDGDGDVVSATPAPAPAPVEAASPWGDLEEVLRRAATKDRTVIMTQINAAWTRPGSLLD

SEQ ID NO: 87018 - protein, 449 aa, Setaria italica
  Transcript Sequence Number=SeqID_21044
  Gene Ontology: Mol. function=protein binding
  Homolog annotation: Hit_ID=B6TRN2; Match level="QueryCoverage=95%, HitCoverage=85%, E-value=0.0, Identity=75%"; Hit description =Nucleotide binding protein
  Pfam annotation: Domain name=WD40; Domain location=1-39; Score=30.6; E_value=6.4e-06; Accession=PF00400.24; Description=WD domain, G-beta repeat
  Pfam annotation: Domain name=WD40; Domain location=142-181; Score =7.4; E_value=5.2; Accession=PF00400.24; Description=WD domain, G -beta repeat
  Pfam annotation: Domain name=WD40; Domain location=273-312; Score =14.6; E_value=0.41; Accession=PF00400.24; Description=WD domain, G -beta repeat
  Pfam annotation: Domain name=WD40; Domain location=316-354; Score =25.0; E_value=0.0003; Accession=PF00400.24; Description=WD domain, G- beta repeat
  Pfam annotation: Domain name=WD40; Domain location=44-84; Score=18.1; E_value=0.037; Accession=PF00400.24; Description=WD domain, G-beta repeat
  Pfam annotation: Domain name=WD40; Domain location=90-129; Score =13.0; E_value=1.1; Accession=PF00400.24; Description=WD domain, G -beta repeat
  Pfam module annotation: Pfam domain module=WD40::WD40::WD40::WD40::WD4 0::WD40; Domain location=1-39::142-181::273-312::316-354::44-84::90 -129
LQLHRKLERHTGCVNTVGFNDAGDTLISGSDDQMVMLWDWATGANKLEFHSGHGGNVFQARFMPGTDDRTIVTCGADGEVRLAKIQDGGDVSTTLLGEHEGRAHNVAVEPGSPYIFYSCGEDGLVQHFDLRTSTATKLLLCRSSVRKSGFSCVHLNAIAIDPRNPNLFAVGGSNAYARVYDIRKHKWDGSSDFGHPSDCYCPSHLVDDKHVGITGLAFSHLSELLVSYNEENIYLFPKNGGLGSDPKSSIKIGVNEGCKSTMAASGQDIAQPAPQVYVGHRNRETVKRVTFIGPNDEYVASGSDCGRIFIWRKRDGRFLRAMEGDECVVNCIEPHPHDMTIASSGIDNDVKMWTPSAIERAPVVNVEELRPRKRRAKLWHFDLPELLIRHLLASQRRQQSAEEEDSSEDLEDRLDSTGLLNLVLRAADRGLSSADDEESSDGSEECSLN

SEQ ID NO: 87019 - protein, 102 aa, Setaria italica
  Transcript Sequence Number=SeqID_21045
  Homolog annotation: Hit_ID=Q8LSP0; Match level="QueryCoverage=66%, HitCoverage=10%, E-value=3e-10, Identity=52%"; Hit description =Putative WD-40 repeat protein
IFTIYLSTFLVWLLPVVNVEELRPRKRRAKLWHFDLPELLIRHLLASQRRQQSAEEEDSSEDLEDRLDSTGLLNLVLRAADRGLSSADDEESSDGSEECSLN

SEQ ID NO: 87020 - protein, 135 aa, Setaria italica
  misc_feature (4)..(4): Xaa can be any naturally occurring amino acid
  Transcript Sequence Number=SeqID_21046
  Gene Ontology: Mol. function=transketolase activity; Cellular component=chloroplast; Biological process=metabolic process
  Homolog annotation: Hit_ID=Q7SIC9; Match level="QueryCoverage=100%, HitCoverage=20%, E-value=1e-63, Identity=84%"; Hit description =Transketolase, chloroplastic
HWSXHVPQGDALEADWNAKFAEYEKKYPEDAATLKIIISGELPADWVDVLPKYTQASPADATRNLSQQCLNALAKVLPGLLGGSADLAPSNMTLLKMFGDFQRDTPEERNVRFGVREHGMGAICNGIALHSPGLV

SEQ ID NO: 87021 - protein, 88 aa, Setaria italica
  Transcript Sequence Number=SeqID_21047
  Homolog annotation: Hit_ID=Q7XIX9; Match level="QueryCoverage=79%, HitCoverage=18%, E-value=2e-10, Identity=59%"; Hit description =Putative transcription factor PCF6
GGGRAAPTTSSAQAASFTELLTGMAAATAAAGSAPADHKQQQSPPWQPMAAPAIADYIGFAQPRKAAGHAIAHSFASPAPHLANIAPI

SEQ ID NO: 87022 - protein, 120 aa, Setaria italica
  Transcript Sequence Number=SeqID_21048
  Gene Ontology: Biological process=response to stress
  Homolog annotation: Hit_ID=Q942D4; Match level="QueryCoverage=66%, HitCoverage=18%, E-value=2e-29, Identity=80%"; Hit description=BURP domain-containing protein 3
  Subcellular localization annotation: CTP_CleavageSite=47; ConfidenceScore=5.22e-01
GVGVNVNPGSGKPGGTTVGVGKGGVGVNVKPRGKPVHVNVSPFRYNYAATETQLHDDPSVALFFQEKDLHAGKKVTVQFTGTAGAGTKFLPRSEAEAIPFSSEKVPEILSRFSVNPDFRS

SEQ ID NO: 87023 - protein, 364 aa, Setaria italica
  Transcript Sequence Number=SeqID_21049
  Gene Ontology: Biological process=response to stress
  Homolog annotation: Hit_ID=Q942D4; Match level="QueryCoverage=67%, HitCoverage=56%, E-value=1e-115, Identity=83%"; Hit description=BURP domain-containing protein 3
  Pfam annotation: Domain name=BURP; Domain location=145-363; Score =466.3; E_value=4.5e-137; Accession=PF03181.7; Description=BURP domain
  Subcellular localization annotation: CTP_CleavageSite=68; ConfidenceScore=5.43e-01
TFNPGYGKPGGTTVGVGKGGVGVNVNPGKPSGTTVGVGKGGVGVNVNPGYGKPGGTTVGVGKGGVGVNVSPGKPGGTTVGVGKGGVGVGVNPGYGKPGGTTVGVGKGGVGVNVKPRGKPVHVNVSPFRYNYAATETQLHDDPSVALFFQEKDLHAGKKVTVQFTGTAGAGTKFLPRSEAEAIPFSSEKVPEILSRFSVNPDSVEAAEMAQTLRDCEAPAARGEKKACATSHESMVDFATSSLGTSHVRAVSTVVAKPGSPKQEYTVAGVKRAAGTGDDGRLVACHAEPYAYAVFMCHLTRQTRAYSVSMVGRDGTAVDAVAVCHADTSGWNPKHVAFQVLDVKPGTVPVCHFLPQDHVVWTRSG

SEQ ID NO: 87024 - protein, 274 aa, Setaria italica
  Transcript Sequence Number=SeqID_21050
  Gene Ontology: Mol. function=oxidoreductase activity; Biological process=oxidation reduction
  Homolog annotation: Hit_ID=B6TAE7; Match level="QueryCoverage=99%, HitCoverage=100%, E-value=1e-123, Identity=79%"; Hit description =Tropinone reductase
  Pfam annotation: Domain name=Epimerase; Domain location=24-254; Score= -60.4; E_value=0.013; Accession=PF01370.13; Description=NAD dependent epimerasedehydratase family
  Pfam annotation: Domain name=KR; Domain location=23-205; Score=-43.4; E_value=0.00019; Accession=PF08659.2; Description=KR domain
  Pfam annotation: Domain name=NAD_binding_4; Domain location=26-242; Score=-97.9; E_value=0.013; Accession=PF07993.4; Description=Male sterility protein
  Pfam annotation: Domain name=adh_short; Domain location=22-190; Score= 131.7; E_value=2.3e-36; Accession=PF00106.17; Description=short chain dehydrogenase
  Pfam module annotation: Pfam domain module=Epimerase::KR::NAD_binding_ 4::adh_short; Domain location=24-254::23-205::26-242::22-190
MAAAETSGTAIGSSGRWALHGKTALVTGGTRGIGRAVVEELAALGAAVHTCSRKEEELGERIKEWEARGFRVTGSVCDLSARDQRERLLREVADRFGGKLDILVNNVGTNIRKPTTEFSAEEYSFLMATNLESAYHLCQIAHPLLKLSGSGSIVFISSVAGVVSVFSGTIYAMTKGAINQLTKTLACEWARDNIRANSVAPWYITTSLTEKLLESNSFKEQVVSRTPLGRVGEPGEISALVAFLCMPGSTYITGQTISVDGGTTVNGFCPTKPF

SEQ ID NO: 87025 - protein, 83 aa, Setaria italica
  Transcript Sequence Number=SeqID_21051
CSSVCYLKVDGILRHILTVHFCCYLVSTSITHSCNSPGNISFFMLLRILIFGDELRIDKRFQWDQICFLCSCCFSDLSKIRST

SEQ ID NO: 87026 - protein, 104 aa, Setaria italica
  Transcript Sequence Number=SeqID_21052
PTKNWKSLDSLEKSVQFVLCAVAGAGLAVWFPYAISEPEFSQGTRWSLRLFLSWRFEKTRAHFLRELVILFGGVEIHNFVTETLELAKYLSITIRHYPDSLHIS

SEQ ID NO: 87027 - protein, 54 aa, Setaria italica
  Transcript Sequence Number=SeqID_21053
LKEKKTKTTCILKWREYFITNRHSFAAIHLIPILHTNNLNMISSTATSIETENG

SEQ ID NO: 87028 - protein, 169 aa, Setaria italica
  misc_feature (29)..(29): Xaa can be any naturally occurring amino acid
  Transcript Sequence Number=SeqID_21054
  Gene Ontology: Mol. function=RNA-directed DNA polymerase activity; Cellular component=exocyst; Biological process=RNA-dependent DNA replication
  Homolog annotation: Hit_ID=Q1KSC2; Match level="QueryCoverage=59%, HitCoverage=6%, E-value=1e-42, Identity=81%"; Hit description =Putative non-LTR retroelement reverse transcriptase
PKWCRWIENFVSGGSVGIKVNDDIGHYFXKKSLRQGDPISPILFNIVADMLSILIKRAKEDGQIRGVIPHLVDDGLSILQYADDTIIFMDHDLEQAKNTKGGARCNSYGITVKHVVRWWRYPAIDGCFSAVSCFVIELLVSCVSLLSVLYPGVVSLCSCSSGCSMAQRL

SEQ ID NO: 87029 - protein, 143 aa, Setaria italica
  Transcript Sequence Number=SeqID_21055
  Gene Ontology: Cellular component=plasma membrane
  Homolog annotation: Hit_ID=Q25A81; Match level="QueryCoverage=70%, HitCoverage=45%, E-value=3e-30, Identity=62%"; Hit description =H0413E07.1 protein
CLPSSAQVSILINITIIVTSDTCVAMEEWVAHPIEHTALDEIIPCVEPATANESLYRSRQVTFQLVNLVNQVITNVSNQNFPSPPPVATPFYYNQSGPLMPLLCNPFTPDLSNRTCTRGEVTLDNATQVNSGQSISPLCNVIA

SEQ ID NO: 87030 - protein, 416 aa, Setaria italica
  misc_feature (2)..(2): Xaa can be any naturally occurring amino acid
  Transcript Sequence Number=SeqID_21056
  Gene Ontology: Cellular component=plasma membrane
  Homolog annotation: Hit_ID=Q25A81; Match level="QueryCoverage=49%, HitCoverage=95%, E-value=3e-73, Identity=59%"; Hit description =H0413E07.1 protein
SXAAYALSLILLILFTCAAITGCIMLYDGQGKFHKSTTHTLKFVVSQANYTVDNLRNLSDSLSAAKKVDIGRFLLPSDMQSQIDEIQAKLNSSATDLAIKTTDNAAKIKKLLNQVRLALIIIAAVMLLLAFIGFVLSIFGLEFLVSVLVVIGWILVTGTFILCGVFLLLHNVTSDTCVAMEEWVAHPIEHTALDEIIPCVEPATANESLYRSRQVTFQLVNLVNQVITNVSNQNFPSPPPVATPFYYNQSGPLMPLLCNPFTPDLSNRTCTRGEVTLDNATQVYKSFECQTTTVSGAEICTTVGRVTPRIYGQMAAGVTVSQGLYQYGPFLIQLEDCTFVRDTFTTINQDYCPGLQRYSKWVYIGLVMVSAAVMLSLIFWVIYARERRHRVYNKQFIAQHQQYPVEDKPAPTAPHA

SEQ ID NO: 87031 - protein, 267 aa, Setaria italica
  misc_feature (142)..(142): Xaa can be any naturally occurring amino acid
  misc_feature (160)..(160): Xaa can be any naturally occurring amino acid
  Transcript Sequence Number=SeqID_21057
  Gene Ontology: Mol. function=nucleoside-triphosphatase activity; Cellular component=integral to membrane; Biological process=transport
  Homolog annotation: Hit_ID=B9HET0; Match level="QueryCoverage=82%, HitCoverage=39%, E-value=3e-71, Identity=56%"; Hit description=White- brown-complex ABC transporter family (Fragment)
  Pfam annotation: Domain name=ABC2_membrane; Domain location=2-165; Score=80.6; E_value=5.8e-21; Accession=PF01061.16; Description=ABC-2 type transporter
KVAERVGLFAFLLTFLLSSTTEALPIFLQEREILAKETSSGAYRVSSYALANAVVFLPFQLALAVVFAAPVYWLAGLRRTAAAFGYFLLVVWLILYTANSVVVCFAAAAPDFVVGNAAIQGVMGSFFLFSGYFIARSAMPGXWVFMHYLSLFKWPFEALXLVNEFAGGGRCVVRALGSCVATGDEVLRREGLGEECRWRNVGVMVAFMASYRLLGYAVLRIRCTLALNRGAMADISLGRRLKSQLAIVGAAASSSATTPSVSLAAAR

SEQ ID NO: 87032 - protein, 154 aa, Setaria italica
  Transcript Sequence Number=SeqID_21058
  Subcellular localization annotation: CTP_CleavageSite=18; ConfidenceScore=5.16e-01
VAPRDSPTRHAPTGDAASCVHTSTWFPFLILIAPRRRRRAHRLFALLGRFLDSPSHQGVRNPQEDQPPRSVELYRSSSRRLHLRPGSRVLGRLRFDPEARLAYGRIWTRNGSEHEAIRKKEKRNRQEKMHAKRREDVPACRFRRFRRITTAAQQ

SEQ ID NO: 87033 - protein, 268 aa, Setaria italica
  Transcript Sequence Number=SeqID_21059
  Gene Ontology: Mol. function=structural constituent of ribosome; Cellular component=intracellular; Biological process=translation
  Subcellular localization annotation: CTP_CleavageSite=48; ConfidenceScore=5.08e-01
MDAGGGVGGGAGVGAATAGGSSYGLVRTVVGYSTSPLFFWLLTVVLVAAIHIASGSKPSRSDEKERDEKKKARRDGFAAAEEREASGRGDDRVLEMMRSFSFVQATEEDFMEGMAAYEYSRVDAGAEHEQYNRVDAGTAHELVEPEPFAPAPAPSLSFKFQHQIAEIPREAAAKHEHEDEAEETELLLEEHVEEQRREVVEQAAPSKVVSTTHNYQFLTERDFRGFIREPEAMTVRVQEAFMPPSPTPSPPLPQQHEEVWGANIRPPH

SEQ ID NO: 87034 - protein, 168 aa, Setaria italica
  Transcript Sequence Number=SeqID_21060
  Gene Ontology: Mol. function=DNA binding; Cellular component=nucleus; Biological process=regulation of transcription, DNA-dependent
  Homolog annotation: Hit_ID=B0KYV1; Match level="QueryCoverage=84%, HitCoverage=39%, E-value=3e-39, Identity=58%"; Hit description=TCP domain-like protein I
  Pfam annotation: Domain name=TCP; Domain location=57-150; Score =151.2; E_value=3.1e-42; Accession=PF03634.5; Description=TCP family transcription factor
MDVSGDAGGGRRPNFPLQLLEKKEEQPCSTSPAAGVGAGAGANGAAGPGELQVRKLAPPKRTSTKDRHTKVDGRGRRIRMPAICAARVFQLTRELGHKTDGETIEWLLQQAEPAVIAATGTGTIPANFTSLNISLRSSGSSFSIPAHLRAPGLPGTRFGGARGDPWDR

SEQ ID NO: 87035 - protein, 131 aa, Setaria italica
  misc_feature (14)..(14): Xaa can be any naturally occurring amino acid
  Transcript Sequence Number=SeqID_21061
  Gene Ontology: Cellular component=nucleus; Biological process=DNA replication
  Homolog annotation: Hit_ID=B6U9B6; Match level="QueryCoverage=70%, HitCoverage=98%, E-value=9e-32, Identity=69%"; Hit description=Delta DNA polymerase
  Pfam annotation: Domain name=DNA_pol_delta_4; Domain location=4-128; Score=1.8; E_value=2.3e-05; Accession=PF04081.5; Description=DNA polymerase delta, subunit 4
  Subcellular localization annotation: CTP_CleavageSite=45; ConfidenceScore=5.21e-01
MASSGMKDFYRQKXKGGVTKASSSSKKKTQQYTGGASVGAPDTAQTSALVSHGSWDLKDDFGDQEEQLRQFDMDTKFGPCIGVSRLQRWERASAMGLQPPAHLRDLLLRIPSTKNRSDSTPSVECLWEGKV

SEQ ID NO: 87036 - protein, 181 aa, Setaria italica
  Transcript Sequence Number=SeqID_21062
  Homolog annotation: Hit_ID=B6TBE4; Match level="QueryCoverage=96%, HitCoverage=42%, E-value=2e-30, Identity=41%"; Hit description=F-box domain containing protein
FKVWLLNGNMQSNGFLYWVYKNHKYIITLNTATMRFSVEELPQFLKNRCCSFDVGETNSGERCIVYAVDFTIGVMLRRTDSDGVEKWMLYRATPLDTQLDGVLRKLKGNYNELLVVAVRDGFAYLATSKNVYDPQNPSWFLSLCLETMKLENLFQRPYNSGGHPYVMAWPPCLVRNYGRLA

SEQ ID NO: 87037 - protein, 217 aa, Setaria italica
  Transcript Sequence Number=SeqID_21063
  Gene Ontology: Mol. function=molecular_function; Cellular component =integral to membrane; Biological process=oxygen and reactive oxygen species metabolic process
  Homolog annotation: Hit_ID=B6SUV8; Match level="QueryCoverage=100%, HitCoverage=100%, E-value=3e-91, Identity=76%"; Hit description =Mpv17 protein
  Pfam annotation: Domain name=Mpv17_PMP22; Domain location=128-195; Score=86.6; E_value=9.1e-23; Accession=PF04117.4; Description=Mpv17 PMP22 family
MRRLWRWYQQCLASHPVRTQVVSSGILWGLGDIGAQAVTHHYSARRANNPPEDKDKDKEFKVDWRRVGITSSFGFAFVGPVGHYWYEYLDRIIRRRFQPNTFKFVASKVAADGFLFGPLDLLLFFSYVGLGQGRSVEQVKEDVKRDFIPALVVGGTIWPAVQIANFRFIPVRYQLLYVNVFCLFDSCCLSWIEQQGDASWKRWFTSFRKIEDHKSKV

SEQ ID NO: 87038 - protein, 223 aa, Setaria italica
  Transcript Sequence Number=SeqID_21064
  Gene Ontology: Mol. function=hydrolase activity, hydrolyzing N -glycosyl compounds; Biological process=nucleotide-excision repair
  Homolog annotation: Hit_ID=B9RVA4; Match level="QueryCoverage=48%, HitCoverage=27%, E-value=2e-36, Identity=63%"; Hit description =Formamidopyrimidine-DNA glycosylase, putative
  Pfam annotation: Domain name=H2TH; Domain location=1-63; Score=42.2; E_value=9.4e-10; Accession=PF06831.6; Description=Formamidopyrimidine -DNA glycosylase H2TH dom
LDQSFISGIGNWIADEVLYQSRIHPLQIASNLSRDGCEALHRSIQEVVKYAVEVDADLERFPKEWLFHHRWGKKPGTVNGKKIEFITAGGRTTAYVPQLQKLTGTQSSKMIAANLEQLAENGDAKDLDTDGEDADNLKPKKRAATSRAARGQQNKDTIGASSRKARGSGGGSKKPGTHVEAGELKTAVTDSNGEQGLDQANSNAVNKSDQVTRRSSRKVKPRK

SEQ ID NO: 87039 - protein, 263 aa, Setaria italica
  misc_feature (238)..(238): Xaa can be any naturally occurring amino acid
  Transcript Sequence Number=SeqID_21065
  Gene Ontology: Mol. function=serine-type endopeptidase activity; Cellular component=cell wall; Biological process=negative regulation of catalytic activity
  Homolog annotation: Hit_ID=B6SWW5; Match level="QueryCoverage=97%, HitCoverage=31%, E-value=1e-123, Identity=84%"; Hit description=SLP3
  Pfam annotation: Domain name=DUF1034; Domain location=176-263; Score =38.6; E_value=2.4e-08; Accession=PF06280.4; Description=Domain of Unknown Function (DUF1034)
LSGWVWSPTLYNSAPQVALFSSRGPDVKDFSFQDADVLKPDILAPGNLIWAAWAPNGTDESNYAGEGFAMVSGTSMAAPHIAGIAALIKQKNPKWSPSAIKSALMTTANTLDKGSHPLRAQQYTTSEMMTLSRATPFDCGSGAVNPKAALDPGLVLDATHEDYITFLCSIPDVNHSEVSNIAGASCNSSSKGQRPYDLNIPSITISQLRGTVTVKRTVTSVSEETETYTIMTRMPPEXALDVTPAALTVLPGASRDITVTLTA

SEQ ID NO: 87040 - protein, 56 aa, Setaria italica
  Transcript Sequence Number=SeqID_21066
HRRAAASVEEGIEALQFYSKEVSRRLLDFVKSRAADAKAEAPSEEAAPAAAEGEAA

SEQ ID NO: 87041 - protein, 364 aa, Setaria italica
  misc_feature (87)..(87): Xaa can be any naturally occurring amino acid
  misc_feature (177)..(177): Xaa can be any naturally occurring amino acid
  misc_feature (213)..(213): Xaa can be any naturally occurring amino acid
  Transcript Sequence Number=SeqID_21067
  Gene Ontology: Mol. function=receptor activity
  Homolog annotation: Hit_ID=B6T6I2; Match level="QueryCoverage=90%, HitCoverage=80%, E-value=2e-50, Identity=38%"; Hit description=F-box domain containing protein
  Pfam annotation: Domain name=F-box; Domain location=42-89; Score =43.8; E_value=6.8e-10; Accession=PF00646.25; Description=F-box domain
MLSNKAAASGRSGGGIRIGRLQLRPAIPIVPGGRGKRQRRAAVVPLLPDDALVEILSRVPAKSLCRFKCVSRAWRDLIADRLRCKKXLPQTLAGFFVNDGDEIHGGDSDDDGSDRVVGRFINTLGRFVPLASVSFLGNQPGIEEFGFLRSCNGLLLFGHRRAGDTYDSLGYIVCNPXTEQWVAVPSSGFKPLPLFDEGEDPGSDSDNEIGCAXTYLIFDPAVSLHFQLVEFISDDCVCVEEVRAYSSETGVWCDSDWSSDCGISFFAGSAIVNGMLHLSVTSFDTHQDLILAVNGEGKDCRSLSGPGKRFDVAFVGESQGLVHCMSQHKDNTRQITELSIWVLRDYDAEEWVLKHSVDFFKLFG

SEQ ID NO: 87042 - protein, 58 aa, Setaria italica
  Transcript Sequence Number=SeqID_21068
VDDQNNFISTTGAYTGLNQHIQNKAILLKSKSYDNRNSILFLPIGDLRTYRIQSTDPK

SEQ ID NO: 87043 - protein, 75 aa, Setaria italica
  Transcript Sequence Number=SeqID_21069
  Gene Ontology: Cellular component=chloroplast
MGNSLRCCLACVLPCGALDLIRIVHLNGRVEEYGRPVAAGEILAANPNHVLSKPCSQGVVRRILIVSPDSELEAT

SEQ ID NO: 87044 - protein, 321 aa, Setaria italica
  Transcript Sequence Number=SeqID_21070
  Gene Ontology: Mol. function=hydrolase activity; Cellular component =peroxisome
  Homolog annotation: Hit_ID=B6T857; Match level="QueryCoverage=100%, HitCoverage=98%, E-value=1e-148, Identity=79%"; Hit description =Epoxide hydrolase 2
  Pfam annotation: Domain name=Abhydrolase_1; Domain location=56-316; Score=84.0; E_value=5.3e-22; Accession=PF00561.12; Description =alphabeta hydrolase fold
  Pfam annotation: Domain name=DLH; Domain location=16-202; Score= -77.3; E_value=0.067; Accession=PF01738.10; Description=Dienelactone hydrolase family
  Pfam module annotation: Pfam domain module=Abhydrolase_1::DLH; Domain location=56-316::16-202
VDGVRHRTVEANGVRLHVAEAGPEGGAAPAVLLLHGFPDLWYGWRHQMAALAARGYRAVAPDLRGYGDSDAPPDASAYTTFHVVGDLVALIADLGQPQVFVVGHDWGAIVAWQLCLLRPDLVRALVNLSVVYHPRRPEGSPLQTIKAACGEDHYMCRFQEPGVAEAEFAQYDAKYIFNKTFGMRKPAPLILPKDKSFFDSLDSDGTCPPWLSEEDISYYAEKFSKTGFTGGFNYYRCMDLNWELSAPWTGAPIKVPTKFIVGDLDITYNTPGVQDYIHKGGFKASVPKLEDVVVMEGVSHFINQEKPSEVSDHICEFFSKF

SEQ ID NO: 87045 - protein, 59 aa, Setaria italica
  misc_feature (40)..(40): Xaa can be any naturally occurring amino acid
  Transcript Sequence Number=SeqID_21071
MGSKKRSPQHPASPVAGEVAGDVGAPPPAGKAAPETAPVXVVPRPPDVAPFLTKVYDMV

SEQ ID NO: 87046 - protein, 79 aa, Setaria italica
  Transcript Sequence Number=SeqID_21072
RAGFSFVCRLSSASGCLLFTSTQYAEAFFLKKKLQLLFFITLVKFLFNEHCSVMNLQRLLQEYLIIKLCCSVRKTVVKT

SEQ ID NO: 87047 - protein, 156 aa, Setaria italica
  misc_feature (25)..(25): Xaa can be any naturally occurring amino acid
  misc_feature (140)..(140): Xaa can be any naturally occurring amino acid
  Transcript Sequence Number=SeqID_21073
  Gene Ontology: Mol. function=protein serine/threonine kinase activity; Biological process=protein amino acid phosphorylation
  Homolog annotation: Hit_ID=Q84SH0; Match level="QueryCoverage=95%, HitCoverage=22%, E-value=2e-34, Identity=53%"; Hit description =Serine/threonine kinase receptor-like protein
QTPLAPAPAPNDLMPTATPGGRMRXKMKIALAIAILVAAVMLAITIFCLCFLRRRRLAREHEPSYSTKPEDIEGIGSLLLDLSTIRAATDNFAESNWVGQGGFGAVYKGVLPNGQEIAVKRFSQSSGQGIQELKNELVLXAKLQHKNLVRLVGVCL

SEQ ID NO: 87048 - protein, 104 aa, Setaria italica
  Transcript Sequence Number=SeqID_21074
  Gene Ontology: Mol. function=transporter activity; Cellular component= membrane; Biological process=oligopeptide transport
  Homolog annotation: Hit_ID=Q8LLN6; Match level="QueryCoverage=66%, HitCoverage=18%, E-value=2e-26, Identity=78%"; Hit description =Putative peptide transporter protein
GTLRSYLLIEYKYNQERPMRSLCSALQLLTTAFGNYLSTFILTMVAYFTTRGGNPGWIPDNLNKGHLDYFFCPLAGLGVFFLFLFLLQQQERHHLGQQLQVLDG

SEQ ID NO: 87049 - protein, 79 aa, Setaria italica
  Transcript Sequence Number=SeqID_21075
  Gene Ontology: Mol. function=oxidoreductase activity, acting on single donors with incorporation of molecular oxygen, incorporation of two atoms of oxygen; Biological process=oxidation reduction
  Homolog annotation: Hit_ID=B6UFQ5; Match level="QueryCoverage=83%, HitCoverage=20%, E-value=1e-19, Identity=72%"; Hit description =Oxidoreductase
MGAGNVEATTQRTMEIGKVDLRGLEPGTPGWARARASVTASMAAHGCVVVAHDALGPELRHALFGRALPELFGLPFDAK

SEQ ID NO: 87050 - protein, 114 aa, Setaria italica
  misc_feature (109)..(109): Xaa can be any naturally occurring amino acid
  Transcript Sequence Number=SeqID_21076
  Gene Ontology: Mol. function=binding
  Homolog annotation: Hit_ID=B9RT16; Match level="QueryCoverage=89%, HitCoverage=18%, E-value=3e-34, Identity=72%"; Hit description =Anaphase promoting complex subunit, putative
MFPYCSLKGNLHLSLNRPDLAVTDFRGAQELRADLRSYQGLVRAYLALAKCKDALFTAREAMKVMHQSAKALKLVGDVHAISSSGREKARKFYESAIRLEPGFLGAALXLADLH

SEQ ID NO: 87051 - protein, 335 aa, Setaria italica
  Transcript Sequence Number=SeqID_21077
  Gene Ontology: Mol. function=binding; Cellular component=nucleoplasm; Biological process=anaphase-promoting complex-dependent proteasomal ubiquitin-dependent protein catabolic process
  Homolog annotation: Hit_ID=B9RT16; Match level="QueryCoverage=96%, HitCoverage=54%, E-value=1e-123, Identity=66%"; Hit description =Anaphase promoting complex subunit, putative
  Pfam annotation: Domain name=TPR_1; Domain location=131-164; Score =11.2; E_value=0.26; Accession=PF00515.20; Description=Tetratricopepti de repeat
  Pfam annotation: Domain name=TPR_1; Domain location=217-252; Score =7.7; E_value=0.69; Accession=PF00515.20; Description=Tetratricopeptid e repeat
  Pfam annotation: Domain name=TPR_1; Domain location=23-56; Score=6.7; E_value=0.93; Accession=PF00515.20; Description=Tetratricopeptide repeat
  Pfam annotation: Domain name=TPR_1; Domain location=253-286; Score =14.0; E_value=0.12; Accession=PF00515.20; Description=Tetratricopepti de repeat
  Pfam annotation: Domain name=TPR_2; Domain location=131-164; Score =10.0; E_value=2; Accession=PF07719.9; Description=Tetratricopeptide repeat
  Pfam annotation: Domain name=TPR_2; Domain location=217-252; Score =4.1; E_value=10; Accession=PF07719.9; Description=Tetratricopeptide repeat
  Pfam annotation: Domain name=TPR_2; Domain location=23-56; Score=8.4; E_value=3.1; Accession=PF07719.9; Description=Tetratricopeptide repeat
  Pfam annotation: Domain name=TPR_2; Domain location=253-286; Score =10.0; E_value=2; Accession=PF07719.9; Description=Tetratricopeptide repeat
  Pfam annotation: Domain name=TPR_2; Domain location=97-130; Score =7.7; E_value=3.8; Accession=PF07719.9; Description=Tetratricopeptide repeat
  Pfam module annotation: Pfam domain module=TPR_1::TPR_1::TPR_1::TPR _1::TPR_2::TPR_2::TPR_2::TPR_2::TPR_2; Domain location=131-164::217 -252::23-56::253-286::131-164::217-252::23-56::253-286::97-130
KNKCEHREALQEMEGIPSKVRTLKMNLMLGKLYRISRNSRSAVVCYKECLRQCPYIFEAITALAEMGLSAKEFSLLFSQAPNRGGKLPSDSVDAQRWWNRYVEAQCCIASHDYKGGLDIYLELMQRFPNNVHILLEIAKVEAIIGRNDQAIMNFEKARLIDPNIMTYMDEYAILLKTKSDYIKLNKLVHDMLHIDPARPETCVALAAMWERKDERKALTYAEKGNLHLSLNRPDLAVTLTYAEKSLRVDDRHITGYIMKGNLHLSLNRPDLAVTDFRGAQELRADLRSYQGLVRAYLALAKCKDALFTAREAMKVMHQSAKALKLVGDVFRLVTF

SEQ ID NO: 87052 - protein, 253 aa, Setaria italica
  misc_feature (26)..(26): Xaa can be any naturally occurring amino acid
  Transcript Sequence Number=SeqID_21078
  Gene Ontology: Mol. function=binding; Cellular component=nucleus; Biological process=ubiquitin-dependent protein catabolic process
  Homolog annotation: Hit_ID=B9RT16; Match level="QueryCoverage=88%, HitCoverage=41%, E-value=1e-85, Identity=70%"; Hit description =Anaphase promoting complex subunit, putative
  Pfam annotation: Domain name=TPR_1; Domain location=109-143; Score =2.5; E_value=3; Accession=PF00515.20; Description=Tetratricopeptide repeat
  Pfam annotation: Domain name=TPR_1; Domain location=177-210; Score =21.9; E_value=0.0027; Accession=PF00515.20; Description =Tetratricopeptide repeat
  Pfam annotation: Domain name=TPR_1; Domain location=42-75; Score =14.0; E_value=0.12; Accession=PF00515.20; Description=Tetratricopepti de repeat
  Pfam annotation: Domain name=TPR_2; Domain location=109-143; Score =6.4; E_value=5.4; Accession=PF07719.9; Description=Tetratricopeptide repeat
  Pfam annotation: Domain name=TPR_2; Domain location=177-210; Score =22.3; E_value=0.0019; Accession=PF07719.9; Description =Tetratricopeptide repeat
  Pfam annotation: Domain name=TPR_2; Domain location=42-75; Score =10.0; E_value=2; Accession=PF07719.9; Description=Tetratricopeptide repeat
  Pfam module annotation: Pfam domain module=TPR_1::TPR_1::TPR_1::TPR _2::TPR_2::TPR_2; Domain location=109-143::177-210::42-75::109 -143::177-210::42-75
QAGHDMLHIDARPETCVLAAMWGSNXLITYAERSLRVDDRHITGYIMKGNLHLSLNRPDLAVTDFRGAQELRADLRSYQGLVRAYLALAKCKDALFTAREAMKVMHQSAKALKLVGDVHAISSSGREKARKFYESAIRLEPGFLGAALALADLHVAEGRNREAVMLLEKYLRQWADDSLHIKLAQVFAATNMLSDALSHYQSALRINPQNEAAKKGLERLEKQMKGVDPDAPEEDEDNEADDIDADQDEAELL

SEQ ID NO: 87053 - protein, 72 aa, Setaria italica
  Transcript Sequence Number=SeqID_21079
  Gene Ontology: Mol. function=binding
  Homolog annotation: Hit_ID=B9RT16; Match level="QueryCoverage=52%, HitCoverage=6%, E-value=4e-11, Identity=84%"; Hit description =Anaphase promoting complex subunit, putative
FSFNFKFICSMLSDALSHYQSALRINPQNEAAKKGLERLEKQMKGVDPDAPEEDEDNEADDIDADQDEAELL

SEQ ID NO: 87054 - protein, 253 aa, Setaria italica
  Transcript Sequence Number=SeqID_21080
  Homolog annotation: Hit_ID=B6TZG7; Match level="QueryCoverage=96%, HitCoverage=85%, E-value=5e-94, Identity=75%"; Hit description =Osmotin-like protein
  Pfam annotation: Domain name=Thaumatin; Domain location=45-253; Score= 161.6; E_value=2.3e-45; Accession=PF00314.9; Description=Thaumatin family
MGKHCPRWTSGARRPLLSWALIALLSFVAAGPVVLAEAIVFHVANRCPFPVWPASAPNTGHPVLAGGGFLVPPGKSRRVVAPATWNGRFWARTGCNFTANGGTGAAACLTGDCEGRLACNGSVGTPPATLVEVSLHADPSKGSSYDVSLVDGYNLPVAVSAKPATGNKCAIAGCAKDVNAVCPPELQVTATTGGGAKAATVVACKSACLAFGLDAFCCRGAYATPAACRGSVYSRLFKDACPAYYSYAYDTTA

SEQ ID NO: 87055 - protein, 59 aa, Setaria italica
  Transcript Sequence Number=SeqID_21081
TSMRCDACVFIHYCAGLYPNNTREVILAGADSGAESDGMPRTVCECPLLPASEEASAAV

SEQ ID NO: 87056 - protein, 292 aa, Setaria italica
  Transcript Sequence Number=SeqID_21082
  Gene Ontology: Mol. function=protein binding
  Homolog annotation: Hit_ID=B9T1Y8; Match level="QueryCoverage=99%, HitCoverage=61%, E-value=3e-91, Identity=53%"; Hit description=WD -repeat protein, putative
  Pfam annotation: Domain name=WD40; Domain location=116-155; Score =11.2; E_value=1.9; Accession=PF00400.24; Description=WD domain, G -beta repeat
  Pfam annotation: Domain name=WD40; Domain location=159-197; Score =30.1; E_value=9e-06; Accession=PF00400.24; Description=WD domain, G -beta repeat
  Pfam module annotation: Pfam domain module=WD40::WD40; Domain location=116-155::159-197
YSFLNDRRRVRLNSIAIDPQNPYYFSIGGSDEYVRLYDMRRFQLDDSRNINQPVDTFCPKHLIKGGKVHITGIAYSYAREILVSYNDEVVYLFQNNMGLGPNPVTAQPEFFDQLDQPQAYSGHRNYRTVKGVSFFGPNDEYVVSGSDCGNVFIWRKKGGELMRMMNGDKSVVNCIEPHPHFPFMATSGIDKTVKLWTPTAKKVMSLPKNAKEIIASNERGREVDASRAEVTLSSDVIMHVLRLHRRQSELHRENEPAAGDFASDDDEAFYIGFGNAERDQGENSDPRECIVT

SEQ ID NO: 87057 - protein, 94 aa, Setaria italica
  Transcript Sequence Number=SeqID_21083
GTSTKLSVTATNTHMGVHWHAELDAISIPIVVPLSVESRLRLDVAAALNRPLACVTSRRRAGPQASHCPPPQVDTNRASATSPSAQADRLHQSL

SEQ ID NO: 87058 - protein, 635 aa, Setaria italica
  Transcript Sequence Number=SeqID_21084
  Gene Ontology: Mol. function=signal transducer activity; Cellular component=plasma membrane; Biological process=response to light stimulus
  Homolog annotation: Hit_ID=B9SND2; Match level="QueryCoverage=100%, HitCoverage=100%, E-value=0.0, Identity=55%"; Hit description=Signal transducer, putative
  Pfam annotation: Domain name=NPH3; Domain location=210-468; Score =387.7; E_value=2e-113; Accession=PF03000.6; Description=NPH3 family
MKYMKLGSKPDAFQTEGSNIRFVATELATDIVISIGDVKFYLHKFPLLSKSSRLQRLVASSNEEKNDEVDISDIPGGHSAFEICAKFCYGMIVTLNAYNVLAARCAAEYLEMFETIDKGNLIYKIDVFLTSSVFRTWKDSIIVLQSTKSLLPWCENLKVINHCIDSIASKASIDPSEVEWSYTYNRRKLPSENGIDSHWNGVRKQPTVPNDWWVEDLCELEVDLYKRVIMAIKAKGRTPAVVIGEALRAYAYRRLLGSLEDAVSNGVDCTKRRAALDAIVFLLPTEEGSVSCGFLLKLLRAACLLESGESHRSDLIKRIGTQLDGASVSDLLIPVNTDENSVYNIDLIMAIVEEFMSQNSDNGKAKFQDDEEIVEVENVSVTTVPSASKLAVAKLIDGYLAEIAKDPNLPLPKLMALAEMASSLPRPTHDGLYRAIDMYLKEHPSLSKSEKKKLCGLMDCKQLSQDACMHAVQNERLPLRVVVQVLFFEQVRASVASARSDPSVELPSVVRSLLPRENGNSIGSSRSAATTTTEEECGVPTSSDINSLRSMRLANNSGGSERSSGSSDMNKNGDDKSASGKAKGMLMPKKILSKLWSGKTNAGENSSSDTSESPGSVNPEEVKSTQSRITRHSVS

SEQ ID NO: 87059 - protein, 87 aa, Setaria italica
  misc_feature (11)..(11): Xaa can be any naturally occurring amino acid
  Transcript Sequence Number=SeqID_21085
  Gene Ontology: Mol. function=protein heterodimerization activity; Cellular component=microtubule; Biological process=cell division
  Homolog annotation: Hit_ID=Q5ZCG1; Match level="QueryCoverage=100%, HitCoverage=10%, E-value=3e-38, Identity=89%"; Hit description =Katanin p80 (WD40-containing) subunit B 1-like protein
  Pfam annotation: Domain name=WD40; Domain location=31-69; Score=35.0; E_value=3e-07; Accession=PF00400.24; Description=WD domain, G-beta repeat
VRSLAIGKKSXRVFITGGNDRKVNLWAIGKQTPLLSLSGHTSAVETVQFDSAEVLVLAGSSNGSIKLWDLEEAKVVRSLTGHRLSCT

SEQ ID NO: 87060 - protein, 72 aa, Setaria italica
  Transcript Sequence Number=SeqID_21086
  Gene Ontology: Mol. function=nucleic acid binding; Cellular component= spliceosome; Biological process=nuclear mRNA splicing, via spliceosome
  Homolog annotation: Hit_ID=B9RRM5; Match level="QueryCoverage=100%, HitCoverage=19%, E-value=6e-36, Identity=98%"; Hit description =Spliceosome associated protein, putative
  Pfam annotation: Domain name=RRM_1; Domain location=27-72; Score=8.8; E_value=0.03; Accession=PF00076.14; Description=RNA recognition motif. (a.k.a. RRM, RBD, o
MTTRIAPGVGANLLGQHSAERNQDATTYVGNLDPQVSEELLWELFVQAGPVVNVYVPKDRVTNLHQGYGFVE

SEQ ID NO: 87061 - protein, 80 aa, Setaria italica
  Transcript Sequence Number=SeqID_21087
  Homolog annotation: Hit_ID=B6T4H2; Match level="QueryCoverage=96%, HitCoverage=18%, E-value=6e-30, Identity=83%"; Hit description=F-box domain containing protein
TSAGPNPRLRFLPIRPVPELAGAARRACGFFDAFKGSAASIYDSRGDRLLVTTFDDRNDSTHQVCSPLSPAGDTTVVPPP

SEQ ID NO: 87062 - protein, 281 aa, Setaria italica
  Transcript Sequence Number=SeqID_21088
  Gene Ontology: Mol. function=serine-type carboxypeptidase activity; Cellular component=extracellular region; Biological process =proteolysis
  Homolog annotation: Hit_ID=P52708; Match level="QueryCoverage=95%, HitCoverage=52%, E-value=2e-86, Identity=61%"; Hit description=P-(S)- hydroxymandelonitrile lyase chain B
  Pfam annotation: Domain name=Peptidase_S10; Domain location=5-257; Score=75.7; E_value=1.7e-19; Accession=PF00450.14; Description =Serine carboxypeptidase
ETLVPPVLEHADHVGNGLIDDLTDMIGMLEYWWHHGLISDETLASGLDVCLGSSLIHPSPECQKICDVQAAKEMGKIDGYSIYTPPCERGNPYDRMLERSRRPLMLPPYDPCTAWYSTNYLNIPEVQNAMHANVSGMIKYPWTMCNNPIYDNWTTITPNVSMIPIYKELIEAGLKIWVFSGDTDTAVPLSSTRRSLASLGLPVKTSWYPWYMVPTEVGGWSMEYDGLTYVTVRGAGHEVPLHRPEQALVLFKQFLLGEPMPAEAPKDASVILLPSEKAPSY

SEQ ID NO: 87063 - protein, 231 aa, Setaria italica
  Transcript Sequence Number=SeqID_21089
  Gene Ontology: Cellular component=ribonucleoprotein complex; Biological process=ribosome biogenesis
  Homolog annotation: Hit_ID=B6T5L3; Match level="QueryCoverage=100%, HitCoverage=100%, E-value=1e-122, Identity=91%"; Hit description =mRNA turnover protein 4
  Pfam annotation: Domain name=Ribosomal_L10; Domain location=19-128; Score=-3.2; E_value=0.0012; Accession=PF00466.12; Description =Ribosomal protein L10
MPKSKRNRPVTLSKTKKKPGLERKGKVVTEIKEAVDKYGSAYVFTYDNMRNQKLKDLREQHKASSRIFLAGKKVMQIALGRSPADEAKTGLHKLSKFLQGDSGLFFTNLPREDVERLFREFEEHDFARTGSTATETVELKEGPLEQFTHEMEPFLRKQGLPVRLNRGVVELIADHVVCEEGKPLSPEAAQTLRLLGIQMATFRLYLVCRWSCDDFEVYKEGLAHLGADDSS

SEQ ID NO: 87064 - protein, 81 aa, Setaria italica
  Transcript Sequence Number=SeqID_21090
  Gene Ontology: Cellular component=ribonucleoprotein complex
  Homolog annotation: Hit_ID=B6T5L3; Match level="QueryCoverage=59%, HitCoverage=20%, E-value=7e-18, Identity=89%"; Hit description=mRNA turnover protein 4
MRVPILLRDRYLPIFMPVYLLALSPPFASSLRNLSPEAAQTLRLLGIQMATFRLYLVCRWSCDDFEVYKEGLAHLGADDSS

SEQ ID NO: 87065 - protein, 72 aa, Setaria italica
  Transcript Sequence Number=SeqID_21091
  Gene Ontology: Mol. function=calcium ion binding; Cellular component =spindle microtubule
  Homolog annotation: Hit_ID=B6SLW1; Match level="QueryCoverage=100%, HitCoverage=42%, E-value=3e-34, Identity=100%"; Hit description =Calmodulin
  Pfam annotation: Domain name=efhand; Domain location=44-72; Score =43.2; E_value=1e-09; Accession=PF00036.24; Description=EF hand
  Pfam annotation: Domain name=efhand; Domain location=8-36; Score =42.1; E_value=2.2e-09; Accession=PF00036.24; Description=EF hand
  Pfam module annotation: Pfam domain module=efhand::efhand; Domain location=44-72::8-36
KDTDSEEELKEAFRVFDKDQNGFISAAELRHVMTNLGEKLTDEEVDEMIREADVDGDGQINYEEFVKVMMAK

SEQ ID NO: 87066 - protein, 61 aa, Setaria italica
  Transcript Sequence Number=SeqID_21092
  Gene Ontology: Cellular component=chloroplast
  Homolog annotation: Hit_ID=B6TLG2; Match level="QueryCoverage=68%, HitCoverage=28%, E-value=1e-16, Identity=92%"; Hit description =Thylakoid membrane phosphoprotein 14 kDa
LICNAQSSPPSDYGSGALKAIDKLPLLPGILEIVGIGYTGWFTYRNLIFQPDREALIRQNQ

SEQ ID NO: 87067 - protein, 62 aa, Setaria italica
  Transcript Sequence Number=SeqID_21093
NKSCILTNMQCTIFSAFRLWFGGSLGHHDLDKLLIVDLTIAIDISLTDEEVDEMIREADVDG

SEQ ID NO: 87068 - protein, 125 aa, Setaria italica
  misc_feature (73)..(73): Xaa can be any naturally occurring amino acid
  Transcript Sequence Number=SeqID_21094
  Gene Ontology: Mol. function=calcium ion binding; Cellular component =spindle microtubule
  Homolog annotation: Hit_ID=B6SLW1; Match level="QueryCoverage=92%, HitCoverage=68%, E-value=4e-59, Identity=97%"; Hit description =Calmodulin
  Pfam annotation: Domain name=efhand; Domain location=24-52; Score =39.0; E_value=1.9e-08; Accession=PF00036.24; Description=EF hand
  Pfam annotation: Domain name=efhand; Domain location=61-89; Score =39.7; E_value=1.1e-08; Accession=PF00036.24; Description=EF hand
  Pfam annotation: Domain name=efhand; Domain location=97-125; Score =43.2; E_value=1e-09; Accession=PF00036.24; Description=EF hand
  Pfam module annotation: Pfam domain module=efhand::efhand::efhand; Domain location=24-52::61-89::97-125
TTNQRKTRVTSTMRSLGQNPTEAELQDMINEVDADGNGTIDFPEFLNLMARKMKDTDSEEELKEAFRVFDKDXNGFISAAELRHVMTNLGEKLTDEEVDEMIREADVDGDGQINYEEFVKVMMAK

SEQ ID NO: 87069 - protein, 82 aa, Setaria italica
  Transcript Sequence Number=SeqID_21095
RSLPTTGLMADQLTDDQIAEFKEAFSLFDKDGDGKIPLLSDSLPPSLSLCKFGSDPCRSCSTSAMPAFGLRSGIAACKSVYT

SEQ ID NO: 87070 - protein, 99 aa, Setaria italica
  misc_feature (43)..(43): Xaa can be any naturally occurring amino acid
  Transcript Sequence Number=SeqID_21096
  Gene Ontology: Mol. function=calcium ion binding; Cellular component =spindle microtubule
  Homolog annotation: Hit_ID=UPI0001A7B2F7; Match level="QueryCoverage =100%, HitCoverage=57%, E-value=4e-43, Identity=87%"; Hit description= CAM1 (CALMODULIN 1); calcium ion binding
  Pfam annotation: Domain name=efhand; Domain location=34-62; Score =9.5; E_value=1.9; Accession=PF00036.24; Description=EF hand
  Pfam annotation: Domain name=efhand; Domain location=71-99; Score =42.1; E_value=2.2e-09; Accession=PF00036.24; Description=EF hand
  Pfam module annotation: Pfam domain module=efhand::efhand; Domain location=34-62::71-99
LQNCLSVTCAGCITTKELGTVMRSLGQNPTEAELQDMINRRLXADGNGTIDFPEFLNLMARKMKDTDSEEELKEAFRVFDKDQNGFISAAELRHVMTNL

SEQ ID NO: 87071 - protein, 134 aa, Setaria italica
  misc_feature (90)..(90): Xaa can be any naturally occurring amino acid
  Transcript Sequence Number=SeqID_21097
  Gene Ontology: Cellular component=chloroplast
  Homolog annotation: Hit_ID=B6TLG2; Match level="QueryCoverage=78%, HitCoverage=72%, E-value=6e-40, Identity=76%"; Hit description =Thylakoid membrane phosphoprotein 14 kDa
  Subcellular localization annotation: CTP_CleavageSite=43; ConfidenceScore=5.34e-01
MATTCRFAAPLGLAPLPRGRAPAGAVVSFPQCGSKISRGVAVRATSGGEGATEEVPEIVKAAQDAWDKVEDKYAVATIGVAAIVALWTAXGALKAIDKLPLLPGILEIVGIGYTGWFTYRNLIFQPDREACRWP

SEQ ID NO: 87072 - protein, 150 aa, Setaria italica
  misc_feature (67)..(67): Xaa can be any naturally occurring amino acid
  misc_feature (96)..(96): Xaa can be any naturally occurring amino acid
  Transcript Sequence Number=SeqID_21098
  Gene Ontology: Cellular component=chloroplast
  Homolog annotation: Hit_ID=B6TLG2; Match level="QueryCoverage=83%, HitCoverage=84%, E-value=7e-48, Identity=77%"; Hit description =Thylakoid membrane phosphoprotein 14 kDa
  Subcellular localization annotation: CTP_CleavageSite=44; ConfidenceScore=5.35e-01
MATTCRFAAPLGLAPLPRGRAPAGAVVSFPQCAGSKISRGVAVRATSGGEGATEEVPEIVKAAQDAXQWDKVEDKYAVATIGVAAIVALWTAAGAXKAIDKLPLLPGILEIVGIGYTGWFTYRNLIFQPDREALISKIKSTYKEITGSSN

SEQ ID NO: 87073 - protein, 150 aa, Setaria italica
  misc_feature (59)..(59): Xaa can be any naturally occurring amino acid
  Transcript Sequence Number=SeqID_21099
  Gene Ontology: Mol. function=calcium ion binding; Cellular component =spindle microtubule
  Homolog annotation: Hit_ID=P27164; Match level="QueryCoverage=100%, HitCoverage=80%, E-value=7e-79, Identity=80%"; Hit description =Calmodulin-related protein
  Pfam annotation: Domain name=efhand; Domain location=12-40; Score =41.0; E_value=4.7e-09; Accession=PF00036.24; Description=EF hand
  Pfam annotation: Domain name=efhand; Domain location=122-150; Score =43.2; E_value=1e-09; Accession=PF00036.24; Description=EF hand
  Pfam annotation: Domain name=efhand; Domain location=48-77; Score =10.1; E_value=1.7; Accession=PF00036.24; Description=EF hand
  Pfam annotation: Domain name=efhand; Domain location=86-114; Score =42.1; E_value=2.2e-09; Accession=PF00036.24; Description=EF hand
  Pfam module annotation: Pfam domain module=efhand::efhand::efhand::efh and; Domain location=12-40::122-150::48-77::86-114
MADQLTDDQIAEFKEAFSLFDKDGDGCITTKELGTVMRSLGQNPTEAELQDMINEVDAXDGNGTIDFPEFLNLMARKMKDTDSEEELKEAFRVFDKDQNGFISAAELRHVMTNLGEKLTDEEVDEMIREADVDGDGQINYEEFVKVMMAK

SEQ ID NO: 87074 - protein, 150 aa, Setaria italica
  misc_feature (18)..(18): Xaa can be any naturally occurring amino acid
  Transcript Sequence Number=SeqID_21100
  Gene Ontology: Mol. function=calcium ion binding; Cellular component =spindle microtubule
  Homolog annotation: Hit_ID=P27164; Match level="QueryCoverage=100%, HitCoverage=80%, E-value=3e-78, Identity=80%"; Hit description =Calmodulin-related protein
  Pfam annotation: Domain name=efhand; Domain location=122-150; Score =43.2; E_value=1e-09; Accession=PF00036.24; Description=EF hand
  Pfam annotation: Domain name=efhand; Domain location=13-41; Score =17.1; E_value=0.071; Accession=PF00036.24; Description=EF hand
  Pfam annotation: Domain name=efhand; Domain location=49-77; Score =39.0; E_value=1.9e-08; Accession=PF00036.24; Description=EF hand
  Pfam annotation: Domain name=efhand; Domain location=86-114; Score =42.1; E_value=2.2e-09; Accession=PF00036.24; Description=EF hand
  Pfam module annotation: Pfam domain module=efhand::efhand::efhand::efh and; Domain location=122-150::13-41::49-77::86-114
MADQLTDDQIAEFKEAFXPLFDKDGDGCITTKELGTVMRSLGQNPTEAELQDMINEVDADGNGTIDFPEFLNLMARKMKDTDSEEELKEAFRVFDKDQNGFISAAELRHVMTNLGEKLTDEEVDEMIREADVDGDGQINYEEFVKVMMAK

SEQ ID NO: 87075 - protein, 149 aa, Setaria italica
  Transcript Sequence Number=SeqID_21101
  Gene Ontology: Mol. function=calcium ion binding; Cellular component =spindle microtubule
  Homolog annotation: Hit_ID=P27164; Match level="QueryCoverage=100%, HitCoverage=93%, E-value=1e-79, Identity=68%"; Hit description =Calmodulin-related protein
  Pfam annotation: Domain name=efhand; Domain location=12-40; Score =41.0; E_value=4.7e-09; Accession=PF00036.24; Description=EF hand
  Pfam annotation: Domain name=efhand; Domain location=121-149; Score =43.2; E_value=1e-09; Accession=PF00036.24; Description=EF hand
  Pfam annotation: Domain name=efhand; Domain location=48-76; Score =39.0; E_value=1.9e-08; Accession=PF00036.24; Description=EF hand
  Pfam annotation: Domain name=efhand; Domain location=85-113; Score =42.1; E_value=2.2e-09; Accession=PF00036.24; Description=EF hand
  Pfam module annotation: Pfam domain module=efhand::efhand::efhand::efh and; Domain location=12-40::121-149::48-76::85-113
MADQLTDEQIAEFKEAFSLFDKDGDGCITTKELGTVMRSLGQNPTEAELQDMINEVDADGNGTIDFPEFLNLMARKMKDTDSEEELKEAFRVFDKDQNGFISAAELRHVMTNLGEKLTDEEVDEMIREADVDGDGQINYEEFVKVMMAK

SEQ ID NO: 87076 - protein, 560 aa, Setaria italica
  Transcript Sequence Number=SeqID_21102
  Gene Ontology: Mol. function=hydrolase activity, hydrolyzing O -glycosyl compounds; Cellular component=integral to membrane; Biological process=carbohydrate metabolic process
  Homolog annotation: Hit_ID=B6SWQ5; Match level="QueryCoverage=100%, HitCoverage=89%, E-value=0.0, Identity=82%"; Hit description =Glycoside transferase, six-hairpin, subgroup
  Pfam annotation: Domain name=Glyco_hydro_9; Domain location=47-521; Score=654.3; E_value=1.1e-193; Accession=PF00759.11; Description =Glycosyl hydrolase family 9
LGCVVVKRKVLWWALWCLVGAFVLIGLPIIIAKAIPHKKPRPPPDDQYTEVLHKALRFFNAQKSGRLPKNNGVPWRGNSGLSDGSDAKDVKGGLVGGYYDAGDNIKFHFPMAFSMTLLSWSVIEYSAKYKAVGEYDHVRELIKWGTDYLLLTFNSSASTIDKIYAQVGVAKINGSRPDDHYCWNRPEDMAYPRPTLAVSSAPDLGGEIAAALAAASIVFRDNAAYSKKLTQGAATVYKFARQMGHRTPYSLRQPDIEYYYNSTSYWDEFMWSAAWMYYATGNTSYITFATDPRLPKNAKAFYNILDFSVFSWDNKLPGAQLLLSRLRMFLNPGYPYEESLIGYHNATSLNMCMYFPKFGAFNFTKGGMALFNHGKGQPLQYVVANSFLASLYADYMEAANVPGWYCGPNFMSTNDLRAFAKSQLNYILGDNPRKMSYVVGFGKKYPRHLHHRGASTPKNGVKYSCTGGYKWRDSKKADPNLLTGAMVGGPDKNDGFKDSRNSYGQNEPTLVGNAGLVAALVAITNSGRGVGVTAVDKNTMFSAVPPMFPAAPPPPSSWKP

SEQ ID NO: 87077 - protein, 153 aa, Setaria italica
  misc_feature (133)..(133): Xaa can be any naturally occurring amino acid
  misc_feature (146)..(146): Xaa can be any naturally occurring amino acid
  Transcript Sequence Number=SeqID_21103
  Gene Ontology: Mol. function=sequence-specific DNA binding; Cellular component=nucleus; Biological process=regulation of transcription, DNA-dependent
  Homolog annotation: Hit_ID=B6TR29; Match level="QueryCoverage=43%, HitCoverage=33%, E-value=4e-15, Identity=59%"; Hit description=GATA zinc finger family protein
  Pfam annotation: Domain name=GATA; Domain location=27-62; Score=65.8; E_value=1.7e-16; Accession=PF00320.19; Description=GATA zinc finger
MDSSVEKQGSGSPDPDERPAAGEPKACTECHTTKTPLWRGGPCGPMSLCNACGIRYRKKRREAMGLDANKAAGGEQQQQQQRKKKAAAAAASKREREKGAEADEVTVELRTVGFGKEVVLKQRRRMRRRRRLXGEEERAAILLMAXSSGVVYA

SEQ ID NO: 87078 - protein, 135 aa, Setaria italica
  misc_feature (83)..(83): Xaa can be any naturally occurring amino acid
  Transcript Sequence Number=SeqID_21104
  Gene Ontology: Mol. function=sequence-specific DNA binding; Cellular component=nucleus; Biological process=regulation of transcription, DNA-dependent
  Homolog annotation: Hit_ID=B9RZK8; Match level="QueryCoverage=90%, HitCoverage=91%, E-value=4e-17, Identity=37%"; Hit description=GATA transcription factor, putative
  Pfam annotation: Domain name=GATA; Domain location=27-62; Score=65.8; E_value=1.7e-16; Accession=PF00320.19; Description=GATA zinc finger
MDSSVEKQGSGSPDPDERPAAGEPKACTECHTTKTPLWRGGPCGPMSLCNACGIRYRKKRREAMGLDANKAAAASKREREKGXEADEVTVELRTVGFGKEVVLKQRRRMRRRRRLGEEERAAILLMALSSGVVYA

SEQ ID NO: 87079 - protein, 87 aa, Setaria italica
  Transcript Sequence Number=SeqID_21105
MLTNTIYHLLYTKSTIWILTICLRNSILLEDTSNFLVLFDTKQRGDPKQYVIVYLKTSSKKGNTSLHIRHPSVPSFSLFKKNKSSKQ

SEQ ID NO: 87080 - protein, 58 aa, Setaria italica
  Transcript Sequence Number=SeqID_21106
  Gene Ontology: Mol. function=metal ion binding
MASSSAAEPGTRLSDRVRRSSLGLRFMVLLMHVLFVGAVFFLDPTLDWRIHEEPWCIG

SEQ ID NO: 87081 - protein, 45 aa, Setaria italica
  Transcript Sequence Number=SeqID_21107
RPAWLIDLIPLLVVLLIAAHVLALGYWIYRLATDGSRQPARSKKH

SEQ ID NO: 87082 - protein, 118 aa, Setaria italica
  Transcript Sequence Number=SeqID_21108
GPPFTYQLASPLKPTSEQTTGGDWFPVFGSFQEEFCEPSLDIENLGDQQAEDAGTKWQTLAASIPGRGRRLLIAEGQQYLAGHCWCFIGCLTLHITQILRRSGANKNQQKICGSLLTP

SEQ ID NO: 87083 - protein, 79 aa, Setaria italica
  Transcript Sequence Number=SeqID_21109
VAVTSSAFLTLQKLLITSCFMKCMIWDYVVLLCYSRLNAVDLTPSLFYSPKDVPIIIPQTDRITTPFSDLVQYWTFCTN

SEQ ID NO: 87084 - protein, 156 aa, Setaria italica
  Transcript Sequence Number=SeqID_21110
SGITQQHNVVPYHTFHEATSDKQLLEGEKSRGSYSNLHAVGCLSLPPGGPLQRRCVALAERLPSLDLQGLEVPPPRLLGGGCCIHRSDGGRGATVKLQPQRYLLEASSPNDRWSSPMDAAPGQGCSQPRCPLARGSGCKRGNEHRGGGSAPENGSA

SEQ ID NO: 87085 - protein, 84 aa, Setaria italica
  Transcript Sequence Number=SeqID_21111
DDGVNLRDAPGARKAFDEISSRDAAAGSDLALFDYARRGLVHQALDHFVDVHRRRGGRVGAAALSCVLKACGSVPDRALGEQLH

SEQ ID NO: 87086 - protein, 120 aa, Setaria italica
  Transcript Sequence Number=SeqID_21112
  Gene Ontology: Mol. function=protoporphyrinogen oxidase activity; Cellular component=mitochondrial inner membrane; Biological process =porphyrin biosynthetic process
  Homolog annotation: Hit_ID=Q9FYV8; Match level="QueryCoverage=100%, HitCoverage=22%, E-value=5e-60, Identity=91%"; Hit description =Protoporphyrinogen IX oxidase
VTVFEAADRAGGKIRTNSEAGFLWDEGANTMTEGELEVSRLIDDLGLQDRQQYPNSQHKRYIVKDGAPALIPADPISLMKSSVLSTKSKLALFLEPFLYKKSNTRNSGKVSDEHLSESVG

SEQ ID NO: 87087 - protein, 52 aa, Setaria italica
  Transcript Sequence Number=SeqID_21113
PQECTCVICTRRLLVVEYEPCMELYVYQNFVISILMPAAVHDNMKMLARSYN

SEQ ID NO: 87088 - protein, 145 aa, Setaria italica
  misc_feature (86)..(86): Xaa can be any naturally occurring amino acid
  misc_feature (112)..(112): Xaa can be any naturally occurring amino acid
  Transcript Sequence Number=SeqID_21114
  Gene Ontology: Mol. function=protein dimerization activity; Cellular component=nucleus; Biological process=regulation of transcription, DNA-dependent
  Homolog annotation: Hit_ID=Q6Z5V7; Match level="QueryCoverage=73%, HitCoverage=24%, E-value=5e-24, Identity=58%"; Hit description =Putative DNA-Binding protein
  Pfam annotation: Domain name=bZIP_1; Domain location=39-79; Score =16.4; E_value=0.0067; Accession=PF00170.13; Description=bZIP transcription factor
MTEAHFLKYLMVDQSVLSVLLNIWLIIMKNCSHLPCVIFQQECEELARKVADLTTENSALRAELDSLKKACQDMEVENSRLLVSTXNSAILCRYDLVTLFASHHLSACQHIXLTVLAKGGVAHSQGPSVTTTLGMSIEPPKVQHH

SEQ ID NO: 87089 - protein, 91 aa, Setaria italica
  Transcript Sequence Number=SeqID_21115
  Gene Ontology: Mol. function=protein dimerization activity; Cellular component=nucleus; Biological process=regulation of transcription, DNA-dependent
  Homolog annotation: Hit_ID=Q9SM11; Match level="QueryCoverage=84%, HitCoverage=19%, E-value=8e-24, Identity=74%"; Hit description=Em binding protein-1a
  Pfam annotation: Domain name=bZIP_1; Domain location=49-91; Score =14.4; E_value=0.011; Accession=PF00170.13; Description=bZIP transcription factor
AALPNATPNLNIGMDLWSASPALAVPAVQVEANPGLALARRDSVTQLDERELKRERRKQSNRESARRSRLRKQVVLESYILIFLQNCSIVS

SEQ ID NO: 87090 - protein, 302 aa, Setaria italica
  Transcript Sequence Number=SeqID_21116
  Gene Ontology: Mol. function=protein dimerization activity; Cellular component=nucleus; Biological process=regulation of transcription, DNA-dependent
  Homolog annotation: Hit_ID=Q9SM11; Match level="QueryCoverage=74%, HitCoverage=59%, E-value=3e-96, Identity=79%"; Hit description=Em binding protein-1a
  Pfam annotation: Domain name=bZIP_1; Domain location=179-242; Score =96.2; E_value=1.2e-25; Accession=PF00170.13; Description=bZIP transcription factor
  Pfam annotation: Domain name=bZIP_2; Domain location=179-233; Score =43.6; E_value=7.7e-10; Accession=PF07716.7; Description=Basic region leucine zipper
  Pfam module annotation: Pfam domain module=bZIP_1::bZIP_2; Domain location=179-242::179-233
AHASMAAGVPYPTAEAAAAAAAAAAAAATAAEAKGKGKGGGASPEKGSSGAPSGEDASRSGDSGSEESSGTRDDDTDHKDSSAPKKRKSGNTSAEGEPSQTALVRYAAVESPYPAKGRSASKLPVSAPGRAALPNATPNLNIGMDLWSASPALAVPAVQVEANPGLALARRDSVTQLDERELKRERRKQSNRESARRSRLRKQQECEELARKVADLTTENSALRAELDSLKKACQDMEVENSRLLGGVAHSQGPSVTTTLGMSIEPPKVQHHDDEGQLHKNTSNNSNGNYAGGSHKAEANTR

SEQ ID NO: 87091 - protein, 64 aa, Setaria italica
  Transcript Sequence Number=SeqID_21117
  Homolog annotation: Hit_ID=B9S9A5; Match level="QueryCoverage=100%, HitCoverage=13%, E-value=2e-21, Identity=70%"; Hit description =Catalytic, putative
HLGVRGRNQLPFLQGLSILEKLAAPLAPLIVGRSGAQLFLTDGDPSKPPLLLQMASECEDKKFM

SEQ ID NO: 87092 - protein, 161 aa, Setaria italica
  misc_feature (85)..(85): Xaa can be any naturally occurring amino acid
  misc_feature (92)..(92): Xaa can be any naturally occurring amino acid
  Transcript Sequence Number=SeqID_21118
  Homolog annotation: Hit_ID=B9S9A5; Match level="QueryCoverage=95%, HitCoverage=33%, E-value=6e-41, Identity=55%"; Hit description =Catalytic, putative
  Pfam annotation: Domain name=DUF676; Domain location=1-152; Score =60.6; E_value=5.9e-15; Accession=PF05057.6; Description=Protein of unknown function (DUF676)
MFSLRKISFLAHSLGGLFARYAIAILYSLETENAGQRSAQIVPTARGSAKSRCTSGLGAVAGLEPINFITLATPHLGVRGRNQGXSILEKLXAAPLAPLIVGRSGAQLFLTDGDPSKPPLLLQMASECEDKKFILALAAFKNRVLYANVSYDRILPIQIIS

SEQ ID NO: 87093 - protein, 326 aa, Setaria italica
  misc_feature (156)..(156): Xaa can be any naturally occurring amino acid
  Transcript Sequence Number=SeqID_21119
  Homolog annotation: Hit_ID=B9S9A5; Match level="QueryCoverage=99%, HitCoverage=66%, E-value=1e-105, Identity=59%"; Hit description =Catalytic, putative
  Pfam annotation: Domain name=DUF676; Domain location=1-168; Score =55.6; E_value=1.9e-13; Accession=PF05057.6; Description=Protein of unknown function (DUF676)
MEQVLDVVKKMSSLRKISFLAHSLGGLFARYAIAILYSLETENAGQRSAQIVPTARGSAKSRCTSGLGAVAGLEPINFITLATPHLGVRGRNQLPFLQGLSILEKLAAPLAPLIVGRSGAQLFLTDGDPSKPPLLLQMASECEDKKFMKKIISWTXSAAYYPIMLISPQTISASILVLCFLELIPDMVGWRTSSLRREKDLIKPSHRSLDGYKHIVNVEYCSPVSSEGPHFPSKAARAKEAAQRTPNTENTEEYHQMMEEEMIHGLQKVGWKKVDVNFHSSFWPYLAHNNIHVKNEWLHNAGAGVISHVADSIKQQESRPCLPANL

SEQ ID NO: 87094 - protein, 419 aa, Setaria italica
  Transcript Sequence Number=SeqID_21120
  Gene Ontology: Mol. function=ion channel activity; Cellular component= integral to membrane; Biological process=ion transport
  Homolog annotation: Hit_ID=B6UFI6; Match level="QueryCoverage=100%, HitCoverage=59%, E-value=0.0, Identity=87%"; Hit description=Cyclic nucleotide-gated ion channel 14
  Pfam annotation: Domain name=cNMP_binding; Domain location=205-305; Score=34.1; E_value=5.5e-07; Accession=PF00027.21; Description =Cyclic nucleotide-binding domain
FISCESDGSNSYSEWQKKTQIFVNCNANDNSIQFKYGMFSSALSKGAVSASFLEKYFFCLWWGLLQLSSSGNPLQTSAFIVENAFAIAIGAISLILFAQLIGNMQTYLQSISKRLEEWRLRQRDMDEWMRHHQLPAHLQERVRRFVQVKWLATRGVEEESILQALPADIRRDVQRHLCLDLVRRVPFFSEMDDQLLDAICERLVSFLCPENTYISREGDPVNEMLFIIRGKLESSTTNGGRSNFFNSIILRPGDFAGEELLTWALLPKTNVHFPLSTRTVRSLTEVEAFALRAEDLKFVANQFRRLHSKKLQHTFRFYSHHWRTWAACFIQAAWRQHQRRKLAESLSRLESYSWWSEDHLAADKPRQEGTSSGGRTIAEGAIAHMHKLASASRRFRAKDTAIRRLQKPDEPDFSEDHFD

SEQ ID NO: 87095 - protein, 370 aa, Setaria italica
  Transcript Sequence Number=SeqID_21121
  Gene Ontology: Mol. function=ion channel activity; Cellular component= integral to membrane; Biological process=ion transport
  Homolog annotation: Hit_ID=B6UFI6; Match level="QueryCoverage=98%, HitCoverage=51%, E-value=0.0, Identity=88%"; Hit description=Cyclic nucleotide-gated ion channel 14
  Pfam annotation: Domain name=Ion_trans; Domain location=126-367; Score=-10.3; E_value=0.076; Accession=PF00520.23; Description=Ion transport protein
MFGSRVQDEVEMQRRPNNRIFPDERQNQSKPLYQAARADRFGANRIDVKNPEKLKMLNEGSKPWHQRILDPGSNIVLSWNRVFLVACLFALFIDPFFYYLPLVREHGNGSSCVAKDQGLSIRITVLRSLADLFYMLNIAIKFHTAYVDPKSRVLGKGELVVDIKKIQQRYIRTDFFVDILAAVPLPQVTVWLIMPAIKNSDYNVRNTAFALIIVIQYVIRMYLIVPLSNQIIKAVGVVAKSAWGGAAYNLLLYMLASHITGAIYYLLSIERQITCWDQQCLAESNVTSCNLRFISCESDGSNSYSEWQKKTQIFVNCNANDNSIQFKYGMFSSALSKGAVSASFLEKYFFCLWWGLLQLSSSANPLFCIF

SEQ ID NO: 87096 - protein, 99 aa, Setaria italica
  Transcript Sequence Number=SeqID_21122
GTRIEDESEDEKESLARGPSVKRSKYVTRSKDPKKPRQENSKVKGGDNDDEDEEVEEEEDEEDETLGGFVVNDEDDEPMEELSDEEEEEEEFDDEEDDD

SEQ ID NO: 87097 - protein, 148 aa, Setaria italica
  Transcript Sequence Number=SeqID_21123
AAGSDVEGLDIDLASIDPVREFGFLSMGHEFDSYPKGRIRAPKDWNWFLEETKRSSDDEDDEVSNRRGRSKALGRNKKNKDGEGDDEDWTDESEDEKESLARGPSVKRSKYVTRSKDPKKPRQENSKVKGGRFPILLSIIIFLVVKFL

SEQ ID NO: 87098 - protein, 83 aa, Setaria italica
  Transcript Sequence Number=SeqID_21124
  Gene Ontology: Mol. function=protein serine/threonine kinase activity; Cellular component=integral to membrane; Biological process=protein amino acid phosphorylation
  Homolog annotation: Hit_ID=B9S7D4; Match level="QueryCoverage=100%, HitCoverage=7%, E-value=3e-40, Identity=91%"; Hit description =Serine/threonine-protein kinase bri1, putative
GMARLISALDTHLSVSTLAGTPGYVPPEYYQSFRCTAKGDVYSLGVVFLELLTGRRPTDKEDFGDTNLVGWVKMKVREGAGKE

SEQ ID NO: 87099 - protein, 194 aa, Setaria italica
  Transcript Sequence Number=SeqID_21125
  Subcellular localization annotation: CTP_CleavageSite=24; ConfidenceScore=5.23e-01
MGSSKLIALSLFVLLSIGLANAVRVARYSSSQGTGEGGGNGGAVVNGAGSGSGSGSGSGQTSGGASHASSGGDGSGGGWSKYGGSAFGGGSGTGSGSSLSEQGSSYGYGGTTNAGGSGGGGGGGQASGNEGSSGYGAGGGNGSGSSETGRSYYNPYVTYANANAAGNGGGTGNTQNGGSGGGNGSGSGYGDAEP

SEQ ID NO: 87100 - protein, 79 aa, Setaria italica
  Transcript Sequence Number=SeqID_21126
SVPLNPNPFVLCPLLSMAMPPYHPIHEEKTLFRTLCCAAKTEHKMYPGMGFSSAIHSSITIPFQARAVHKIMSQSVILR

SEQ ID NO: 87101 - protein, 396 aa, Setaria italica
  Transcript Sequence Number=SeqID_21127
  Gene Ontology: Mol. function=cation transmembrane transporter activity; Cellular component=integral to membrane; Biological process=cation transport
  Homolog annotation: Hit_ID=A4ZGN5; Match level="QueryCoverage=96%, HitCoverage=70%, E-value=1e-113, Identity=56%"; Hit description=HKT8
  Pfam annotation: Domain name=TrkH; Domain location=166-396; Score= -114.3; E_value=0.013; Accession=PF02386.8; Description=Cation transport protein
MGLWHVPSSSSCSQRFYHLLLFHVHPFWIQLVYFLSISLFGFMMLKALPMKTSAVPTPSGLDLIFTSVSATTVSSMVAVEMESFSNSQLLLVTLLMLLGGEVFTSMLGLHFTYTKLKKRETQIPHDLDGNNGLPPPSSSLELRTMGGGAPAAVAALEQMETGFKNNLDFTSIARTRMLMFVVLGYLVVVHLAGYTLMLIYLSAVTGAREVLIGKKINPSTFSIFTVVSTFANCGFVPTNEGMVSFKSYPGMLLLAMPHVLLGNTLFPVFLRLSIGALERVTRRRDLGELLVSGGGGGGPGPAAATSTIGYDHLLPAARTWHLAFTVAALVAAQLVLFCAMEWGSDGLRGLTASQKLVAALFMSVNSRHSGEMAVDLAAVSPALVVLYVVMMYVSTT

SEQ ID NO: 87102 - protein, 163 aa, Setaria italica
  Transcript Sequence Number=SeqID_21128
  Gene Ontology: Mol. function=cation transmembrane transporter activity; Cellular component=integral to membrane; Biological process=cation transport
  Homolog annotation: Hit_ID=Q0JNB6; Match level="QueryCoverage=87%, HitCoverage=25%, E-value=1e-58, Identity=75%"; Hit description =Cation transporter HKT8
MDGVITKLTRMLSLVCRYLPPYTTFLPVPVEDHHQYREAQSNEKSKTTSSKNICQKLLMSPLSCLAIFIIVICITERRQIAHDPINFSVRNIVVEIISAYGNVGFSTGYSCGRQVKPDGSCRDAWVGFSGKWSREGKLTLMAVMFYGRLKKFSMHGGQAWRLG

SEQ ID NO: 87103 - protein, 138 aa, Setaria italica
  Transcript Sequence Number=SeqID_21129
  Gene Ontology: Mol. function=electron carrier activity; Cellular component=anchored to membrane
  Homolog annotation: Hit_ID=B6TQC1; Match level="QueryCoverage=83%, HitCoverage=55%, E-value=1e-53, Identity=84%"; Hit description=Early nodulin-like protein 1
  Pfam annotation: Domain name=Cu_bind_like; Domain location=33-119; Score=99.8; E_value=9.4e-27; Accession=PF02298.9; Description =Plastocyanin-like domain
MRARAALASAAVLLLLAGGCAGAMYKVGDLDAWGVPPPSKPDVYKSWAKSVHFALGDSIWFLYPPSQDSVLQVTPEAFAACDLANPVLKLADGNSVFNLTTPGRAYYTSGAPGHCRKGQKLWVDVPMANGTYLQPSAS

SEQ ID NO: 87104 - protein, 221 aa, Setaria italica
  Transcript Sequence Number=SeqID_21130
  Gene Ontology: Mol. function=zinc ion binding; Cellular component =plasma membrane
  Homolog annotation: Hit_ID=B6TUM5; Match level="QueryCoverage=89%, HitCoverage=98%, E-value=7e-83, Identity=78%"; Hit description=PIT1
  Pfam annotation: Domain name=zf-C3HC4; Domain location=20-67; Score =58.4; E_value=2.6e-14; Accession=PF00097.17; Description=Zinc finger, C3HC4 type (RING finger)
MEHEQELPSSSSSLGYLMQCRICHEEEDEVCTTMESPCGCSGSLKYAHRGCVQRWCDEKGSTLCEICLQNFEPGYTMPPKKTPVVETAVTISEHEDMQYVESSESLIDDADYGACSDQVATWCRTLTIMFTIMLLVWHLVAVVMVEAADHCAFSLLTMYLLRAAGILLPFYIVMRLIRMVQRGQQQYWLQMLEDQRRKCINYESYAWPRAAAASNEYSLSQ

SEQ ID NO: 87105 - protein, 48 aa, Setaria italica
  Transcript Sequence Number=SeqID_21131
LNANLNLCPCSLNVVWIKLQSLLKNVLLSVASIGVSLVCCNCILLYYP

SEQ ID NO: 87106 - protein, 120 aa, Setaria italica
  Transcript Sequence Number=SeqID_21132
  Gene Ontology: Mol. function=solute:hydrogen antiporter activity; Cellular component=integral to membrane; Biological process =regulation of pH
  Homolog annotation: Hit_ID=Q9FFR9; Match level="QueryCoverage=100%, HitCoverage=14%, E-value=4e-34, Identity=59%"; Hit description =Na+/H+ antiporter-like protein
MAANATAKCPGPMKATSQGAFQGENPLEYALPLAILQICLVVVVTRGLAYLLRPLRQPRVIAEIIGGILLGPSALGRSEKFLHTVFPAQSMTVLDTLANLGLLFFLFLVGLELDISAIRR

SEQ ID NO: 87107 - protein, 325 aa, Setaria italica
  Transcript Sequence Number=SeqID_21133
  Gene Ontology: Mol. function=pyridoxal phosphate binding; Cellular component=mitochondrion; Biological process=cysteine biosynthetic process from serine
  Homolog annotation: Hit_ID=B6TEX7; Match level="QueryCoverage=99%, HitCoverage=92%, E-value=1e-132, Identity=72%"; Hit description =Cysteine synthase
  Pfam annotation: Domain name=PALP; Domain location=36-325; Score =369.6; E_value=5.5e-108; Accession=PF00291.17; Description=Pyridoxal- phosphate dependent enzyme
MEEEEGRRGIPALLRSPSTPETEAASAHQEHIASDITQLVGWTPLIELKRIAEKDQVNARIVGKLEWYQPLCSVKDRSALRMIEDAEGKGLISPGTTTLIEPTSGNMGIGLAYIALIRGYRFVAVMPAEYSLDKQILLRYLGADVVLTDPMLGFQGQLDKVEQLKKDLPNVHVLDQFANAANPEAHFAWTGPEIWRDTAGKVDIFVAGSGTGGTVSGVGKYLKMKNPAVKVICVEPAESPVISGGKPSRHKIQGVGPGFVPKNLDTSLIDEIITVTAEDAMANARRLSREEGLLVGISSGANLAACLKVASREENQDKMIVTVFP

SEQ ID NO: 87108 - protein, 153 aa, Setaria italica
  Transcript Sequence Number=SeqID_21134
  Gene Ontology: Mol. function=binding; Cellular component=cytoplasm; Biological process=mitotic chromosome condensation
  Homolog annotation: Hit_ID=B9H3B9; Match level="QueryCoverage=92%, HitCoverage=50%, E-value=1e-44, Identity=60%"; Hit description =Condensin complex components subunit (Fragment)
  Subcellular localization annotation: CTP_CleavageSite=36; ConfidenceScore=5.04e-01
NQVRRAAYSVLSTKFPLQSLSIKQRTTLLHRGLSDRSASVNNGCLKMLKDEWLVKYCGGDAIALLRFLDVETYESVGESVMAVLLKEGALRVQDGQSIRQYFTANGENEEEQLSNIQLMDAEVALYWKIMCKHLQAEAQVKGSEAATTTGAEA

SEQ ID NO: 87109 - protein, 142 aa, Setaria italica
  Transcript Sequence Number=SeqID_21135
  Homolog annotation: Hit_ID=B6UE27; Match level="QueryCoverage=97%, HitCoverage=21%, E-value=2e-27, Identity=59%"; Hit description =Ternary complex factor MIP1
SDAHREAPKLSVSSRSAQLDETPKAKAPVRRGGDPMLHYSCPPLSKGRNGAVADDSSPSTCPRRTTDFDHGLRSQSALSFRGVCSSRISPTEDSLARALRSCHSQPFSFLEEGETATSGVVSLADYLGTNVADHIPETPNNL

SEQ ID NO: 87110 - protein, 135 aa, Setaria italica
  Transcript Sequence Number=SeqID_21136
  Homolog annotation: Hit_ID=B6UE27; Match level="QueryCoverage=71%, HitCoverage=15%, E-value=1e-26, Identity=62%"; Hit description =Ternary complex factor MIP1
DENLTFAKFRLFLLNFKSIFVCSGCVHEQEGETATSGVVSLADYLGTNVADHIPETPNNLSEEMVRCMAGVFCKLADPPLVHHRPSSSPSSSLSSASVVSPQYLGDMWSPNCRREATLDSRLINPFHVEGLKEFS

SEQ ID NO: 87111 - protein, 89 aa, Setaria italica
  Transcript Sequence Number=SeqID_21137
EEAGNGKTSHAPSEGATEQAMEVDGGVPEGRCGDLESLLGAVKSSEVLENRIALINQLESSFEYSPDDLSLILDSLTVSLPCAPPPPPP

SEQ ID NO: 87112 - protein, 97 aa, Setaria italica
  Transcript Sequence Number=SeqID_21138
  Gene Ontology: Mol. function=hydrolase activity, hydrolyzing O -glycosyl compounds; Cellular component=cell wall; Biological process= carbohydrate metabolic process
  Homolog annotation: Hit_ID=B6TH17; Match level="QueryCoverage=90%, HitCoverage=31%, E-value=2e-20, Identity=55%"; Hit description =Xyloglucan endotransglucosylase/hydrolase protein 15
  Pfam annotation: Domain name=Glyco_hydro_16; Domain location=1-97; Score=6.5; E_value=2.8e-07; Accession=PF00722.13; Description =Glycosyl hydrolases family 16
RLQHFYMDQDMDTLALCLDRSSGSGFSSNGSYLYARYDMDIKLVVNDSAGTVATFYLMPDDVPWEYHDEVDMEFLGNATGEPYTLHTNVYVNGAGGR

SEQ ID NO: 87113 - protein, 193 aa, Setaria italica
  Transcript Sequence Number=SeqID_21139
  Subcellular localization annotation: CTP_CleavageSite=25; ConfidenceScore=5.03e-01
MAGTKLVALGFIVLLSIMSLANAARVARYSSSGGTGTGEGGGGGYVNGAGSGSGSGAGSGESGSNGVHASAGGGGGGGGSSNYGGSGYGGGSGSGSGSSQYIEGSYYGYGGYSNAGGNGGGGGGGQAGGNYGSSGQGGGSGTGSGSSQAGTYRYGPGYANANANGNGEGKGTGQNGGSGGGQGGGSGYGNANP

SEQ ID NO: 87114 - protein, 291 aa, Setaria italica
  Transcript Sequence Number=SeqID_21140
  Gene Ontology: Mol. function=DNA binding; Cellular component=nucleus; Biological process=regulation of transcription
  Homolog annotation: Hit_ID=B6TTB8; Match level="QueryCoverage=97%, HitCoverage=83%, E-value=2e-80, Identity=58%"; Hit description=NAC domain protein NAC5
  Pfam annotation: Domain name=NAM; Domain location=1-93; Score=172.1; E_value=1.6e-48; Accession=PF02365.7; Description=No apical meristem (NAM) protein
EADLNKCEPWDLPSLAKMGEKEWYFFCLKDRKYPTGLRTNRATEAGYWKATGKDKDIFRGKALVGSKKTLVFYTGRAPKGEKSGWVMHEYRLHGKLHGAMPKPASKNEWVLCRVFKKSLIVGVGVPPAARRGAMEMAAKMDDMAAISHLPPLMDVSGAAANPAAAHVTCFSNALEGQSFLNQTAAPQVAAAAATDHLGLASSSPFLSSFAQYGSLHHGGVSLVQLLESSGYAGGGGLPDMPKQQQQPAPPCKGGERERLSASQDTGLTSDVHPEISSSSGQRFDHEQLWGY

SEQ ID NO: 87115 - protein, 151 aa, Setaria italica
  misc_feature (90)..(90): Xaa can be any naturally occurring amino acid
  misc_feature (131)..(131): Xaa can be any naturally occurring amino acid
  Transcript Sequence Number=SeqID_21141
  Gene Ontology: Mol. function=metal ion binding; Cellular component =integral to membrane; Biological process=ubiquitin-dependent protein catabolic process
  Homolog annotation: Hit_ID=Q70CE6; Match level="QueryCoverage=97%, HitCoverage=77%, E-value=1e-14, Identity=33%"; Hit description=Zinc finger protein (Fragment)
  Pfam annotation: Domain name=zf-C3HC4; Domain location=108-146; Score= 9.1; E_value=0.0093; Accession=PF00097.17; Description=Zinc finger, C3HC4 type (RING finger)
CQMNAVDSSPFREPPDLFEVEATNGMPRASIDKLPESWITEEYKRDGVGDLSGCSVCLQVRRNSEHLCSSSFLIALRSITFRQKNAAWIXICKCAENFFHPSWMLPFICAGFPGREKVRSLPDCWHVFHVXCIDGWLIKHGSCPLCRRSSR

SEQ ID NO: 87116 - protein, 246 aa, Setaria italica
  Transcript Sequence Number=SeqID_21142
  Gene Ontology: Mol. function=metal ion binding; Cellular component =integral to membrane; Biological process=ubiquitin-dependent protein catabolic process
  Homolog annotation: Hit_ID=B6U0R9; Match level="QueryCoverage=76%, HitCoverage=71%, E-value=5e-56, Identity=56%"; Hit description=RING -H2 finger protein ATL2B
  Pfam annotation: Domain name=zf-C3HC4; Domain location=201-242; Score= 18.2; E_value=0.00085; Accession=PF00097.17; Description=Zinc finger, C3HC4 type (RING finger)
  Subcellular localization annotation: CTP_CleavageSite=33; ConfidenceScore=5.79e-01
MDSSAAFLQHQPQRSSSNVSLSSLARTGSGGGSAARGRGATRGRRMMRRVCRGVITFIFAIAGLFLGAVTGGLIGLATESGLFRGTGIGAITGALVSIEVVDSSIRLWQARRSGIWSILYVLNVIYSLLTGRLVREKVDPAVQRVVRSQMNAVDSSPFREPPDLFEVEATNGMPRASIDKLPESWITEEYKRDGVGDLSGCSVCLQDFQVGEKVRSLPDCWHVFHVPCIDGWLIKHGSCPLCRRKL

SEQ ID NO: 87117 - protein, 40 aa, Setaria italica
  Transcript Sequence Number=SeqID_21143
EWESPRILGKNFKLYGLNVMQLVCHLCSFTNSTNTTIHVP

SEQ ID NO: 87118 - protein, 90 aa, Setaria italica
  Transcript Sequence Number=SeqID_21144
  Gene Ontology: Cellular component=nucleus; Biological process =multicellular organismal development
  Homolog annotation: Hit_ID=Q9AT61; Match level="QueryCoverage=85%, HitCoverage=28%, E-value=1e-23, Identity=70%"; Hit description=LOB domain-containing protein 13
  Pfam annotation: Domain name=DUF260; Domain location=1-71; Score =89.0; E_value=1.6e-23; Accession=PF03195.6; Description=Protein of unknown function DUF260
AAVHKVFGASNVSKMLLEVHESQRADAANSLVYEANLRLRDPVYGCMGAILTLQQQVQALEAELATVRAEIVRHRYRPATASAAVATVPP

SEQ ID NO: 87119 - protein, 75 aa, Setaria italica
  Transcript Sequence Number=SeqID_21145
  Gene Ontology: Mol. function=structural constituent of ribosome; Cellular component=intracellular; Biological process=translation
  Homolog annotation: Hit_ID=Q0QG44; Match level="QueryCoverage=85%, HitCoverage=52%, E-value=7e-26, Identity=84%"; Hit description =Mitochondrial ribosomal protein S14 (Fragment)
VHDTFTLFRLPLWGTLIKPKPNMFMHLQARGYHGIAEKRNLLDHKRRLLAEKYELRGKLYKSVCRDPDLPLDMTG

SEQ ID NO: 87120 - protein, 82 aa, Setaria italica
  Transcript Sequence Number=SeqID_21146
  Gene Ontology: Mol. function=succinate dehydrogenase (ubiquinone) activity; Cellular component=mitochondrial inner membrane; Biological process=electron transport chain
  Homolog annotation: Hit_ID=B9SLS5; Match level="QueryCoverage=68%, HitCoverage=19%, E-value=8e-19, Identity=76%"; Hit description =Succinate dehydrogenase, putative
NFEIVVCCYKCLLPYHDCANVHCFSRWIQDSRDQFTKERLDAINDEFKLYRCHTIKNCTHACPKGLNPAKQIDTIKKLQINS

SEQ ID NO: 87121 - protein, 77 aa, Setaria italica
  Transcript Sequence Number=SeqID_21147
LKNSQHKQLHSGLRYQVPNHAMFTIIQSTRGMLGREVVISSLASWKSEQTKEQEQQIHESKYEDNPISISAFRNMFQ

SEQ ID NO: 87122 - protein, 161 aa, Setaria italica
  misc_feature (111)..(111): Xaa can be any naturally occurring amino acid
  Transcript Sequence Number=SeqID_21148
  Gene Ontology: Mol. function=succinate dehydrogenase (ubiquinone) activity; Cellular component=mitochondrial inner membrane; Biological process=electron transport chain
  Homolog annotation: Hit_ID=Q8LB02; Match level="QueryCoverage=66%, HitCoverage=38%, E-value=3e-47, Identity=80%"; Hit description =Succinate dehydrogenase [ubiquinone] iron-sulfur subunit 2, mitochondrial
GLACLTKISSASSASTVSPLPHMFVVKDLVVDMTNFYSQYKSVEPWLKRKDPPPQEGKEIPQTKADRAKLDGMYECILCACCSTSCPSYWWNPEEYLGPAALLHANRLPLXGTLIKPKPNMFMHLQARGYHGIAEKRNLLDHKRGYRTAATSSPRSAWTPY

SEQ ID NO: 87123 - protein, 179 aa, Setaria italica
  Transcript Sequence Number=SeqID_21149
  Gene Ontology: Mol. function=succinate dehydrogenase (ubiquinone) activity; Cellular component=mitochondrial inner membrane; Biological process=electron transport chain
  Homolog annotation: Hit_ID=B9SLS5; Match level="QueryCoverage=49%, HitCoverage=31%, E-value=8e-45, Identity=89%"; Hit description =Succinate dehydrogenase, putative
SASSASTVSPLPHMFVVKDLVVDMTNFYSQYKSVEPWLKRKDPPPQEGKEIPQTKADRAKLDGMYECILCACCSTSCPSYWWNPEEYLGPAALLHANRLPLWGTLIKPKPNMFMHLQARGYHGIAEKRNLLDHKRRLLAEKYELRGKLYKSVCRDPDLPLDMREKFRYKLSKLPRNSSM

SEQ ID NO: 87124 - protein, 284 aa, Setaria italica
  Transcript Sequence Number=SeqID_21150
  Gene Ontology: Mol. function=succinate dehydrogenase (ubiquinone) activity; Cellular component=mitochondrial inner membrane; Biological process=electron transport chain
  Homolog annotation: Hit_ID=Q8LB02; Match level="QueryCoverage=81%, HitCoverage=82%, E-value=1e-109, Identity=79%"; Hit description =Succinate dehydrogenase [ubiquinone] iron-sulfur subunit 2, mitochondrial
  Pfam annotation: Domain name=Fer2; Domain location=66-130; Score =25.0; E_value=0.0003; Accession=PF00111.19; Description=2Fe-2S iron -sulfur cluster binding domain
  Subcellular localization annotation: CTP_CleavageSite=41; ConfidenceScore=5.59e-01
MAAAALLRRSPAARALLSPSLSSRLVASKPHSSSPAPPPPPSSAKAAAPNVKTFSIYRWDPDSPSTKPHLKDYQIDLSDCGPMVLDALLKIKNEQDPSLTFRRSCREGICGSCAMNIDGDNGLACLTKISSASSASTVSPLPHMFVVKDLVVDMTNFYSQYKSVEPWLKRKDPPPQEGKEIPQTKADRAKLDGMYECILCACCSTSCPSYWWNPEEYLGPAALLHANRWIQDSRDQFTKERLDAINDEFKLYRCHTIKNCTHACPKGLNPAKQIDTIKKLQINS

SEQ ID NO: 87125 - protein, 174 aa, Setaria italica
  Transcript Sequence Number=SeqID_21151
  Subcellular localization annotation: CTP_CleavageSite=54; ConfidenceScore=5.60e-01
LLAASQSQRRCHFSYQWLPAPPSGPPLSSCSSCLPGSCWWRRQRPRLQGGAFCRCRTLLSPAATTTYAESHAWKFVSEGAMASLTIRLSCLPAKSARIALANARSIRGTEARCRRRKEEAEPIIALVTYMPFLLKSLFELKTTTFIFFFHLSKSANKICTISFPFQLQFVSVVK

SEQ ID NO: 87126 - protein, 66 aa, Setaria italica
  Transcript Sequence Number=SeqID_21152
SYLIRSNYVVRCMHARTPSKNELKSVCVKMERKSEAQQPEAGAAVSRRRRVRTPARTCRAWPWTAR

SEQ ID NO: 87127 - protein, 194 aa, Setaria italica
  Transcript Sequence Number=SeqID_21153
  Gene Ontology: Mol. function=transferase activity, transferring groups other than amino-acyl groups; Biological process=flavonoid biosynthetic process
  Homolog annotation: Hit_ID=B6D7P1; Match level="QueryCoverage=90%, HitCoverage=39%, E-value=9e-38, Identity=46%"; Hit description =Shikimate O-hydroxycinnamoyltransferase
  Pfam annotation: Domain name=Transferase; Domain location=2-194; Score=-134.2; E_value=0.00022; Accession=PF02458.7; Description =Transferase family
MAAIEVVESELVPPSEPTPRGALWLSNLDLAARNGYTPTVYFFRHPDEQTRSGFFSADVLHAALAAALVPFYPFAGRLAVGRDGRAEIDCNAEGALFVVARSAAALEDFEGFAPSKAMRDMFVPAYEPAGAGTPLLLLQVTFFRCGGVALGTAMHHFVMDGRSAFNFIRTWAGIARGDAGAAVVPSLDRTPLRA

SEQ ID NO: 87128 - protein, 60 aa, Setaria italica
  Transcript Sequence Number=SeqID_21154
CVDQLKILAHLKGLSSRYMLDYFYQPIQMYVRSVPLAKYPQNNDNVLLGFISMSYQVLFG

SEQ ID NO: 87129 - protein, 249 aa, Setaria italica
  Transcript Sequence Number=SeqID_21155
  Gene Ontology: Mol. function=RNA-directed RNA polymerase activity
  Homolog annotation: Hit_ID=Q0DXS3; Match level="QueryCoverage=98%, HitCoverage=33%, E-value=1e-119, Identity=83%"; Hit description =Probable RNA-dependent RNA polymerase 1
  Pfam annotation: Domain name=RdRP; Domain location=1-248; Score =223.4; E_value=6e-64; Accession=PF05183.4; Description=RNA dependent RNA polymerase
SANFALEVAMKCKLKRFAPSVFQIRYGGYKGVVAIDPGSNRKLSLRKSMSKFQSENITLDVLAYSKYQPCFLNRQLITLLSTLGVSGTVFELKQEEAVRQLNRMVTEPQAASEAIELMPMGEVTNVVKELLSCGYQPDHEPYLSMLLQTFRASKLLELKTKSRIFIPQGRAMMGCLDETRTLKYGQVFIQASYCADDHRKFVVTGKVVVAKNPCLHPGDIRVLHAVDVPYLHHMFDCVVFPQQGPRHVF

SEQ ID NO: 87130 - protein, 772 aa, Setaria italica
  misc_feature (27)..(27): Xaa can be any naturally occurring amino acid
  misc_feature (287)..(287): Xaa can be any naturally occurring amino acid
  Transcript Sequence Number=SeqID_21156
  Gene Ontology: Mol. function=RNA-directed RNA polymerase activity
  Homolog annotation: Hit_ID=Q0DXS3; Match level="QueryCoverage=97%, HitCoverage=99%, E-value=0.0, Identity=82%"; Hit description =Probable RNA-dependent RNA polymerase 1
  Pfam annotation: Domain name=RdRP; Domain location=173-551; Score =680.0; E_value=2e-201; Accession=PF05183.4; Description=RNA dependent RNA polymerase
MHCKGHLVYLWMMDWFMSTGCKLPLLXVYFYGPEINVSNRVVRHFSADLDNFLRISFVDEDCEKLRSVDLSPRSASGNDARRTALYNRVLSVLSNGISIGGKHFEFLAFSSSQLRDNSAWMFASRPGLTASDIRKWMGDFRNIRNVAKYAARLGQSFSSSTETLKVHRYEVEEIPDITVITDGTKYIFSDGIGKISANFALEVAMKCKLKRFAPSVFQIRYGGYKGVVAIDPGSNRKLSLRKSMSKFQSENITLDVLAYSKYQPCFLNRQLITLLSTLGVSGTVFDXKQEEAVRQLNRMVTEPQAASEAFNYISYLSHGQKVTNVVKELLSCGYQPDHEPYLSMLLQTFRASKLLELKTKSRIFIPQGRAMMGCLDETRTLKYGQVFIQASYCADDHRKFVVTGKVVVAKNPCLHPGDIRVLHAVDVPYLHHMFDCVVFPQQGPRPHPNECSGSDLDGDIYFVSWDQTLIPSRMVEPMDYTPAPADILDHDVTIEEIQEYFTNYIVNESLGIIANAHVVFADKERLKAESLPCIELAKLFSVAVDFPKTGVPALIPPELHVKEYPDFMEKLDKVTYESSGVIGRLYREIKKHTPHIKHFTRDVARQSYDTDLIVDGYEDYISEAIEFKEEYDFKLGNLMDHYGIKSEAEIISGCILKMAKNFTKSSDADAIRMAVRSLRKEARSWFNEMSTGEDGIGQDAIEAKASAWYHVTYHPQYWGSYNEGYDRPHLISFPWCVYDRLLCIKQRRNFLRKMEPDLTSLLNNMNQNLRFH

SEQ ID NO: 87131 - protein, 55 aa, Setaria italica
  Transcript Sequence Number=SeqID_21157
MARAGALCLALLCLLAAHSAAAQKSTTPAPATAPAATTTPPAPSKKPPTPAATPR

SEQ ID NO: 87132 - protein, 54 aa, Setaria italica
  Transcript Sequence Number=SeqID_21158
  Gene Ontology: Mol. function=hydrolase activity, hydrolyzing O -glycosyl compounds; Cellular component=cell wall; Biological process= carbohydrate metabolic process
  Homolog annotation: Hit_ID=B8XXI5; Match level="QueryCoverage=88%, HitCoverage=16%, E-value=4e-10, Identity=58%"; Hit description =Xyloglucan endotransglycosylase
  Pfam annotation: Domain name=XET_C; Domain location=1-45; Score=59.2; E_value=1.6e-14; Accession=PF06955.4; Description=Xyloglucan endo -transglycosylase (XET)
SWWDQPPAWALDEAQRLDNAWVGRNVLIYDYCDDRKRFPTPPEECALRNAGAAS

SEQ ID NO: 87133 - protein, 349 aa, Setaria italica
  Transcript Sequence Number=SeqID_21159
  Gene Ontology: Mol. function=nucleoside-triphosphatase activity; Cellular component=nucleus; Biological process=DNA replication initiation
  Homolog annotation: Hit_ID=Q5JKB0; Match level="QueryCoverage=99%, HitCoverage=38%, E-value=0.0, Identity=95%"; Hit description =Putative replication licensing factor MCM4
  Pfam annotation: Domain name=MCM; Domain location=1-254; Score=400.3; E_value=3.2e-117; Accession=PF00493.15; Description=MCM235 family
QYMHKLSPRGIYTSGRGSSAVGLTAYVAKDPETGETVLESGALVLSDKGVCCIDEFDKMSDNARSMLHEVMEQQTVSIAKAGIIASLNARTSVLACANPTESRYNPRLSVIDNIHLAPTLLSRFDLIYLILDKADEQTDRRLAKHIVSLHFENPNLEELEVLDLPTLVAYISYARKYIQPQLSDEAAEELTRGYVEMRKRGNSPGSRKKVITATARQIESLIRLSEALARMRFSEVVEVRDVVEAFRLLEVAMQQSATDHATGTIDMDLIMTGISASERQRRENLVAATRNLIMEKMQLGGPSMRMTELLEEMRKQSSMEIQLHDLRGALGTLMTEGAVVIHGDNVKRV

SEQ ID NO: 87134 - protein, 112 aa, Setaria italica
  Transcript Sequence Number=SeqID_21160
GGSLTRSPDAAIGILMRILKNAPGLRERLLTAPAAPVPQEPSSLQRVVTEEHCSGASSSAGMPSTLLKSRTAADALEELNRYKEIRESILNRGKGHPRDDAELEEKPADGDT

SEQ ID NO: 87135 - protein, 126 aa, Setaria italica
  Transcript Sequence Number=SeqID_21161
  Gene Ontology: Mol. function=acid-amino acid ligase activity; Cellular component=intracellular; Biological process=ubiquitin -dependent protein catabolic process
  Homolog annotation: Hit_ID=B9SMZ3; Match level="QueryCoverage=98%, HitCoverage=3%, E-value=2e-41, Identity=65%"; Hit description=E3 ubiquitin protein ligase upl2, putative
HLLSLAQGWGSKEEGLGLYSCVVANEGNQQEGLSLFPADMENKYDGSQHRLGSTLHFEYNLSPTQDPDQTSDKSKSSNLCVIHIPDMHLQKEDDLSILKQCVDKFNVPPEHRFALLTRIRYARAFN

SEQ ID NO: 87136 - protein, 54 aa, Setaria italica
  Transcript Sequence Number=SeqID_21162
DVAPVNVVNVVFRRLLSAVESTELLRKHMVSSGGFFRNYHTNLDPSFAFERYCL

SEQ ID NO: 87137 - protein, 450 aa, Setaria italica
  misc_feature (19)..(19): Xaa can be any naturally occurring amino acid
  misc_feature (273)..(273): Xaa can be any naturally occurring amino acid
  Transcript Sequence Number=SeqID_21163
  Gene Ontology: Mol. function=metal ion binding; Cellular component =plasma membrane
  Homolog annotation: Hit_ID=B6U4R6; Match level="QueryCoverage=100%, HitCoverage=74%, E-value=0.0, Identity=90%"; Hit description=Ankyrin like protein
  Pfam annotation: Domain name=DUF248; Domain location=1-444; Score =758.5; E_value=4.8e-225; Accession=PF03141.8; Description=Putative methyltransferase
  Pfam annotation: Domain name=Methyltransf_11; Domain location=66-161; Score=27.1; E_value=7.3e-05; Accession=PF08241.4; Description =Methyltransferase domain
  Pfam annotation: Domain name=Methyltransf_12; Domain location=66-159; Score=9.8; E_value=0.058; Accession=PF08242.4; Description =Methyltransferase domain
  Pfam module annotation: Pfam domain module=DUF248::Methyltransf _11::Methyltransf_12; Domain location=1-444::66-161::66-159
RSNVNHSHLAEVKGGQNWXHEKGKLWWFPGGGTHFKHGASDYIERLGNMTTNSTGDLRSAGVVQVLDVGCGVASFSAYLLPLDIQTMSFAPKDGHENQIQFAVERGIGAMISVLATKQLPYPGNSFEMVHCSRCRVDWHENDGILLKEVDRLLRPNGYFVYSAPPAYRKDKDFPVIWEKLVNITTAMCWKLIAKHVQTAIWIKPADESCRQKNADMKLLNICESNDNVSPSWKIPLMNCVRLNKDKSEIKKFPSRPDRLSFYFKSLEMIGVTXSQFEKNNEFWKNQVHKYWSFLDVEKTSVRNVMDMNANYGGFAAALSNDPVWIMNIVPYTMSNTLPIIYDRGLLGSYHDWCEPFSTYPRSYDLLHAFHLFSHYEGRNEDCLLEDIMLEMDRIIRPQGSIIIRDEKNTLSRIIDLAPKFLWDVSTHMLENEENRTEKVLICRKKFWAIV

SEQ ID NO: 87138 - protein, 84 aa, Setaria italica
  misc_feature (8)..(8): Xaa can be any naturally occurring amino acid
  Transcript Sequence Number=SeqID_21164
FYYPPPTXGGNNGASQQGGGSGGGGGGGAYPTPPPPNPFLPYFPFYYYSPPPPHYSGAWAVTATSSPVATLLAVILSGLLLLQW

SEQ ID NO: 87139 - protein, 58 aa, Setaria italica
  Transcript Sequence Number=SeqID_21165
TCIATITHKIIEMHHKTIIRHIIEYVIVISITHKIIEMHHKTIIRYIIEYVIVISNWQ

SEQ ID NO: 87140 - protein, 50 aa, Setaria italica
  Transcript Sequence Number=SeqID_21166
QKYTIVNLLFNTNLLIFSFKYQSQCTRDNLYSLSLTWLTSDNPKISLICD

SEQ ID NO: 87141 - protein, 93 aa, Setaria italica
  Transcript Sequence Number=SeqID_21167
  Gene Ontology: Mol. function=transferase activity, transferring nitrogenous groups; Biological process=cellular amino acid and derivative metabolic process
  Homolog annotation: Hit_ID=Q5Z7R2; Match level="QueryCoverage=94%, HitCoverage=27%, E-value=5e-20, Identity=55%"; Hit description =Putative nicotianamine aminotransferase B
MEGDRSSRRWLFVSPNPAVAAAGERSVQPYLLDIHGCLDERGPRPVIPLSIGDPSSAPSYRTAPEAVEAVATALRSGQFDGYPSRDTNSQLAE

SEQ ID NO: 87142 - protein, 72 aa, Setaria italica
  Transcript Sequence Number=SeqID_21168
EQVPPVTKDAATESSTDGPQQNVREQVKQPDEQSASKLKEKLNENKQAPKEDKPTEVFPDGSQAELLNETTT

SEQ ID NO: 87143 - protein, 192 aa, Setaria italica
  misc_feature (75)..(75): Xaa can be any naturally occurring amino acid
  misc_feature (137)..(137): Xaa can be any naturally occurring amino acid
  Transcript Sequence Number=SeqID_21169
  Gene Ontology: Mol. function=protein complex binding; Cellular component=nucleotide-excision repair complex; Biological process =transcription-coupled nucleotide-excision repair
  Homolog annotation: Hit_ID=Q6Z0X1; Match level="QueryCoverage=82%, HitCoverage=34%, E-value=2e-76, Identity=87%"; Hit description =Putative cockayne syndrome 1 homolog
  Pfam annotation: Domain name=WD40; Domain location=137-177; Score =0.1; E_value=38; Accession=PF00400.24; Description=WD domain, G-beta repeat
  Pfam annotation: Domain name=WD40; Domain location=34-73; Score=16.6; E_value=0.11; Accession=PF00400.24; Description=WD domain, G-beta repeat
  Pfam annotation: Domain name=WD40; Domain location=93-132; Score =28.3; E_value=3.1e-05; Accession=PF00400.24; Description=WD domain, G-beta repeat
  Pfam module annotation: Pfam domain module=WD40::WD40::WD40; Domain location=137-177::34-73::93-132
MWLEEVRGRERGELRARRFEAAARARRAASLALSNRKEFATPHHGAVNSLQVDLTEGRYLLSGASDGSAAVFDVXNATDCEAGFIAKHKHILLVDKQHQNGHKFAISAAVWYPVDTGLFVTASFDQYVKVWDTNSTXKVVMDFKMPGKVFTAAMSPIATTQMLIATGSADVQVRLCDIASGAFTHTLSGHRG

SEQ ID NO: 87144 - protein, 143 aa, Setaria italica
  misc_feature (61)..(61): Xaa can be any naturally occurring amino acid
  Transcript Sequence Number=SeqID_21170
  Gene Ontology: Mol. function=protein serine/threonine kinase activity; Cellular component=plasma membrane; Biological process =protein amino acid phosphorylation
  Homolog annotation: Hit_ID=B6SWD9; Match level="QueryCoverage=81%, HitCoverage=16%, E-value=2e-45, Identity=78%"; Hit description =Carbohydrate binding protein
  Pfam annotation: Domain name=Lectin_legB; Domain location=1-117; Score=-31.5; E_value=3.3e-08; Accession=PF00139.11; Description =Legume lectin domain
AAAIEFDTLMDVQFGDVNGNHVGLDLGSMVSAAVADLGEAGVELTSGRTVNAWIDYRPDKXGILEVSVSYAANRPRVPVLSAPLDLGETVKDAAFVGFSASTQGSTEVHAIEWWSFSTASPAPAPHSAPTPPPESPAVEPPPS

SEQ ID NO: 87145 - protein, 289 aa, Setaria italica
  misc_feature (29)..(29): Xaa can be any naturally occurring amino acid
  Transcript Sequence Number=SeqID_21171
  Gene Ontology: Mol. function=electron carrier activity; Biological process=oxidation reduction
  Homolog annotation: Hit_ID=Q2R447; Match level="QueryCoverage=100%, HitCoverage=54%, E-value=1e-127, Identity=76%"; Hit description =Cytochrome P450 family protein, expressed
  Pfam annotation: Domain name=p450; Domain location=1-281; Score= -54.7; E_value=5.1e-09; Accession=PF00067.14; Description=Cytochrome P450
VREGYELVGTFNLGDHYYTTLWGPLMDLXGVGPACRGLAARVRGYFGKVIEERRVARDCHDRDDLLSYMLSLPEDERLEDSDVIAVLWEMVFPGVDVVAILLEWTMARVALHPDIQSKAHEEIDAVVGVHRPITDADIPNLHFLQCIVKETLRMHPPGPLLSWARLAVHDARVGKYVVPAGTTAMVNMWAISHDEAIWGDPWVFRPERFGVEDVSVLGSDLRLAPFGSGRRVCPGRMMGLSTVQLWLGRLLQEYEWSPAKPVKLAECLRLSMEMKQPLVCRAVRRGEAA

SEQ ID NO: 87146 - protein, 335 aa, Setaria italica
  misc_feature (232)..(232): Xaa can be any naturally occurring amino acid
  Transcript Sequence Number=SeqID_21172
  Gene Ontology: Mol. function=metal ion binding; Cellular component =integral to membrane
  Homolog annotation: Hit_ID=B6TEJ9; Match level="QueryCoverage=88%, HitCoverage=70%, E-value=1e-167, Identity=96%"; Hit description=Zinc finger, C3HC4 type family protein
  Pfam annotation: Domain name=zf-C3HC4; Domain location=274-311; Score= 36.6; E_value=9.8e-08; Accession=PF00097.17; Description=Zinc finger, C3HC4 type (RING finger)
  Pfam annotation: Domain name=zf-MIZ; Domain location=274-314; Score= -5.7; E_value=0.0078; Accession=PF02891.12; Description=MIZ zinc finger
  Pfam module annotation: Pfam domain module=zf-C3HC4::zf-MIZ; Domain location=274-311::274-314
AEEVIVEEEEEEGHATRARAEEPAPAAGAGEGGRESSSSYQRYDIQQVARWVEQILPFSLLLLVVFIRQHLQGFFVTIWIAAVMFKSNDILRKQTALKRERKIPVLVGITVLFVVHVSGFYWCYKNGDLIRPLLMLPPKEIPPFWHAIFIILVNDTMVRQTAMIVKCLLLMYYKNSRGRSYRRQGQMLTIVEYFLLLYRALLPTPVWYRFFLNKEYGSLFSSLTTGLYLTFXKLTSVVEKVQSFLTALRALSHKDFHYGSYATSEQVLVAGDMCVICQEKMHVPILLRCKHIFCEDCVSEWFERERTCPLCRALVKPADLRSFGDGSTSLFFQLF

SEQ ID NO: 87147 - protein, 292 aa, Setaria italica
  misc_feature (63)..(63): Xaa can be any naturally occurring amino acid
  Transcript Sequence Number=SeqID_21173
  Gene Ontology: Mol. function=nucleoside-triphosphatase activity; Cellular component=cytoskeleton; Biological process=protein transport
  Homolog annotation: Hit_ID=B9SYF3; Match level="QueryCoverage=97%, HitCoverage=51%, E-value=1e-111, Identity=51%"; Hit description =Transitional endoplasmic reticulum ATPase, putative
  Pfam annotation: Domain name=AAA; Domain location=62-252; Score =294.2; E_value=2.8e-85; Accession=PF00004.21; Description=ATPase family associated with various cellular activities (AAA)
  Pfam annotation: Domain name=AAA_2; Domain location=58-194; Score= -43.7; E_value=0.027; Accession=PF07724.6; Description=ATPase family associated with various
  Pfam annotation: Domain name=AAA_5; Domain location=62-199; Score= -6.8; E_value=0.0035; Accession=PF07728.6; Description=ATPase family associated with various
  Pfam module annotation: Pfam domain module=AAA::AAA_2::AAA_5; Domain location=62-252::58-194::62-199
WESARSMVGPSITRGVTKELSTVSWDDIGGLKDLKKELQKAVEWPIKHAAGYDRLGITPVRGXLLHGPPGCSKTTLAKAAAHASQASFFSLSGAELYSKYVGEGEALLRRTFQKARLASPSIIFFDEADAIAPKRTGPGGNSSGGVTVGERLLSTLLTEMDGLELATGIIVLAATNRPNAIDAALMRPGRFDKVLYVPPPDVEGRYEILRIHTRKMKLGEDVDLWKIAECTELFTGADLEGLCREAGMAALREDLSASSIHNTHFQTARSSLRPSLTKAGVDKYSNAAINDL

SEQ ID NO: 87148 - protein, 90 aa, Setaria italica
  Transcript Sequence Number=SeqID_21174
  Gene Ontology: Mol. function=phospholipase D activity; Cellular component=membrane; Biological process=phosphatidylcholine metabolic process
  Homolog annotation: Hit_ID=Q6AVR2; Match level="QueryCoverage=100%, HitCoverage=10%, E-value=3e-44, Identity=88%"; Hit description =Phospholipase D
HDLHCKVEGPAAYDILTNFEQRWRKATKWKVNLKKVASWHYDTLIKLNRMSWIVSPATGEANAHVCDEQDPENWHVQVFRSIDSGSIKGF

SEQ ID NO: 87149 - protein, 58 aa, Setaria italica
  Transcript Sequence Number=SeqID_21175
  Gene Ontology: Mol. function=DNA binding; Cellular component=nucleus; Biological process=regulation of transcription, DNA-dependent
  Homolog annotation: Hit_ID=Q653H7; Match level="QueryCoverage=100%, HitCoverage=8%, E-value=2e-24, Identity=90%"; Hit description=Auxin response factor 18
MITFVDSAAMERERESDKCMDPQLWHACAGGMVQMPAVHSKVYYFPQGHAEHAQGPVE

SEQ ID NO: 87150 - protein, 41 aa, Setaria italica
  Transcript Sequence Number=SeqID_21176
IICWYEYLICYSSCLMEPLCICCFLLLVFFVTVHIRSNKTC

SEQ ID NO: 87151 - protein, 100 aa, Setaria italica
  Transcript Sequence Number=SeqID_21177
  Subcellular localization annotation: CTP_CleavageSite=46; ConfidenceScore=5.04e-01
GGAAWILLLFFSSFIFITGNKVSLQMSMTMQIKLNQQQDKFLSFFRAKEVGAWRVTLSEHHVEMLLAILLLCSTYYIRNSECLVACSTPVQNVDWLSFVL

SEQ ID NO: 87152 - protein, 248 aa, Setaria italica
  Transcript Sequence Number=SeqID_21178
  Homolog annotation: Hit_ID=B6UIB9; Match level="QueryCoverage=87%, HitCoverage=51%, E-value=1e-96, Identity=78%"; Hit description=PQ loop repeat family protein
  Pfam annotation: Domain name=PQ-loop; Domain location=65-129; Score =98.3; E_value=2.6e-26; Accession=PF04193.6; Description=PQ loop repeat
MEDVLDQINEASVHNPTFFSCNLSFRSGAEMGVFSGTPPSCPSSRHCAEWARTYLKYCLCSQKDSAALALGLISVISWGVAEVPQIITNYRQKSTEGLSVAFLMTWIVGDMFNLIGCFLEPATLPTQFYMALLYTITTVILTGQTVYYSHIYHRLKAKKSRATSKPQKHQRGDTSLREKLLGAKDGGASGNNHQSDATIPIPSSPIPVNTEFTEQYHAPSSPTSDYYYVSARSLSRSPVPTAGTWLGN

SEQ ID NO: 87153 - protein, 81 aa, Setaria italica
  Transcript Sequence Number=SeqID_21179
  Subcellular localization annotation: CTP_CleavageSite=57; ConfidenceScore=5.63e-01
ALRISPVVIFIPQQPLDIPWLVRNPPWSSTRGTTPLDASSSSSSSSSWFLGSAPLLRQSGRGADGHGRPAGSGKREAMLGM

SEQ ID NO: 87154 - protein, 108 aa, Setaria italica
  Transcript Sequence Number=SeqID_21180
PAASVPAAEVAAPAVKAKEEFDADAGYAGHLEHEFSPDSGGGESCVTTESDEDASSSPSYVTDSWRSMAPAQERAVLERELSLPSQSVDCDGDGDDDMDAMWKAIMQK

SEQ ID NO: 87155 - protein, 65 aa, Setaria italica
  Transcript Sequence Number=SeqID_21181
  Gene Ontology: Mol. function=protein binding; Cellular component =nucleus; Biological process=regulation of transcription, DNA -dependent
  Homolog annotation: Hit_ID=Q8H2X8; Match level="QueryCoverage=100%, HitCoverage=10%, E-value=3e-22, Identity=80%"; Hit description =Protein SHORT-ROOT 1
RRMRSAGFSPVAFSEDVADDVRSLLRRYREGWSMRDAGLDDSAAGAGVFLAWKEQPLVWASAWKP

SEQ ID NO: 87156 - protein, 109 aa, Setaria italica
  misc_feature (84)..(84): Xaa can be any naturally occurring amino acid
  Transcript Sequence Number=SeqID_21182
  Gene Ontology: Mol. function=zinc ion binding; Biological process =carbohydrate metabolic process
  Homolog annotation: Hit_ID=Q75IS6; Match level="QueryCoverage=88%, HitCoverage=6%, E-value=4e-21, Identity=47%"; Hit description =Putative Mutator-like transposase
  Pfam annotation: Domain name=SWIM; Domain location=46-83; Score=18.6; E_value=0.0043; Accession=PF04434.9; Description=SWIM zinc finger
REVYTNEIFKLFQDEVIAARDSCDVKSMAQLGEIRITGISDDSGKIKTVQYNTCTKIAQCSCRLFESVGIPCSHIIVVLKGKSXNEIPSHYIMQRWTKMATWINIFGSN

SEQ ID NO: 87157 - protein, 47 aa, Setaria italica
  Transcript Sequence Number=SeqID_21183
STHHTRTMHSRQPVKSLEHLQQFGRIEDQKFVLRVLYNSYTLLQQLW

SEQ ID NO: 87158 - protein, 72 aa, Setaria italica
  Transcript Sequence Number=SeqID_21184
  Subcellular localization annotation: CTP_CleavageSite=44; ConfidenceScore=5.07e-01
RGSCRHWSRAQRSLSHTQTLSPLAMHTIRGQRARARSSDVKYVTAAAAAADGASNGTAAKPFTAHYFPQELD

SEQ ID NO: 87159 - protein, 594 aa, Setaria italica
  Transcript Sequence Number=SeqID_21185
  Gene Ontology: Mol. function=serine-type peptidase activity; Cellular component=lysosome; Biological process=proteolysis
  Homolog annotation: Hit_ID=B6TWH6; Match level="QueryCoverage=77%, HitCoverage=84%, E-value=0.0, Identity=88%"; Hit description =Lysosomal Pro-X carboxypeptidase
  Pfam annotation: Domain name=Abhydrolase_1; Domain location=213-466; Score=-10.4; E_value=0.04; Accession=PF00561.12; Description =alphabeta hydrolase fold
  Pfam annotation: Domain name=Peptidase_S28; Domain location=143-574; Score=261.9; E_value=1.5e-75; Accession=PF05577.4; Description =Serine carboxypeptidase S28
  Pfam module annotation: Pfam domain module=Abhydrolase_1::Peptidase _S28; Domain location=213-466::143-574
  Subcellular localization annotation: CTP_CleavageSite=51; ConfidenceScore=5.54e-01
MSSTSPPPPPPPTAPATARRRSRSRRTTSRRSWTTSPSRPCERERWAAAPMAAAASSAPPLLALLPLLLLLAAFSPATATAARSSNPRAPFPPLAPLHLQALRQQRARARSSDVKYVTAAAAAADGASNGTAAKPFTAHYFPQELDHFTFTPNASMVFYQKYLVNDTYWRRPSGGRKGGAAGPLFVYTGNEGDIEWFATNTGFMFDIAPKFGALLVFIEHRFYGESKPFGNDSYKSAETLGYLTSTQALADFAILIGSLKQNLSAEGAPVVVFGGSYGGMLASWFRIKYPHVAIGALASSAPILQFDYITPWSSFYDAVSQDFKSESFNCFSVIKATWDVLDERGASDKGLLELSKLFRACKTVKYAYSIPNWLSTAFTYTAMVDYPTPANFLENLPAYPVKEMCKIIDGFPTNTDILEKAFAAASLYYNYTGDLTCNPIEDEDDPHGLDGWQWQACTEMIMPMTVSNESMFPPSSFSYKDRSDGCFQSWGVRPRPHWITTEYGGYKIDKVLKRFGSNIIFSNGMRDPWSRGGVLKNISSSIIALVTEKGAHHLDFRSATKGDPDWVIEQRRQEVEIIQGWIDQYHQDMAEIYY

SEQ ID NO: 87160 - protein, 227 aa, Setaria italica
  misc_feature (17)..(17): Xaa can be any naturally occurring amino acid
  misc_feature (103)..(103): Xaa can be any naturally occurring amino acid
  misc_feature (113)..(113): Xaa can be any naturally occurring amino acid
  Transcript Sequence Number=SeqID_21186
  Homolog annotation: Hit_ID=Q00SL2; Match level="QueryCoverage=51%, HitCoverage=43%, E-value=3e-11, Identity=38%"; Hit description=UV radiation resistance associated protein (ISS)
EANNLLSGENGCGCLKXITQKLRMRQQYMVTQVAWVYPVRPLDEKSPDHKTGYTPSIIKTSNAESILPDGSQKRPLAILGLQLPKPTAKKTGYFGDRTDFRNXSTVLGYVAHXSLIASYLNVPLRYPLRFGGSRSYILDHSPLVEPSSMTSVVSSVSPSTSMRTMEFPLFFDGQETTRSAYAIFLLNKDIEQLLNYIGAESLGPRHVLANLKQLTTIIQSQQYISTD

SEQ ID NO: 87161 - protein, 536 aa, Setaria italica
  misc_feature (503)..(503): Xaa can be any naturally occurring amino acid
  Transcript Sequence Number=SeqID_21187
  Gene Ontology: Mol. function=transferase activity
  Homolog annotation: Hit_ID=Q5QPY8; Match level="QueryCoverage=99%, HitCoverage=100%, E-value=0.0, Identity=65%"; Hit description =Glycosyltransferase
  Pfam annotation: Domain name=DUF563; Domain location=149-400; Score =445.0; E_value=1.1e-130; Accession=PF04577.6; Description=Protein of unknown function (DUF563)
MGGDPGKLIKSVKGAAQKYLGVGFLLGFFLVLLTYFTVSEQFAISAPNAIRRSSPGHAHPSPSPITPAEEKKRQQPPVIEEKPPKAEFAAEEKPPKAEHHAAEEKPPAVDVEEPHTKTEEDQKPVADGGRSSIGGDGATREEGAPAKKPACDIQGPWASDVCDVTGDVRIRGSAGTILIAPSIESGGNPNPQEWLIRPYSRKHQAGIKEVTVREMASAADAPACDVRSPVPAMVFAMGGLTGNYWHDFSDVLIPLYLQAVRFKGEVQLVVENFQPWYAGKYRTILKRLSRYDIVDMDKDDKVRCFPGAVVGIRMHKEFSIDPAREPLGHSMPEFTRFLRETFSLPRDAPAKLTGADGEDNEKVRPRMMIISRRHPRKLMNVDAVVALAERVGFEVVIGDPPFNVDVGEFAKEVNAVDALVGVHGAGLTNSVFLPTGAVFIQVVPYGKMEHIGEVDFGVPAVDMGLRYIAYSAGVEESTLVETLGRDHPAVRDPESIHRSGWGXVAEYYLGRQDIRLDLERFEPVLRKAMQMLREQQ

SEQ ID NO: 87162 - protein, 101 aa, Setaria italica
  Transcript Sequence Number=SeqID_21188
VRFPPGRRRRSRGRDEAVEVDPRECEADPEVPDPVGQGHEAVGRHGGPERRLLLQEPPEPERRRRRRRREALRHGSPQHGRHCCLMGLGYLSLANSDSMGG

SEQ ID NO: 87163 - protein, 160 aa, Setaria italica
  Transcript Sequence Number=SeqID_21189
  Gene Ontology: Mol. function=hydrolase activity; Cellular component =mitochondrion
  Homolog annotation: Hit_ID=B2BXS0; Match level="QueryCoverage=82%, HitCoverage=83%, E-value=7e-19, Identity=43%"; Hit description =AcylCoa-1
  Pfam annotation: Domain name=4HBT; Domain location=68-145; Score =57.4; E_value=5.5e-14; Accession=PF03061.14; Description =Thioesterase superfamily
MGKQEDHRSKDGEVAVEGGPVMDWQLEPGVASKLYDVFTVAGLRVDAIEPGRALICSFTVPTRLTDGSKRMHGGALASLVDLVGSAVFFAGGSPTTGVSLEITISYLNAARANEEIEIDARVLGIGETTGCVTVEVRKKGTGEVIAHGRHTKYLAVSSKL

SEQ ID NO: 87164 - protein, 104 aa, Setaria italica
  misc_feature (96)..(96): Xaa can be any naturally occurring amino acid
  Transcript Sequence Number=SeqID_21190
  Gene Ontology: Mol. function=nucleotide binding; Cellular component =intracellular; Biological process=small GTPase mediated signal transduction
  Homolog annotation: Hit_ID=P92978; Match level="QueryCoverage=86%, HitCoverage=45%, E-value=5e-32, Identity=81%"; Hit description=Rac -like GTP-binding protein ARAC11
  Pfam annotation: Domain name=Ras; Domain location=8-86; Score=-71.1; E_value=0.00059; Accession=PF00071.14; Description=Ras family
FGYLPLLTLLSLFIAPGVPIILVGTKLDLRDDKQFFVDHPGAVPITTAQGEELRKQIGAPYYIECSSKTQLNVKGVFDAAIKVVLQPPKAKKKKKXAEGACSIL

SEQ ID NO: 87165 - protein, 58 aa, Setaria italica
  Transcript Sequence Number=SeqID_21191
  Gene Ontology: Mol. function=nucleotide binding; Cellular component =intracellular; Biological process=small GTPase mediated signal transduction
  Homolog annotation: Hit_ID=Q6EP31; Match level="QueryCoverage=100%, HitCoverage=29%, E-value=4e-14, Identity=70%"; Hit description=Rac -like GTP-binding protein 5
SMQGEELRKLIGAAAYIECSSKTQQNIKAVFDAAIKVVLQPPKQKRRRRKAQKGCTIL

SEQ ID NO: 87166 - protein, 75 aa, Setaria italica
  Transcript Sequence Number=SeqID_21192
CNYEVRAYQAWSRRELLARQEHSALIQESTEKWKGFGVSRQEVKIFKFGNHLCIKSYPEIDFGNVFPDNIVEFLY

SEQ ID NO: 87167 - protein, 79 aa, Setaria italica
  Transcript Sequence Number=SeqID_21193
  Gene Ontology: Mol. function=nucleotide binding; Cellular component =intracellular; Biological process=small GTPase mediated signal transduction
  Homolog annotation: Hit_ID=Q38912; Match level="QueryCoverage=83%, HitCoverage=33%, E-value=1e-30, Identity=93%"; Hit description=Rac -like GTP-binding protein ARAC3
  Pfam annotation: Domain name=Ras; Domain location=10-79; Score=-39.1; E_value=2.2e-06; Accession=PF00071.14; Description=Ras family
MPTWGISMLQDYVPTLFDNFSANVVVDGNTVNLGLWDTAGQEDYNRLRPLSYRGADVFLLAFSLISKASYENVSKKARH

SEQ ID NO: 87168 - protein, 197 aa, Setaria italica
  Transcript Sequence Number=SeqID_21194
  Gene Ontology: Mol. function=nucleotide binding; Cellular component =intracellular; Biological process=small GTPase mediated signal transduction
  Homolog annotation: Hit_ID=Q6EP31; Match level="QueryCoverage=100%, HitCoverage=100%, E-value=1e-101, Identity=91%"; Hit description=Rac- like GTP-binding protein 5
  Pfam annotation: Domain name=GTP_EFTU; Domain location=4-179; Score= -85.7; E_value=0.012; Accession=PF00009.19; Description=Elongation factor Tu GTP binding domain
  Pfam annotation: Domain name=Miro; Domain location=8-121; Score=65.5; E_value=1.9e-16; Accession=PF08477.5; Description=Miro-like protein
  Pfam annotation: Domain name=Ras; Domain location=8-179; Score=263.4; E_value=5.1e-76; Accession=PF00071.14; Description=Ras family
  Pfam module annotation: Pfam domain module=GTP_EFTU::Miro::Ras; Domain location=4-179::8-121::8-179
MSASRFIKCVTVGDGAVGKTCMLISYTSNTFPTDYVPTVFDNFSANVVVDGSTVNLGLWDTAGQEDYNRLRPLSYRGADVFLLAFSLISKASYENVSKKWIPELRHYAPGVPIILVGTKLDLRDDKQFFADHPGAVPISTAQGEELRKLIGAAAYIECSSKTQQNIKAVFDAAIKVVLQPPKQKRRRRKAQKGCTIL

SEQ ID NO: 87169 - protein, 150 aa, Setaria italica
  Transcript Sequence Number=SeqID_21195
  Gene Ontology: Mol. function=small conjugating protein ligase activity; Cellular component=heterochromatin; Biological process =ubiquitin-dependent protein catabolic process
  Homolog annotation: Hit_ID=A7PLF0; Match level="QueryCoverage=98%, HitCoverage=92%, E-value=2e-59, Identity=71%"; Hit description =Ubiquitin carrier protein
  Pfam annotation: Domain name=UQ_con; Domain location=10-150; Score =208.0; E_value=2.5e-59; Accession=PF00179.18; Description=Ubiquitin -conjugating enzyme
MATGGIARSRLAEERKKWRRSHPHGFVAKPETLPDGSVNLMVWKCVVPGKEGTDWEGGYFPLTLQFPEDYPSNAPVCKFPAGFFHVNVYPTGAVCLSILSNAWKPSITVCQILIGIQDLLDHPNPASPAQDACYRLYKKDMRSYKDRVRQ

SEQ ID NO: 87170 - protein, 69 aa, Setaria italica
  Transcript Sequence Number=SeqID_21196
  Gene Ontology: Mol. function=small conjugating protein ligase activity; Biological process=ubiquitin-dependent protein catabolic process
  Homolog annotation: Hit_ID=B9T817; Match level="QueryCoverage=92%, HitCoverage=35%, E-value=5e-17, Identity=67%"; Hit description =Ubiquitin carrier protein
MAASGGVARGRLAEERKSHPHGFVAKPETLPDGTVNLMVWKCVIPGKEGIMPEYRKLVRQQAKLYPSLV

SEQ ID NO: 87171 - protein, 319 aa, Setaria italica
  Transcript Sequence Number=SeqID_21197
  Gene Ontology: Mol. function=electron carrier activity; Cellular component=extracellular region; Biological process=response to oxidative stress
  Homolog annotation: Hit_ID=B9RW97; Match level="QueryCoverage=90%, HitCoverage=91%, E-value=3e-90, Identity=54%"; Hit description =Peroxidase 47, putative
  Pfam annotation: Domain name=peroxidase; Domain location=45-282; Score=416.1; E_value=5.6e-122; Accession=PF00141.15; Description =Peroxidase
MGAQMKSFVRLLILVQVAAILAGHGAAELSMDYYGMSCPYAEYIVRNVVGQALMKDPTLAGSILRLHFHDCFVQGCDASVLLDSTDDNTAEKDAPANKSLRGFEVIDSIKEALEEQCPGVVSCADVLALAARDAVFMARGPYYGVPLGRRDGSRSVASDTFLTLPPPIKNVTVLIQIFDKVGLDVHDMVALSGGHTLGIAHCANFKNRIKDETETLDATLASSLGSVCKGGDSGKAPFDRTSTRFDAVYYRELTSKRGLLSSDQTLFESPETKEMVSMFAMNPDYFFYAFQQGMLKMGQINLKEGDDGEIRHTCRVVNS

SEQ ID NO: 87172 - protein, 144 aa, Setaria italica
  Transcript Sequence Number=SeqID_21198
  Gene Ontology: Mol. function=protein binding
  Homolog annotation: Hit_ID=B6TDM9; Match level="QueryCoverage=65%, HitCoverage=20%, E-value=5e-32, Identity=75%"; Hit description =Leucine Rich Repeat family protein
VLDGKERKKGRKEAKKKPEVEEHANDSKSKRKDDVDDTGRKDKKAKRKKFVDEEDIDAEGIDNTEISFADLVFSKQYSSEPKLKDSSTQEVAPDGKFEDLVIDHTKKRKKSKNAVTITDPSALKMISSVPDVGAGGLGLSGWDD

SEQ ID NO: 87173 - protein, 81 aa, Setaria italica
  Transcript Sequence Number=SeqID_21199
MEPRHGHSAFTISFPNPNGFVNQCAAVIPAASHPAAGSSQPDVLAPRGYKRKSTELALGLGDSSSSDSSRQSMGTWCHLSL

SEQ ID NO: 87174 - protein, 93 aa, Setaria italica
  Transcript Sequence Number=SeqID_21200
CTAARSACSSSLESLLVRLGFDIDRLCASVLLQRPGRQELHRRHECLVAELISVRACLRDNVLRVWDCLCVSIYIYTPLRENSIEGEETSDLR

SEQ ID NO: 87175 - protein, 173 aa, Setaria italica
  misc_feature (40)..(40): Xaa can be any naturally occurring amino acid
  Transcript Sequence Number=SeqID_21201
  Gene Ontology: Mol. function=protein serine/threonine kinase activity; Cellular component=plasma membrane; Biological process =protein amino acid phosphorylation
  Homolog annotation: Hit_ID=B9SB26; Match level="QueryCoverage=89%, HitCoverage=17%, E-value=1e-47, Identity=58%"; Hit description =Kinase, putative
REFGYLDPEYFMRQQLTQSSDVYSFGVVLLEVLCARPVIXPTLPRDQINLPEWALKWKRQNLLETIIDPRLGGNYTLDSVKQFSEIAEKCLADEGRSRPSMGEVLWHLENALQLHQAYLQTATADGLSGPELKLSDASTNIRCIEEVEESAHSDCQDADGESVDIRIEVPETV

SEQ ID NO: 87176 - protein, 248 aa, Setaria italica
  misc_feature (16)..(16): Xaa can be any naturally occurring amino acid
  Transcript Sequence Number=SeqID_21202
  Gene Ontology: Mol. function=catalytic activity; Cellular component =chloroplast; Biological process=metabolic process
  Homolog annotation: Hit_ID=Q5DQ95; Match level="QueryCoverage=100%, HitCoverage=63%, E-value=2e-91, Identity=66%"; Hit description=4 -amino-4-deoxychorismate lyase
  Pfam annotation: Domain name=Aminotran_4; Domain location=4-231; Score=125.5; E_value=1.7e-34; Accession=PF01063.11; Description =Aminotransferase class IV
  Subcellular localization annotation: CTP_CleavageSite=24; ConfidenceScore=5.49e-01
NSTFDRFLRSALMPNXTFGRSTMRSMLIQTVSVSNCTQGSLRYWLSVGPGDFQLSSSGCANPALYAVVIESPSIQVPSGCKVVTSSIPIKSSHFAVMKSVNYLPNALTKFEGEENGAFTGIWLDDEGFVAEGSNMNVGFVTAGKELLMPRFDKILSGCTAKRVLTLAEQLVADGRLSRIISRNVSVQEGKAADEMMLIGSGILVKPVVQWDDQIIGSGQEGPIAQALYDLILEDMRSGPPSVRIPVPY

SEQ ID NO: 87177 - protein, 52 aa, Setaria italica
  Transcript Sequence Number=SeqID_21203
  Gene Ontology: Mol. function=RNA binding
  Homolog annotation: Hit_ID=B9T521; Match level="QueryCoverage=84%, HitCoverage=16%, E-value=4e-12, Identity=77%"; Hit description =Nucleic acid binding protein, putative (Fragment)
MSGLYSQGFSPARNLSPQIRSNPDVDSQYLAELLAEHQKLGPFMQVLPICNK

SEQ ID NO: 87178 - protein, 91 aa, Setaria italica
  Transcript Sequence Number=SeqID_21204
  Subcellular localization annotation: CTP_CleavageSite=85; ConfidenceScore=5.69e-01
QRVTVLSKKRCPFHRTTTARAATPLPLTRPRPASKASLTSKIRRSQHLGPPQSPRRPPSPPHLIPSPPKAVRHPWPWPSTPWPPRASASPP

SEQ ID NO: 87179 - protein, 301 aa, Setaria italica
  Transcript Sequence Number=SeqID_21205
  Gene Ontology: Mol. function=oxidoreductase activity; Cellular component=cytoplasm; Biological process=oxidation reduction
  Homolog annotation: Hit_ID=B6TD57; Match level="QueryCoverage=100%, HitCoverage=79%, E-value=1e-144, Identity=83%"; Hit description =Alcohol dehydrogenase 1
  Pfam annotation: Domain name=ADH_N; Domain location=1-84; Score= -15.4; E_value=0.033; Accession=PF08240.4; Description=Alcohol dehydrogenase GroES-like doma
  Pfam annotation: Domain name=ADH_zinc_N; Domain location=115-258; Score=145.5; E_value=1.6e-40; Accession=PF00107.18; Description=Zinc- binding dehydrogenase
  Pfam module annotation: Pfam domain module=ADH_N::ADH_zinc_N; Domain location=1-84::115-258
EHAEGFAAGDAVVPTFLGQCSECVDCRSPRSNMCSRFRFAVRPGMLRDGATRFADAQGRPLHHFLGVSSFAEYTVVDVNHVVKVSPDMPPALACLLSCGASTGVGAAWKLAKVEPGSSVAIFGLGAVGLAVAEGARICGASKIIGVDINPDKQELGKKFGVTHFINPKELGEKPVNQAIIEMTDGGADYCFECIGLAVLMKEAFLSTRDGWGKTIILGVEMHGAPLSIPSRQILHGKTVIGSMFGGVKPKQDIPILADKYLNKELELDKFITHEVGLNDINEAFDLLLQGKSVRCTIWMNK

SEQ ID NO: 87180 - protein, 159 aa, Setaria italica
  misc_feature (27)..(27): Xaa can be any naturally occurring amino acid
  Transcript Sequence Number=SeqID_21206
  Gene Ontology: Mol. function=hydrolase activity, hydrolyzing O -glycosyl compounds; Cellular component=anchored to membrane; Biological process=carbohydrate metabolic process
  Homolog annotation: Hit_ID=B6U0V2; Match level="QueryCoverage=97%, HitCoverage=26%, E-value=7e-32, Identity=51%"; Hit description =Hydrolase, hydrolyzing O-glycosyl compounds
  Pfam annotation: Domain name=Glyco_hydro_17; Domain location=2-153; Score=-151.2; E_value=0.021; Accession=PF00332.10; Description =Glycosyl hydrolases family 17
PNSGHVYHSLLDAMRDDQRYFRPHRKXTEPHMQTMASGSNAGQTDTVWTETGWPSRGQVKPGKKPPRDAETSSKADTSECPPATVANAKAYNNYVINRVLSGDTGTPRYPYIDMDVYIFALFNENEKGDGSDDAERYFGLFYPDGTKVYDFDFQGTDAK

SEQ ID NO: 87181 - protein, 170 aa, Setaria italica
  Transcript Sequence Number=SeqID_21207
  Gene Ontology: Mol. function=hydrolase activity, hydrolyzing O -glycosyl compounds; Biological process=carbohydrate metabolic process
  Homolog annotation: Hit_ID=B6U0V2; Match level="QueryCoverage=80%, HitCoverage=23%, E-value=2e-44, Identity=66%"; Hit description =Hydrolase, hydrolyzing O-glycosyl compounds
  Pfam annotation: Domain name=Glyco_hydro_17; Domain location=1-170; Score=-97.3; E_value=2e-05; Accession=PF00332.10; Description =Glycosyl hydrolases family 17
MAWPWDEVFEQAKNLTSKLLPAMINVQAALAKLGLDDAVKVTTPVAFDALREPSFPPSGARFRDDIAQSVMKPMLQFLQQTGSYLTINPYPFLALAKEPQNITLEFALGSYEPGVPDPNSGHVYHSLLDAMRDATFFAIENLTEPHMSESILSTTKLTSFIRAAPARLLN

SEQ ID NO: 87182 - protein, 48 aa, Setaria italica
  Transcript Sequence Number=SeqID_21208
LIAFVIVICEFCTYTFTDPLHVLQVHNRRILVLDRFLVPSRHLPLPLP

SEQ ID NO: 87183 - protein, 44 aa, Setaria italica
  Transcript Sequence Number=SeqID_21209
QSTSQDIPSKHTSNMKGEKIPLNWPSHPLYRTIIFRLILQFHVV

SEQ ID NO: 87184 - protein, 129 aa, Setaria italica
  Transcript Sequence Number=SeqID_21210
  Gene Ontology: Mol. function=electron carrier activity; Biological process=response to oxidative stress
  Homolog annotation: Hit_ID=Q5U1M7; Match level="QueryCoverage=81%, HitCoverage=30%, E-value=6e-35, Identity=68%"; Hit description=Class III peroxidase 66
  Pfam annotation: Domain name=peroxidase; Domain location=36-129; Score=-51.8; E_value=6.6e-06; Accession=PF00141.15; Description =Peroxidase
MAKLSAAVLSLCVVLAFLAGQSAAGRYYSDKVQDKVRKEVEKAMAYNPGLGAALVRLVFHDCWINGCDGSVLLDKTPTDGTNTEKKAVTNIGLAGFEVIDTIKQKVGANTSCADILVFAGRDAADILSG

SEQ ID NO: 87185 - protein, 94 aa, Setaria italica
  Transcript Sequence Number=SeqID_21211
  Gene Ontology: Mol. function=electron carrier activity; Biological process=electron transport chain
  Homolog annotation: Hit_ID=B6TCC4; Match level="QueryCoverage=74%, HitCoverage=44%, E-value=4e-16, Identity=59%"; Hit description=Blue copper protein
  Pfam annotation: Domain name=Cu_bind_like; Domain location=34-94; Score=32.6; E_value=2.7e-08; Accession=PF02298.9; Description =Plastocyanin-like domain
MANALSLVAVLLCVASYGALSSARTFTVGDDQGWMSGIDYTDWTSGKTFAVGDKLLFSYRSQEHTVTEVSKSGYYTCSGSGALSDDTSGWTVVT

SEQ ID NO: 87186 - protein, 341 aa, Setaria italica
  Transcript Sequence Number=SeqID_21212
  Gene Ontology: Mol. function=electron carrier activity; Biological process=oxidation reduction
  Homolog annotation: Hit_ID=B6SXJ4; Match level="QueryCoverage=100%, HitCoverage=61%, E-value=1e-152, Identity=80%"; Hit description =Cytochrome P450 CYP78A55
  Pfam annotation: Domain name=p450; Domain location=2-331; Score=27.6; E_value=5.5e-13; Accession=PF00067.14; Description=Cytochrome P450
RVRGLLRRASLYYIMRFVFGKEYDVSRAAAPASGKEEEVEELLEMVHQGYELLGEENWCDYFPGLAALDPQGVGARCAELMPRVNRFVHGIIQERRRARAEAIDGGEARDFVDILLSLQESEGLADADIAAVLWEMIFRGTDAMAVLMEWTLARVVLHRDVQAKAHRELDELVGRNTPVTESAAPSLPYLQALLKEALRIHPPGPLLSWRHRAISDTYVDGHLVPAGTTAMVNQWAISRDPEVWDAPLEFQPERFLPGGKAQDVSVLGADGRLVPFGSGRRSCPGKSLAMTTVTAWMATLLHEFEWLPATDAAAVDMSEVLRLSCEMAVPLEVRVRPRRGV

SEQ ID NO: 87187 - protein, 94 aa, Setaria italica
  Transcript Sequence Number=SeqID_21213
TQCLVYINKNIHNPSSPILLLEHLQRQRQSFFNQRCKKIKGKDSVRNTMCCMIVSYWIVRETENNSRLLTKQLHTGHCLCTFKNHLSFFELPLL

SEQ ID NO: 87188 - protein, 112 aa, Setaria italica
  Transcript Sequence Number=SeqID_21214
KYLDSAFDSISAFSSKKDNQEAVFGSEETILDIREAKLAYRAEVFELQKQLARQQAQFDLLAGQASTLIQGRRARVSAMSAVSGELVSLDEILSSRNLEMNAVLGRIAATTQ

SEQ ID NO: 87189 - protein, 279 aa, Setaria italica
  Transcript Sequence Number=SeqID_21215
  Gene Ontology: Mol. function=transporter activity; Cellular component= integral to membrane; Biological process=response to antibiotic
  Homolog annotation: Hit_ID=Q2RAW8; Match level="QueryCoverage=96%, HitCoverage=56%, E-value=1e-111, Identity=70%"; Hit description =Major facilitator superfamily antiporter, putative, expressed
RWEDSFVRFPYLLPCLCISLFAAVVLVSCIWLPETLHKHKNIGSNEIEMSSDPRTPQTTDTHGDKSLYKNWPLMSSIIAYCVFTLHDTAYSEILSLWTISDRKYGGLSFSSKEVGQLLAVAGAGLMVYQLFIYRPVHKFLGCVNSCRASSALSIPLLAVFPFMTHLSGYRLGLALYFATIVKAALGITILTGTSLLQNYAVPQSQRGAANGIAATAMSFFKAIGPAGAGALFSWTQKRQHAAFFPGDQMLFLVLNVVQCIGLVMTFKPFLAVPQHYDPK

SEQ ID NO: 87190 - protein, 66 aa, Setaria italica
  Transcript Sequence Number=SeqID_21216
  Gene Ontology: Mol. function=nucleotide binding; Cellular component =myosin complex; Biological process=signal transduction
  Homolog annotation: Hit_ID=O24518; Match level="QueryCoverage=100%, HitCoverage=4%, E-value=6e-27, Identity=83%"; Hit description =Unconventional myosin
PKDTEAPPGGVDDMTRLSYLHEPGVLDNLAVRYAKNIIYTYTGNILIAINPFQRLPNLVDSRTMEK

SEQ ID NO: 87191 - protein, 235 aa, Setaria italica
  misc_feature (32)..(32): Xaa can be any naturally occurring amino acid
  Transcript Sequence Number=SeqID_21217
  Gene Ontology: Mol. function=catalytic activity; Biological process =cellular metabolic process
  Homolog annotation: Hit_ID=B6T555; Match level="QueryCoverage=100%, HitCoverage=67%, E-value=2e-64, Identity=53%"; Hit description =Dihydroflavonol-4-reductase
  Pfam annotation: Domain name=Epimerase; Domain location=1-148; Score=- 66.2; E_value=0.034; Accession=PF01370.13; Description=NAD dependent epimerasedehydratase family
KGTKNVLEACSATNVQKLIVVSSVAASCFDPXWPEGELKDESCWTDKEFCKDTQNWYSLAKTEAEEMALEYGKKNGLHVVTFCPGLVVGPLLQHVAVNTSSKVLLYIIKGGPDTLSNKFWPLVDVRDLADAMLLAYEKSESSGRYICSLDQMDIKDLVSLMKSMFPNYNYTDKMVDVDYKVYTTSDKLKNLGWQPRKLEETLADSVEYFEKAGLLQDADGKPCRLPYFYRVNAEE

SEQ ID NO: 87192 - protein, 73 aa, Setaria italica
  Transcript Sequence Number=SeqID_21218
LTSTGTSNRIRNWYPCRRGRIVGVDILISVWQHSIPEKQFHSTNSTKLPAKHIQLHQLQLQKKYGVRGSDPRF

SEQ ID NO: 87193 - protein, 87 aa, Setaria italica
  Transcript Sequence Number=SeqID_21219
LVEWNCFFWNGVSTKLPAKHIQLHQLQLQKKYGVRGSDPRFFWSTLRGAPKTLILDLLVELWVNLPTITTHYTTYLFAKQKIALLLP

SEQ ID NO: 87194 - protein, 145 aa, Setaria italica
  Transcript Sequence Number=SeqID_21220
  Gene Ontology: Mol. function=electron carrier activity; Cellular component=extracellular region; Biological process=response to oxidative stress
  Homolog annotation: Hit_ID=B6U6W0; Match level="QueryCoverage=97%, HitCoverage=41%, E-value=8e-59, Identity=80%"; Hit description =Peroxidase 52
  Pfam annotation: Domain name=peroxidase; Domain location=27-145; Score=104.8; E_value=2.9e-28; Accession=PF00141.15; Description =Peroxidase
FVRSSSLVPTGLSYFLVFLAPALYSAVKSVVQSAIDKEKRMGASIVRLFFHDCFVQGCDGSLLLDDTPSFQGEKMATPNNGSVRGFEVIDAIKSAVEKVCPGVVSCADILAIAARDSVVILGGPNWNVKVGRRDSMTASFIGSPN

SEQ ID NO: 87195 - protein, 93 aa, Setaria italica
  Transcript Sequence Number=SeqID_21221
  Gene Ontology: Mol. function=electron carrier activity; Cellular component=extracellular region; Biological process=response to oxidative stress
  Homolog annotation: Hit_ID=B6U6W0; Match level="QueryCoverage=97%, HitCoverage=27%, E-value=6e-39, Identity=84%"; Hit description =Peroxidase 52
  Pfam annotation: Domain name=peroxidase; Domain location=1-92; Score=- 96.9; E_value=0.02; Accession=PF00141.15; Description=Peroxidase
SELAGAHTIGLARCTNFRAHVYNETNIDGAFARTRQSGCPSTSGTGDNNLAPLDLQTPTVFENNYYRNLVSKKGLLHSDQELFNGGATDAQVQ

SEQ ID NO: 87196 - protein, 116 aa, Setaria italica
  Transcript Sequence Number=SeqID_21222
  Gene Ontology: Mol. function=electron carrier activity; Cellular component=extracellular region; Biological process=response to oxidative stress
  Homolog annotation: Hit_ID=B6U6W0; Match level="QueryCoverage=94%, HitCoverage=33%, E-value=3e-40, Identity=74%"; Hit description =Peroxidase 52
  Pfam annotation: Domain name=peroxidase; Domain location=1-97; Score=- 82.1; E_value=0.0014; Accession=PF00141.15; Description=Peroxidase
FLAGAHTIGLARCTNFRAHVYNETNIDGALARTRQSGCPSTSGTGDNNLAPLDLQTPTVFENNYYKNLVSKKGLLHSDQELFNGGATDAQVQSYVSSQSAFFADFVTGMIKEWVNN

SEQ ID NO: 87197 - protein, 321 aa, Setaria italica
  Transcript Sequence Number=SeqID_21223
  Gene Ontology: Mol. function=electron carrier activity; Cellular component=extracellular region; Biological process=response to oxidative stress
  Homolog annotation: Hit_ID=B6U6W0; Match level="QueryCoverage=91%, HitCoverage=88%, E-value=1e-145, Identity=85%"; Hit description =Peroxidase 52
  Pfam annotation: Domain name=peroxidase; Domain location=43-285; Score=473.4; E_value=3.3e-139; Accession=PF00141.15; Description =Peroxidase
  Subcellular localization annotation: CTP_CleavageSite=47; ConfidenceScore=5.13e-01
MAARCSGGGIALVLLLLALAGTSSAQLSTGFYSSSCPGVYSAVKSVVQSAIDKEKRMGASIVRLFFHDCFVQGCDGSLLLDDTPSFQGEKMATPNNGSVRGFEVIDAIKSAVEKVCPGVVSCADILAIAARDSVVILGGPNWNVKVGRRDSMTASFSGANNSIPPPTSGLANLTSLFAAQGLSQKDMVALSGAHTIGLARCTNFRAHVYNETNIDGALARTRQSGCPSTSGTGDNNLAPLDLQTPTVFENNYYKNLVSKKGLLHSDQELFNGGATDAQVQSYVSSQSAFFADFVTGMIKMGDITPLTGSNGEIRKNCRRIN

SEQ ID NO: 87198 - protein, 218 aa, Setaria italica
  Transcript Sequence Number=SeqID_21224
  Gene Ontology: Cellular component=integral to membrane
  Homolog annotation: Hit_ID=Q259E3; Match level="QueryCoverage=100%, HitCoverage=100%, E-value=7e-73, Identity=64%"; Hit description =B0213E10.2 protein
  Pfam annotation: Domain name=Tetraspannin; Domain location=8-163; Score=15.2; E_value=0.00014; Accession=PF00335.12; Description =Tetraspanin family
MAGRMVRSCVQTTLKTVNSVVGLAGMAVILYALWMLRAWYREVAQLDQRLPAPWFIYTFLGMGIFLCLLTCSGHIAAETANGHCLSCYMIIVFVLIILEGAITVDVCLNNNWEEDFPPDPSGKFDEFKVFVRSNFEICEWVGLSVVAAQVLSIILGMVLRTLGPDRETDYDSDDDTTVPARLPLLRNQSQHGPADYAEPNTSRRSDSWKLRILDKVNN

SEQ ID NO: 87199 - protein, 88 aa, Setaria italica
  Transcript Sequence Number=SeqID_21225
  Gene Ontology: Mol. function=electron carrier activity; Cellular component=endoplasmic reticulum membrane; Biological process =oxidation reduction
  Homolog annotation: Hit_ID=B9SST9; Match level="QueryCoverage=100%, HitCoverage=16%, E-value=3e-21, Identity=54%"; Hit description =Cytochrome P450, putative
LTAFFLLLSDHPDVATAIRDEVSGVAGGRGDDPAAAATSEKLKDMHYVHAALYECMRLFPPVQFDSKFAAGDDTLPDGTFVARGTRVT

SEQ ID NO: 87200 - protein, 40 aa, Setaria italica
  Transcript Sequence Number=SeqID_21226
YPSVQKYNIHLKSNFVIFNRQLVTLYACLVSKRYTIRFIF

SEQ ID NO: 87201 - protein, 103 aa, Setaria italica
  Transcript Sequence Number=SeqID_21227
  Gene Ontology: Mol. function=transferase activity, transferring groups other than amino-acyl groups
  Homolog annotation: Hit_ID=B6SYB0; Match level="QueryCoverage=97%, HitCoverage=23%, E-value=2e-41, Identity=83%"; Hit description =Taxadien-5-alpha-ol O-acetyltransferase
LVGPAAPTPRETKRLSDLDDHETLRGQAPFLFFYRGGAHAHDRDPAGVIRRALGEALVPYYPLAGRLREVEARKLVVDCTGEGVMFVEADADVRLADLEAAAT

SEQ ID NO: 87202 - protein, 235 aa, Setaria italica
  Transcript Sequence Number=SeqID_21228
  Homolog annotation: Hit_ID=Q710F0; Match level="QueryCoverage=88%, HitCoverage=37%, E-value=1e-30, Identity=36%"; Hit description=CDT1a protein
NSLSSSYISGSKEAQLEEDGKVVVSSTKVSEGTPAKYASTPVRLMASTPDLKTPKRPISAAGYGSPPLNLAKRSARAKLFTTPTKGASSMDRENQNAAISSADSDDELLSFLPQSLLQSVKQKEQRAMEEKETGFADQVKRHKLIASLPSIFDIIFLIYQSRQRSVMTKQELIHKIVASSPKIVDRSEVEEQLTLLKELVPEWISEKTARSGDVLCCVDATLSQAELRQRLYAAE

SEQ ID NO: 87203 - protein, 73 aa, Setaria italica
  Transcript Sequence Number=SeqID_21229
MSYQHDPYYPPPGHRPGYQGYGDEDEDDSPHYPPQHRPYEEEDDGCCGCHCSGFFKGCLAALCCCCVLEQCCF

SEQ ID NO: 87204 - protein, 161 aa, Setaria italica
  Transcript Sequence Number=SeqID_21230
  Gene Ontology: Mol. function=sulfotransferase activity
  Homolog annotation: Hit_ID=Q6EU01; Match level="QueryCoverage=92%, HitCoverage=41%, E-value=2e-60, Identity=75%"; Hit description =Putative steroid sulfotransferase
  Pfam annotation: Domain name=Sulfotransfer_1; Domain location=2-142; Score=19.3; E_value=7.9e-09; Accession=PF00685.19; Description =Sulfotransferase domain
PSAEAFDLFCDGVSPFGPVWDHMAEYWKESVARPGEVIFLRYEHLKEDAVGSVMRLAKFLGCPFTGEEVARGVPEAAVALCSMDRMRSVEANRSGVHGTASWSFKNSAFFRKGEVGDWKSHMTPEVAQRLDGIVEEKLRGSGLSLAIHRGSASRRFGSGLS

SEQ ID NO: 87205 - protein, 120 aa, Setaria italica
  misc_feature (47)..(47): Xaa can be any naturally occurring amino acid
  misc_feature (108)..(108): Xaa can be any naturally occurring amino acid
  Transcript Sequence Number=SeqID_21231
  Gene Ontology: Cellular component=plasma membrane
  Homolog annotation: Hit_ID=B6U8U8; Match level="QueryCoverage=80%, HitCoverage=15%, E-value=9e-32, Identity=66%"; Hit description =Nodulin-like protein
  Pfam annotation: Domain name=Nodulin-like; Domain location=1-120; Score=-82.1; E_value=5.1e-06; Accession=PF06813.5; Description =Nodulin-like
KFLIFAWFYFLQLLTSHCFVIQMCVLLFVGTNYSTYFNTASLVTYLXCIENFPKSRGPTVGILKAFSSLSSAILTQIYAVMHTPDHATLIFMVAVGPALVAIGLMFVXPVGGHHQARPSV

SEQ ID NO: 87206 - protein, 126 aa, Setaria italica
  misc_feature (107)..(107): Xaa can be any naturally occurring amino acid
  Transcript Sequence Number=SeqID_21232
  Gene Ontology: Mol. function=protein dimerization activity; Cellular component=nucleus; Biological process=regulation of transcription, DNA-dependent
  Homolog annotation: Hit_ID=Q56W43; Match level="QueryCoverage=100%, HitCoverage=35%, E-value=4e-44, Identity=62%"; Hit description=BZip protein AtbZip21
SSKLKLAQMEQDMQRARSQGLFLGGAPGANTSSGAAMFDVEYARWLDDHARRMAELHGALHAHLPDGGLRAIVDDTLTHHDELFQLKAVAVKSDVFHLITGVWTTPXERCFLWMGGFRPSDLLKTL

SEQ ID NO: 87207 - protein, 80 aa, Setaria italica
  Transcript Sequence Number=SeqID_21233
  Gene Ontology: Biological process=protein transport
  Homolog annotation: Hit_ID=Q9FZ60; Match level="QueryCoverage=70%, HitCoverage=25%, E-value=5e-11, Identity=60%"; Hit description =F11A6.7 protein
PIPCVPCLSPVACLSEKLMNQIFDLKFTSKSLQRQARKCEKEEKEQKLKVKKAIEKGNMDGARIYAENAIPIPFLSFVFF

SEQ ID NO: 87208 - protein, 204 aa, Setaria italica
  Transcript Sequence Number=SeqID_21234
  Gene Ontology: Mol. function=protein domain specific binding; Cellular component=microtubule organizing center; Biological process= protein transport
  Homolog annotation: Hit_ID=Q9FZ60; Match level="QueryCoverage=99%, HitCoverage=90%, E-value=4e-74, Identity=71%"; Hit description =F11A6.7 protein
  Pfam annotation: Domain name=Snf7; Domain location=9-179; Score=57.7; E_value=4.3e-14; Accession=PF03357.13; Description=Snf7
MGNPEKLMNQIFDLKFTSKSLQRQARKCEKEEKEQKLKVKKAIEKGNMDGARIYAENAIRKRTEHMNYLRLASRLDAVVARLDTQAKMQVIGKSMQSIVKSLDSALATGNLQKMSETMDNFERQFVNMEVQAEFMEGAMAGSTSLSTPETEVNSLMQQVADDYGLEVSVGLPQAAAHAIPAAKDKEKVDEDDLSRRLAELKARG

SEQ ID NO: 87209 - protein, 185 aa, Setaria italica
  misc_feature (55)..(55): Xaa can be any naturally occurring amino acid
  Transcript Sequence Number=SeqID_21235
  Gene Ontology: Mol. function=DNA binding; Cellular component=nucleus
  Homolog annotation: Hit_ID=Q9SM16; Match level="QueryCoverage=100%, HitCoverage=47%, E-value=6e-33, Identity=50%"; Hit description=SBP -domain protein 4
  Pfam annotation: Domain name=SBP; Domain location=1-32; Score=3.1; E _value=0.0086; Accession=PF03110.6; Description=SBP domain
RFHVLTEFDEAKRSCRKRLAEHNRRRRKPATTASSKDAASPPAKKPSGGSISGSXTHDGADLSTTKSTMSSNTGSVISCLDQGNKQLARPTLTLGASPDKQDHHHQLSTMLQVQAAAGGHHQEQHFITSLQVHNNGGNGGGNNILSCSSVCSSALPSAAANGEVSDQNTNNGNGNMHNLFEVDFM

SEQ ID NO: 87210 - protein, 316 aa, Setaria italica
  misc_feature (291)..(291): Xaa can be any naturally occurring amino acid
  Transcript Sequence Number=SeqID_21236
  Gene Ontology: Biological process=response to stress
  Homolog annotation: Hit_ID=Q70KG5; Match level="QueryCoverage=72%, HitCoverage=57%, E-value=5e-45, Identity=43%"; Hit description =Protein RAFTIN 1A
  Pfam annotation: Domain name=BURP; Domain location=89-311; Score =264.1; E_value=3.3e-76; Accession=PF03181.7; Description=BURP domain
MHPSTLLLIVVVSAGAAVVLGHPATTNTLAAQFWQKALPGTTMPDAIADLVKNGIDHSPLVEHYSAPPSISVCIMFNSACNPLTVAETGIFFHEAQLRPGSAMTLSFPAEAETAILPHGVAEKVPFGNLGDVLATFNIPAGSAEATQVRDTLSRCQEPPVAGEVKSCTTSLESTVRSAMDMLGTVVNDGGQQGVWAATSELPRGGLPRQPYVVQGVAPLDGERYVSCHKVPFPYAVYQCHSAGTMGYRAYVVSLSGLRGGGRPAASMLAFCHVDTSSWNPAHPAFEILNTXPGGSPVCHFMPYGDLAFVKKAGRAY

SEQ ID NO: 87211 - protein, 87 aa, Setaria italica
  Transcript Sequence Number=SeqID_21237
FFFLIPQTSYCIFYDYNTNEKQKEKEKKKRNTRIMYRYSYNPPADTHSASSPTKTEQARRLAANALQARAKNAEPPTPSDPSLIRSS

SEQ ID NO: 87212 - protein, 37 aa, Setaria italica
  Transcript Sequence Number=SeqID_21238
  Gene Ontology: Mol. function=carbohydrate binding; Biological process= carbohydrate metabolic process
  Homolog annotation: Hit_ID=Q40784; Match level="QueryCoverage=100%, HitCoverage=11%, E-value=1e-11, Identity=83%"; Hit description =Putative apospory-associated protein C
RVEGLETLDYFDNLNEKERFTEQGDAIVFEAEVDKIY

SEQ ID NO: 87213 - protein, 94 aa, Setaria italica
  Transcript Sequence Number=SeqID_21239
GPLLVLNVHSLTTTRRIVKHGETFAWEAYSYFTTILTKVASCNSMGNICQLFGGSDDNNLKNMNEKLQYRHRIGHLANGQPKKTFKICVNTNSD

SEQ ID NO: 87214 - protein, 73 aa, Setaria italica
  Transcript Sequence Number=SeqID_21240
  Gene Ontology: Mol. function=chitinase activity; Cellular component =vacuole; Biological process=cell wall catabolic process
  Homolog annotation: Hit_ID=B6TR38; Match level="QueryCoverage=89%, HitCoverage=19%, E-value=4e-23, Identity=78%"; Hit description=Basic endochitinase A
DRAAGRGAPGYGVITNIINGGLECGRGPDLRVADRIGFYKRYCHAFRIGYGSDLDCDGQRPFNAAVAAGLAAQ

SEQ ID NO: 87215 - protein, 399 aa, Setaria italica
  Transcript Sequence Number=SeqID_21241
  Gene Ontology: Mol. function=protein serine/threonine kinase activity; Cellular component=cytoplasm; Biological process=protein amino acid phosphorylation
  Homolog annotation: Hit_ID=Q84UI5; Match level="QueryCoverage=100%, HitCoverage=100%, E-value=0.0, Identity=91%"; Hit description =Mitogen-activated protein kinase 1
  Pfam annotation: Domain name=Pkinase; Domain location=73-353; Score =318.3; E_value=1.5e-92; Accession=PF00069.17; Description=Protein kinase domain
  Pfam annotation: Domain name=Pkinase_Tyr; Domain location=64-348; Score=1.4; E_value=8.1e-14; Accession=PF07714.9; Description=Protein tyrosine kinase
  Pfam module annotation: Pfam domain module=Pkinase::Pkinase_Tyr; Domain location=73-353::64-348
MDGGAQPPDTEMTDAGAGAGGGGGHPPQQPAGGGGGMMDNIQATLSHGGRFIQYNIFGNVFEVTAKYKPPILPIGKGAYGIVCSALNSETGEQVAIKKIANAFDNKIDAKRTLREIKLLRHMDHENIVAIRDIIPPSQREAFNDVYIAYELMDTDLHQIIRSNQALSEEHCQYFLYQILRGLKYIHSANVLHRDLKPSNLLLNANCDLKICDFGLARITSETDFMTEYVVTRWYRAPELLLNSSEYTAAIDVWSVGCIFMELMDRKPLFPGRDHVHQLRLLMELIGTPNEADLDFVNENARRYIRQLPRHARQSFPEKFPHVQPLAIDLVEKMLTFDPRQRITVEGALAHPYLASLHDISDEPVCSMPFSFDFEQHALSEEQMKDLIYQEALAFNPDYQ

SEQ ID NO: 87216 - protein, 492 aa, Setaria italica
  Transcript Sequence Number=SeqID_21242
  Gene Ontology: Mol. function=electron carrier activity; Biological process=oxidation reduction
  Homolog annotation: Hit_ID=Q7XP35; Match level="QueryCoverage=92%, HitCoverage=91%, E-value=8e-90, Identity=44%"; Hit description =B1340F09.13 protein
  Pfam annotation: Domain name=p450; Domain location=4-488; Score=88.8; E_value=1.9e-23; Accession=PF00067.14; Description=Cytochrome P450
MEAMQLLAAVLAVLALFLAAYWRPRSRYVHTTRPMPVIIEVGDPDVARALMFDHADFFSNHPDAALGIDFDAGQPKTESITFAPYGTLWSALRRNLTVNILHPSRLGHHVEPIQRDAAEALVADLSTRVVGAGEEVAIRERVYAAVFGTMARLCFGDGVGERDVAVMRRTLHDFFHSNVDIKLLARSRLARLVRWRQWRYIIGMRRRLAEVFGPVVEARRRQSRRSDGGGGSFSSYLDSLIDLRVPNDSDDSETGGGLGLGARRILRDDEVVRLVWEFLGSSTQSVVSCIEWTLARLVTEPEVQKKLYHELIAAGDHRKGQVSDERLQELPYLRAVILESLRLHPPLPTILREVGPEGAAAAGAPPPPPDGTPVRFLFNAGQIGRDRKTWTEDPDEFKPERFLAGGEGEDVSPLPGPKKIKMMPFGAGRRHCPGAGLSMIHVGCFVAALVREFEWAPPADGGGGVDLTGTNTLFVRMMAPPLRARITPRTSR

SEQ ID NO: 87217 - protein, 283 aa, Setaria italica
  Transcript Sequence Number=SeqID_21243
  Gene Ontology: Mol. function=serine-type endopeptidase activity; Biological process=proteolysis
  Homolog annotation: Hit_ID=Q5ZBS1; Match level="QueryCoverage=71%, HitCoverage=67%, E-value=1e-60, Identity=63%"; Hit description =Subtilisin-like serine proteinase-like protein
  Pfam annotation: Domain name=PA; Domain location=189-283; Score=29.3; E_value=1.5e-05; Accession=PF02225.14; Description=PA domain
  Pfam annotation: Domain name=Peptidase_S8; Domain location=8-263; Score=-35.3; E_value=7.9e-05; Accession=PF00082.14; Description =Subtilase family
  Pfam module annotation: Pfam domain module=PA::Peptidase_S8; Domain location=189-283::8-263
EAWGSSNCSRKIIGARFYSAGIDANLLKSDYLSPRGVNGHGTHAASTAAGSIVEAASFHGLAAGAAHGGAHRARIAVYKSLWGPRGRGSSATVLAAIDDAIHDGVDVLSLSLGALRDTSSFGALHAVQKGITIVYSAGNDGPRPQTIGNTAPWVITVAASTIDRSFPTVITLGNKQQIVGQSLYYQEKNSSRSSFRSLAIGGVGGLCTAEALNGTDLERRIVLCFPSNRERALTPTSEFTNALQNVQDAGGSGLVFAQYTTNGLDGVTANCRGIACVLVDLDT

SEQ ID NO: 87218 - protein, 87 aa, Setaria italica
  Transcript Sequence Number=SeqID_21244
NRLEGRKCYLGSQLAPLFLRCLICDCVVVTHLSVLYFVHYFLPENSFSRCSSDADKRRNREDASVGTAPCVFILLLCLCIISFQFER

SEQ ID NO: 87219 - protein, 53 aa, Setaria italica
  Transcript Sequence Number=SeqID_21245
  Gene Ontology: Mol. function=nicotianamine synthase activity; Biological process=nicotianamine biosynthetic process
  Homolog annotation: Hit_ID=Q9XFB6; Match level="QueryCoverage=100%, HitCoverage=16%, E-value=1e-17, Identity=86%"; Hit description =Nicotianamine synthase 8
MEAQNVEVAALVHKIAGLHAAIAKLPSLSPSPQVDALFTDLVMACVPPSPVDV

SEQ ID NO: 87220 - protein, 83 aa, Setaria italica
  Transcript Sequence Number=SeqID_21246
FKSDQIATNELLLPRTAPRCATSNGQLLRRHLLPLLERARLHLAALARRAHVLSSVRVLLLLISYVRHALWECVFHIGYASTG

SEQ ID NO: 87221 - protein, 277 aa, Setaria italica
  Transcript Sequence Number=SeqID_21247
  Gene Ontology: Mol. function=nicotianamine synthase activity; Biological process=nicotianamine biosynthetic process
  Homolog annotation: Hit_ID=Q8LT19; Match level="QueryCoverage=100%, HitCoverage=92%, E-value=1e-141, Identity=89%"; Hit description =ZmNAS2 protein
  Pfam annotation: Domain name=NAS; Domain location=1-125; Score=68.0; E_value=3.6e-17; Accession=PF03059.8; Description=Nicotianamine synthase protein
  Pfam annotation: Domain name=NAS; Domain location=126-277; Score =178.8; E_value=1.5e-50; Accession=PF03059.8; Description =Nicotianamine synthase protein
  Pfam module annotation: Pfam domain module=NAS::NAS; Domain location =1-125::126-277
RSGAANDRARKLVRADEDLRKRMAFHTVDVANLTDELGKYDVVFLAALVGMAAEDKAKVVAHLGRHMADGAALVVRSAHGARGFLYPIVDPEDIRRGGFDVLTVYHPDDEVINSVIVARKIDANANMEVAALVQKITSLHAAITKLPSLSPSPDVDRLFTELVMACVPPSPVDVTKLAPDAQKMREELIRLCSDAEGHLEAHYSDMLNAFDNPLDHLSRFPYFSNYINLSKLEYDLLVRYIPGLAPSRVAFVGSGPLPFSSLVLAARHLPNTVFDNY

SEQ ID NO: 87222 - protein, 184 aa, Setaria italica
  Transcript Sequence Number=SeqID_21248
  Gene Ontology: Mol. function=nicotianamine synthase activity; Biological process=nicotianamine biosynthetic process
  Homolog annotation: Hit_ID=Q8S9C5; Match level="QueryCoverage=100%, HitCoverage=56%, E-value=9e-72, Identity=71%"; Hit description =ZmNAS1 protein
  Pfam annotation: Domain name=NAS; Domain location=1-139; Score=125.2; E_value=2.1e-34; Accession=PF03059.8; Description=Nicotianamine synthase protein
AARHLPGTLFDNYDRCAAANERAKKLVRADADLSKRMSFRTADVADLTEELAEYDVVFLAALVGMAAEDKARVVAHLGRHMAPGAALVVRSAHGARGFLYPVVDPEDIGRGGFEVLAVYHPDDEVINSVIVAGKAADGQGKGSGAAPVVSPPCKCCKMEAGAATTAAPPLLKREDMAAREEVSF

SEQ ID NO: 87223 - protein, 431 aa, Setaria italica
  misc_feature (227)..(227): Xaa can be any naturally occurring amino acid
  Transcript Sequence Number=SeqID_21249
  Gene Ontology: Mol. function=nicotianamine synthase activity; Biological process=nicotianamine biosynthetic process
  Homolog annotation: Hit_ID=Q8S9C5; Match level="QueryCoverage=100%, HitCoverage=100%, E-value=1e-107, Identity=70%"; Hit description =ZmNAS1 protein
  Pfam annotation: Domain name=Methyltransf_12; Domain location=131 -230; Score=1.7; E_value=0.28; Accession=PF08242.4; Description =Methyltransferase domain
  Pfam annotation: Domain name=Methyltransf_12; Domain location=235 -334; Score=14.0; E_value=0.025; Accession=PF08242.4; Description =Methyltransferase domain
  Pfam annotation: Domain name=NAS; Domain location=227-387; Score =206.2; E_value=8.5e-59; Accession=PF03059.8; Description =Nicotianamine synthase protein
  Pfam annotation: Domain name=NAS; Domain location=3-226; Score=430.6; E_value=2.4e-126; Accession=PF03059.8; Description=Nicotianamine synthase protein
  Pfam module annotation: Pfam domain module=Methyltransf _12::Methyltransf_12::NAS::NAS; Domain location=131-230::235-334::227- 387::3-226
MEAQNHEVAALVEKISGLHAAIAKLPSLSPSPAVDALFTALVTACVPASPVDVSRLGPDAQKMREELIRLCSDAEGQMEAHYADALAAFDNPLDHLARFPYYRNYINLSKLEYDLLVRYIPGLAPSRVAFVGSGPLPFSSLVLAARHLPNTVFDNYDRSGAANDRARKLVRADEDLRKRMAFHTVDVANLTDELAEYDVVFLAALVGMAAEDKARVVAHLGRHMADXAPSRVAFVGSGPLPFSSLVLAARHLPNTVFDNYDRSGAANDRARKLVRADEDLRKRMTFHTVDVANLTDELGKYDVVFLAALVGMAAEDKAKVVAHLGRHMADGAALVVRSAHGARGFLYPVVDPEDICRGGFDVRAVYHPDDEVINSVIIARKVGAHGNGLQNGQHANARGAVPIVSPPCKCCKVEASALQKREEMAAKELSI

SEQ ID NO: 87224 - protein, 44 aa, Setaria italica
  Transcript Sequence Number=SeqID_21250
RAGAVHPSRVAAVERAHAHYPHSANAGAAGAGGRGEKVMWRVEV

SEQ ID NO: 87225 - protein, 358 aa, Setaria italica
  Transcript Sequence Number=SeqID_21251
  Gene Ontology: Mol. function=protein binding; Cellular component =nucleoplasm; Biological process=DNA replication-dependent nucleosome assembly
  Homolog annotation: Hit_ID=B4FIA4; Match level="QueryCoverage=99%, HitCoverage=70%, E-value=0.0, Identity=86%"; Hit description =Chromatin assembly factor 1 subunit B
  Pfam annotation: Domain name=WD40; Domain location=1-35; Score=17.3; E_value=0.064; Accession=PF00400.24; Description=WD domain, G-beta repeat
  Pfam annotation: Domain name=WD40; Domain location=165-219; Score =2.8; E_value=18; Accession=PF00400.24; Description=WD domain, G-beta repeat
  Pfam annotation: Domain name=WD40; Domain location=224-262; Score =18.9; E_value=0.021; Accession=PF00400.24; Description=WD domain, G -beta repeat
  Pfam annotation: Domain name=WD40; Domain location=39-77; Score=36.7; E_value=9e-08; Accession=PF00400.24; Description=WD domain, G-beta repeat
  Pfam module annotation: Pfam domain module=WD40::WD40::WD40::WD40; Domain location=1-35::165-219::224-262::39-77
VHLLFHHKDVLDLQWSRDSAFLASASVDNTCIIWDAVKGTVQQKLEGHLHYVQGVAWDPLGQYIASLSSDRTCKIYANKPQGKSKNAEKVNFVCQHTLVKIEYPNHDESKPPVKSHLFHDETLPSFFRRLAWSPDGSFLVLPAGLSKHSSEVINTAYVMSRRDLSRPAIQLPGASKAIVAVRFCPVLFRPRGSNSDGFFKLPYRVVFAVATLNSVYVYDTESVPPILIHAGLHYAAITDIAWSFDAKYLAVSSRDGYCTIIEFENEELGQPHILPGSKEVAKGNMTCEKKPLSVDSMEVDVSASKLKMEVSPVAAGVAVPPMLAENVILRTGELAEGNVTCENKRPVAVDIMEVDVSD

SEQ ID NO: 87226 - protein, 30 aa, Setaria italica
  Transcript Sequence Number=SeqID_21252
SAASSFTGEPSHTTATATSVTDETKSTITE

SEQ ID NO: 87227 - protein, 151 aa, Setaria italica
  misc_feature (95)..(95): Xaa can be any naturally occurring amino acid
  Transcript Sequence Number=SeqID_21253
  Pfam annotation: Domain name=DUF231; Domain location=11-151; Score =135.2; E_value=2e-37; Accession=PF03005.7; Description=Arabidopsis proteins of unknown function
TSSSFDSYVWWMSGSRIKTVWGAFGDDGYEELDAWVAFRLGLKTWANWVDANIDPNATRVFFMSISTTHMRSEDWGREGGIRCYNETWPITRKAXLGSGADRRMMEAPFRVMGRMRVPVALLNVTQLTEHRVDAHVSVYTETGGELLTDAQ

SEQ ID NO: 87228 - protein, 374 aa, Setaria italica
  Transcript Sequence Number=SeqID_21254
  Homolog annotation: Hit_ID=Q9SSL4; Match level="QueryCoverage=91%, HitCoverage=84%, E-value=9e-88, Identity=43%"; Hit description =F3N23.34 protein
  Pfam annotation: Domain name=DUF231; Domain location=204-374; Score =285.2; E_value=1.5e-82; Accession=PF03005.7; Description=Arabidopsis proteins of unknown function
MLTRPVEKVTPPPPVEKVTPAAAAAKGAFDPSRCSVTEGYWAYNRSKKLHYTDQTCPFIDRQVSCQRNGRPDSDYLYWDWHLDDCNLPRFDPAALLEKLRGKRMMFVGDSLQMGQWLSFVCLVNSAVPYTARTMERSTTLSVFTATEYNATIEFYWPPYLVEANSDRNIRLGADGRVLHVDAVELHAKHWKGADILVFDSYVWWMSGSRIKTVWGAFGDDGYEELDAWVAFRLGLKTWANWVDANIDPNATRVFFMSISTTHMRSEDWGREGGIRCYNETWPITRKGYWGSGADRRMMEVVSDVLGRMRVPVALLNVTQLTEHRVDAHVSVYTETGGELLTDAQRADPQTYTDCIHWCLPGVPDTWNQILYAHL

SEQ ID NO: 87229 - protein, 72 aa, Setaria italica
  Transcript Sequence Number=SeqID_21255
RLLGYHRGLSIYKRRLQGEPSPFKRLSRERGPGTLNLSSSVSFCYHLLVPSNFDPRRPPSNAQPSSWLPLRH

SEQ ID NO: 87230 - protein, 382 aa, Setaria italica
  Transcript Sequence Number=SeqID_21256
  Gene Ontology: Cellular component=membrane
  Homolog annotation: Hit_ID=B6T9F8; Match level="QueryCoverage=95%, HitCoverage=95%, E-value=1e-142, Identity=69%"; Hit description =Nodulin protein
  Pfam annotation: Domain name=DUF6; Domain location=194-324; Score =36.4; E_value=1.1e-07; Accession=PF00892.12; Description=Integral membrane protein DUF6
  Pfam annotation: Domain name=DUF6; Domain location=21-154; Score =48.3; E_value=3.1e-11; Accession=PF00892.12; Description=Integral membrane protein DUF6
  Pfam annotation: Domain name=TPT; Domain location=185-324; Score= -19.5; E_value=0.0088; Accession=PF03151.8; Description=Triose -phosphate Transporter family
  Pfam annotation: Domain name=UAA; Domain location=12-330; Score= -171.6; E_value=0.089; Accession=PF08449.3; Description=UAA transporter family
  Pfam module annotation: Pfam domain module=DUF6::DUF6::TPT::UAA; Domain location=194-324::21-154::185-324::12-330
  Subcellular localization annotation: CTP_CleavageSite=50; ConfidenceScore=5.10e-01
MGVGKVLNDVKPYLAMILLQVGFAGMYVVAVASLKRGMSHFVLVVYRNVVATAVMAPFALWFERSVRPKMTFTIFLKIMGLAILEPVLDQNLYYMGANLTSAGFASALVNVLPAITFVMALFLRIEKVRLRSLHSKAKIAGTALTVVGAVLMILYHGPVVPFPWTKGQHHDGGGAQVGGGGFLQGTLCVIVACVAWSGFFVLQSNTLQSYPAELSLTALICLMGSLMSGAVALVAERRNTQAWVIGFDTRLFTAVYAGVVCSGVAYYVQGVVSRQRGPVFVTAFSPLCMIVTSVMGSIILKEEITLGSVIGAVIIVLGLYALIWGKSKDHENQVADVSKGAAAAGGELPITLAQTNGNGKHELGNTRGLVFDVETPATNGHY

SEQ ID NO: 87231 - protein, 77 aa, Setaria italica
  misc_feature (28)..(28): Xaa can be any naturally occurring amino acid
  Transcript Sequence Number=SeqID_21257
MGNSLGGKRKSAKVMQLDGTSFRVKPPXAAADVLRDHPGFQLLESEEVKLLGARARPLAPDAPLRRGRLYFLVALPR

SEQ ID NO: 87232 - protein, 289 aa, Setaria italica
  Transcript Sequence Number=SeqID_21258
  Gene Ontology: Mol. function=nucleic acid binding
  Homolog annotation: Hit_ID=Q9ZW97; Match level="QueryCoverage=97%, HitCoverage=30%, E-value=6e-78, Identity=54%"; Hit description =F11M21.32 protein
  Pfam annotation: Domain name=Helicase_C; Domain location=1-46; Score =7.6; E_value=0.01; Accession=PF00271.23; Description=Helicase conserved C-terminal domain
QQVFLISTRAGNLGVNLVSANRVVIFDPSWNPAQDLQAQDRSFRYGQRRHVTVFRLLGAGSLEELVYSRQIYKQQLSNIAVSGKIEKRYFEGVQDDKKFQGELFGICNLFRDLSDKLFTSEIIEMHGEHCKSSATEATGIREIVDTDLFGSQENRKSATATTDSDNQNLVDFGIVYAHRNEDVVNMGTNGRDKDGTDETVESSSEELQSKHETKHTVKVKSSSLEQKRKVVKSYSLEQKRKEFSQIASFIGMDDLEFSKWLLAASPVQRSEVLQKFKRKRKMKCEHNQN

SEQ ID NO: 87233 - protein, 69 aa, Setaria italica
  Transcript Sequence Number=SeqID_21259
MRFAGWYLKIAAVGASIGAAMELFMIHTGFYEKVTVLESEKRAWESSPEAQAMREALNPWRKHDEQQKK

SEQ ID NO: 87234 - protein, 78 aa, Setaria italica
  Transcript Sequence Number=SeqID_21260
LPDGSHKNVLPDSAFLAAASAGALHRWNGHVRLVDVVDDGGAGEEGCDDDHGRPREGRSPRRRPPAAEPLSAAHLRDS

SEQ ID NO: 87235 - protein, 76 aa, Setaria italica
  Transcript Sequence Number=SeqID_21261
RPSRTPPRRAPSQVQRRGPWLLGRWWCSSQPGQGTSFCIRQKQHVNFRNQKASSLLIIFLHNKLQLRNNGRKLVVQ

SEQ ID NO: 87236 - protein, 79 aa, Setaria italica
  Transcript Sequence Number=SeqID_21262
  Pfam annotation: Domain name=Metallothio_2; Domain location=1-79; Score=119.3; E_value=1.3e-32; Accession=PF01439.10; Description =Metallothionein
MSCGGSCNCGSSCSCGGGCGKMYPDLAEKSTTTAPAAMVLGVAPEKGPSEVGFEKDAESGEAGHGCSCGSSCKCNPCNC

SEQ ID NO: 87237 - protein, 53 aa, Setaria italica
  misc_feature (42)..(42): Xaa can be any naturally occurring amino acid
  Transcript Sequence Number=SeqID_21263
  Gene Ontology: Mol. function=hydrolase activity, acting on acid anhydrides, catalyzing transmembrane movement of substances; Cellular component=proton-transporting ATP synthase complex, coupling factor F(o); Biological ...
  Gene Ontology: Cellular component=process=ATP synthesis coupled proton transport
  Homolog annotation: Hit_ID=A9QBW8; Match level="QueryCoverage=84%, HitCoverage=25%, E-value=3e-11, Identity=76%"; Hit description=ATP synthase CF0 subunit I (Fragment)
KCNLFFRFLAHRPFAGSFGLNTDILATNLINLTVVVGVLIFXKGVCASCLFQE

SEQ ID NO: 87238 - protein, 68 aa, Setaria italica
  Transcript Sequence Number=SeqID_21264
  Gene Ontology: Mol. function=hydrolase activity, acting on acid anhydrides, catalyzing transmembrane movement of substances; Cellular component=proton-transporting two-sector ATPase complex; Biological process=ATP ...
  Gene Ontology: Biological process=synthesis coupled proton transport
  Homolog annotation: Hit_ID=P0C2Z0; Match level="QueryCoverage=100%, HitCoverage=37%, E-value=8e-29, Identity=92%"; Hit description=ATP synthase subunit b, chloroplastic
MKNVTYSFVFLAHRPFAGSFGLNTDILATNLINLTVVVGVLYFFGKGVLKDLLDNRKQRILSTIRNSE

SEQ ID NO: 87239 - protein, 55 aa, Setaria italica
  Transcript Sequence Number=SeqID_21265
EVRLKGFLGMSPVAMSCRLVFPGGRDGDDGGSRVFSDASFGLVFPGGGTASGQGS

SEQ ID NO: 87240 - protein, 94 aa, Setaria italica
  Transcript Sequence Number=SeqID_21266
  Gene Ontology: Mol. function=electron carrier activity; Biological process=oxidation reduction
  Homolog annotation: Hit_ID=Q67WW3; Match level="QueryCoverage=89%, HitCoverage=16%, E-value=7e-14, Identity=45%"; Hit description =Putative cytochrome P450
RLENTFLRLLERRVKIMPASSLPDLFPSSRLAMFISPTPRLMMREREKMMAFIDTIIQDHQDNRAAGVDEEDLLDVLLRIQREDELDPPLTTEN

SEQ ID NO: 87241 - protein, 146 aa, Setaria italica
  Transcript Sequence Number=SeqID_21267
  Gene Ontology: Mol. function=ubiquitin-protein ligase activity; Cellular component=nucleus; Biological process=ubiquitin-dependent protein catabolic process
  Homolog annotation: Hit_ID=A8W462; Match level="QueryCoverage=71%, HitCoverage=34%, E-value=1e-36, Identity=72%"; Hit description=SINA3
PWRHARAQPPPGDRILCPGILLRSRLPSEDSVPIGIPMASVTYIDDSHAEVIDPPKNEEMLDVTELVGEHIQHSPKPNVTSYGNVRELLECPVCLSAMYPPIHQCSNGHTLCSGCKPRVHNRCPTCRHELGNIRCLALEKVAASLE

SEQ ID NO: 87242 - protein, 246 aa, Setaria italica
  Transcript Sequence Number=SeqID_21268
  Gene Ontology: Mol. function=ubiquitin-protein ligase activity; Cellular component=nucleus; Biological process=ubiquitin-dependent protein catabolic process
  Homolog annotation: Hit_ID=A8W462; Match level="QueryCoverage=96%, HitCoverage=78%, E-value=1e-107, Identity=77%"; Hit description=SINA3
  Pfam annotation: Domain name=Sina; Domain location=96-245; Score =220.0; E_value=6e-63; Accession=PF03145.8; Description=Seven in absentia protein family
MMATAGYIDDSCSEVIDPPKTEVLDVTELAGDHIQHPPKPNVVVSSSVRELLECPVCLSAMYPPIHQCSNGHTLCSGCKPRVHNRCPTCRHELGNIRCLALEKVAASLELPCKYQNFGCLGIYPYYCKLKHESQCQYRPYTCPYAGSECTVAGDIPYLVNHLKDDHKVDMHNGSTFNHRYVKSNPHEVENATWMLTVFSCFGQYFCLHFEAFQLGMAPVYIAFLRFMGDDAEAKNYSLLVLCKFGR

SEQ ID NO: 87243 - protein, 41 aa, Setaria italica
  Transcript Sequence Number=SeqID_21269
ALECQLYENTEIFVIYVISSLKFINMYVNVKKIVETGAALQ

SEQ ID NO: 87244 - protein, 221 aa, Setaria italica
  Transcript Sequence Number=SeqID_21270
IRRKPTSSSSYVSNSAVHTISTPNLSLDQDKSAAEETQLKASRDVANAMAAKAKLLLRELKSVKADLAFAKQRCAQLEEENKLLRETKQKGSKTEEDDDLIRVQLETLLAEKSRLAQENSTYARENRFLREIVDFHQFSTTQDVVSLDDGDMEDDDPEEDSNLICTEYALPMVEENSGGEELSPVPSRPESPMDGPEEPSSPISSNFQNASKPDASTSDTA

SEQ ID NO: 87245 - protein, 79 aa, Setaria italica
  Transcript Sequence Number=SeqID_21271
  Subcellular localization annotation: CTP_CleavageSite=49; ConfidenceScore=5.13e-01
FSHSISKQHGRGAARTEESARDVSIQSLGARRRRTSGDPDATAGTANVRGRARVARRPWARRAQAPQRRARRWGRNSSR

SEQ ID NO: 87246 - protein, 94 aa, Setaria italica
  Transcript Sequence Number=SeqID_21272
  Subcellular localization annotation: CTP_CleavageSite=35; ConfidenceScore=5.34e-01
PASRRSRRRARRCRWRSSPSSCGAWRRPRSACTCRAWGAAAPSERARRSTAAGPLAHSLSMRRGHAGSRRSPADRPTRTSTSPETQLESHLQFT

SEQ ID NO: 87247 - protein, 87 aa, Setaria italica
  Transcript Sequence Number=SeqID_21273
  Subcellular localization annotation: CTP_CleavageSite=64; ConfidenceScore=5.03e-01
FPRSNCYSIFRLLLFSRRKFVLVGSACVAGDVAMLAAGVRRQIDQRVRRPRRRPSWNPTCNSPSSEAAGPGCKSYPVGYMPTSLSIL

SEQ ID NO: 87248 - protein, 86 aa, Setaria italica
  Transcript Sequence Number=SeqID_21274
EDTATSPISSPKLIELRDSDATHHQKKNNPSDEILHSKKNTTGDVNGANTTTDTTIKEEDGAYDNNELRKKGLCLVPVSAFRVYNS

SEQ ID NO: 87249 - protein, 158 aa, Setaria italica
  Transcript Sequence Number=SeqID_21275
  Gene Ontology: Mol. function=ATP-dependent helicase activity; Cellular component=nucleolus; Biological process=ribosome biogenesis
  Homolog annotation: Hit_ID=Q8L4E9; Match level="QueryCoverage=100%, HitCoverage=31%, E-value=4e-62, Identity=76%"; Hit description=DEAD -box ATP-dependent RNA helicase 36
  Pfam annotation: Domain name=Helicase_C; Domain location=1-74; Score =107.0; E_value=6.3e-29; Accession=PF00271.23; Description=Helicase conserved C-terminal domain
ELGHPAVSLHSLKSQAQRLSALNRFKSGQVPVLLATDVGSRGLDIQTVDLVINYDVPSDARDYIHRVGRTARASRGGLAISFITQKDICLLHEIEDIVGKQLEAYECSDKEVTKNITKVFKAKRFAKMKMDDEGHEEKVQARKEQKKRDLARKRKHEE

SEQ ID NO: 87250 - protein, 55 aa, Setaria italica
  Transcript Sequence Number=SeqID_21276
MPASSVSGGSGPGGVSPDAIIEWLQDEMGYPSAPPAPEQLRKICRGNMIPVWSFL

SEQ ID NO: 87251 - protein, 537 aa, Setaria italica
  Transcript Sequence Number=SeqID_21277
  Gene Ontology: Mol. function=DNA binding; Cellular component=nucleus; Biological process=insulin receptor signaling pathway
  Homolog annotation: Hit_ID=B9RZN7; Match level="QueryCoverage=58%, HitCoverage=20%, E-value=5e-90, Identity=53%"; Hit description=WD -repeat protein, putative
NPFNPRIAMSAGYDGKTIIWDIWEGKPVQIYETGHFKLVDGKFSPDGTSLILSDEIGQIFIIGTGQGESQKDAKYDQFFLGDYRPLIRDTNGSVIDQETQLIPHRRNMQDFLCDAGMIPYPEPFQSMYQKRRLGTLGIEWRPPSVNFAVGPTYNATTGEYQNIPIIDPDRWEPLPEITDFIELEPENEVISDDTDSEYNGMDENSSEGEQEIMSGDSSGTSYSSAEIDADNPNSAAHLRRSRRKKKKSEADLVTSSGRRVRKKILDEPDITTVSRPHRCRKSRNGRSSKRKRSPKSRGLRPQRRAARNALSFFSKIGASTEDDEDYSEGSSSDSELNTDSTEAEQLERSGQVRFSREEDVTQPSQFADNKGNSGTGRKLVLRIPRAKIPFALESGKAECSTQDKAVNSLALADHESVEPELTVEHGHSSACKAELLTDGDLHDGSAVHSNNSIRWGEVKMRSSKRCKYSDPAGGLWSTSNNAASQDIEGSGSQEMPHEYCDGIQQSVGQNVQAIQPGIILDNIQENHSTYEYNGENF

SEQ ID NO: 87252 - protein, 593 aa, Setaria italica
  Transcript Sequence Number=SeqID_21278
  Gene Ontology: Mol. function=transcription regulator activity; Cellular component=cytoplasm; Biological process=phagocytosis, engulfment
  Homolog annotation: Hit_ID=A2Q283; Match level="QueryCoverage=56%, HitCoverage=18%, E-value=2e-97, Identity=50%"; Hit description =Cytochrome cd1-nitrite reductase-like, C-terminal haem d1
  Pfam annotation: Domain name=Bromodomain; Domain location=501-581; Score=1.1; E_value=0.0018; Accession=PF00439.17; Description =Bromodomain
YCDGIQQSVGQNVQAIQPGIILDNIQENHSTYEYNGENFGDKEKITNDNNACADGANNTVQVHNTSQPSLKLKIKSKGFADGATLSDKSRSATVGNTMNAEHDKGSVQHEEDSSINQPRNVDLLNVSKSSQECTDKSTGLHDSKKPHLDFPKMCTAVYKRSKPNNRKKMDSDEYANDDSTSISNDDGGYQPPEYSPVTAASGRLRRSARKSYAHNDDDTPWDDISQVKDSYSSYEASTSGRRIVSDAREVMWRPPSKTVGLRSARNKRESSNFPDTHPLGKKHQTPLKYSWLMLLEHEDSYRYIPQLGDEVMYLRQGHEEYLQGMRSSDPCPWNRIKGLKAVELCKIQGLDYSSYKGSGESCCKLSIEFIDCTSTGFGKTFMITLPELVNFPDFLVERTRYEASMERNWTHRDKCKVWWRDEEGQEGGNWWEGRIMALKPKSPDFPESPWEKYVIQYKNDGSHHPHSPWELHDVGNLWVPWKHPHINLEIRDRLLSEMEKLQEMSLKNQDRYGVLKLDKVTEKSDFMNRFPVQFSIEVIKTRLANNYYRTLEAVKHDTTVMLTNAESYFSKSAEMTKKISRLSEWVDQTFSLL

SEQ ID NO: 87253 - protein, 139 aa, Setaria italica
  misc_feature (130)..(130): Xaa can be any naturally occurring amino acid
  Transcript Sequence Number=SeqID_21279
  Gene Ontology: Mol. function=oxidoreductase activity; Biological process=oxidation reduction
  Homolog annotation: Hit_ID=Q8LNJ6; Match level="QueryCoverage=94%, HitCoverage=34%, E-value=1e-45, Identity=65%"; Hit description =Putative gibberellin oxidase
ASGRDRSMAGAGRRLDLPVVDLASPDLRAAATSIRQACVEYGFFYVVNHGIERALMERVLAESRKFFERPVEEKMALRKNSSHRGYTAPYSEKVDDNPDSRGDSKETFYIGPEEDDDSHNNVNQWPSEEXFPSWRKTMM

SEQ ID NO: 87254 - protein, 56 aa, Setaria italica
  Transcript Sequence Number=SeqID_21280
  Homolog annotation: Hit_ID=B6U887; Match level="QueryCoverage=98%, HitCoverage=8%, E-value=5e-12, Identity=66%"; Hit description =Protein kinase
ASGGAVVSGELVNGMLLMSPHGRSSWRPPPGDEEEEEAVDLTEPRLETFTQPALFR

SEQ ID NO: 87255 - protein, 103 aa, Setaria italica
  misc_feature (4)..(4): Xaa can be any naturally occurring amino acid
  Transcript Sequence Number=SeqID_21281
  Gene Ontology: Mol. function=DNA binding; Cellular component=nucleus; Biological process=regulation of transcription
  Homolog annotation: Hit_ID=Q8S416; Match level="QueryCoverage=100%, HitCoverage=65%, E-value=9e-48, Identity=86%"; Hit description=P -type R2R3 Myb protein (Fragment)
  Pfam annotation: Domain name=Myb_DNA-binding; Domain location=22-67; Score=50.8; E_value=5.2e-12; Accession=PF00249.23; Description=Myb -like DNA-binding domain
VNRXGKSCRLRWTNYLRPDIKRGKFSQEEEQTILHLHSVLGNKWSAIAAHLPGRTDNEIKNFWNTHLKKRLIQMGFDPMTHRPRTDFFAALPQLIALAAFRDQ

SEQ ID NO: 87256 - protein, 164 aa, Setaria italica
  Transcript Sequence Number=SeqID_21282
  Homolog annotation: Hit_ID=B6T5H1; Match level="QueryCoverage=85%, HitCoverage=52%, E-value=1e-52, Identity=73%"; Hit description =Electron transporter
EVATATEASAPAASGAAARQNHPFPWLDSAISEPYYFLHLLAFFSYFAARSAALSADDGGELHDRLLRREIQAVLVFLVLFVVKIVKEETWETFLADSLLYAKGLLLAVTLVINYWLTLGYFLGFVVIYAVAQQPPYDGLGHSNHLTPLQLESLLTEEPTIRRI

SEQ ID NO: 87257 - protein, 148 aa, Setaria italica
  Transcript Sequence Number=SeqID_21283
  Gene Ontology: Biological process=cell redox homeostasis
  Homolog annotation: Hit_ID=B6T5H1; Match level="QueryCoverage=89%, HitCoverage=49%, E-value=1e-69, Identity=93%"; Hit description =Electron transporter
MVVTGSLLNETLSSDDGLGHSNHLTPLQLESLLTEEPTSRFWLVEFRTSFSATCIQASSVLPELSNIYSNKNISFGIIDLGHFPNAAAKFGISMWDHLPTYILFDKVTEVARFPEVTSESKVFVPKVTKKLLCQHFDLDRRLIEYLST

SEQ ID NO: 87258 - protein, 129 aa, Setaria italica
  misc_feature (67)..(67): Xaa can be any naturally occurring amino acid
  Transcript Sequence Number=SeqID_21284
  Gene Ontology: Mol. function=metal ion transmembrane transporter activity; Cellular component=integral to membrane; Biological process=metal ion transport
  Homolog annotation: Hit_ID=B6TQ79; Match level="QueryCoverage=67%, HitCoverage=22%, E-value=1e-26, Identity=73%"; Hit description=Zinc transporter 4
DCGVTTILLGVHLLTEFHWHLFYSFTIFFSWLTDYLKIISLQAQFKNLSAVLMASFFAITTPAGDSXTGAGLATFYNPNSPRALVVEGILDSVSAGILIYMSLVDLIAAVIFSPKKSAAMRSTKDMYMR

SEQ ID NO: 87259 - protein, 292 aa, Setaria italica
  Transcript Sequence Number=SeqID_21285
  Gene Ontology: Mol. function=metal ion transmembrane transporter activity; Cellular component=integral to membrane; Biological process=metal ion transport
  Homolog annotation: Hit_ID=B6TQ79; Match level="QueryCoverage=98%, HitCoverage=74%, E-value=1e-109, Identity=70%"; Hit description=Zinc transporter 4
  Pfam annotation: Domain name=Zip; Domain location=1-289; Score=199.2; E_value=1.1e-56; Accession=PF02535.14; Description=ZIP Zinc transporter
  Subcellular localization annotation: CTP_CleavageSite=37; ConfidenceScore=5.21e-01
PCHGFVHMLHDAQHALSSPCLPAAPWRRFPFPGFVAMAAALATLVLDFLATRFYETKHRDEAARVKAAAAATLAAASSASDEDITVVTVAEDDRKAPLLQTHCHGHSHGHGHNHGHGHELVQVEGREGDMSDHVRSVVVSQILEMGIVSHSVIIGLSLGVSRSPCTIRPLVAALSFHQFFEGFALGGCIAQAQFKNLSAVLMASFFAITTPAGIAAGAGLATFYNPNSPRALVVEGILDSVSAGILIYMSLVDLIAADFLGEKMTGSLRQQLVAYIALFLGALSMSSLAIWA

SEQ ID NO: 87260 - protein, 76 aa, Setaria italica
  Transcript Sequence Number=SeqID_21286
TILLLLISARRVTFVFVVVVMAKHGDSTIIFVISRAVFQVPAQALVLFSFCPPWLQISRGLSRRWTRATRRGPRGA

SEQ ID NO: 87261 - protein, 54 aa, Setaria italica
  Transcript Sequence Number=SeqID_21287
  Homolog annotation: Hit_ID=B6U6A9; Match level="QueryCoverage=90%, HitCoverage=20%, E-value=4e-15, Identity=82%"; Hit description =Caleosin
  Pfam annotation: Domain name=Caleosin; Domain location=1-49; Score= -78.0; E_value=0.028; Accession=PF05042.5; Description=Caleosin related protein
LLQQAILGWATAAGEWLLLYSVAKDKDGLLQRETVRGAFDGSLFERLQDNKKSS

SEQ ID NO: 87262 - protein, 119 aa, Setaria italica
  Transcript Sequence Number=SeqID_21288
  Gene Ontology: Mol. function=calcium ion binding; Cellular component =vacuole
  Homolog annotation: Hit_ID=B6U6A9; Match level="QueryCoverage=78%, HitCoverage=38%, E-value=4e-44, Identity=88%"; Hit description =Caleosin
  Pfam annotation: Domain name=Caleosin; Domain location=71-119; Score=- 61.0; E_value=0.0014; Accession=PF05042.5; Description=Caleosin related protein
RSCKLSPRVSMSSSSFSSPPEDQSQETEAPHAPVTRERRLNPDLQQQLPKPYLARALEAVDPSHPQGTKGRDSRGLSVLQQHAAFFDRNGDGIIYPWETFQGLRAIGCGLPVSVVGSIL

SEQ ID NO: 87263 - protein, 271 aa, Setaria italica
  Transcript Sequence Number=SeqID_21289
  Gene Ontology: Mol. function=calcium ion binding; Cellular component =vacuole
  Homolog annotation: Hit_ID=B6U6A9; Match level="QueryCoverage=82%, HitCoverage=93%, E-value=1e-114, Identity=87%"; Hit description =Caleosin
  Pfam annotation: Domain name=Caleosin; Domain location=93-266; Score =441.8; E_value=1.1e-129; Accession=PF05042.5; Description=Caleosin related protein
  Subcellular localization annotation: CTP_CleavageSite=30; ConfidenceScore=5.47e-01
MTLQLVSSLPARCSRLAVPHLRRSCKLSPRVSMSSSSFSSPPEDQSQETEAPHAPVTRERRLNPDLQQQLPKPYLARALEAVDPSHPQGTKGRDSRGLSVLQQHAAFFDRNGDGIIYPWETFQGLRAIGCGLPVSVVGSILINLVLSYPTQPGWLPSPLFSIHIKNIHKGKHGSDSEAYDTEGRFDPSKFDAIFSKYGRTHPNALTKDELNSMLEGNRNMYDFLGWATAAGEWLLLYSVAKDKDGLLQRETVRGAFDGSLFERLQDNKKSS

SEQ ID NO: 87264 - protein, 125 aa, Setaria italica
  Transcript Sequence Number=SeqID_21290
  Gene Ontology: Mol. function=calcium ion binding; Cellular component =mitochondrial inner membrane; Biological process=transport
  Homolog annotation: Hit_ID=B6TXR3; Match level="QueryCoverage=100%, HitCoverage=41%, E-value=7e-63, Identity=63%"; Hit description =Calcium-binding mitochondrial carrier F55A11.4
  Pfam annotation: Domain name=Mito_carr; Domain location=34-124; Score= 119.9; E_value=8.3e-33; Accession=PF00153.19; Description =Mitochondrial carrier protein
SLLGMVPYAGIDLTVYETLKELSKTYVLKDSDPGPLVQLGCGTVSGALGATCVYPLQVVRTRMQAQSANSEDPYRGMTDCFRRTLRREGISGFYKGLVPNLLKVVPAASITYLVYETMKKSLSLD

SEQ ID NO: 87265 - protein, 53 aa, Setaria italica
  Transcript Sequence Number=SeqID_21291
TAHQCDVSYHVCVKHQLCDAVDCVWLENHVATPSFCSPNQCGLCRNGVLFSGI

SEQ ID NO: 87266 - protein, 65 aa, Setaria italica
  Transcript Sequence Number=SeqID_21292
  Pfam annotation: Domain name=Metallothio_2; Domain location=1-64; Score=26.8; E_value=1.1e-07; Accession=PF01439.10; Description =Metallothionein
YPDLAEKSAAPAAMVLGVAPEKGRLEEGFEKAMESGEGGHGCSCGSGCKCNPATVDGEDDPCACP

SEQ ID NO: 87267 - protein, 97 aa, Setaria italica
  Transcript Sequence Number=SeqID_21293
EAPACQRWGGKFQAWKPTWSLRSYLCSIVTEILDNMVRRDQENMCSIPLLRRNAEDHGRRGGALLGQVRVHLSASGKTEHHMNFRNICSKHPSRRNQ

SEQ ID NO: 87268 - protein, 71 aa, Setaria italica
  Transcript Sequence Number=SeqID_21294
SIVTEILDNMVRRDQENMCGMPLLRRNAEDHGRRGGALLGQVRVHLSASGKTEHHMNFRNICSKHPSRRNQ

SEQ ID NO: 87269 - protein, 77 aa, Setaria italica
  Transcript Sequence Number=SeqID_21295
  Pfam annotation: Domain name=Metallothio_2; Domain location=1-77; Score=118.5; E_value=2.2e-32; Accession=PF01439.10; Description =Metallothionein
MSCGGSCNCGSSCGCGSGCGKMYPDLAEKSAAPAAMVLGVAPEKGRLEEGFEKAMESGEGGHGCSCGSGCKCNPCNC

SEQ ID NO: 87270 - protein, 591 aa, Setaria italica
  Transcript Sequence Number=SeqID_21296
  Gene Ontology: Mol. function=iron ion binding; Cellular component =integral to membrane; Biological process=iron ion transport
  Homolog annotation: Hit_ID=Q9AY27; Match level="QueryCoverage=99%, HitCoverage=86%, E-value=0.0, Identity=88%"; Hit description=Iron -phytosiderophore transporter yellow stripe 1
  Pfam annotation: Domain name=OPT; Domain location=1-585; Score=504.3; E_value=1.6e-148; Accession=PF03169.7; Description=OPT oligopeptide transporter protein
TLNVSAALIAFLALRGWTRVLERLGVAHRPFTRQENCVIETCAVACYTIAFGGGFGSTLLGMDKRTYELSGNSPANVPGSYKDPGFGWMAGFMAAISFSGLLSLIPLRKVLVIDYNLTYPSGTATAVLINGFHTKQGDKNAKMQVRGFLKYFGLSFIWSFFQWFYTGGDICGFVQFPTFGLKAWKQTFFFDFSMTYVGAGMICSHLVNISTLLGAILSWGILWPLISKQKGEWYPANVPESSMKSLYGYKAFLCIALIMGDGLYHFFKVLGVTAMSLHERLNRKRASNRVANGNGDEMVPLDDLQRDEVFKDGSFPAWAAYAGYAGLSVIAVITIPIMFRQIKWYHVIVAYVIAPLLGFANSYGTGLTDINMAYNYGKIALFIFAAWAGKDNGVIAGLAGGTLVKQLVMASADLMHDFKTGHLTMTSPRSLLVAQFIGTAMGCIVAPLTFLLFYNAFDIGNPTGYWKAPYGLIYRNMAVLGVEGFSALPKHCLTLSAGFFAFAFIFSVARDILPRKYGRLVPLPMAMAVPFLVGGSFAIDMCVGSLIVFVWNKMNKNEAAFMVPAMASGLICGDGIWTFPSSLLALAKISK

SEQ ID NO: 87271 - protein, 161 aa, Setaria italica
  misc_feature (76)..(76): Xaa can be any naturally occurring amino acid
  Transcript Sequence Number=SeqID_21297
  Gene Ontology: Mol. function=aminopeptidase activity; Cellular component=mitochondrion; Biological process=cellular process
  Homolog annotation: Hit_ID=B9RFL1; Match level="QueryCoverage=96%, HitCoverage=30%, E-value=1e-40, Identity=56%"; Hit description=Xaa -pro dipeptidase, putative
  Pfam annotation: Domain name=Peptidase_M24; Domain location=2-129; Score=-69.7; E_value=0.00048; Accession=PF00557.16; Description =metallopeptidase family M24
SLILETNKECIKLCKPGTSINEIHNHSVKMLIKGFQELGILEKGKSIQYNYLNPTAIGHSLGMDIHDSVTLPKDKXPLEPGVVITIEPGVYIPPAPVLNERAPGRFRGIGIRIEDEVLVTEDGHEVLTASVPKEIPHLTTLMSMGSESAAAGGHERRAACS

SEQ ID NO: 87272 - protein, 389 aa, Setaria italica
  Transcript Sequence Number=SeqID_21298
  Gene Ontology: Mol. function=aminopeptidase activity; Cellular component=mitochondrion; Biological process=cellular process
  Homolog annotation: Hit_ID=B9RFL1; Match level="QueryCoverage=87%, HitCoverage=70%, E-value=1e-137, Identity=64%"; Hit description=Xaa -pro dipeptidase, putative
  Pfam annotation: Domain name=AMP_N; Domain location=63-193; Score =115.9; E_value=1.4e-31; Accession=PF05195.8; Description =Aminopeptidase P, N-terminal domain
  Pfam annotation: Domain name=Peptidase_M24; Domain location=229-389; Score=28.8; E_value=2.6e-11; Accession=PF00557.16; Description =metallopeptidase family M24
  Pfam module annotation: Pfam domain module=AMP_N::Peptidase_M24; Domain location=63-193::229-389
MAMAARLLRRTLRATEVASRFLSASHGLVQRAAYTSGGIVDVGQPTPQTHPELLADGEITPGITTEEYISRRKKLLEVLPEKSLAIIASADQQMMTDVVPYPFRQNGDYLYITGCTQPGGVAVLSEETGLCMFMPDTNKEDVVWQGQTAGIEAAVEFFKADKAFSLSQMQKILPEMIEQSKGVYHNVKTSSSSYKNLDAFRRASLNNKVKDLTYYTDELRWIKSKSEIKLMRESASIVSQSLLQTMLLSRTHREESQLAAKIEYECKMRGAQRMAFHPVVGGGANGSVIHYSRNDRKIKTGDLLLMDVGCEYHGYLSDLTRTWPPCGRFSPAQEELYSLILETNKECIKLCKPGLIINEIHNHSVKMLIKGFQERVTYRGRVQVVVLDG

SEQ ID NO: 87273 - protein, 46 aa, Setaria italica
  misc_feature (45)..(45): Xaa can be any naturally occurring amino acid
  Transcript Sequence Number=SeqID_21299
CCDICHVNDAAQQQEKLFFTFFRRLNEQRYLPQCVLHPLKKKTKXT

SEQ ID NO: 87274 - protein, 175 aa, Setaria italica
  misc_feature (31)..(31): Xaa can be any naturally occurring amino acid
  Transcript Sequence Number=SeqID_21300
  Gene Ontology: Cellular component=integral to membrane; Biological process=transport
  Homolog annotation: Hit_ID=B6TAR3; Match level="QueryCoverage=98%, HitCoverage=77%, E-value=4e-70, Identity=82%"; Hit description =Prenylated Rab receptor 2
  Pfam annotation: Domain name=PRA1; Domain location=4-158; Score =200.3; E_value=5.2e-57; Accession=PF03208.11; Description=PRA1 family protein
GRTTARRSLADRRPWTELLDRSAFSRPDSLXSEATSRLRRNLGYFRKLTTAVVAFSLAASLLAHPFSLLVLLSILGAWCFLYVFRASDQPVVLFGRTFTDRETLLGLVVASVLAFFLTSVASLIISGLLVGGAIVAAHGACRMPEDLFLDDPSAASNGNTTSRLLSFLASPGSGV

SEQ ID NO: 87275 - protein, 92 aa, Setaria italica
  misc_feature (1)..(9): Xaa can be any naturally occurring amino acid
  misc_feature (20)..(20): Xaa can be any naturally occurring amino acid
  Transcript Sequence Number=SeqID_21301
XXXXXXXXXFFFFFFKPFKXAAGDGRFLIYIELLPKACCSGVRARSEPYTKQGSMRHARRFSRWSSAASLLEVVLGPALEADLAEFMCGAAL

SEQ ID NO: 87276 - protein, 44 aa, Setaria italica
  Transcript Sequence Number=SeqID_21302
TLLPHFCLRKLNFAKISSHETLARLFIKLNPSVQQGDGRFSHLH

SEQ ID NO: 87277 - protein, 89 aa, Setaria italica
  misc_feature (50)..(50): Xaa can be any naturally occurring amino acid
  Transcript Sequence Number=SeqID_21303
  Homolog annotation: Hit_ID=B6SR19; Match level="QueryCoverage=100%, HitCoverage=62%, E-value=7e-41, Identity=92%"; Hit description=16kDa membrane protein
PRDWLRRDLSVIGFGLIGWIGPSSVPVINGNSLTGLFFSSIGEELAHFPXPPVTSQFCLWMVTWHLGLFIVLTFGQIGFKGRTEDYFEK

SEQ ID NO: 87278 - protein, 144 aa, Setaria italica
  Transcript Sequence Number=SeqID_21304
  Homolog annotation: Hit_ID=B6SR19; Match level="QueryCoverage=87%, HitCoverage=87%, E-value=1e-58, Identity=88%"; Hit description=16kDa membrane protein
  Subcellular localization annotation: CTP_CleavageSite=28; ConfidenceScore=5.71e-01
MAASSSAVSGLAGAALASRPAFSTSFVRGGRVSARNPLMTRNLERFPGYVLARFPRDWLRRDLSVIGFGLIGWIGPSSVPVINGNSLTGLFFSSIGEELAHFPTPPPVTSQFWLWMVTWHLGLFIVLTFGQIGFKGRTEDYFEK

SEQ ID NO: 87279 - protein, 144 aa, Setaria italica
  Transcript Sequence Number=SeqID_21305
  Homolog annotation: Hit_ID=B6SR19; Match level="QueryCoverage=87%, HitCoverage=87%, E-value=4e-65, Identity=94%"; Hit description=16kDa membrane protein
  Subcellular localization annotation: CTP_CleavageSite=28; ConfidenceScore=5.73e-01
MAASSSAVSGLAGAALASRPAFSTSFVRGGRVSARNPLMTRNLERNGRITCMTFPRDWLRRDLSVIGFGLIGWIGPSSVPVINGNSLTGLFFSSIGEELAHFPTPPPVTSQFWLWMVTWHLGLFIVLTFGQIGFKGRTEDYFEK

SEQ ID NO: 87280 - protein, 234 aa, Setaria italica
  misc_feature (138)..(138): Xaa can be any naturally occurring amino acid
  misc_feature (162)..(162): Xaa can be any naturally occurring amino acid
  Transcript Sequence Number=SeqID_21306
  Gene Ontology: Mol. function=hydrogen ion transporting ATPase activity, rotational mechanism; Cellular component=proton -transporting two-sector ATPase complex; Biological process=proton transport
  Homolog annotation: Hit_ID=Q8RU33; Match level="QueryCoverage=97%, HitCoverage=64%, E-value=1e-117, Identity=90%"; Hit description =Probable V-type proton ATPase subunit d
  Pfam annotation: Domain name=vATP-synt_AC39; Domain location=1-231; Score=101.8; E_value=2.4e-27; Accession=PF01992.8; Description=ATP synthase (CAC39) subunit
QCCVHLLSTHTALHMLYSIASLAVAQNMRELYRLVLVDTPLAPYFSECITSEDLDDMNIEIMRNTLYKAYLEDFYKFCQKLGGATAEIMCDILSFEADRRAVNITINSIGTELTRDDRRKLYSNFGLLYPYGHKKETXLVCEDVDQVRGAMEKYPPYQSIFXRISYGESQMLDKAFYEEEVRRLCLSFEQQFHYGVFFAYIRLREQEIRNLMWISECVAQNQKARVHDSVVFIF

SEQ ID NO: 87281 - protein, 351 aa, Setaria italica
  Transcript Sequence Number=SeqID_21307
  Gene Ontology: Mol. function=hydrogen ion transporting ATPase activity, rotational mechanism; Cellular component=proton -transporting two-sector ATPase complex; Biological process=proton transport
  Homolog annotation: Hit_ID=Q8RU33; Match level="QueryCoverage=100%, HitCoverage=100%, E-value=0.0, Identity=96%"; Hit description =Probable V-type proton ATPase subunit d
  Pfam annotation: Domain name=vATP-synt_AC39; Domain location=15-348; Score=452.2; E_value=7.8e-133; Accession=PF01992.8; Description=ATP synthase (CAC39) subunit
MYGWEMLSFNIHDGFLEAIVRGNRSGLLTAADYNNLCQCETLDDIKMHLTATEYGPYLQNEPSPLHTTTIVEKCTLKLVDEYKHMLCQATEPLSTFLQYITYGHMIDNVVLIVTGTLHERDVNELLEKCHPLGMFDSIASLAVAQNMRELYRLVLVDTPLAPYFSECITSEDLDDMNIEIMRNTLYKAYLEDFYKFCQKLGGATAEIMCDILSFEADRRAVNITINSIGTELTRDDRRKLYSNFGLLYPYGHEELAVCEDVDQVRGAMEKYPPYQSIFSRISYGESQMLDKAFYEEEVRRLCLSFEQQFHYGVFFAYIRLREQEIRNLMWISECVAQNQKARVHDSVVFIF

SEQ ID NO: 87282 - protein, 534 aa, Setaria italica
  misc_feature (71)..(71): Xaa can be any naturally occurring amino acid
  misc_feature (89)..(89): Xaa can be any naturally occurring amino acid
  misc_feature (485)..(485): Xaa can be any naturally occurring amino acid
  Transcript Sequence Number=SeqID_21308
  Gene Ontology: Mol. function=ARF guanyl-nucleotide exchange factor activity; Cellular component=intracellular; Biological process =regulation of ARF protein signal transduction
  Homolog annotation: Hit_ID=Q7F8R6; Match level="QueryCoverage=99%, HitCoverage=31%, E-value=0.0, Identity=79%"; Hit description =Putative guanine nucleotide-exchange protein GEP2
  Pfam annotation: Domain name=Sec7; Domain location=247-432; Score =309.4; E_value=7.7e-90; Accession=PF01369.12; Description=Sec7 domain
RPRRSPDDPMLLRGKVLSLELVRMVVDNAGPFWKTNEKYLEAVKQYLCLSLLKNSALSAMSVFQLLCSIFXSLISRFRSGLKEEIGMFXPMLILRVLENVLQPSFLQKMTVLNFLEKICKEPQVIIDIFVNFDCDVDAPNIFERIVNGLLKTALGVPAGSTTTLTVAQDQTFRIESVKCLATIMKSMSAWMDQQLRIGEFSPSNSENLSSVDNQNIHNGEEGSGMDYELQFDTINSDITDSSSLEQRRAYKMELQKGITLFNRKPSKGIDFLVKSKKIGHSPEDVASFLRNTAGLNATMIGDYLGERDDFPLKVMHAYVDALNFESMDFGQAIRFFLQGFRLPGEAQKIDRIMEKFAQCYCKCNPNAFTSADTAYVLAYSVIMLNTDAHNTMVKDKMSKADFIRNNRGIDDGKDLPEAYLSTLYDQIVNNEIKMSADSSVPQNKQPSSVMKLLGLDNIINFVNWRPAEDKAVGANDLLIKHIQEXFKAKRGKLESTFYVIADATILRSMMESCWAPMMAAFSVLLDQCDDKAST

SEQ ID NO: 87283 - protein, 294 aa, Setaria italica
  misc_feature (152)..(152): Xaa can be any naturally occurring amino acid
  Transcript Sequence Number=SeqID_21309
  Gene Ontology: Mol. function=oxidoreductase activity; Cellular component=extracellular region; Biological process=oxidation reduction
  Homolog annotation: Hit_ID=Q941X2; Match level="QueryCoverage=84%, HitCoverage=43%, E-value=2e-88, Identity=62%"; Hit description =Laccase-3
  Pfam annotation: Domain name=Cu-oxidase_2; Domain location=139-276; Score=177.5; E_value=3.8e-50; Accession=PF07731.6; Description =Multicopper oxidase
  Subcellular localization annotation: CTP_CleavageSite=51; ConfidenceScore=5.69e-01
GCPTTTASAGAGAGAGAGMGGNTFNGPVGRSSRSSGHPGRTGPQPMLPFLPAFNDTNTATAFSNSLRSPHPVKVPGPVTQELFTTVGFGLFNCHPGPFCQGPNNTRFGASMNNVSFQLPNTVSLLQAHRSNTPGVFTDDFPSFPPVFFDFTXPQNIPRPLWQPVKGTKLYRVRYGAVVQIVFQDTGIFAAEEHPMHIHGYHFYVLATGFGNYDPRRDAAKFNLVDPPSRNTIGVPVGGWAVVRFVADNPGVWLVHCHIDAHLTGGLAMALLVENGGSELEATMAPPLDLPICVL

SEQ ID NO: 87284 - protein, 146 aa, Setaria italica
  Transcript Sequence Number=SeqID_21310
  Gene Ontology: Mol. function=aminoacyl-tRNA ligase activity
  Homolog annotation: Hit_ID=A8JCE5; Match level="QueryCoverage=98%, HitCoverage=54%, E-value=1e-37, Identity=49%"; Hit description =YbaK/prolyl-tRNA synthetase-like protein
  Pfam annotation: Domain name=YbaK; Domain location=2-137; Score=44.5; E_value=4.3e-10; Accession=PF04073.7; Description=YbaK  prolyl-tRNA synthetases associated domain
GLLRADSVAQLCKSIVMVNTQATADVVDCSNPKNSKYYVVVVQYMARLNTENIKNFLYELNEKQIPKKRFNMRLAPEEESHKLTGFVHNAVTCIGMETDIPVIIDEAITKLDEGFFWLGGGEVDLKLGMRTSQFLSAFSPFVVKCS

SEQ ID NO: 87285 - protein, 102 aa, Setaria italica
  Transcript Sequence Number=SeqID_21311
  Subcellular localization annotation: CTP_CleavageSite=62; ConfidenceScore=5.44e-01
AFRFPLTSHNSSFLSVSVFTSFTPTHALFPHAPNHGTTQLQTHNRSQDTLKHTFEQIDVSTPGQTVQRKPPQNEEGKKRTIPFPSVVQPRMRLAYRCRKSFR

SEQ ID NO: 87286 - protein, 83 aa, Setaria italica
  Transcript Sequence Number=SeqID_21312
  Subcellular localization annotation: CTP_CleavageSite=74; ConfidenceScore=5.31e-01
LRVTRGKGNGTQHGKPRSGKREPRRPPGVSVFPNFPLLSVGPWFGRRPAHGVIASEWRRHPRLSPPAPAPDHPRTSRASGAAA

SEQ ID NO: 87287 - protein, 171 aa, Setaria italica
  misc_feature (171)..(171): Xaa can be any naturally occurring amino acid
  Transcript Sequence Number=SeqID_21313
  Gene Ontology: Mol. function=hydrolase activity; Biological process =glutamine metabolic process
  Homolog annotation: Hit_ID=B9SM04; Match level="QueryCoverage=99%, HitCoverage=38%, E-value=7e-60, Identity=65%"; Hit description=Gamma- glutamyl-gamma-aminobutyrate hydrolase, putative
  Pfam annotation: Domain name=Peptidase_C26; Domain location=1-171; Score=-37.8; E_value=5.4e-07; Accession=PF07722.5; Description =Peptidase C26
VGYGAVPVIVPRVAGVHTLLDSFEPIHGVLLCEGEDIDPSLYESSDAGDGDGSALSPDQLEAVRRLHPSDAAIDHEKDSIELRLARRCLERNIPYLGICRGSQVLNVACGGSLYQDVEHELGGEAVQHINYGDYDGHRHPVRVLPGTPLHEWFADDLADGEDGGKQLMVNX

SEQ ID NO: 87288 - protein, 80 aa, Setaria italica
  Transcript Sequence Number=SeqID_21314
  Gene Ontology: Mol. function=oxidoreductase activity; Biological process=oxidation reduction
  Homolog annotation: Hit_ID=Q2R3G3; Match level="QueryCoverage=97%, HitCoverage=25%, E-value=2e-20, Identity=62%"; Hit description=NAD dependent epimerase/dehydratase family protein, expressed
LCMASISGILGGLGTYPYSVSKFAIAGIVKAAAAELSRVGVRINCISPYAVPTPMVVDQFSTMLGGAAYEEQVAAIIRPE

SEQ ID NO: 87289 - protein, 179 aa, Setaria italica
  misc_feature (92)..(92): Xaa can be any naturally occurring amino acid
  Transcript Sequence Number=SeqID_21315
  Gene Ontology: Mol. function=peptidase activity; Biological process =proteolysis
  Homolog annotation: Hit_ID=B6SP44; Match level="QueryCoverage=92%, HitCoverage=17%, E-value=3e-34, Identity=46%"; Hit description =Glutamate carboxypeptidase 2
HHLLFALLVACIKVLRLGDGGSDYLAFVQHAGIPSMNIVFGEGPGYPVYHSLYDDYVWMAKFGDPGFRRHVAGLLRCIAPAFVLRCIAPLYXLRHYLRHHVVTKMFAAASIWGMMALRLADDEIIPFNYMSYAIELEAYTKVLENKVKGTDVTCSPLYNSIRALKTAATTVNNEQKVLT

SEQ ID NO: 87290 - protein, 143 aa, Setaria italica
  Transcript Sequence Number=SeqID_21316
  Gene Ontology: Mol. function=carboxypeptidase activity; Cellular component=integral to membrane; Biological process=proteolysis
  Homolog annotation: Hit_ID=B6SP44; Match level="QueryCoverage=86%, HitCoverage=16%, E-value=8e-38, Identity=59%"; Hit description =Glutamate carboxypeptidase 2
LFSFPGFSLSYLGRIGRYSSTYFSPFVQHAGIPSMNIVFGEGPGYPVYHSLYDDYVWMAKFGDPGFRRHVAAASIWGMMALRLADDEIIPFNYMSYAIELEAYTKVLENKVKGTDVTCSPLYNSIRALKTAATTVNNEQKVLT

SEQ ID NO: 87291 - protein, 646 aa, Setaria italica
  Transcript Sequence Number=SeqID_21317
  Gene Ontology: Mol. function=carboxypeptidase activity; Cellular component=integral to membrane; Biological process=proteolysis
  Homolog annotation: Hit_ID=B6SP44; Match level="QueryCoverage=100%, HitCoverage=88%, E-value=0.0, Identity=61%"; Hit description =Glutamate carboxypeptidase 2
  Pfam annotation: Domain name=PA; Domain location=79-184; Score=51.0; E_value=4.6e-12; Accession=PF02225.14; Description=PA domain
  Pfam annotation: Domain name=Peptidase_M28; Domain location=279-466; Score=65.8; E_value=1.6e-16; Accession=PF04389.9; Description =Peptidase family M28
  Pfam annotation: Domain name=TFR_dimer; Domain location=507-644; Score=50.2; E_value=8e-12; Accession=PF04253.7; Description =Transferrin receptor-like dimerisation domain
  Pfam module annotation: Pfam domain module=PA::Peptidase_M28::TFR _dimer; Domain location=79-184::279-466::507-644
GTRANSRTARYVRDALPFPAHIAPYSVLLSYPVHRSLSLSAPGRGAGASTSFALKQETYRGDPYAAASAEAIPTFYAYAASGSVSAEAVYANYGREEDFAYLASRGVDVAGKVALARYGRIHCEEVVHNARAAGAAAAVVYTDPLHYGGAPGEAAFPESRWLPPSGVQVGSLFLGAGDPTTPMWPSSDGCERLSVEEAMGTDDMPLIPALPVSARDAMEIHSGMGGAVAPAGWQGREDGPVYRLGPGPAVLNLTYLGNDTMATIENVFAIIEGAEEPDRYVILGNHRDAWTFGASDPNSGTAAMIELAQRFSMLQKQGWRPRRTIIFCSWDAEEYGLTGSTEWVEENREMLSSRAVAYLNIDVSVVGPGFLPSTTPQLDELLQEITKVVQDPDNSSQTVYDSWIKSNGSPRVLRLGDGGSDYLAFVQHAGIPSMNIVFGEGPGYPVYHSLYDDYVWMAKFGDPGFRRHVAAASIWGMMALRLADDEIIPFNYMSYAIELEAYTKVLENKVKGTDVTCSPLYNSIRALKTAATTVNNEQKELQKQLLSKQLNKDALKIRQLNDRLMQAERAFTSREGIFKQEWCKHLVYGPSDQNDWDTAVYPGIANAIGSARSSNTSESWKSVQHEIYRVARAVTQASAVLSGRLT

SEQ ID NO: 87292 - protein, 111 aa, Setaria italica
  Transcript Sequence Number=SeqID_21318
  Homolog annotation: Hit_ID=B6UQE3; Match level="QueryCoverage=91%, HitCoverage=27%, E-value=2e-25, Identity=61%"; Hit description=ALMT2 (Fragment)
VRRGAAPEHVKRLLRDACTRAGARCARVLREASCSVATMTASSRALDLAVADMNTAVHDLQGDMRSLPSMLAVKLAETSLVDTMPVFTVASLLVEIAARVEGVVDAVLRHA

SEQ ID NO: 87293 - protein, 55 aa, Setaria italica
  Transcript Sequence Number=SeqID_21319
  Gene Ontology: Mol. function=nucleotide binding; Cellular component =intracellular; Biological process=small GTPase mediated signal transduction
  Homolog annotation: Hit_ID=B6TX18; Match level="QueryCoverage=78%, HitCoverage=14%, E-value=2e-16, Identity=86%"; Hit description =Septum-promoting GTP-binding protein 1
WYERARKWNKTAIPILIGTKFDDFAQLPLEMQWAIVNQVKHFGLVSHTQPQIQEF

SEQ ID NO: 87294 - protein, 136 aa, Setaria italica
  misc_feature (73)..(73): Xaa can be any naturally occurring amino acid
  misc_feature (104)..(104): Xaa can be any naturally occurring amino acid
  Transcript Sequence Number=SeqID_21320
  Gene Ontology: Cellular component=membrane
SFSIPVKQKLPHAKAYFGYRYLVDNYNFLFVYRVRGFRAGNDGKLMDRVLCIMQFCVIFLSAVLLFFAVQGDXMKLQGICTLGMLVFYKLLPSRSDRFQPSLRXLEGMQTVNSFVDGPTDYEVFSQPDLDWNMYQS

SEQ ID NO: 87295 - protein, 116 aa, Setaria italica
  misc_feature (73)..(73): Xaa can be any naturally occurring amino acid
  Transcript Sequence Number=SeqID_21321
  Gene Ontology: Cellular component=membrane
SFSIPVKQKLPHAKAYFGYRYLVDNYNFLFVYRVRGFRAGNDGKLMDRVLCIMQFCVIFLSAVLLFFAVQGDXMKLQGIHIIQPYAQLALQVTNSVHNTKANVPTLVAGAPLEVRR

SEQ ID NO: 87296 - protein, 140 aa, Setaria italica
  misc_feature (43)..(43): Xaa can be any naturally occurring amino acid
  Transcript Sequence Number=SeqID_21322
  Gene Ontology: Mol. function=nucleotide binding; Cellular component =intracellular; Biological process=small GTPase mediated signal transduction
  Homolog annotation: Hit_ID=B6TX18; Match level="QueryCoverage=88%, HitCoverage=41%, E-value=2e-63, Identity=91%"; Hit description =Septum-promoting GTP-binding protein 1
  Pfam annotation: Domain name=Miro; Domain location=6-113; Score=77.3; E_value=5.7e-20; Accession=PF08477.5; Description=Miro-like protein
  Pfam annotation: Domain name=Ras; Domain location=9-140; Score=-83.7; E_value=0.0053; Accession=PF00071.14; Description=Ras family
  Pfam module annotation: Pfam domain module=Miro::Ras; Domain location= 6-113::9-140
TTDELARSGKTSFMVKYVGDDGEEQNGLQMTGLNLMEKTMAVXGARIAYSIWDVAGDVQSVDHIPIACKDAVAILYMFDLTSRCTLNNIIDWYERARKWNKTAIPILTGTKFDDFAQLPLEMQWAIVNQVSSAFYNTGLF

SEQ ID NO: 87297 - protein, 366 aa, Setaria italica
  misc_feature (336)..(336): Xaa can be any naturally occurring amino acid
  Transcript Sequence Number=SeqID_21323
  Gene Ontology: Cellular component=membrane
  Pfam annotation: Domain name=DUF221; Domain location=55-365; Score= -41.2; E_value=1.1e-07; Accession=PF02714.7; Description=Domain of unknown function DUF221
EHRFVRRCKELWVMASERLGFTDEERLRKLQTKKLVLGSKLSDYKEGRAPGAGVAFVVFKDVYTANKAVRDFKLERKKTPIGRFFPVMELQLERSRWKVERAPPASDIYWNHLGLSKMSSRLRRIAVNTCLLLMLLFFSSPLAIISGMQSAARIINVEAMDHAKSWLAWLEGSSWFWTIIFQFLPNVLIFVSMYIIIPSVLSYFSKFECHLTVSGEQRAALLKMVCFFLVNLILLRALVESSLESWILSMGRCYLDGPDCKQIEHYLSPSFLSRSSLSSLAFLITCTFLGISFDLLAPIPWIKHIMKKFRKNDMVQLVPEENEDYLMMQNGEESIXFDSTLMPEREDSGLGNSGRYRALLRMLAWQ

SEQ ID NO: 87298 - protein, 309 aa, Setaria italica
  misc_feature (246)..(246): Xaa can be any naturally occurring amino acid
  misc_feature (279)..(279): Xaa can be any naturally occurring amino acid
  Transcript Sequence Number=SeqID_21324
  Gene Ontology: Cellular component=membrane
  Pfam annotation: Domain name=DUF221; Domain location=40-239; Score= -166.1; E_value=0.015; Accession=PF02714.7; Description=Domain of unknown function DUF221
MMRSSVCFFLVNLILLHVLVESSLQSWILSIGRCYLDGPDCKQIEHYLSPYFLSRSSLSSLAFLITCTFLGISFDLLAPIPWIKHIMKKFRKNDMVQLVPEENEDYLMMQNGEESNNLTAPLMPEREDSGLLDSIEGHDLSLYPLNRSFHMPKQKFDFAQYYAFDITIFALTMIYSLFAPLVVPVGAAYFGYRYLVDKYNFLFVYRVRGFPAGNDGKLMDRVLCIMQFCVIFLAAMLLFFAVQGDXMKLQAICTLGMLVFYKLLPSRSDRFQPSLLELXGMQTINSFVDDLTDYSVFSQPDLDYSLYQS

SEQ ID NO: 87299 - protein, 207 aa, Setaria italica
  Transcript Sequence Number=SeqID_21325
  Gene Ontology: Mol. function=nucleotide binding; Cellular component =intracellular; Biological process=small GTPase mediated signal transduction
  Homolog annotation: Hit_ID=B6TX18; Match level="QueryCoverage=91%, HitCoverage=63%, E-value=1e-106, Identity=97%"; Hit description =Septum-promoting GTP-binding protein 1
  Pfam annotation: Domain name=Miro; Domain location=23-137; Score =113.8; E_value=5.7e-31; Accession=PF08477.5; Description=Miro-like protein
  Pfam annotation: Domain name=Ras; Domain location=23-189; Score= -13.7; E_value=2.7e-08; Accession=PF00071.14; Description=Ras family
  Pfam module annotation: Pfam domain module=Miro::Ras; Domain location= 23-137::23-189
FYGFRFSFNDAATADGENVVSLKVSLLGDCQIGKTSFMVKYVGDDGEEQNGLQMTGLNLMDKTMAVRGARIAYSIWDVAGDVQSVDHIPIACKDAVAILYMFDLTSRCTLNNIIDWYERARKWNKTAIPILIGTKFDDFAQLPLEMQWAIVNQARAYARAMKATLFFSSATHNINVNKIFKFITAKLFNLPWTVERNLTIGEPIIDF

SEQ ID NO: 87300 - protein, 74 aa, Setaria italica
  Transcript Sequence Number=SeqID_21326
  Subcellular localization annotation: CTP_CleavageSite=53; ConfidenceScore=5.26e-01
PPFPSPSRDDRARPLAESSPAPAPSCRRYRRDSAAMSSPRLHTITITFSAATHARARSAHPFRSCNYQHGDIRT

SEQ ID NO: 87301 - protein, 111 aa, Setaria italica
  misc_feature (65)..(65): Xaa can be any naturally occurring amino acid
  Transcript Sequence Number=SeqID_21327
  Subcellular localization annotation: CTP_CleavageSite=54; ConfidenceScore=5.61e-01
ASPPPPPAPGAAPPAPFPRRRRRSPAAPPAVAPPGAPPSPPFPSPSRDDRARPLAESSPAPAPSXPPLSPRLWDWEEGTGGEYVGVVDLLRSCRGFICCLGDRRAGPWPRN

SEQ ID NO: 87302 - protein, 160 aa, Setaria italica
  misc_feature (147)..(147): Xaa can be any naturally occurring amino acid
  Transcript Sequence Number=SeqID_21328
  Gene Ontology: Mol. function=ATPase activity, coupled to transmembrane movement of substances; Cellular component=integral to membrane; Biological process=transport
  Homolog annotation: Hit_ID=Q6UC91; Match level="QueryCoverage=100%, HitCoverage=58%, E-value=2e-65, Identity=65%"; Hit description=P -glycoprotein 1
  Pfam annotation: Domain name=ABC_tran; Domain location=1-160; Score =160.9; E_value=3.7e-45; Accession=PF00005.19; Description=ABC transporter
TIALVGSSGSGKSTVVSLIERFYDPSAGQILLDGHDLKSLKLRWLRQQMGLVSQEPTLFATSIKENLLLGRESETATQAEMEEAARVANAHSFIIKLPQGYDTQVGDRGLQLSGGQKQRIAIARAMLKNPAILLLDEATSALDSESXKLVQEALDRFMIG

SEQ ID NO: 87303 - protein, 122 aa, Setaria italica
  Transcript Sequence Number=SeqID_21329
  Pfam annotation: Domain name=DUF588; Domain location=12-119; Score= -32.9; E_value=0.042; Accession=PF04535.4; Description=Domain of unknown function (DUF588)
MHDEEKKESKCAMAVSIACRIVGMGLAVAAAVLMSTASQCTIYAAYGARPRTVTYSDYPPFVYLVGAAAIAAFLEAIAIVLCVWKKGKGKKAKVLMPLLAAAVPALLYSATGAAFAAGADMS

SEQ ID NO: 87304 - protein, 127 aa, Setaria italica
  Transcript Sequence Number=SeqID_21330
  Gene Ontology: Mol. function=nucleoside-triphosphatase activity; Cellular component=membrane; Biological process=transport
  Homolog annotation: Hit_ID=B9N0R0; Match level="QueryCoverage=96%, HitCoverage=18%, E-value=4e-41, Identity=64%"; Hit description=White- brown-complex ABC transporter family (Fragment)
VLVAQSLGLAIGAVLMDVKQGTTLASVITMVFLIAGGYYVQHIPPFVAWLRWLNYSFYCYRLLLGIQFPNGGGYYDCGGGAMCPVAEFPAIKAVGLNNHWVDVCVMALLLVGYRVVAYIALDRLKPR

SEQ ID NO: 87305 - protein, 509 aa, Setaria italica
  misc_feature (142)..(142): Xaa can be any naturally occurring amino acid
  misc_feature (243)..(243): Xaa can be any naturally occurring amino acid
  misc_feature (444)..(444): Xaa can be any naturally occurring amino acid
  Transcript Sequence Number=SeqID_21331
  Gene Ontology: Mol. function=protein binding; Biological process =defense response
  Homolog annotation: Hit_ID=B9V0H5; Match level="QueryCoverage=94%, HitCoverage=42%, E-value=1e-83, Identity=39%"; Hit description=NBS -LRR disease resistance protein family-3
  Pfam annotation: Domain name=LRR_1; Domain location=131-153; Score =15.1; E_value=0.29; Accession=PF00560.25; Description=Leucine Rich Repeat
  Pfam annotation: Domain name=LRR_1; Domain location=155-174; Score =9.0; E_value=5.8; Accession=PF00560.25; Description=Leucine Rich Repeat
  Pfam annotation: Domain name=LRR_1; Domain location=16-39; Score =11.0; E_value=2.3; Accession=PF00560.25; Description=Leucine Rich Repeat
  Pfam annotation: Domain name=LRR_1; Domain location=384-408; Score =0.2; E_value=2.8e+02; Accession=PF00560.25; Description=Leucine Rich Repeat
  Pfam annotation: Domain name=LRR_1; Domain location=41-63; Score =11.3; E_value=2; Accession=PF00560.25; Description=Leucine Rich Repeat
  Pfam annotation: Domain name=LRR_1; Domain location=488-507; Score =2.0; E_value=1.3e+02; Accession=PF00560.25; Description=Leucine Rich Repeat
  Pfam module annotation: Pfam domain module=LRR_1::LRR_1::LRR_1::LRR _1::LRR_1::LRR_1; Domain location=131-153::155-174::16-39::384 -408::41-63::488-507
ALSFLELPASFGNLTNAVHINLSGCIGLKTLPAESFGVLKKLEHLDLSSCSCLEGIPSVVDGLTNLQHLNLSHPCCYLSEHRFHLKALKDIWVKLINLRYLNLSMCLNPIFCYLSEKERIEYIDSISHLHTLEHLDLSHNIXLFDIPESLSRLSQLQTLNLSGCSRLKRIEKCMGENNCPKKSLVVSNCLGLERYQFVVHTDGANRSNLAQLKDVSCKEVEISRLEKVISTKEAQNIGLMEKXKLQKLALVWSAGGDDASSKDGDLLAELVPPQNLQYFELHGYSSEYLPAWLTSSIFSHLPNLVEVTMVDIPSCSNLPSVGVLPNLQRLILRRVAKVTRIDAGYLSGGSKAAFRRLMHVTLDGMVNLKELDTYSSSDNFVFPTLDELVINKCPKLRFGDSPPKTRMLVISDCDQLMMYPEKRGKHDISSSCTTSAPVTEVVIXSCEVPLDKLKWSLLEGLAPLHSLHIRNCSEKIISPEIMKGRLLSIQLLSFSHCASMTYLPDHVVQ

SEQ ID NO: 87306 - protein, 191 aa, Setaria italica
  Transcript Sequence Number=SeqID_21332
  Gene Ontology: Mol. function=serine-type endopeptidase activity; Cellular component=mitochondrial matrix; Biological process =proteolysis
  Homolog annotation: Hit_ID=B9RLZ5; Match level="QueryCoverage=93%, HitCoverage=33%, E-value=3e-82, Identity=79%"; Hit description =Serine endopeptidase degp2, putative
KPGETAVLKALRDGKEQELSVILRPLQPLVPVHQFDKLPSYYIFAGFVFIPLTQPYLHEFGEDWYNASPRRLCERALRELPKKAGEQLVVLSQVLMDDINVGYERLAELQVKKVNGVEVENLKHLCSLVESCTEENLRFDLDDERVIILKYQNARLATSRVLKRHRIPSAMSSDLVEEQATNGEVEASCTS

SEQ ID NO: 87307 - protein, 69 aa, Setaria italica
  Transcript Sequence Number=SeqID_21333
NKYVLDDNNNPISYPSSAYRLYIRWIIYTISALRCSGSEIFELCFRSGVMWVYYPKFSSVAAEDVLQIL

SEQ ID NO: 87308 - protein, 173 aa, Setaria italica
  Transcript Sequence Number=SeqID_21334
  Homolog annotation: Hit_ID=B2ZAT1; Match level="QueryCoverage=100%, HitCoverage=43%, E-value=6e-65, Identity=45%"; Hit description =Putative pentatricopeptide repeat protein
  Pfam annotation: Domain name=PPR; Domain location=124-158; Score=1.0; E_value=6.7; Accession=PF01535.12; Description=PPR repeat
  Pfam annotation: Domain name=PPR; Domain location=53-87; Score=48.3; E_value=3e-11; Accession=PF01535.12; Description=PPR repeat
  Pfam annotation: Domain name=PPR; Domain location=88-121; Score=7.1; E_value=1.3; Accession=PF01535.12; Description=PPR repeat
  Pfam module annotation: Pfam domain module=PPR::PPR::PPR; Domain location=124-158::53-87::88-121
SLERGREIHAYALRRGYLEDNYTSNALVDMYVKCGALMVARLLFDRLTKKNLISWTIMIAGYGMHGHGKDAIALFEQMRGSGVEPDSASFSAILYACCHSGLRNEGWRFFNAMRNEHKIEPKLKHYACIVDLLSHTGNLKEAFEFIESMPIEPDSSIWVSLLHGCRIHRDVKL

SEQ ID NO: 87309 - protein, 344 aa, Setaria italica
  Transcript Sequence Number=SeqID_21335
  Gene Ontology: Mol. function=electron carrier activity; Cellular component=extracellular region; Biological process=response to oxidative stress
  Homolog annotation: Hit_ID=Q9MAX9; Match level="QueryCoverage=88%, HitCoverage=91%, E-value=1e-122, Identity=69%"; Hit description =Peroxidase
  Pfam annotation: Domain name=peroxidase; Domain location=57-307; Score=479.2; E_value=5.8e-141; Accession=PF00141.15; Description =Peroxidase
MARRQWSNGGVAVAAAVLAVLSVLCSAHPVPGGHGGGGFPLQPHFYDHSCPQMQAIVGAIVAKAHAEDPRMAASLLRMHFHDCFVQGCDASVLLDADGSGRFVTEKRSNPNKDSLRGYEVIDEIKAAVEHACPHVVSCADIVAVAARDSVVLTGGPGWEVPLGRRDSLTASLSGSNNLIPAPNDSLPTIIGKFANQGLDVVDLVALSGGHTIGDSRCVSFRQRLYGQNNNGQVDRTLNPAYAAELRGRCPRSGGDQNLFALDPASQFRFDNQYYHNILAMNGLLSSDEILLTQGRETMELVHRFAANQGLFFEQFAKSMVKMGNISPLTGHAGEIRMNCRRVNH

SEQ ID NO: 87310 - protein, 49 aa, Setaria italica
  Transcript Sequence Number=SeqID_21336
RDSCLLFGKILLQVDGFAECLWMVTLTIHNLFVKQAATRHSHQCCNYAT

SEQ ID NO: 87311 - protein, 79 aa, Setaria italica
  Transcript Sequence Number=SeqID_21337
  Gene Ontology: Cellular component=integral to membrane
  Homolog annotation: Hit_ID=Q94CH2; Match level="QueryCoverage=100%, HitCoverage=15%, E-value=1e-20, Identity=65%"; Hit description=Seven transmembrane protein Mlo3
CIDESLMEHWLPCRGGNNDKHASAAAAHYGAASTFAASGRRMLKGGAAFGHCSSKGKVPLLSRHALEQLHIFIFVLAIT

SEQ ID NO: 87312 - protein, 114 aa, Setaria italica
  misc_feature (16)..(16): Xaa can be any naturally occurring amino acid
  Transcript Sequence Number=SeqID_21338
ILKHFSSYLKIERKIXGDSSLVHLTGDWSGSGSVSGLEVTMSLSNIEMVSSLLAPFYGIMSSGSTQKEIPSGGITHQAQLDNMDYTIPDGAIVAIRDLNQQMYVSVKNTGNTYQ

SEQ ID NO: 87313 - protein, 265 aa, Setaria italica
  Transcript Sequence Number=SeqID_21339
  Gene Ontology: Mol. function=protein serine/threonine kinase activity; Cellular component=peroxisome; Biological process=protein amino acid phosphorylation
  Homolog annotation: Hit_ID=B6SKM9; Match level="QueryCoverage=99%, HitCoverage=44%, E-value=1e-141, Identity=93%"; Hit description=ATP binding protein
  Pfam annotation: Domain name=Pkinase; Domain location=1-231; Score =42.2; E_value=5.3e-11; Accession=PF00069.17; Description=Protein kinase domain
  Pfam annotation: Domain name=Pkinase_Tyr; Domain location=1-231; Score=3.7; E_value=5.7e-14; Accession=PF07714.9; Description=Protein tyrosine kinase
  Pfam module annotation: Pfam domain module=Pkinase::Pkinase_Tyr; Domain location=1-231::1-231
TRKEKEFLAELGIQGHVCHPNTSYLLGCCVENGLYLIFEFCANGTLASALHGKSGKTLEWPLRYKIAIGVARGLQYLHMFCRHRIIHRDIKASNVLLGDDFEPQISDFGLAKWLPKQWTHHSIIPIEGTFGYLAPEYFMHGIVDEKTDIFAFGVLLLEIVTGRRPIDCSKQSLLQWAKPLLEAGQATELADPNLGDDYDQDQLKRMIAVASRCIMRPAMWRPSMAEVLHFLSTDDCLKEPEKWNIPEDEVDDMDDCTLFSESCSP

SEQ ID NO: 87314 - protein, 83 aa, Setaria italica
  misc_feature (34)..(34): Xaa can be any naturally occurring amino acid
  misc_feature (49)..(49): Xaa can be any naturally occurring amino acid
  misc_feature (58)..(58): Xaa can be any naturally occurring amino acid
  Transcript Sequence Number=SeqID_21340
  Subcellular localization annotation: CTP_CleavageSite=63; ConfidenceScore=5.26e-01
GGCSGGNATGGRRPVQAGRAATAASFPPLLPVDXLVSAAEYGGGGNWSXAARRTRRRXASRLPSSSRPDTEARRSPTSLPLPS

SEQ ID NO: 87315 - protein, 49 aa, Setaria italica
  Transcript Sequence Number=SeqID_21341
QVYLLLGLNSEQKNINPALDFRVLSVHQVHESYIDEIAGINTELLALKS

SEQ ID NO: 87316 - protein, 81 aa, Setaria italica
  Transcript Sequence Number=SeqID_21342
  Gene Ontology: Mol. function=hydrolase activity; Cellular component =cell wall
  Homolog annotation: Hit_ID=A6N1T8; Match level="QueryCoverage=95%, HitCoverage=36%, E-value=3e-35, Identity=87%"; Hit description =Catalytic hydrolase (Fragment)
LELGQKFYVLGASMGGYSVWGCLQYIPHRLAGAALVVPVINYWWPSFPAELSRQAFKKLVVPEQRTLWIAHNVPSLLYLWM

SEQ ID NO: 87317 - protein, 172 aa, Setaria italica
  Transcript Sequence Number=SeqID_21343
  Gene Ontology: Cellular component=integral to membrane
  Homolog annotation: Hit_ID=UPI0000162E4C; Match level="QueryCoverage =88%, HitCoverage=39%, E-value=1e-46, Identity=59%"; Hit description =auxin efflux carrier family protein
  Pfam annotation: Domain name=Mem_trans; Domain location=1-163; Score=- 103.7; E_value=0.0051; Accession=PF03547.10; Description=Membrane transport protein
MSLSTFLFEANYRLLQIVGFIIGGTPLIRNAIIGDSAPLRVLQESAELIGGGAIPSVTLIMGANLLNGVRGGARVQPSVIAGVIVVRYILLPLLGTGLVKGAVRLGLIQPDPLYQFILHLQYAVPPAMNIGTIMQLFGVGASECSVIFVWVYALASVAVTVWSAFFMWTLSS

SEQ ID NO: 87318 - protein, 114 aa, Setaria italica
  Transcript Sequence Number=SeqID_21344
  Gene Ontology: Mol. function=hydrolase activity; Cellular component =plasma membrane
  Homolog annotation: Hit_ID=B4FTK9; Match level="QueryCoverage=100%, HitCoverage=47%, E-value=2e-42, Identity=72%"; Hit description=Endo -1,3;1,4-beta-D-glucanase
PLQWLQSHDPEKAFEEAKPVIAALKEKGMPTIGAAGYCWGAKVVVELAKAREIQAVVMSHPALVTVDDIKEVKCPICVLGAEIDQFSPQELVKQFEHVLSATAVAHFVKIFPGV

SEQ ID NO: 87319 - protein, 197 aa, Setaria italica
  Transcript Sequence Number=SeqID_21345
SGELHTFASLLGKAKAQLKGPLLTLAFVYALEIAYTAFLTVMAGILLTFVLVIKQYLALVFVGALLAIVAVVFLVYFFFVCSLSIIVAVAEPDCHGAGAVGRAWRLMKGKLLRAVVFILVTVVLAAAIWPVYNLAKTCALSNMASGLLLGFLYTILMAAVQVFEVCAMTAFYYECKESTEASATKYVKVSTKESINV

SEQ ID NO: 87320 - protein, 196 aa, Setaria italica
  Transcript Sequence Number=SeqID_21346
  Gene Ontology: Mol. function=electron carrier activity; Cellular component=extracellular region; Biological process=response to oxidative stress
  Homolog annotation: Hit_ID=B6SIA9; Match level="QueryCoverage=91%, HitCoverage=53%, E-value=8e-91, Identity=90%"; Hit description =Peroxidase 1
  Pfam annotation: Domain name=peroxidase; Domain location=30-196; Score=235.3; E_value=1.5e-67; Accession=PF00141.15; Description =Peroxidase
LLLLAGSSPAAAQLEVGYYSKTCPNAEAIVRDEMEKIISAAPSLAGPLLRLHFHDCFVRGCDASVLLNSTEGNLAERDAKPNKSLRGFGSVDRVKAKLEAACPNTVSCADVLTLMARDAVVLAKGPSWPVALGRRDGKVSSATEAADELPPANGDIPLLTKIFVSKNLDVKDLVVLSGAHTLGTAHCPSYAGRLYN

SEQ ID NO: 87321 - protein, 69 aa, Setaria italica
  Transcript Sequence Number=SeqID_21347
AQQATDRLPLESERKRESVSRASSYATQLAARHRVVARSGERDMPEAPVAMRETAAAVLPEAHREALEY

SEQ ID NO: 87322 - protein, 41 aa, Setaria italica
  Transcript Sequence Number=SeqID_21348
IVRLTNPSHSMFIEAMIGWFDAGGHELLGMRFLIFWNYGNI

SEQ ID NO: 87323 - protein, 355 aa, Setaria italica
  misc_feature (96)..(96): Xaa can be any naturally occurring amino acid
  Transcript Sequence Number=SeqID_21349
  Gene Ontology: Biological process=axonogenesis
  Homolog annotation: Hit_ID=Q01L33; Match level="QueryCoverage=82%, HitCoverage=27%, E-value=1e-117, Identity=67%"; Hit description =H0209H04.5 protein
MACMQKSANVVKQLNNVYSPSTFFGNLLQHIVRLTNPSHSMFIEAMIGWFDAGGHELLGMRFFNLLELCVGQVGLACLDSLVHILIKHSMENTVKXFDAKRQGDLTKMDDLLGPPMSIPLMGWLSYKQMVKMLHSSWGSLVEKLATIGQLQLVRTLISFKLRSACKIKANTITSAVEVLVSSLYMHKRVFERGDEDETVRFFLQNIKEKQNFCGLFSPFQVIYISEDPPMFLTRLLSLFSISQLSRYVLDVHLGNLTSPLKRSTADFSAVIIGLGTILRQFDSFYMTQYIQFMVQYIRTAEAAFNATTETPKGATHSSEAPKAVFWLMSLCKYMDVSGDVVESCLPASALAILQS

SEQ ID NO: 87324 - protein, 113 aa, Setaria italica
  misc_feature (71)..(71): Xaa can be any naturally occurring amino acid
  Transcript Sequence Number=SeqID_21350
  Gene Ontology: Mol. function=RNA-directed DNA polymerase activity; Cellular component=exocyst; Biological process=RNA-dependent DNA replication
  Homolog annotation: Hit_ID=Q7XE51; Match level="QueryCoverage=77%, HitCoverage=5%, E-value=5e-20, Identity=53%"; Hit description =Retrotransposon protein, putative, unclassified
MITNRHTKKPLHGLMHIFQASYKYQLTLLPKGQGAEKIQQYMPICLLNCIYKWITKTLPLRLDNVAEKLIXNPFMKGRNIMNGIMALHEILHETKKRQEVGIILKLDFEKACD

SEQ ID NO: 87325 - protein, 59 aa, Setaria italica
  Transcript Sequence Number=SeqID_21351
RKQINQIELCANHNVNKIEAICGCALSCVHIFLSCCRRKHQILKAVDKVIIIHLYQMEP

SEQ ID NO: 87326 - protein, 139 aa, Setaria italica
  Transcript Sequence Number=SeqID_21352
  Homolog annotation: Hit_ID=B9REF6; Match level="QueryCoverage=82%, HitCoverage=37%, E-value=1e-34, Identity=64%"; Hit description =Protein KTI12, putative
  Pfam annotation: Domain name=KTI12; Domain location=1-134; Score= -122.0; E_value=0.034; Accession=PF08433.2; Description=Chromatin associated protein KTI12
MLLILFLDLGSYIFIIAFSWILAVTLDIRLRFHNGLIFQVRTTEANSLYEMDKATQEVVNAVVEAQSCGLGLAMNKISIGPNLPTINLQRSVGLPELRSLRRTFIKLAGQYSLSGPPPPTDADSAKRMFVDYLNSEVGA

SEQ ID NO: 87327 - protein, 214 aa, Setaria italica
  Transcript Sequence Number=SeqID_21353
  Gene Ontology: Mol. function=nucleotide binding; Cellular component =chromosome
  Homolog annotation: Hit_ID=B9REF6; Match level="QueryCoverage=100%, HitCoverage=70%, E-value=4e-72, Identity=61%"; Hit description =Protein KTI12, putative
  Pfam annotation: Domain name=KTI12; Domain location=1-214; Score =204.4; E_value=3e-58; Accession=PF08433.2; Description=Chromatin associated protein KTI12
MALVVMCGQPCSGKSAAAACLAAALRSSSTDLTVRIIDESSLHLGRNDSYKDMVVEKNLRGVLRSEVDRSVSRDSIIIVDSLNNIKGYRYELWCLARASGVRYCVLFCDTEVDHCREWNSNRQEKEERAYDSNIFEDLVSRFEKPDSRNRWDSPLFELFPSRDEIVETAPVIAEAVSYLTKKVDSKTRDVKVLQPTIATQTVRTTEANSLYEMD

SEQ ID NO: 87328 - protein, 177 aa, Setaria italica
  misc_feature (104)..(104): Xaa can be any naturally occurring amino acid
  Transcript Sequence Number=SeqID_21354
  Gene Ontology: Mol. function=nucleotide binding; Cellular component =chromosome
  Homolog annotation: Hit_ID=B9REF6; Match level="QueryCoverage=100%, HitCoverage=62%, E-value=3e-53, Identity=57%"; Hit description =Protein KTI12, putative
  Pfam annotation: Domain name=KTI12; Domain location=1-175; Score =94.1; E_value=5e-25; Accession=PF08433.2; Description=Chromatin associated protein KTI12
LVVMCGQPCSGKSAAAACLAAALRSSSTDLTVRIIDESSLHLGRNDSYKDMVVEKNLRGVLRSEVDRSVSRDSIIIVDSLNNIKGYRYELWCLARASGVRYCVXWNSNRQEKEERAYDSNIFEDLVRRFEKPDSRNRWDSPLFELFPSRDEIVETAPVIAEAVSYLTKKVDSKTRDV

SEQ ID NO: 87329 - protein, 272 aa, Setaria italica
  misc_feature (61)..(61): Xaa can be any naturally occurring amino acid
  misc_feature (77)..(77): Xaa can be any naturally occurring amino acid
  Transcript Sequence Number=SeqID_21355
  Gene Ontology: Cellular component=ribonucleoprotein complex
  Homolog annotation: Hit_ID=P49199; Match level="QueryCoverage=82%, HitCoverage=100%, E-value=2e-84, Identity=73%"; Hit description=40S ribosomal protein S8
  Pfam annotation: Domain name=Ribosomal_S8e; Domain location=1-202; Score=345.5; E_value=1e-100; Accession=PF01201.14; Description =Ribosomal protein S8e
  Subcellular localization annotation: CTP_CleavageSite=45; ConfidenceScore=5.21e-01
MGISRDSMHKRRATGGKQKAWRKKRKYELGRQPANTKLSSNKTVRRVRVRGGNVKWRALRXLGITGNYSWGSEAVNXDKTRILDVVYNASNNELVRTQTLVKSAIVQVDAAPFKQWYLTHYGVDIGRKKKAPAAKKDAAEGQEGEAAAEETKKSNHVTRKLEKRKVGRNLDPHIEEQFGSGRLLACIASRPGQCGRADGYILEGKELEFYMKKDYQEEEGQGCCSLDASSCSKGGLSYPLLWVLLVHKYVMSCCRPDEHLFSESESTLASKN

SEQ ID NO: 87330 - protein, 159 aa, Setaria italica
  Transcript Sequence Number=SeqID_21356
  Gene Ontology: Mol. function=nucleotide binding; Cellular component =chromosome
  Homolog annotation: Hit_ID=B9REF6; Match level="QueryCoverage=100%, HitCoverage=65%, E-value=8e-56, Identity=55%"; Hit description =Protein KTI12, putative
  Pfam annotation: Domain name=KTI12; Domain location=1-154; Score= -19.0; E_value=1.4e-07; Accession=PF08433.2; Description=Chromatin associated protein KTI12
YCVLFCDTEVDHCREWNSNRQEKEERAYDSNIFEDLVRRFEKPDRRNRWDSPLFELFPSRGANNINSLYEMDKATQEVVNAVVEAQSCGLELAMNKISIGPNLPTINLQRSVGLPELRSLRRTFIKLAGQYSLSGPPPPTDADSAKRMFVDYLNREVGA

SEQ ID NO: 87331 - protein, 277 aa, Setaria italica
  Transcript Sequence Number=SeqID_21357
  Gene Ontology: Mol. function=DNA binding
  Homolog annotation: Hit_ID=B6T8B0; Match level="QueryCoverage=100%, HitCoverage=100%, E-value=9e-87, Identity=62%"; Hit description=Mcb1 protein
  Pfam annotation: Domain name=Myb_DNA-binding; Domain location=95-142; Score=53.2; E_value=9.8e-13; Accession=PF00249.23; Description=Myb -like DNA-binding domain
MDRPEEENGRKVAPVVFRLFGVDVRRVADEELDDFGNGFELRKISSMPNLTVNSIDPVLPPGEAGDGKAYASDDLELASRQQKRRRRKAQERKKGIPWTEEEHRKFLDGLRQLGKGDWRGISKGFVTTRTATQVASHAQKYFLRQTNPGKKKRRASLFDVGIADFSDDQVPSPPNSATKPAPTQEIIHTDRGDVPIPSYRGFGGILGNNIQVSELTNYFERPMAHAETSFASMASGLETASSVNSLELSIAINNLELSIAPPALCGCGGAAGAIKVL

SEQ ID NO: 87332 - protein, 176 aa, Setaria italica
  Transcript Sequence Number=SeqID_21358
  Gene Ontology: Mol. function=molecular_function; Cellular component =ribonucleoprotein complex
  Homolog annotation: Hit_ID=P49199; Match level="QueryCoverage=93%, HitCoverage=74%, E-value=1e-60, Identity=75%"; Hit description=40S ribosomal protein S8
  Pfam annotation: Domain name=Ribosomal_S8e; Domain location=1-168; Score=262.2; E_value=1.2e-75; Accession=PF01201.14; Description =Ribosomal protein S8e
  Subcellular localization annotation: CTP_CleavageSite=45; ConfidenceScore=5.26e-01
MGISRDSMHKRRATGGKQKAWRKKRKYELGRQPANTKLSSNKTVRRVRVRGGNVKWRALRLDTGNYSWGSEAVTRKTRILDVVYNASNNELVRTQTLVKSAIVQVDAALFKQWYLTHYGVDIGRKKKAPAAKKDAAEGQEGEAAAEETKKSNHVTRKLEKRKVGPSSSYQCPLHSE

SEQ ID NO: 87333 - protein, 227 aa, Setaria italica
  misc_feature (117)..(117): Xaa can be any naturally occurring amino acid
  misc_feature (200)..(200): Xaa can be any naturally occurring amino acid
  Transcript Sequence Number=SeqID_21359
  Gene Ontology: Mol. function=molecular_function; Cellular component =ribonucleoprotein complex
  Homolog annotation: Hit_ID=P49199; Match level="QueryCoverage=94%, HitCoverage=94%, E-value=4e-79, Identity=73%"; Hit description=40S ribosomal protein S8
  Pfam annotation: Domain name=Ribosomal_S8e; Domain location=1-205; Score=326.4; E_value=5.7e-95; Accession=PF01201.14; Description =Ribosomal protein S8e
  Subcellular localization annotation: CTP_CleavageSite=45; ConfidenceScore=5.25e-01
MGISRDSMHKRRATGGKQKAWRKKRKYELGRQPANTKLSSNKTVRRVRVRGGNVKWRALRLDTGNYSWGSEAVTRKTRILDVVYNASNNELVRTQTLVKSAIVQVDAAPFKLVGYLXTHYGVDIGRKKKAPAAKKDGAEGQEGEAAAEETKKEDKPIVPRRKLEKRKDGRALDPHIEEQFGSGRLLACIASRPGQCGRAXDGYILEGKELEFYMKKLQKKKGKGAAA

SEQ ID NO: 87334 - protein, 221 aa, Setaria italica
  Transcript Sequence Number=SeqID_21360
  Gene Ontology: Mol. function=molecular_function; Cellular component =ribonucleoprotein complex
  Homolog annotation: Hit_ID=P49199; Match level="QueryCoverage=94%, HitCoverage=94%, E-value=9e-89, Identity=79%"; Hit description=40S ribosomal protein S8
  Pfam annotation: Domain name=Ribosomal_S8e; Domain location=1-199; Score=379.5; E_value=6.1e-111; Accession=PF01201.14; Description =Ribosomal protein S8e
  Subcellular localization annotation: CTP_CleavageSite=45; ConfidenceScore=5.25e-01
MGISRDSMHKRRATGGKQKAWRKKRKYELGRQPANTKLSSNKTVRRVRVRGGNVKWRALRLDTGNYSWGSEAVTRKTRILDVVYNASNNELVRTQTLVKSAIVQVDAAPFKQWYLTHYGVDIGRKKKAPAAKKDAAEGQEGEAAAEETKKSNHVTRKLEKRKVGRNLDPHIEEQFGSGRLLACIASRPGQCGRADGYILEGKELEFYMKKLQKKKGKGAAA

SEQ ID NO: 87335 - protein, 225 aa, Setaria italica
  Transcript Sequence Number=SeqID_21361
  Gene Ontology: Mol. function=protein disulfide oxidoreductase activity; Cellular component=outer membrane-bounded periplasmic space
  Homolog annotation: Hit_ID=B6U346; Match level="QueryCoverage=88%, HitCoverage=89%, E-value=1e-103, Identity=90%"; Hit description=DSBA- like thioredoxin domain containing protein
  Pfam annotation: Domain name=DSBA; Domain location=53-222; Score =14.1; E_value=2.5e-06; Accession=PF01323.12; Description=DSBA-like thioredoxin domain
LCEMESSRRVSLLLLGIIGCCACLVCRAQIPIPARTDGFVYGGKPPAWGETVVVEAFFDPVCPDSRDAWPALKKAVEHYGSRVSVVVHLFPLPYHSYAFIACRSIHTVNKLNPSFVYPLLEKFFKYQEGYYNQPTYTKSRATVVDEITKNLVVSIIGETNLAAYKAGFNDSQSDQAARISFKNGCARGVTGTPYFFVNGIPINDSGSPLDYKYWISILDALVGKM

SEQ ID NO: 87336 - protein, 671 aa, Setaria italica
  Transcript Sequence Number=SeqID_21362
  Gene Ontology: Mol. function=catalytic activity; Cellular component =anchored to membrane; Biological process=oxidation reduction
  Homolog annotation: Hit_ID=C3TX91; Match level="QueryCoverage=92%, HitCoverage=89%, E-value=0.0, Identity=61%"; Hit description =Hedgehog-interacting-like protein
  Pfam annotation: Domain name=Folate_rec; Domain location=1-206; Score= -71.1; E_value=0.022; Accession=PF03024.6; Description=Folate receptor family
MRPSTVTGAVLATAVLLLVAVRDGHCAQLCMDSSFPRTINGSLSFCGYNGTSCCNATDDAAVQKQFAAMNISGTPCGDIVKNILCARCNPYAGELFTVTTTSRTVPLLCSTTGVSSRLSTKPAAATTDYCSQVWDTCKDVRIPGSPFQAPKGGAAAPKLTDLWQSAGEFCSALGGGGAAKSPCLDGGGAAFNATRPALPLNGMCLERIGNGSYLNMAAHPDGSNRVFLSNQAGKVFLATVPAQGSGKTLGIDVASPFLDITDEVHFDNEFGLMGLAFHPGFATNGRFFVSYNCDKTQSASCAGRCACNSDFGCDPAKLGADNGAQPCQYQSVIAEYTANATSGTPAKATSANPVEVRRIMTLGLPFTTHHGGQILFSPADGYMYFAMGDGGSVGDPWNFAQNKKTLLGKILRIDVNTMPSGNTTAGWGSYSIPKDNPSSTDSSFAPEVFAIGFKNPWRCSFDSGKPSYMYCADVGQAAYEEVDLITKGGNYGWRVFEGPLPYTPLSTPGGNTSAASINAISPVMGYHHNAVNNNVGSASIIGGYVYRSTVDPCLNGRYLYADLYAKSMWAGAESPEGSGVYNVTDLKFSCSKSSPIPCDVAAGSALPSLGYIFSFGEDNARDVYLLTSKGVYRVVDPAQCGYACPVKSSTPGASSSPSPGAAPSSAVRARA

SEQ ID NO: 87337 - protein, 89 aa, Setaria italica
  Transcript Sequence Number=SeqID_21363
  Gene Ontology: Cellular component=integral to membrane
  Homolog annotation: Hit_ID=B6UBV0; Match level="QueryCoverage=100%, HitCoverage=48%, E-value=4e-40, Identity=92%"; Hit description =Threonine endopeptidase
LRTILVQLDSDKSYSALVYGTSALVAIWISSIVVSALDSVPLVPQVMEVVGLGFTIWFTSRYLIFKENRDELITRVSSIKKQILGSHEN

SEQ ID NO: 87338 - protein, 113 aa, Setaria italica
  Transcript Sequence Number=SeqID_21364
  Gene Ontology: Mol. function=DNA topoisomerase type I activity; Cellular component=chromosome; Biological process=DNA unwinding during replication
  Homolog annotation: Hit_ID=Q5VMY4; Match level="QueryCoverage=96%, HitCoverage=12%, E-value=3e-54, Identity=89%"; Hit description=DNA topoisomerase
WHIKEMLEQQGALSCNVTVARVAFQEITEDAIKKALMAPRYIDMDLVNAYLARRSLDYLIGFGISPLLWRKLPGCQSAGRVQSAALALVCDREAEIEQFKPQEYWTVQTSTFY

SEQ ID NO: 87339 - protein, 72 aa, Setaria italica
  Transcript Sequence Number=SeqID_21365
  Subcellular localization annotation: CTP_CleavageSite=29; ConfidenceScore=5.36e-01
CPLALVLFMAAAFVCVPPPPGSPVMLNTSLSKVSDFLSVQESYPVELAARLKQWSSSSLNFVTSYWERLLHP

SEQ ID NO: 87340 - protein, 151 aa, Setaria italica
  misc_feature (11)..(11): Xaa can be any naturally occurring amino acid
  misc_feature (135)..(135): Xaa can be any naturally occurring amino acid
  Transcript Sequence Number=SeqID_21366
  Gene Ontology: Mol. function=protein dimerization activity; Cellular component=nucleus; Biological process=regulation of transcription, DNA-dependent
  Homolog annotation: Hit_ID=A3B9A0; Match level="QueryCoverage=98%, HitCoverage=13%, E-value=1e-78, Identity=93%"; Hit description=Auxin response factor 16
  Pfam annotation: Domain name=Auxin_resp; Domain location=1-44; Score =45.5; E_value=2.1e-10; Accession=PF06507.5; Description=Auxin response factor
PFGMRFRMLFXTEDSGVRRYMGTITGIGDLDPIRWKNSHWRNLQVGWDELTASERRTRVSIWEIEPVATPFYICPPPFFRPKLPKQPGMPDDENEVESAFKRAMPWLGDDFALKDVQNALFPGLSLVQWMAMQQXNPQMLTAAAPAVQSQS

SEQ ID NO: 87341 - protein, 381 aa, Setaria italica
  misc_feature (1)..(1): Xaa can be any naturally occurring amino acid
  misc_feature (11)..(11): Xaa can be any naturally occurring amino acid
  misc_feature (21)..(21): Xaa can be any naturally occurring amino acid
  Transcript Sequence Number=SeqID_21367
  Gene Ontology: Mol. function=protein dimerization activity; Cellular component=nucleus; Biological process=regulation of transcription, DNA-dependent
  Homolog annotation: Hit_ID=A3B9A0; Match level="QueryCoverage=85%, HitCoverage=30%, E-value=1e-154, Identity=82%"; Hit description =Auxin response factor 16
  Pfam annotation: Domain name=Auxin_resp; Domain location=96-178; Score=203.2; E_value=6.8e-58; Accession=PF06507.5; Description=Auxin response factor
  Pfam annotation: Domain name=B3; Domain location=4-74; Score=25.4; E _value=0.00011; Accession=PF02362.13; Description=B3 DNA binding domain
  Pfam module annotation: Pfam domain module=Auxin_resp::B3; Domain location=96-178::4-74
XQPPAQELIAXKDLHDISWKXFRHIYRGQPKRHLLTTGWSVFVSTKRLLAGDSVLFIRDEKSQLLLGIRHASRPQPALSSSVLSSDSMHIGILAAAAHAAANSSPFTIFYNPRASPSEFVIPLAKYNKALYTQVSLGMRFRMLFETEDSGVRRYMGTITGIGDLDPIRWKNSHWRNLQVGWDESTASEKDDNPEELEASCYTIYICPPPFFRPKLPKQPGMPDDENEVESAFKRAMPWLGDDFALKDVQNALFPGLSLVQWMAMQQNPQMLTAAAPAVQSQYLTSNALGMQDGIGGVNEDPAKRLSMQAQNIGLPNLQAGSKVDHPAITSLAQQQQQQHPILQQQQVQPLQQNSAILQQQQAQLLQQNAIHLQQQQEQLQR

SEQ ID NO: 87342 - protein, 118 aa, Setaria italica
  Transcript Sequence Number=SeqID_21368
  Gene Ontology: Mol. function=electron carrier activity; Cellular component=integral to membrane; Biological process=oxidation reduction
  Homolog annotation: Hit_ID=B9HZ22; Match level="QueryCoverage=95%, HitCoverage=24%, E-value=3e-17, Identity=40%"; Hit description =Cytochrome P450
APPSSAWGGDAAVRRELWTEFQQLLRGIWAVPVNLPFTSYSRCLAASRRGRRAVAGVIQERRARLERGESSPSDDVVTLMLVEGLHDEEIIDNVMFLMVAAHDTTAALLTFLIRQLEF

SEQ ID NO: 87343 - protein, 53 aa, Setaria italica
  Transcript Sequence Number=SeqID_21369
SRSSIYCFTASAETTRLQRHVTLAGTMALCLQNRVELRTQPNLHQDTRQTSVS

SEQ ID NO: 87344 - protein, 243 aa, Setaria italica
  misc_feature (49)..(49): Xaa can be any naturally occurring amino acid
  Transcript Sequence Number=SeqID_21370
RGGDDVLCGGTDLLLGCRSGRTGGDLLLQAASGVLESQSPTETSSLQAXLSMEALVVFPEQRNHHHRHPGARRKSSGPHFSSPPPSRDFHGMNCRSFHSGGGCMGVLASPPPPPARTYSSPEPKTPKQQQPRHGGKRSRPISISPSTSPPSRSELWAGPAFSNSPPPSSLPIPKFSLRQKRSISLELPPVERSDDVEVRPHAKSAPSSPVGGAGYEFFNDNETASAIATENLRRILQLDIADR

SEQ ID NO: 87345 - protein, 166 aa, Setaria italica
  Transcript Sequence Number=SeqID_21371
  Gene Ontology: Mol. function=RNA-directed DNA polymerase activity; Biological process=RNA-dependent DNA replication
  Homolog annotation: Hit_ID=Q75GM6; Match level="QueryCoverage=29%, HitCoverage=3%, E-value=9e-12, Identity=53%"; Hit description =Putative non-LTR retroelement reverse transcriptase
  Pfam annotation: Domain name=zf-CCHC; Domain location=116-133; Score =23.2; E_value=8e-05; Accession=PF00098.15; Description=Zinc knuckle
  Pfam annotation: Domain name=zf-CCHC; Domain location=135-152; Score =8.2; E_value=0.03; Accession=PF00098.15; Description=Zinc knuckle
  Pfam module annotation: Pfam domain module=zf-CCHC::zf-CCHC; Domain location=116-133::135-152
MKITMASTVEVSSQDFGEGGGGEGEEMWRGGGVLIMGVKAGSLTIAAPGFHSGDGRAKFFGGGDEQGKQNKRRMDERGERNLGGDDLHHRLARDQDRDPAKQQRGGFQRGEREGVVICFRCNQEGHHRSECSNPLLCYNSKASGHMSQSCPRVKVNRGLKLCGFGL

SEQ ID NO: 87346 - protein, 78 aa, Setaria italica
  Transcript Sequence Number=SeqID_21372
  Homolog annotation: Hit_ID=A4GWX8; Match level="QueryCoverage=53%, HitCoverage=9%, E-value=8e-13, Identity=73%"; Hit description =Inositol phosphate kinase 1A
CFCYCKDCSLMISFRPRESGTADSEYDSVFLDSVKQTYEYKVYYCEIYCCITVIFKYPATKLTYTVQIISRFGSFRFI

SEQ ID NO: 87347 - protein, 375 aa, Setaria italica
  misc_feature (165)..(165): Xaa can be any naturally occurring amino acid
  Transcript Sequence Number=SeqID_21373
  Gene Ontology: Mol. function=inositol pentakisphosphate 2-kinase activity; Cellular component=basal body; Biological process=inositol and derivative phosphorylation
  Homolog annotation: Hit_ID=A4GWX8; Match level="QueryCoverage=94%, HitCoverage=80%, E-value=0.0, Identity=86%"; Hit description =Inositol phosphate kinase 1A
  Pfam annotation: Domain name=Ins_P5_2-kin; Domain location=1-346; Score=405.2; E_value=1.1e-118; Accession=PF06090.4; Description =Inositol-pentakisphosphate 2-kinase
VKQDCLAQAYVMHVMSKHLGANHVDGGVRVCVSRDFLELVEKNVLNSRPAWRVNASSIDNTADAALLIPDHSLFSGNPRGNSCIAVEIKAKCGFLPSSEYISKENSIKKQVTRYKMHQHLKFHQGEISTPSEYNPLDLFSGSKERICIAIKSFFSTPQNNFRVFXNGSLVFGGMGGGADNVHPAETDKCLQDLSKVSGLELPDFIELLSEAIFRSGVLGKLLITQKLDDHDIEGAIHLYYSIISQPCLVCKNVTDAELLRKYTLLHSLPLDKSLKIVRDFLVSATAKDCSLMISFRPRESGTADSEYDSVFLDSVKQTYEYKANFIDLDVKPLDKMEHYFKLDQKIVNFYSRNEELVPSLKGSNTKDASQIQLQQ

SEQ ID NO: 87348 - protein, 175 aa, Setaria italica
  Transcript Sequence Number=SeqID_21374
  Gene Ontology: Mol. function=nucleic acid binding; Cellular component= nucleus; Biological process=mRNA processing
  Homolog annotation: Hit_ID=B6TYA4; Match level="QueryCoverage=100%, HitCoverage=68%, E-value=3e-87, Identity=85%"; Hit description=RNA binding protein
  Pfam annotation: Domain name=RRM_1; Domain location=1-67; Score=47.6; E_value=4.8e-11; Accession=PF00076.14; Description=RNA recognition motif. (a.k.a. RRM, RBD, o
  Pfam annotation: Domain name=RRM_1; Domain location=98-166; Score =67.4; E_value=5.3e-17; Accession=PF00076.14; Description=RNA recognition motif. (a.k.a. RRM, RBD, o
  Pfam module annotation: Pfam domain module=RRM_1::RRM_1; Domain location=1-67::98-166
SGMPYTTTEVDIRKLFEFYGPLRSVQLSRFPDSGNFRGLAFVCFESDEDAVKSIELDGFKIGNRYMRVERCRVTASSNKKRKAEFQTDPEKSVGCLSAYVGNLSWNVTEKDLRAFFKSSKIASMRFAIDKRTGSSRGFCHVDFEDDESLEKAVAMNQSELQGRPVKVAYSVSNRG

SEQ ID NO: 87349 - protein, 92 aa, Setaria italica
  Transcript Sequence Number=SeqID_21375
MSAMEPRKSSYLVAVVFASLLLSSMAGGHRKLVNKDDAESMETSESMQQLQGDDEAAAVVHERILKQVKMDDYGRYDPTPTMSKPHFKDIPN

SEQ ID NO: 87350 - protein, 63 aa, Setaria italica
  Transcript Sequence Number=SeqID_21376
KKRNAGGSSRELHLQVLIYTAWNLWEERYRRVFDNKTLNSGQLLDIIKQDIIAYRVANSNVAA

SEQ ID NO: 87351 - protein, 505 aa, Setaria italica
  Transcript Sequence Number=SeqID_21377
  Gene Ontology: Mol. function=histone-lysine N-methyltransferase activity; Cellular component=nucleus; Biological process=chromatin modification
  Homolog annotation: Hit_ID=Q8L820; Match level="QueryCoverage=93%, HitCoverage=53%, E-value=0.0, Identity=74%"; Hit description=SET domain-containing protein SET104
  Pfam annotation: Domain name=YDG_SRA; Domain location=365-504; Score =211.8; E_value=1.8e-60; Accession=PF02182.9; Description=YDGSRA domain
SASGTRKIADRVGAPSGGKSGGVGGGEQQSEGCTPSQSLKSPGVDNGGRPVPGNACNLGNGGVKSSGLEGAENSRGANIGVETGEDCNLGSSNCDGSVKDAGTQDLGGTGDGPAREPEVGSNVGVEKSFSQGLKESFVDQTRLKSNGCSASDLRLEDPERNVGLGDSACHTAKECGTDDGAAKKSNAAAKGCSLATPGNNGNGIYCRKGRKAVVPWRFQVGYKRSFSKAFGSDNGSPDLPVFRFDDSSTQCAPATRSSVRYYASAHSGVRVSAMRDFSVKGENETGSGYKKRKTNNDDQDKAMPNNGGVIVRESIMRSLQDFRLIYRDLLDEEEDNSREEVLNVRPDLQAYRIFRERFSTECDDKKYIGSVPGIYPGDIFHLRVELCVVGLHRPHRLGIDHTKNHDGTSVAISIVSYAQSSDIKYNLDVLVYTGSVAVTVNQKIEGTNLALKKSMDTNIPVRVIHGFTTANGKKKFPTYIYGGLYHVEKYWREKEHGDRYVYMFR

SEQ ID NO: 87352 - protein, 131 aa, Setaria italica
  misc_feature (43)..(43): Xaa can be any naturally occurring amino acid
  misc_feature (105)..(105): Xaa can be any naturally occurring amino acid
  Transcript Sequence Number=SeqID_21378
  Gene Ontology: Mol. function=magnesium ion binding; Biological process=metabolic process
  Homolog annotation: Hit_ID=Q01L21; Match level="QueryCoverage=77%, HitCoverage=18%, E-value=2e-22, Identity=50%"; Hit description =OSIGBa0106G08.3 protein
MAASKASVNQQTAGDTTAAPAAIAAVGRPFEPCVWGDFFVTYXPPPLQRSEEWMRERADELKGEVRQMFGADRAMSVSAMVNLVDELERLGVDNHFREEISADSXEGLDVGMSNDLHIVALRFCLLRQHGF

SEQ ID NO: 87353 - protein, 80 aa, Setaria italica
  Transcript Sequence Number=SeqID_21379
  Subcellular localization annotation: CTP_CleavageSite=49; ConfidenceScore=5.64e-01
RRRLSPCPAPPPCRRGPPASSPPSSPRPSSPPPPRDRNRIRRLFHPSCSCVGVATDYCVAPFCDLLSLFFLLIHHSIPCE

SEQ ID NO: 87354 - protein, 178 aa, Setaria italica
  Transcript Sequence Number=SeqID_21380
  Gene Ontology: Mol. function=catalytic activity; Cellular component =plasma membrane; Biological process=cellular metabolic process
  Homolog annotation: Hit_ID=B6T555; Match level="QueryCoverage=100%, HitCoverage=50%, E-value=6e-69, Identity=71%"; Hit description =Dihydroflavonol-4-reductase
  Pfam annotation: Domain name=Epimerase; Domain location=1-152; Score=- 61.1; E_value=0.014; Accession=PF01370.13; Description=NAD dependent epimerasedehydratase family
  Subcellular localization annotation: CTP_CleavageSite=26; ConfidenceScore=5.09e-01
LAPAVKGTLSVLQACSANDVQKVVVVSSTAAVYFNPSWPQGRMKDESCWSDRNLCMKNEDWYSAAKTIAETTALEYREKNGLTVVTVCPCIVLGPLLQPVVNATSEFLIYIIKGGPSVMKNVPWNIVDVRDVADALLLVYEKVESSGRYICAPDWITTKGMVNLLKKAYPNYNYVNCD

SEQ ID NO: 87355 - protein, 71 aa, Setaria italica
  Transcript Sequence Number=SeqID_21381
  Homolog annotation: Hit_ID=B6T555; Match level="QueryCoverage=92%, HitCoverage=18%, E-value=7e-22, Identity=69%"; Hit description =Dihydroflavonol-4-reductase
NSFTLIAGGPSVMKNVPWNIVDVRDVADALLLVYEKVESSGRYICAPDWITTKGMVNLLKKAYPNYNYVNW

SEQ ID NO: 87356 - protein, 39 aa, Setaria italica
  Transcript Sequence Number=SeqID_21382
HKHSYLPYAGWLTIAMTEKPVLKYVLIAALGLLVVASKE

SEQ ID NO: 87357 - protein, 80 aa, Setaria italica
  Transcript Sequence Number=SeqID_21383
CSNPCRSSGGQILEALHSDPASSLSVEQERSAKLLKPLPSTSAALAKLSKGASGVTGKTPQTEKKETPQERLKRIMSKQL

SEQ ID NO: 87358 - protein, 96 aa, Setaria italica
  Transcript Sequence Number=SeqID_21384
  Homolog annotation: Hit_ID=B9SC65; Match level="QueryCoverage=52%, HitCoverage=9%, E-value=5e-10, Identity=60%"; Hit description =Splicing factor, arginine/serine-rich, putative
FLLAVSDETGLQHVVQELEAKVVLPFSFEKPQSSQPPAIKGAYSQVGYSYKGDGNEESEDLNSDDEEEEEEDDEDDKDFSSDDSSDERMESIAKEF

SEQ ID NO: 87359 - protein, 244 aa, Setaria italica
  Transcript Sequence Number=SeqID_21385
  Homolog annotation: Hit_ID=B9SC65; Match level="QueryCoverage=86%, HitCoverage=32%, E-value=5e-23, Identity=36%"; Hit description =Splicing factor, arginine/serine-rich, putative
VSYRDPYREQRRSPSYEAYSRGRRSRSRSRSRSPSYSRRHGRGIHAESSYRSKPKAPRVEYITEFGGSDDSSEPKVSGISPPSSPIRIDIPSRSGNSTFNICKYMLGELFSAGAYYPGILKLTVSSGGQILEALHSDPASSLSVEQERSAKLLKPLPSTSAALAKLSKGASGVTGKTPQTEKKETPQERLKRIMSKQLNKQIRKDTAAEIAKKREQERQKQEKLAEVEGGGIAEAVAGAEAQEG

SEQ ID NO: 87360 - protein, 133 aa, Setaria italica
  Transcript Sequence Number=SeqID_21386
  Homolog annotation: Hit_ID=B9SC65; Match level="QueryCoverage=58%, HitCoverage=14%, E-value=2e-22, Identity=65%"; Hit description =Splicing factor, arginine/serine-rich, putative
  Pfam annotation: Domain name=DRY_EERY; Domain location=1-88; Score =72.7; E_value=1.3e-18; Accession=PF09750.1; Description=Alternative splicing regulator
VHRDDALYQAADEHQVWISWNGKQDVLIDRFDGRALLDFIRDPSSRPFRVQEKSEEEEELEEFVNFERYRDLIKHRRRGCRYLFGFSLPLLLSYKFHVLLPFTSLEGLSWLTFCSFLSYYRKGAISQFLLLVN

SEQ ID NO: 87361 - protein, 431 aa, Setaria italica
  misc_feature (13)..(13): Xaa can be any naturally occurring amino acid
  Transcript Sequence Number=SeqID_21387
  Homolog annotation: Hit_ID=B9SC65; Match level="QueryCoverage=84%, HitCoverage=66%, E-value=5e-66, Identity=44%"; Hit description =Splicing factor, arginine/serine-rich, putative
  Pfam annotation: Domain name=DRY_EERY; Domain location=2-75; Score= -6.3; E_value=0.00039; Accession=PF09750.1; Description=Alternative splicing regulator
EEEELELFLNSYXLVRDLIKHRRRGFSDETGLQHVVQELEAKVVLPFSFEKPQSSQPPAIKGAYSQVGYSYKGDGNEESEDLNSDDEEEEEEDDEDDKDFSSDDSSDERMESIAKEFGVKRYNWLVYMDKKAKEEEKRQKEIIKGDPSIKKLSRRERRKASQIEREKEREAARSVGRVSYRDPYREQRRSPSYEAYSRGRRSRSRSRSRSPSYSRRHGRGIHAESSYRSKPKAPRVEYITEFGGSDDSSEPKVSGISPPSSPIRIDIPSRSSGGQILEALHSDPASSLSVEQERSAKLLKPLPSTSAALAKLSKGASGVTGKTPQTEKKETPQERLKRIMSKQLNKQIRKDTAAEIAKKREQERQKQEKLAEVGRYRRRSRSRSLSRSPPRRRRYSRSRSRSRSPRRYRSRSRSSSRSPSRSPRYRSRSRH

SEQ ID NO: 87362 - protein, 81 aa, Setaria italica
  Transcript Sequence Number=SeqID_21388
LLVKGSHILRKFYIGLFAHFITNDIMTNCMINNIHPNKQRWSKFADLGWLSLKVIYISNTLNLADFSSVTSAHEPFFLLVV

SEQ ID NO: 87363 - protein, 23 aa, Setaria italica
  Transcript Sequence Number=SeqID_21389
MDFAELEAVEGLRWPWHSWPPTP

SEQ ID NO: 87364 - protein, 132 aa, Setaria italica
  Transcript Sequence Number=SeqID_21390
RAEKVLKNLSRVESNKQLMEDSVVSSAVVELGKILDEAQELVKKCQVKRNIICVYWTAGKLSRKLSRMNQSISDRNSDLMHAIMCAIMCSPTQRGHHPPVPEPVRVPSSAPDGEMNNHHKQIADIADQIKAR

SEQ ID NO: 87365 - protein, 78 aa, Setaria italica
  Transcript Sequence Number=SeqID_21391
CCFDATSLTDSTYAHAHIQMLLPPTYKLIRQCECCKTWGFQSTAPGQNDHASAPPSCGLVGRASTGYSAKNPCWTLWP

SEQ ID NO: 87366 - protein, 598 aa, Setaria italica
  Transcript Sequence Number=SeqID_21392
  Gene Ontology: Mol. function=transporter activity; Cellular component= membrane; Biological process=oligopeptide transport
  Homolog annotation: Hit_ID=B4FQ14; Match level="QueryCoverage=98%, HitCoverage=99%, E-value=0.0, Identity=84%"; Hit description=Peptide transporter PTR2
  Pfam annotation: Domain name=MFS_1; Domain location=33-512; Score= -9.8; E_value=0.059; Accession=PF07690.8; Description=Major Facilitator Superfamily
  Pfam annotation: Domain name=PTR2; Domain location=95-504; Score =386.9; E_value=3.5e-113; Accession=PF00854.13; Description=POT family
  Pfam module annotation: Pfam domain module=MFS_1::PTR2; Domain location=33-512::95-504
MAAEDGREEKRGAEAAVARKAKKQGGFRTMPFILANDFCDRLASVGFTSNLITYLTLQMHLPLVHASNIITNYNGTANLTPLVGGLIADSFAGRFWTITFGSFVYQLGMVCLTLSAALPSLHPPPCAKHAADCQRASSYQIAVLYLSLLCTSIGTGGTRPCTVAFGADQLELNAQGRRGARPMWSFFNLYFFTVELAKLTAVTAVVYVQENVGWGWGLGVPTIAMLAAVIAFVSGYSLYVRMPPAGSPMVRLAQVATAAFKKRKATVPDPSLLYEDKELDAGISTTGRLLHTDQLKFFDKAAIVTDGDVLPSGEPKLWRLSTVHRVEELKSIIRILPICAAGIILVTSSSHNHSFAIQQARTMDRDLTPHFKIPPASMLIFTNLAMLLTLAFYDRVLVRVLRRFTGRPNGITHLQRTGVGLTIAMLSNAVAAVVERQRRSVAAASGLLDDPKATLPMSVFWLVPQFTIHGIANAFMDVGRMEFLYDQAPESMRSTAAALYWLTFSIGSYLGTLLVTIVHAKTRRSGQWLPDNLNRGKLDNYYWLVVSLEVVNLVYFFVCVKYYTFKPLETVGGEEEVELYHGSGNGTDGAKKQGGSFK

SEQ ID NO: 87367 - protein, 109 aa, Setaria italica
  Transcript Sequence Number=SeqID_21393
NLSLDLHLMPSTAMSHPTPAHHKPRYTTHKICFIQTPQHNSHIWLAVSIIKCIWNMDSTGKASNHLVNHSSQIDQDTCQLGLSISSLISALTKDDLKAKENSFKCPKAK

SEQ ID NO: 87368 - protein, 169 aa, Setaria italica
  misc_feature (11)..(11): Xaa can be any naturally occurring amino acid
  misc_feature (67)..(67): Xaa can be any naturally occurring amino acid
  misc_feature (85)..(85): Xaa can be any naturally occurring amino acid
  misc_feature (90)..(90): Xaa can be any naturally occurring amino acid
  Transcript Sequence Number=SeqID_21394
DFLSSWKATKXGKNTIDFSVDSIPKSSKKFNFDNLDDFGLDGAFDKLPSFKMGMSDLDFSSPLKKKXVKHSSSNGDDLSEGKKGXTKKDXFSFSFDFNELGKFSLDAKLGIKEKTMSKGTGKVDPVSLEGNKDTQRGLLAKGTAILEDNNSKDKQTQDVCASRPLSGKS

SEQ ID NO: 87369 - protein, 590 aa, Setaria italica
  Transcript Sequence Number=SeqID_21395
  Homolog annotation: Hit_ID=B9RVZ9; Match level="QueryCoverage=30%, HitCoverage=37%, E-value=8e-45, Identity=49%"; Hit description =Structural constituent of cell wall, putative
  Pfam annotation: Domain name=DUF1421; Domain location=137-575; Score =547.7; E_value=1.4e-161; Accession=PF07223.3; Description=Protein of unknown function (DUF1421)
MSGSGDPSGRGSGGGGGSRSFDFGADDVLCSYDDFAATSEPKRPDPADKDFHESRLGRPFVKAYEQESYSKEDVLSAVEKCMKKYADNLLRSLEGITSRLSQLEIYCYKLERSIGELRSDVLRDVTDHRLKSLEKHLHEVHRSVQILRDKQELAEAQKELAKFQLTQDTSKKKEDAPTPSIPEPKKLEEKPDTSGQQLALVLPHQVNQTSLAPRASEAVQQYKDLPAQQSAPAPPVPQQDRYVLSQAIVYYPQRQAPGIQDTQGQQLQPEVQYLPARPPAQDVPVHASSQPLQAGNQTQPQSYPPYQQQWHQQSSQPTPPPVAQPQQTFSQTFPPPAQQPQLSNVQQFPPQPVQQPQSSSQQYPPPSVQPQQSNPQLPPQAMQPQHPPVQTQMRPPQPPPNYPHYPPEQPLNPAPETMPGHVAMQGQYNTAAPSGVSRSEAPYSYGGPGIPPSQPPPQHSMQRHQLPPSSQGSYGPPPSKGSYAGGPAQYAPQSNPQGYGAGYGYLPSGPPAVQTPQMPPGGGGMSHPGSHMMRGHPYGEMIEKAITMGYPREQVLNVTQRMAESGQPMDFNTLLDRLNEAGSGAPPRAW

SEQ ID NO: 87370 - protein, 42 aa, Setaria italica
  Transcript Sequence Number=SeqID_21396
MQAMRRLVRVLVVLGVAAATASAQQGPTAAPATPTPTTPADP

SEQ ID NO: 87371 - protein, 83 aa, Setaria italica
  Transcript Sequence Number=SeqID_21397
  Gene Ontology: Mol. function=electron carrier activity; Biological process=oxidation reduction
  Homolog annotation: Hit_ID=C4PJN6; Match level="QueryCoverage=98%, HitCoverage=16%, E-value=2e-15, Identity=59%"; Hit description =Cytochrome P450 monooxygenase
RLATDVIGQAAFGADFGLSGKPPVPGDEDSKGADDGGAAAKASSEFINMHIHSTTSLKMDLSGSLSTIVGMFLPFLQKPLRQV

SEQ ID NO: 87372 - protein, 55 aa, Setaria italica
  Transcript Sequence Number=SeqID_21398
PSQRRRRWSRTPPACSRSRAESFGKEILHALGEDDARAGCHQARWGGFSDRQSHR

SEQ ID NO: 87373 - protein, 98 aa, Setaria italica
  Transcript Sequence Number=SeqID_21399
  Gene Ontology: Mol. function=oxidoreductase activity; Cellular component=cytoplasm; Biological process=metabolic process
  Homolog annotation: Hit_ID=C5I848; Match level="QueryCoverage=86%, HitCoverage=22%, E-value=3e-25, Identity=65%"; Hit description=12 -oxophytodienoic acid 10,10-reductase
HDQHNNIVSTAGFDGVEIHGSHGFLLEQFMKDSVNDRTDKYGGSLQNRCRFALEVVEAVVAEVGSDRVGIRLSPYANYLGCHDSDPDAGGSSYMATRN

SEQ ID NO: 87374 - protein, 120 aa, Setaria italica
  misc_feature (93)..(93): Xaa can be any naturally occurring amino acid
  misc_feature (101)..(101): Xaa can be any naturally occurring amino acid
  misc_feature (107)..(107): Xaa can be any naturally occurring amino acid
  Transcript Sequence Number=SeqID_21400
  Gene Ontology: Mol. function=oxidoreductase activity; Cellular component=cytoplasm; Biological process=metabolic process
  Homolog annotation: Hit_ID=Q76FR9; Match level="QueryCoverage=88%, HitCoverage=27%, E-value=4e-31, Identity=63%"; Hit description=12 -oxophytodienoic acid 10, 11-reductase
STLKARRSWFLLKSGSRGARRAIMESIPLLSPCETGRFRFSHRIVLAPLTRNRSYGNLPQSHAMLYYSQRATEGGLLIAEATGVSSDAQGMSXILHTPGIXWTKEQXVEAWKPVVDAVHA

SEQ ID NO: 87375 - protein, 240 aa, Setaria italica
  Transcript Sequence Number=SeqID_21401
  Gene Ontology: Mol. function=oxidoreductase activity; Cellular component=cytoplasm; Biological process=metabolic process
  Homolog annotation: Hit_ID=Q84QJ9; Match level="QueryCoverage=91%, HitCoverage=93%, E-value=1e-82, Identity=66%"; Hit description=Oxo -phytodienoic acid reductase
  Pfam annotation: Domain name=Oxidored_FMN; Domain location=1-204; Score=2.2; E_value=4.9e-12; Accession=PF00724.12; Description =NADH:flavin oxidoreductase  NADH oxidas
KELTPIPKECLAVEEIPNVVNRFRVAARNAMDAGFDGVEIHGSHCFLLEQFMKDSVNDRTDKYGGSLQNRCRFALEVVEAVVAEVGSDRVGIRLSPYANYLGCHDSDPDALGVYMAQELNKRSILYCSAVEPEMVTVDGKMQIPHRLHEMRKAFNGMFMVGGGYDREEGNRVVADGYADMVVYGRLFLANPDLPRRFHLNAPLNRYDRSTFYTNDPVVGYTDYPFLEDCELMINEEKLQV

SEQ ID NO: 87376 - protein, 245 aa, Setaria italica
  misc_feature (191)..(191): Xaa can be any naturally occurring amino acid
  misc_feature (206)..(206): Xaa can be any naturally occurring amino acid
  misc_feature (232)..(232): Xaa can be any naturally occurring amino acid
  misc_feature (238)..(238): Xaa can be any naturally occurring amino acid
  Transcript Sequence Number=SeqID_21402
  Gene Ontology: Mol. function=binding; Cellular component=mitochondrion
  Homolog annotation: Hit_ID=B9SMD1; Match level="QueryCoverage=99%, HitCoverage=72%, E-value=1e-70, Identity=30%"; Hit description =Pentatricopeptide repeat-containing protein, putative
  Pfam annotation: Domain name=PPR; Domain location=109-143; Score =36.3; E_value=1.2e-07; Accession=PF01535.12; Description=PPR repeat
  Pfam annotation: Domain name=PPR; Domain location=144-178; Score =39.4; E_value=1.4e-08; Accession=PF01535.12; Description=PPR repeat
  Pfam annotation: Domain name=PPR; Domain location=39-73; Score=44.9; E_value=3.1e-10; Accession=PF01535.12; Description=PPR repeat
  Pfam annotation: Domain name=PPR; Domain location=74-108; Score=42.6; E_value=1.5e-09; Accession=PF01535.12; Description=PPR repeat
  Pfam module annotation: Pfam domain module=PPR::PPR::PPR::PPR; Domain location=109-143::144-178::39-73::74-108
AIVDGMWQEGNVALGRLGNSFLAVTSDSSSRQRCLPDRITYSILISALCKEGRFDEAKKKLLEMIVKDISPDSVIYDTFIHGYCRHGKTSLAIKVLRDMEKKGCNPSTRTYNLLIRGFEEKHNSDEIIKLMSEMKDKGISPNVMTYNSLIKSFCERGMVNKAMPLLDEMLQNEIVPNITSFDLVIKAFCKXADFPSAHMVFDAALXTCGQKEVLFCLMCTEVSTYGRWIEAXDILETXLEMRISI

SEQ ID NO: 87377 - protein, 395 aa, Setaria italica
  misc_feature (34)..(34): Xaa can be any naturally occurring amino acid
  misc_feature (200)..(200): Xaa can be any naturally occurring amino acid
  misc_feature (385)..(386): Xaa can be any naturally occurring amino acid
  Transcript Sequence Number=SeqID_21403
  Gene Ontology: Mol. function=glutathione-disulfide reductase activity; Cellular component=cytoplasm; Biological process =glutathione metabolic process
  Homolog annotation: Hit_ID=A8CCK2; Match level="QueryCoverage=99%, HitCoverage=71%, E-value=0.0, Identity=81%"; Hit description =Chloroplastic glutathione reductase
  Pfam annotation: Domain name=Pyr_redox; Domain location=167-260; Score=102.2; E_value=1.8e-27; Accession=PF00070.19; Description =Pyridine nucleotide-disulphide oxidore
  Pfam annotation: Domain name=Pyr_redox_2; Domain location=2-306; Score=198.7; E_value=1.6e-56; Accession=PF07992.6; Description =Pyridine nucleotide-disulphide oxidore
  Pfam annotation: Domain name=Pyr_redox_dim; Domain location=336-393; Score=-15.1; E_value=0.0025; Accession=PF02852.14; Description =Pyridine nucleotide-disulphide oxidored
  Pfam module annotation: Pfam domain module=Pyr_redox::Pyr_redox _2::Pyr_redox_dim; Domain location=167-260::2-306::336-393
RGACGRRASPPALYGARAAVCEMPFATVASNTLXGVGGTCVLRGCVPKKLLVYASKYSHEFEESRGFGWMYETDPKHDWRTLITNKNLELQRLVGLQTNTLKKSGVTIIEGRGKIVDPHTVSVDGKLYTAKNILLAVGGRPSKPNIPGIEHAIDSDAALDLPSRPEKIAIVGGGYIALEFAGIFNGLKSDVHVFIRQKKXLRGFDEEIRDFVAEQMSLRGVKFHIEQTPQAVIKSDDGLLTLKTNKETISGFSHVMFATGRKANTKNLGLEDVGVKMDKHGAILVDEYSRSSVDSIWAVGDVTNRLNLTPVALMEAGAIARTIFGNEPTKPDYRAVPSAVFSQPPIGQVGLTEEKAIEKYGDVDVYTSNFKPLRATLSGLPDRVXXMKVIVCAKT

SEQ ID NO: 87378 - protein, 93 aa, Setaria italica
  misc_feature (48)..(48): Xaa can be any naturally occurring amino acid
  Transcript Sequence Number=SeqID_21404
MEKGILALSLIFLLILAAEGSAGVSAGHRLRPHLQIQEELHGKKDLKXRAPAGGLDTLGLGHEVRTVEMKHHRRMVTGHKGGSMGGAAGAGGS

SEQ ID NO: 87379 - protein, 44 aa, Setaria italica
  Transcript Sequence Number=SeqID_21405
YWYKIHVETLSLISNPFIKSSASQDPAFRTLSLKNGEKKAIALI

SEQ ID NO: 87380 - protein, 40 aa, Setaria italica
  Transcript Sequence Number=SeqID_21406
YEIRISVDHCVHLHALSKLCGLVWVSTKHDNHFEKLYLPG

SEQ ID NO: 87381 - protein, 169 aa, Setaria italica
  Transcript Sequence Number=SeqID_21407
  Gene Ontology: Mol. function=metal ion transmembrane transporter activity; Cellular component=integral to membrane; Biological process=metal ion transport
  Homolog annotation: Hit_ID=B4YHA7; Match level="QueryCoverage=99%, HitCoverage=45%, E-value=2e-82, Identity=89%"; Hit description=Metal ion transporter-like protein
  Pfam annotation: Domain name=Zip; Domain location=2-166; Score=49.4; E_value=1.4e-11; Accession=PF02535.14; Description=ZIP Zinc transporter
DDDEARKVQLSRNRVVVQVLEMGIIVHSVVIGLGMGASQSVCTIRPLVAAMCFHQLFEGMGLGGCILQAEYGLKMKSGLVFFFSTTTPFGIALGLALTRVYRENSPTALIVVGILNAASAGLLHYMALVELLAADFMGPKLQGSVRLQLLSFAAVLLGAGGMSVMAKWA

SEQ ID NO: 87382 - protein, 76 aa, Setaria italica
  Transcript Sequence Number=SeqID_21408
LFSSLKNKLCIPNFHVKYCKFDLAVNYEVLPPYLKLLDSSSQTSLNVSKFMLNNAHNEKYISCTMFNTLTQSEAMV

SEQ ID NO: 87383 - protein, 61 aa, Setaria italica
  Transcript Sequence Number=SeqID_21409
LQSYCQLQTKENGKRTAASVSKKSAAPSEVPALDIVQQILLSYLQEAGPQDDGNLFTRWFY

SEQ ID NO: 87384 - protein, 89 aa, Setaria italica
  misc_feature (63)..(63): Xaa can be any naturally occurring amino acid
  Transcript Sequence Number=SeqID_21410
  Pfam annotation: Domain name=RAP; Domain location=26-83; Score=52.1; E_value=2.1e-12; Accession=PF08373.2; Description=RAP domain
MKWVREYAIRTVNTVDAVLVDEKLAFEIDGPTHFSRNLGTPLGHTAFKRRYITTSGWKLVSSXQLQWDELQGEFEQLEYLRRILDIEAE

SEQ ID NO: 87385 - protein, 80 aa, Setaria italica
  Transcript Sequence Number=SeqID_21411
  Gene Ontology: Mol. function=nucleotide binding; Cellular component =plasma membrane; Biological process=small GTPase mediated signal transduction
  Homolog annotation: Hit_ID=P16976; Match level="QueryCoverage=91%, HitCoverage=34%, E-value=2e-25, Identity=80%"; Hit description=GTP -binding protein YPTM1
HQQCISVQAFADEIGIPFLETSAKESINVEEAFLAMSAAIKKSKAGNQAALERKPSNLVQMKGQPIQQQQQQQKSRCCST

SEQ ID NO: 87386 - protein, 159 aa, Setaria italica
  Transcript Sequence Number=SeqID_21412
  Gene Ontology: Mol. function=nucleotide binding; Cellular component =plasma membrane; Biological process=small GTPase mediated signal transduction
  Homolog annotation: Hit_ID=P16976; Match level="QueryCoverage=100%, HitCoverage=75%, E-value=5e-75, Identity=85%"; Hit description=GTP -binding protein YPTM1
  Pfam annotation: Domain name=Arf; Domain location=1-137; Score=-98.3; E_value=0.05; Accession=PF00025.13; Description=ADP-ribosylation factor family
  Pfam annotation: Domain name=Miro; Domain location=1-74; Score=2.5; E_ value=0.0063; Accession=PF08477.5; Description=Miro-like protein
  Pfam annotation: Domain name=Ras; Domain location=1-121; Score=188.3; E_value=2.1e-53; Accession=PF00071.14; Description=Ras family
  Pfam module annotation: Pfam domain module=Arf::Miro::Ras; Domain location=1-137::1-74::1-121
EMDGKTIKLQIWDTAGQERFRTITSSYYRGAHGIIIVYDITDVESFNNVKQWLSEIDRYANDSVCKLLVGNKCDLAESRAVETAVAQAFADEIGIPFLETSAKESINVEEAFLAMSAAIKKSKAGNQAALERKPSNLVQMKGQPIQQQQQQQKSRCCST

SEQ ID NO: 87387 - protein, 249 aa, Setaria italica
  Transcript Sequence Number=SeqID_21413
  Gene Ontology: Mol. function=oxidoreductase activity; Biological process=oxidation reduction
  Homolog annotation: Hit_ID=B9SNS2; Match level="QueryCoverage=98%, HitCoverage=67%, E-value=5e-76, Identity=53%"; Hit description =Flavonol synthase/flavanone 3-hydroxylase, putative
  Pfam annotation: Domain name=2OG-FeII_Oxy; Domain location=94-195; Score=141.7; E_value=2.2e-39; Accession=PF03171.12; Description=2OG -Fe(II) oxygenase superfamily
EKQALAQGPGGIEGYGQAFVVSEDQKLDWADMLFLSTLPPEYRSLNFWPSRPATFGGSLQRYAAEVQRVAAGLLRAMARNLGVADTEEMTRIAAAQGMRINYYPPCPQAHDKVLGLSPHSDAVGLTLLLQASPVAGLQIRREGAWIPVEPLPGALIANVGDVIEVLTNGRYKSIEHRAVVNARHERISVAAFHTAMFGGTYGPLEEIIVGQGEAPRYRTVGVEDYVKLVLSSKLEGKNIMDAMKINNAP

SEQ ID NO: 87388 - protein, 435 aa, Setaria italica
  Transcript Sequence Number=SeqID_21414
  Gene Ontology: Mol. function=glucose-1-phosphate adenylyltransferase activity; Cellular component=chloroplast; Biological process =glycogen biosynthetic process
  Homolog annotation: Hit_ID=A7LB43; Match level="QueryCoverage=100%, HitCoverage=84%, E-value=0.0, Identity=92%"; Hit description=Glucose- 1-phosphate adenylyltransferase
  Pfam annotation: Domain name=Hexapep; Domain location=330-347; Score =5.1; E_value=40; Accession=PF00132.16; Description=Bacterial transferase hexapeptide (th
  Pfam annotation: Domain name=Hexapep; Domain location=383-400; Score =17.8; E_value=0.044; Accession=PF00132.16; Description=Bacterial transferase hexapeptide (th
  Pfam annotation: Domain name=NTP_transferase; Domain location=3-282; Score=400.9; E_value=2.1e-117; Accession=PF00483.15; Description =Nucleotidyl transferase
  Pfam module annotation: Pfam domain module=Hexapep::Hexapep::NTP _transferase; Domain location=330-347::383-400::3-282
TVASIILGGGAGTRLFPLTRTRAKPAVPVGGCYRLIDIPMSNCINSKINKIYVLTQFNSQSLNRHIARTYNFGEGVGFSGGSVEVLAATQTAGESGKKWFQGTADAVRQFLWLFEDARLKCIENILILSGDHLYRMDYMDFVQKHVDSGADISVACVPMDESRASDFGLMKADRNGRITDFLEKPKGESLKSMQVDMDLFGLSPELADTYKYMASMGIYVFKADVLRKLLRGHYPTANDFGSEVIPMAAKDYDVQAYLFDGYWEDIGTIKSFFEANLALTDQTPNFYFYDPVKPIFTSPRFLPPTRVENCKVLNSIVSHGCFLTECSVEHSVIGIRSRLEQGVQLKDTMMMGADYYQTEAERCSELSDGKVPVGVGENTIIRNCIIDKNARIGKNVVIMNSDNVQEADRPAEGFYIRSGITVVLKNAVIPDGTTI

SEQ ID NO: 87389 - protein, 87 aa, Setaria italica
  Transcript Sequence Number=SeqID_21415
  Gene Ontology: Mol. function=calcium ion binding; Biological process =protein amino acid phosphorylation
  Homolog annotation: Hit_ID=Q3S2H9; Match level="QueryCoverage=97%, HitCoverage=22%, E-value=8e-29, Identity=71%"; Hit description=Wall -associated kinase-like 2
  Pfam annotation: Domain name=EGF_CA; Domain location=51-87; Score =33.0; E_value=1.2e-06; Accession=PF07645.7; Description=Calcium binding EGF domain
SCPVDAARSACRSSHSTCRNVTDNYRTGYVCQCQDGYAGNPYLAGDGGCQDIDECALPGKCFGVCTNIAGGYECRCPRGARGNPFMA

SEQ ID NO: 87390 - protein, 97 aa, Setaria italica
  misc_feature (11)..(11): Xaa can be any naturally occurring amino acid
  Transcript Sequence Number=SeqID_21416
DDELGLPPAGXSSSSEDAGGAAGEEPDVAAGLDGQIWGFEDEIDGGFGGYSPEAAAAAAAAAAWDDDGFDAGLFAFGDDACGPSDLAALRHETMPAV

SEQ ID NO: 87391 - protein, 103 aa, Setaria italica
  misc_feature (9)..(9): Xaa can be any naturally occurring amino acid
  misc_feature (36)..(36): Xaa can be any naturally occurring amino acid
  Transcript Sequence Number=SeqID_21417
  Subcellular localization annotation: CTP_CleavageSite=63; ConfidenceScore=5.54e-01
QQLQQQQHXQQQQQLQQQQHLQQQQQLTTTSLSVSXQQQLNQQQMAMSANQNAQLAQQFNQVPSMSAYGMRMPPVKVEAFHELVSGDSSLKQDNDPNKLTSPK

SEQ ID NO: 87392 - protein, 93 aa, Setaria italica
  Transcript Sequence Number=SeqID_21418
  Gene Ontology: Mol. function=hydrolase activity, hydrolyzing O -glycosyl compounds; Cellular component=anchored to membrane; Biological process=carbohydrate metabolic process
  Homolog annotation: Hit_ID=A2Q5H1; Match level="QueryCoverage=98%, HitCoverage=19%, E-value=1e-33, Identity=71%"; Hit description =Glycoside hydrolase, family 17; X8
  Pfam annotation: Domain name=X8; Domain location=53-90; Score=-18.7; E_value=0.0018; Accession=PF07983.5; Description=X8 domain
SLLDEEQKSILPGNFERHWGIFSFDGQAKYPLNLGLGSPVLKNARDVPYLPPQWCVANPGQNLNNVGNHLKLACTMADCTTLYYGGLCNAIGD

SEQ ID NO: 87393 - protein, 172 aa, Setaria italica
  Transcript Sequence Number=SeqID_21419
  Gene Ontology: Mol. function=protein serine/threonine kinase activity; Cellular component=plasma membrane; Biological process =protein amino acid phosphorylation
  Homolog annotation: Hit_ID=B9TAC6; Match level="QueryCoverage=95%, HitCoverage=51%, E-value=4e-65, Identity=37%"; Hit description =Receptor protein kinase CLAVATA1, putative
  Pfam annotation: Domain name=LRR_1; Domain location=120-143; Score =10.1; E_value=3.5; Accession=PF00560.25; Description=Leucine Rich Repeat
  Pfam annotation: Domain name=LRR_1; Domain location=24-46; Score=8.2; E_value=8.1; Accession=PF00560.25; Description=Leucine Rich Repeat
  Pfam annotation: Domain name=LRR_1; Domain location=48-70; Score =13.4; E_value=0.84; Accession=PF00560.25; Description=Leucine Rich Repeat
  Pfam annotation: Domain name=LRR_1; Domain location=72-94; Score =16.6; E_value=0.1; Accession=PF00560.25; Description=Leucine Rich Repeat
  Pfam annotation: Domain name=LRR_1; Domain location=96-118; Score =9.2; E_value=5.3; Accession=PF00560.25; Description=Leucine Rich Repeat
  Pfam module annotation: Pfam domain module=LRR_1::LRR_1::LRR_1::LRR _1::LRR_1; Domain location=120-143::24-46::48-70::72-94::96-118
LSFIDVSHNHLQYSLPSSLFTIPTLQSFLASDNIISGELPDQFQDCPALAALDLSNNRLAGTIPSSLASCQRLVKLNLRHNRLTGEIPKALAKMPAMAILDLSSNSLTGGIPENFGSSPALETLNLAYNNLTGPVPGNGVLRSINPDELAGNAGLCGGVLPPCSGSRDMGLA

SEQ ID NO: 87394 - protein, 79 aa, Setaria italica
  Transcript Sequence Number=SeqID_21420
MAGWRVAGARAVLRRLSAASKTVGRRDGGVLTAICSSSENAPSGFGARVISHQCANLFRVQAFASRSIPVNLHQLIRNA

SEQ ID NO: 87395 - protein, 72 aa, Setaria italica
  Transcript Sequence Number=SeqID_21421
CRSQCANLFRVQAFASRSIPVNLHQLIRNAVIHLSHVALYGYDYIFCKDNKKGTAILKDVCFSFWCSQMSFI

SEQ ID NO: 87396 - protein, 139 aa, Setaria italica
  misc_feature (125)..(125): Xaa can be any naturally occurring amino acid
  Transcript Sequence Number=SeqID_21422
  Gene Ontology: Mol. function=structural constituent of ribosome; Cellular component=large ribosomal subunit; Biological process =translation
  Homolog annotation: Hit_ID=B9SDL6; Match level="QueryCoverage=96%, HitCoverage=48%, E-value=5e-46, Identity=67%"; Hit description=50S ribosomal protein L22, putative
  Pfam annotation: Domain name=Ribosomal_L22; Domain location=1-97; Score=85.5; E_value=1.9e-22; Accession=PF00237.11; Description =Ribosomal protein L22pL17e
SPKKVNLVAKLVRGMRVEDALLQLQVTVKRAAKTVYQVIHSARANAAHNHGLDPDKLIVEEAFVGKGLYLKRLSYHAKGRCGVMVRPRCRLTVVVREATAEEEAKIAKLRVSNYKKLTRKERQLXPHRLIEVSPRLGPV

SEQ ID NO: 87397 - protein, 153 aa, Setaria italica
  misc_feature (31)..(31): Xaa can be any naturally occurring amino acid
  misc_feature (48)..(48): Xaa can be any naturally occurring amino acid
  misc_feature (66)..(66): Xaa can be any naturally occurring amino acid
  Transcript Sequence Number=SeqID_21423
  Gene Ontology: Mol. function=structural constituent of ribosome; Cellular component=large ribosomal subunit; Biological process =translation
  Homolog annotation: Hit_ID=B9SDL6; Match level="QueryCoverage=97%, HitCoverage=51%, E-value=2e-41, Identity=57%"; Hit description=50S ribosomal protein L22, putative
  Pfam annotation: Domain name=Ribosomal_L22; Domain location=1-102; Score=39.7; E_value=4.9e-09; Accession=PF00237.11; Description =Ribosomal protein L22pL17e
SPKKVNLVAKLIRGMCVEDALLQLQVTVKKXAKTVYQVLFSERLTAQXASLAHNHGLDPDKLIVEXAFVEKGLYLKRLSYHAKGSCGVMVRPRCRLTVVVREATAEEEGKIAKLRVSNYKKLTRKERQLMPHRLIEVSPRWARKRKEEAGATA

SEQ ID NO: 87398 - protein, 173 aa, Setaria italica
  misc_feature (23)..(23): Xaa can be any naturally occurring amino acid
  Transcript Sequence Number=SeqID_21424
  Homolog annotation: Hit_ID=Q9ASH1; Match level="QueryCoverage=65%, HitCoverage=31%, E-value=6e-40, Identity=67%"; Hit description =Membrane-associated salt-inducible protein-like
  Pfam annotation: Domain name=PPR; Domain location=127-161; Score =27.8; E_value=4.5e-05; Accession=PF01535.12; Description=PPR repeat
  Pfam annotation: Domain name=PPR; Domain location=91-125; Score=3.2; E_value=3.7; Accession=PF01535.12; Description=PPR repeat
  Pfam module annotation: Pfam domain module=PPR::PPR; Domain location =127-161::91-125
MAAATFSAAGRRLLSTAAAAAEXTELPVPIAQLRRLARAGRLADIDAALAPLLPSHTVAALDSFYKQRLPHRAEELWRAMVQDHGIAPDAAAYNSRITYKSANGTVDEVRELIRVMREEAGLAPDVVSYNALVRAMARHRRVDEAVEVYRGMEAREVEGVAPNCATYTCVVGA

SEQ ID NO: 87399 - protein, 205 aa, Setaria italica
  misc_feature (145)..(145): Xaa can be any naturally occurring amino acid
  misc_feature (162)..(162): Xaa can be any naturally occurring amino acid
  misc_feature (180)..(180): Xaa can be any naturally occurring amino acid
  Transcript Sequence Number=SeqID_21425
  Gene Ontology: Mol. function=structural constituent of ribosome; Cellular component=large ribosomal subunit; Biological process =translation
  Homolog annotation: Hit_ID=B9SDL6; Match level="QueryCoverage=78%, HitCoverage=57%, E-value=1e-39, Identity=55%"; Hit description=50S ribosomal protein L22, putative
  Pfam annotation: Domain name=Ribosomal_L22; Domain location=107-204; Score=16.6; E_value=4.3e-07; Accession=PF00237.11; Description =Ribosomal protein L22pL17e
MAHDPLKAPDAAAYNSRITYKSANGTVDKVRELSGQYANLFRAQTFASRSIPVNFHQLIRNAGISTTRNLLADDAMVPISSPLTPPLGDGEETDKKGAVVKRLKVQAIKKDIKQSPKKVNLVAKLIRGMCVEDALLQLQVTVKKXAKTVYQVLFSERLTAQXASLAHNHGLDPDKLIVEXAFVEKGLYLKRLSYHHCQSTPWSHH

SEQ ID NO: 87400 - protein, 214 aa, Setaria italica
  misc_feature (52)..(52): Xaa can be any naturally occurring amino acid
  misc_feature (60)..(60): Xaa can be any naturally occurring amino acid
  Transcript Sequence Number=SeqID_21426
  Gene Ontology: Mol. function=structural constituent of ribosome; Cellular component=large ribosomal subunit; Biological process =translation
  Homolog annotation: Hit_ID=B9SDL6; Match level="QueryCoverage=87%, HitCoverage=67%, E-value=2e-59, Identity=62%"; Hit description=50S ribosomal protein L22, putative
  Pfam annotation: Domain name=Ribosomal_L22; Domain location=59-163; Score=100.7; E_value=5e-27; Accession=PF00237.11; Description =Ribosomal protein L22pL17e
MDLAFSCREYQLCYLRFNVVLSYCIAMVPISSPLTPPLGDGEETDKKGAVVXKRLKVQAXKKDIKQSPKKVNLVAKLVRGMRVEDALLQLQVTVKRAAKTVYQVIHSARANAAHNHGLDPDKLIVEEAFVGKGLYLKRLSYHAKGRCGVMVRPRCRLTVVVREATAEEEGKIAKLRVSNYKKLTRKERQLMPHRLIEVSPRWARKRKEETSATA

SEQ ID NO: 87401 - protein, 87 aa, Setaria italica
  Transcript Sequence Number=SeqID_21427
RLVRKRIRTDGGRRPAGGGAHVASAHGGVHPGGPARRHGAHGVAVGRRGAGIRTVRGRRRWAQAAAHDEPLGDPREQVHLKANIRAT

SEQ ID NO: 87402 - protein, 36 aa, Setaria italica
  Transcript Sequence Number=SeqID_21428
CIIRVTWSAEGGDLASSNYVTLKIWQMVMLWSWLNS

SEQ ID NO: 87403 - protein, 94 aa, Setaria italica
  Transcript Sequence Number=SeqID_21429
  Subcellular localization annotation: CTP_CleavageSite=78; ConfidenceScore=5.16e-01
TNSKNMPGLLWLSKYNYNSSKYSFILHLSSAHLHSNMLLLRTKVLSSHHFASLCFACCRYLVGNPVYDRDGHNNQSSRGSHAHSRNMRGVYFTD

SEQ ID NO: 87404 - protein, 133 aa, Setaria italica
  misc_feature (22)..(22): Xaa can be any naturally occurring amino acid
  Transcript Sequence Number=SeqID_21430
  Gene Ontology: Mol. function=hydrolase activity, hydrolyzing O -glycosyl compounds; Cellular component=vacuole; Biological process =carbohydrate metabolic process
  Homolog annotation: Hit_ID=Q1EMA3; Match level="QueryCoverage=92%, HitCoverage=61%, E-value=1e-51, Identity=79%"; Hit description =Glucan endo-1,3-beta-D-glucosidase
  Pfam annotation: Domain name=Glyco_hydro_17; Domain location=1-133; Score=37.4; E_value=5.5e-13; Accession=PF00332.10; Description =Glycosyl hydrolases family 17
AVVIGCNVHVPLLANVYPYFAXTGNPRDLSLGYATFQPGTTVRDGGNGLTYTNLFDAMVDATVAALEKAGAPNVRIVISESGWPSAGGFGASVENARNYNQGLIDHVGRGTPKRSGAMETFIFAMFNENQKSG

SEQ ID NO: 87405 - protein, 64 aa, Setaria italica
  Transcript Sequence Number=SeqID_21431
  Gene Ontology: Mol. function=hydrolase activity, hydrolyzing O -glycosyl compounds; Cellular component=cytoplasm; Biological process= carbohydrate metabolic process
  Homolog annotation: Hit_ID=Q02438; Match level="QueryCoverage=98%, HitCoverage=19%, E-value=3e-22, Identity=77%"; Hit description =Glucan endo-1,3-beta-glucosidase GV
VENARNYNQGLIDHVGRGTPKRSGAMETFIFAMFNENQKSGDPTERNFGLFYPNKQPVYSIRFQ

SEQ ID NO: 87406 - protein, 63 aa, Setaria italica
  Transcript Sequence Number=SeqID_21432
  Gene Ontology: Mol. function=hydrolase activity, hydrolyzing O -glycosyl compounds; Cellular component=vacuole; Biological process =carbohydrate metabolic process
  Homolog annotation: Hit_ID=Q1EMA5; Match level="QueryCoverage=65%, HitCoverage=11%, E-value=8e-14, Identity=92%"; Hit description =Glucan endo-1,3-beta-D-glucosidase
PQPSPAPRRWRPPWRRTGSCRSARYLASTGAPLLANVYPYFAYRGNPRDISLGYATFQPGTTV

SEQ ID NO: 87407 - protein, 68 aa, Setaria italica
  Transcript Sequence Number=SeqID_21433
  Gene Ontology: Mol. function=hydrolase activity, hydrolyzing O -glycosyl compounds; Cellular component=cytoplasm; Biological process= carbohydrate metabolic process
  Homolog annotation: Hit_ID=Q02438; Match level="QueryCoverage=98%, HitCoverage=21%, E-value=1e-24, Identity=79%"; Hit description =Glucan endo-1,3-beta-glucosidase GV
FGASVENARNYNQGLIDHVGRGTPKRSGAMETFIFAMFNENQKSGDPTERNFGLFYPNKQPVYSIRFQ

SEQ ID NO: 87408 - protein, 136 aa, Setaria italica
  Transcript Sequence Number=SeqID_21434
  Gene Ontology: Mol. function=hydrolase activity, hydrolyzing O -glycosyl compounds; Cellular component=cytoplasm; Biological process= carbohydrate metabolic process
  Homolog annotation: Hit_ID=Q1EMA3; Match level="QueryCoverage=97%, HitCoverage=66%, E-value=4e-56, Identity=78%"; Hit description =Glucan endo-1,3-beta-D-glucosidase
  Pfam annotation: Domain name=Glyco_hydro_17; Domain location=1-136; Score=68.4; E_value=2.7e-17; Accession=PF00332.10; Description =Glycosyl hydrolases family 17
AVVFAYQGNPRDISLGYATFQPGTTVRDGGNGLTYTNLFDAMVDATVAALEKAGAPNVRIVISESGWPSAGGFGASVENARNYNQGLIDHVGRGTPKRSGAMETFIFAMFNENQKSGDPTERNFGLFYPNKQPVYS

SEQ ID NO: 87409 - protein, 115 aa, Setaria italica
  Transcript Sequence Number=SeqID_21435
  Gene Ontology: Mol. function=hydrolase activity, hydrolyzing O -glycosyl compounds; Cellular component=cytoplasm; Biological process= carbohydrate metabolic process
  Homolog annotation: Hit_ID=Q02438; Match level="QueryCoverage=100%, HitCoverage=36%, E-value=2e-51, Identity=82%"; Hit description =Glucan endo-1,3-beta-glucosidase GV
  Pfam annotation: Domain name=Glyco_hydro_17; Domain location=1-115; Score=-4.3; E_value=1.2e-10; Accession=PF00332.10; Description =Glycosyl hydrolases family 17
ATFQPGTTVRDGGNGLTYTNLFDAMVDATVAALEKAGAPNVRIVISESGWPSAGGFGASVENARNYNQGLIDHVGRGTPKRSGAMETFIFAMFNENQKSGDPTERNFGLFYPNKQ

SEQ ID NO: 87410 - protein, 99 aa, Setaria italica
  Transcript Sequence Number=SeqID_21436
  Gene Ontology: Mol. function=hydrolase activity, hydrolyzing O -glycosyl compounds; Cellular component=cytoplasm; Biological process= carbohydrate metabolic process
  Homolog annotation: Hit_ID=Q02438; Match level="QueryCoverage=98%, HitCoverage=31%, E-value=2e-40, Identity=78%"; Hit description =Glucan endo-1,3-beta-glucosidase GV
  Pfam annotation: Domain name=Glyco_hydro_17; Domain location=1-98; Score=-57.1; E_value=1.1e-07; Accession=PF00332.10; Description =Glycosyl hydrolases family 17
MLDATVAALEKAGAPNVRIVISESGWPSAGGFGASVENARNYNQGLIDHVGRGTPKRSGAMETFIFAMFNENQKSGDPTERNFGLFYPNKQPVYSIRFQ

SEQ ID NO: 87411 - protein, 108 aa, Setaria italica
  Transcript Sequence Number=SeqID_21437
  Gene Ontology: Mol. function=hydrolase activity, hydrolyzing O -glycosyl compounds; Cellular component=cytoplasm; Biological process= carbohydrate metabolic process
  Homolog annotation: Hit_ID=Q02438; Match level="QueryCoverage=99%, HitCoverage=33%, E-value=1e-45, Identity=80%"; Hit description =Glucan endo-1,3-beta-glucosidase GV
  Pfam annotation: Domain name=Glyco_hydro_17; Domain location=1-107; Score=-17.0; E_value=6.2e-10; Accession=PF00332.10; Description =Glycosyl hydrolases family 17
LTYTNLFDAMVDATVAALEKAGAPNVRIVISESGWPSAGGFGASVENARNYNQGLIDHVGRGTPKRSGAMETFIFAMFNENQKSGDPTERNFGLFYPNKQPVYSIRFQ

SEQ ID NO: 87412 - protein, 56 aa, Setaria italica
  Transcript Sequence Number=SeqID_21438
  Gene Ontology: Mol. function=hydrolase activity, hydrolyzing O -glycosyl compounds; Cellular component=vacuole; Biological process =carbohydrate metabolic process
  Homolog annotation: Hit_ID=Q02437; Match level="QueryCoverage=92%, HitCoverage=15%, E-value=7e-13, Identity=73%"; Hit description =Glucan endo-1,3-beta-glucosidase GIV
  Subcellular localization annotation: CTP_CleavageSite=24; ConfidenceScore=5.40e-01
AMRNLNAALTATGLGSIKVSTSVQSNVIANSFPPSSGVFAQGYMVEIARYLAISTM

SEQ ID NO: 87413 - protein, 119 aa, Setaria italica
  Transcript Sequence Number=SeqID_21439
  Gene Ontology: Mol. function=hydrolase activity, hydrolyzing O -glycosyl compounds; Cellular component=cytoplasm; Biological process= carbohydrate metabolic process
  Homolog annotation: Hit_ID=Q02438; Match level="QueryCoverage=99%, HitCoverage=37%, E-value=1e-51, Identity=81%"; Hit description =Glucan endo-1,3-beta-glucosidase GV
  Pfam annotation: Domain name=Glyco_hydro_17; Domain location=1-118; Score=15.9; E_value=8.9e-12; Accession=PF00332.10; Description =Glycosyl hydrolases family 17
PGTTVRDGGNGLTYTNLFDAMVDATVAALEKAGAPNVRIVISESGWPSAGGFGASVENARNYNQGLIDHVGRGTPKRSGAMETFIFAMFNENQKSGDPTERNFGLFYPNKQPVYSIRFQ

SEQ ID NO: 87414 - protein, 141 aa, Setaria italica
  misc_feature (5)..(5): Xaa can be any naturally occurring amino acid
  Transcript Sequence Number=SeqID_21440
  Gene Ontology: Mol. function=hydrolase activity, hydrolyzing O -glycosyl compounds; Cellular component=vacuole; Biological process =carbohydrate metabolic process
  Homolog annotation: Hit_ID=Q1EMA3; Match level="QueryCoverage=99%, HitCoverage=69%, E-value=1e-58, Identity=78%"; Hit description =Glucan endo-1,3-beta-D-glucosidase
  Pfam annotation: Domain name=Glyco_hydro_17; Domain location=1-140; Score=91.4; E_value=3.1e-24; Accession=PF00332.10; Description =Glycosyl hydrolases family 17
YPYFXAYRGNPRDISLGYATFQPGTTVRDGGNGLTYTNLFDAMVDATVAALEKAGAPNVRIVISESGWPSAGGFGASVENARNYNQGLIDHVGRGTPKRSGAMETFIFAMFNENQKSGDPTERNFGLFYPNKQPVYSIRFQ

SEQ ID NO: 87415 - protein, 194 aa, Setaria italica
  misc_feature (169)..(169): Xaa can be any naturally occurring amino acid
  Transcript Sequence Number=SeqID_21441
  Gene Ontology: Mol. function=hydrolase activity, hydrolyzing O -glycosyl compounds; Cellular component=cytoplasm; Biological process= carbohydrate metabolic process
  Homolog annotation: Hit_ID=Q02438; Match level="QueryCoverage=100%, HitCoverage=61%, E-value=8e-73, Identity=72%"; Hit description =Glucan endo-1,3-beta-glucosidase GV
  Pfam annotation: Domain name=Glyco_hydro_17; Domain location=1-194; Score=241.6; E_value=1.9e-69; Accession=PF00332.10; Description =Glycosyl hydrolases family 17
YIAVGNEVPPGDAAGILLPAMRNVRGALVSAGLDGIKVSTAVKMDVFTDTFPPSRGVFRDPSVMSPIVQFLAGTGAPLLANVYPYFAYKDNPRDINTNFATFRPGTTVRDGGNGLTYTNLFDAMVDATVAALEKAGAPNVRIVISESGWPSAGGFGASVENARNYNQGXLIDHVGRGTPKRSGAMETFIFAMFN

SEQ ID NO: 87416 - protein, 60 aa, Setaria italica
  Transcript Sequence Number=SeqID_21442
  Gene Ontology: Mol. function=hydrolase activity, hydrolyzing O -glycosyl compounds; Cellular component=extracellular region; Biological process=carbohydrate metabolic process
  Homolog annotation: Hit_ID=P15737; Match level="QueryCoverage=73%, HitCoverage=13%, E-value=1e-15, Identity=88%"; Hit description =Glucan endo-1,3-beta-glucosidase GII
MQLTVCVNNLIVNAAAVQSIGVCYGVLGNNLPSRSDVVQLYRSRGINGMRIYFPDRQALD

SEQ ID NO: 87417 - protein, 223 aa, Setaria italica
  misc_feature (199)..(199): Xaa can be any naturally occurring amino acid
  Transcript Sequence Number=SeqID_21443
  Gene Ontology: Mol. function=hydrolase activity, hydrolyzing O -glycosyl compounds; Cellular component=vacuole; Biological process =carbohydrate metabolic process
  Homolog annotation: Hit_ID=P15737; Match level="QueryCoverage=83%, HitCoverage=55%, E-value=4e-75, Identity=79%"; Hit description =Glucan endo-1,3-beta-glucosidase GII
  Pfam annotation: Domain name=Glyco_hydro_17; Domain location=2-220; Score=287.2; E_value=3.5e-83; Accession=PF00332.10; Description =Glycosyl hydrolases family 17
  Subcellular localization annotation: CTP_CleavageSite=41; ConfidenceScore=5.14e-01
YVTYGQRLRTNTKTPTKTTASWVQSNVRPYYPAVNIKYIAVGNEVAGSATQSILPAMRNLNAALTATGLGSIKVSTSVQSNVIANSFPPSSGVFAQGYMVEIARYLASTGAPLLANVYPYFAYRGNPRDISLGYATFQPGTTVRDGGNGLTYTNLFDAMVDATVAALEKAGAPNVRIVISESGWPSAGGFGASVENARXYNQGLVFDLRSGRRSTSLSRFRSS

SEQ ID NO: 87418 - protein, 335 aa, Setaria italica
  Transcript Sequence Number=SeqID_21444
  Gene Ontology: Mol. function=hydrolase activity, hydrolyzing O -glycosyl compounds; Cellular component=vacuole; Biological process =carbohydrate metabolic process
  Homolog annotation: Hit_ID=P15737; Match level="QueryCoverage=99%, HitCoverage=100%, E-value=1e-138, Identity=74%"; Hit description =Glucan endo-1,3-beta-glucosidase GII
  Pfam annotation: Domain name=Glyco_hydro_17; Domain location=29-334; Score=694.3; E_value=1e-205; Accession=PF00332.10; Description =Glycosyl hydrolases family 17
MARQQVASMLAVALILGAFASIPTTVQSIGVCYGVLGNNLPSRSDVVQLYRSRGINGMRIYFPDRQALDALRGSGMALILDTGNDVLGKLASSPSSAASWVQSNVRPYYPAVNIKYIAVGNEVAGSATQSILPAMRNLNAALTATGLGSIKVSTSVQSNVIANSFPPSSGVFAQGYMVEIARYLASTGAPLLANVYPYFAYRGNPRDISLGYATFQPGTTVRDGGNGLTYTNLFDAMVDATVAALEKAGAPNVRIVISESGWPSAGGFGASVENARNYNQGLIDHVGRGTPKRSGAMETFIFAMFNENQKSGDPTERNFGLFYPNKQPEYLIPFQ

SEQ ID NO: 87419 - protein, 296 aa, Setaria italica
  Transcript Sequence Number=SeqID_21445
  Gene Ontology: Mol. function=oxidoreductase activity; Biological process=DNA integration
  Homolog annotation: Hit_ID=B6T5D7; Match level="QueryCoverage=99%, HitCoverage=55%, E-value=4e-93, Identity=55%"; Hit description =Reticuline oxidase
  Pfam annotation: Domain name=FAD_binding_4; Domain location=2-94; Score=2.7; E_value=0.00093; Accession=PF01565.15; Description=FAD binding domain
VAVLDLSNLRAVRVDPQAATAWVDSGATLGELYYAVGKASGVLGFPAGLCPTVGVGGHFSGGGFGMLLRKYGLAVDHVVDAVLVDARGRLLNKNTMGSDVFWAIRGGSGESFGVVLSWQVRLVPVPPKVTVFNLPVTASQGAVDVVARWQQVAPALPDDLMIRVVVQQKTANFQSLFLGTCDALLPLMSSRFPELKFNRTYCKEMTWIQSVPYIYLGSGSTVEDLLNRTTAASVFSSGYKATSDYVRKAIPRDVWTNIFTQLAQPNAGLMILDPYGGQIAAVPEAATPYPHRAGVL

SEQ ID NO: 87420 - protein, 150 aa, Setaria italica
  Transcript Sequence Number=SeqID_21446
  Gene Ontology: Mol. function=transferase activity; Cellular component= endoplasmic reticulum membrane; Biological process=metabolic process
  Homolog annotation: Hit_ID=B6TFG4; Match level="QueryCoverage=100%, HitCoverage=48%, E-value=9e-50, Identity=60%"; Hit description =Undecaprenyl pyrophosphate synthetase
  Pfam annotation: Domain name=Prenyltransf; Domain location=1-150; Score=70.3; E_value=7.1e-18; Accession=PF01255.11; Description =Putative undecaprenyl diphosphate syntha
PQEDVNFGLELIERGIRDTMDVHAREGIRVHVAGDRSRMPTSLQDAAREAEEMTRNNSQYHCIIATCYSGRWDIVQACRELATKVQDNMLRPEDIDEEMLAGHLSTNALGEFGCPDLVIRTSGELRLSNFLLWQSAYAELYFTDTMWPVF

SEQ ID NO: 87421 - protein, 398 aa, Setaria italica
  Transcript Sequence Number=SeqID_21447
  Gene Ontology: Mol. function=protein serine/threonine kinase activity; Biological process=protein amino acid phosphorylation
  Homolog annotation: Hit_ID=Q2QMH1; Match level="QueryCoverage=99%, HitCoverage=66%, E-value=1e-180, Identity=81%"; Hit description =Serine/threonine-protein kinase Nek2
DIPYGTKSDIWSLGCCIYEMSALRPAFKAFDMQALINKITKSIVSPLPTRYSGAFRGLIKSMLRKSPEHRPSAAELLKHPHLQPYVLQVQLKSSPSRNMSPIYQSLTDKVKKMTFPSDVTDSVRRRVARRNSLGNERTVTFCKPSPERNSISSTRSIKEYTTTQSVKEFSIDSSQVDDEVTSKAVITKTSGILRTPKSTPSKSLTTRNWLDPPKTSYSRTNHSELSSRTPLNKSARTARRASLPLPTYGTPSNRTISILDRLDSPDVSVNAPRIDRIAEFPLASSEDPLAPINNKLSPAPGYGSCSTPPSINRSITKDKYTVQVLHTGDGDNGSDSSGRNATAASSRGSNDSRLQRFDTSSYQQRAEALEGLLEFSAQLLQQERYEELGILLKPFRSP

SEQ ID NO: 87422 - protein, 62 aa, Setaria italica
  Transcript Sequence Number=SeqID_21448
  Gene Ontology: Mol. function=protein serine/threonine kinase activity; Biological process=protein amino acid phosphorylation
  Homolog annotation: Hit_ID=B9RSY9; Match level="QueryCoverage=98%, HitCoverage=4%, E-value=3e-11, Identity=54%"; Hit description=ATP binding protein, putative
LLYGLGFSCRQYLAQGMILSISVSALMRVEALVSAFKGSNDNFLADAASYLGAELQRLPRCG

SEQ ID NO: 87423 - protein, 156 aa, Setaria italica
  Transcript Sequence Number=SeqID_21449
  Subcellular localization annotation: CTP_CleavageSite=75; ConfidenceScore=5.28e-01
AYNPCYNTNGYASHQTSVPRPPPQPQPPLLPLPAAQAPPQCWSRPVSRAKKPRCYDAAPGPNKLAAPATSAPITVAAPSKKRTAPAATGLEVEWTGTGSLYSVSPPPSSVPMPTSLLLTVTAARKAPTACAVEVAGAGCGGVDVGATDELRRLLRL

SEQ ID NO: 87424 - protein, 51 aa, Setaria italica
  Transcript Sequence Number=SeqID_21450
GTLLLLFIGRISLLKIFLAAGQSSFVHRTLDIVKIKSPANRVHFISLLWTN

SEQ ID NO: 87425 - protein, 508 aa, Setaria italica
  misc_feature (97)..(97): Xaa can be any naturally occurring amino acid
  Transcript Sequence Number=SeqID_21451
  Gene Ontology: Mol. function=hydrolase activity; Biological process =metabolic process
  Homolog annotation: Hit_ID=B6SV15; Match level="QueryCoverage=90%, HitCoverage=100%, E-value=0.0, Identity=92%"; Hit description=5 -nucleotidase
  Pfam annotation: Domain name=5_nucleotid; Domain location=101-501; Score=595.1; E_value=7.4e-176; Accession=PF05761.6; Description=5' nucleotidase family
EKKAGEAETLLHDLGIADPFSVRHSPRGIFCTRTLNLRSISVIGYDMDYTLIHYNVMAWEGRAYDYGMDNLKSMGFPVDDLKFDPDLVIRGLVIDKXGNLVKADRFGYIKRAMHGTQMLSTSSVSEIYGRELVDLRKESRWEFLNTLFSVSEAVMFMQMVDKLDQGLVPAELGPLDYKGLYNAVSKALFRAHVEGQLKREIMAEPERFVEPDPELPLALLDQKEAGKKLLLITNSDYHYTNKMMNHAFNRFLPNDVGWRDLFEMVIVSARKPEFFQLSHPLYEVVTDDGLMRPCFKANSGGLYSGGSAQMVEKSLEIHGDEILYVGDHIYTDVSQSKVHLRWRTALICRELEDEFDALVQSYDQKEKLVTLIQQKEIVGDLFNQLRLAQQRRSNSRPAQTLAATCMDDHELTESMQKLLIVMQRLDEKIGPMLESDGELFNKRWGWLSRAGLWDKSHLTRQIEKYADIYTSRVSNFLHYTPFMYFQSQEQTLAHDGHSYARGENIKVQ

SEQ ID NO: 87426 - protein, 73 aa, Setaria italica
  misc_feature (9)..(9): Xaa can be any naturally occurring amino acid
  Transcript Sequence Number=SeqID_21452
  Homolog annotation: Hit_ID=B6SV15; Match level="QueryCoverage=47%, HitCoverage=7%, E-value=1e-13, Identity=97%"; Hit description=5 -nucleotidase
SHLTRQIEXYADIYTSRVSNFLHYTPFMYFQSQEQVNTQLHTICCTVDFAIFLLSCLLVQARKMHFSYSMTRY

SEQ ID NO: 87427 - protein, 95 aa, Setaria italica
  Transcript Sequence Number=SeqID_21453
  Gene Ontology: Mol. function=peptidase activity; Cellular component =cellular_component; Biological process=lipid transport
  Homolog annotation: Hit_ID=P93191; Match level="QueryCoverage=70%, HitCoverage=69%, E-value=2e-26, Identity=83%"; Hit description =Nonspecific lipid transfer protein
  Pfam annotation: Domain name=Tryp_alpha_amyl; Domain location=30-95; Score=40.9; E_value=5.1e-09; Accession=PF00234.14; Description =Protease inhibitorseed storageLTP f
MKPAQLLFAALAVLLLCAAAAPRGAEAATCDATQLTPCAGAIIGNSPPTAACCSKMREQQPCMCTYARDPNLQRYVSSPNGKKAMAACKVPVPSC

SEQ ID NO: 87428 - protein, 59 aa, Setaria italica
  Transcript Sequence Number=SeqID_21454
MERKRKEMEKAKSGLRLAMEELCLCSPGDVEEKQEQVQPRSSTMDLLSVSKQLLHVLGW

SEQ ID NO: 87429 - protein, 79 aa, Setaria italica
  Transcript Sequence Number=SeqID_21455
LMGNCQDFEDLAEDAKMLTYAVQPMLEEIDAISVRVLNFTSVYYQDKSCNERSEFLAHTCSIYMCGLQAKHNLDKMKSS

SEQ ID NO: 87430 - protein, 77 aa, Setaria italica
  Transcript Sequence Number=SeqID_21456
  Gene Ontology: Mol. function=glycolipid transporter activity; Cellular component=cytoplasm; Biological process=glycolipid transport
CQLRSISFSKYLLERLLKAPELSLREIVEEAYASTLKPWHGWISSAAYKVLAEHLQCIPGDYNQISENFLFTDTLVC

SEQ ID NO: 87431 - protein, 224 aa, Setaria italica
  Transcript Sequence Number=SeqID_21457
  Gene Ontology: Mol. function=glycolipid transporter activity; Cellular component=cytoplasm; Biological process=glycolipid transport
  Homolog annotation: Hit_ID=B9SV19; Match level="QueryCoverage=80%, HitCoverage=88%, E-value=1e-28, Identity=33%"; Hit description =Glycolipid transfer protein, putative
  Pfam annotation: Domain name=GLTP; Domain location=39-185; Score =191.1; E_value=3.2e-54; Accession=PF08718.3; Description=Glycolipid transfer protein (GLTP)
MERKRKEMEKAKSGLRLAMEELCLCSPGDVEEKQEQVQPRSSTMDLLSVSKQLLHVLDEIGPTLLVLRQDIQQNIQRLQDLHERDSSKYVSLTAIVTEEVEQETAKKTKSCTRAIIWLSRSISFSKYLLERLLKAPELSLREIVEEAYASTLKPWHGWISSAAYKVAMKLVPEREVLIALLMGNCQDFEDLAEDAKMLTYAVQPMLEEIDAISAKHNLDKMKSS

SEQ ID NO: 87432 - protein, 183 aa, Setaria italica
  Transcript Sequence Number=SeqID_21458
  Gene Ontology: Cellular component=cytoplasm; Biological process =translation
  Homolog annotation: Hit_ID=B9RBL6; Match level="QueryCoverage=95%, HitCoverage=66%, E-value=1e-65, Identity=67%"; Hit description =Ribosome recycling factor, putative
  Pfam annotation: Domain name=RRF; Domain location=19-181; Score =168.8; E_value=1.6e-47; Accession=PF01765.11; Description=Ribosome recycling factor
DQTVQNQAATSQMDAAVIALSRELSKLRTGRTNPGMLDHIMVETADVKVALNHIAVVSVLDAHTLSVMPYDPSSMKSIENAIISSPLGINPTPDGNRIIANIPPLTKENIQALCKVVTKSAEDFKQSIRRARQKALDTIKKSASSMPKDDVKRLEKEIEELTKKFIKSADDMCKAKEKEISGS

SEQ ID NO: 87433 - protein, 554 aa, Setaria italica
  misc_feature (7)..(7): Xaa can be any naturally occurring amino acid
  misc_feature (75)..(75): Xaa can be any naturally occurring amino acid
  Transcript Sequence Number=SeqID_21459
  Gene Ontology: Mol. function=binding; Cellular component=cytoplasm; Biological process=ubiquitin-dependent protein catabolic process
  Homolog annotation: Hit_ID=UPI0001A7B120; Match level="QueryCoverage =99%, HitCoverage=27%, E-value=1e-140, Identity=52%"; Hit description= DCAF1 (DDB1-CUL4 ASSOCIATED FACTOR 1); nucleotide binding
  Subcellular localization annotation: CTP_CleavageSite=40; ConfidenceScore=5.08e-01
PKFAALXVDRGGIQKILSVPRITQTYMGLSACLFTFGSLQSTMERVCALSSDTLDSVVELALQLLGCPQDLARKXAAIFFAAAFVFKAVLDLFDARDGMQKLLDILYGCASGRSSGNSGGLGSSHINQGNDQLPAEVLTASEKQVAYHTCVALRQYFRAHLLQLVDSIRPSKSIRSIARNTSSARAGYKPFDISNEAMDAVFRQIQRDRKLGPALVRARWPVLDKFVASNGHMTMLELCKFQAHGDRYLRDLTQYAFGVLHIITLMPHPHVRKPIVHATLSNNRVGMAVLLDAVKSFDYIDHEVICPALNVLVNLVCPPPSISNKPSSTANQQPAAAQALVSESRDKNFEKSVSDRNLVANHGESRERSGDGNPSERNNTLHQGTPCTPVVPSGVVGDRRITLGVGVGGPGLAAQLEQGYRQAREVVRANNGIKILLQLLSSRMVTHPVAIDSIRALACRVLLGLARDDAIAHILTKLQVGKKLSELIRDTSAQTSGGDSGRWQAELTQVAIELIGVLTNSGKETTLAATDAAAPALRRIERAGIAAATPISYH

SEQ ID NO: 87434 - protein, 195 aa, Setaria italica
  Transcript Sequence Number=SeqID_21460
MARFAAATVLVCAALLLCVEQSAGSLASADPLSTLFPANSRPPPVMIYCKQNTELNVAVGDDGKVVLAVAKFGEFKQLWWKLPLPALVHGEGHKFWLVNVATEQAIATPTDDNKREVKMAPFNPWDKAQLWVPDTPDADGFYQIKVSADESKALNGLGGSVHKGTVVGIYPGNPVSANTLWNLTSIWPFPFHYFP

SEQ ID NO: 87435 - protein, 39 aa, Setaria italica
  Transcript Sequence Number=SeqID_21461
MPPRRRRRAPPSKPQPQPQPDGQEPPGDDAPLEERLAWN

SEQ ID NO: 87436 - protein, 132 aa, Setaria italica
  Transcript Sequence Number=SeqID_21462
  Gene Ontology: Mol. function=oxidoreductase activity
  Homolog annotation: Hit_ID=B6T1S5; Match level="QueryCoverage=86%, HitCoverage=87%, E-value=2e-55, Identity=91%"; Hit description =Phytoene dehydrogenase-like
  Pfam annotation: Domain name=BLOC1_2; Domain location=10-126; Score =42.5; E_value=1.6e-09; Accession=PF10046.1; Description=Biogenesis of lysosome-related organelles co
MASANPAVAEAETAAAGQRDELAESLAELFTNVSLMVRGELQGTNSQLALLEKMNDRVAQEYSNYGDVAAGLRVFVEQLNEKNQGFDEYVSHIDAIDQQVTEFEAVVSMLDKHVALLEKKVKSAYHISSSTQ

SEQ ID NO: 87437 - protein, 139 aa, Setaria italica
  misc_feature (12)..(12): Xaa can be any naturally occurring amino acid
  Transcript Sequence Number=SeqID_21463
  Gene Ontology: Mol. function=transferase activity, transferring glycosyl groups; Cellular component=integral to membrane; Biological process=protein amino acid glycosylation
  Homolog annotation: Hit_ID=B9S2F1; Match level="QueryCoverage=99%, HitCoverage=21%, E-value=2e-46, Identity=62%"; Hit description =Transferase, transferring glycosyl groups, putative
AEVKKVSDSKAXYLGNMNYYHRPLREGKWAVSYEEWPREEYPPYADGAGYIVSSDIANFVASDMEYTKLNLFKMEDVSMGMWVGRFNSSGNSVAYVHSPRLCQSGCVDDYLTAHYQSPAQMVCLWEKLRQGRPQCCNAR

SEQ ID NO: 87438 - protein, 83 aa, Setaria italica
  Transcript Sequence Number=SeqID_21464
  Homolog annotation: Hit_ID=B9REZ6; Match level="QueryCoverage=100%, HitCoverage=8%, E-value=3e-27, Identity=69%"; Hit description=Breast carcinoma amplified sequence, putative
PTCIANGSGTTRYDCTASHVHLYKLYRGMTSAVIQDISFSHFSQWISIVSSRGTCHIFTLSPFGGDASLQPQKSHSDGPPLAP

SEQ ID NO: 87439 - protein, 119 aa, Setaria italica
  Transcript Sequence Number=SeqID_21465
  Subcellular localization annotation: CTP_CleavageSite=28; ConfidenceScore=5.20e-01
ISFFPIKQKVCTNKHGTFTGLGRRRSTNMAAKVGIQNHPMSRKYGTKQMGLTVYVQINTKGAASRQAMATSRQHPAPLIVNPRISKLPLFHESLLKFHQILYIILHTECCGHCFSLYLK

SEQ ID NO: 87440 - protein, 662 aa, Setaria italica
  Transcript Sequence Number=SeqID_21466
  Gene Ontology: Cellular component=nucleus
  Homolog annotation: Hit_ID=B9REZ6; Match level="QueryCoverage=79%, HitCoverage=52%, E-value=1e-157, Identity=53%"; Hit description =Breast carcinoma amplified sequence, putative
  Subcellular localization annotation: CTP_CleavageSite=50; ConfidenceScore=5.65e-01
GPMRVGPRWLAYATNSPLLSNTGRLSPQNLTPSPGVSPSTSPSSGSLVARYAMESSKQLATGIINLGDMGYKTLSKYCQELLPDGSNSPLSSSPGRRSGKIPSTVHPVEADNAGMVVIKDFTSKVVISQFRAHTSPISALCFDPSGTLLVTASVHGHNINVFRIMPTCIANGSGTTRYDCTASHVHLYKLYRGMTSAVIQDISFSHFSQWISIVSSRGTCHIFTLSPFGGDASLQPQKSHSDGPPLAPCQSRPWWSKPSFLMDQQLHQVPSTVTNSVVSRIKNSTSGWLNTVSNVAASASGKLSVPSGSVTAVFHNSIYQGSLPVPSKANALEHLLVYSPSGHVIQHELLPSGSESSGNSPRVGSGPNSQLQDDEMHVTAEPIQWWDVCRRTNWPERDENIANIVLYNQRNCMMAMDASDCEDSEHSDSTPSNDGSSGKEITRVRERSSWYLSNAEVQINSWRIPIWQKSKICFYVMDHPAAESGETVSSSGGEIEIEKLPLHEVEIRRRELLPVFKQFHYTERNSSDRNIANGGFQNGLSHIGDAHYSSVKDNGEYEPKPVAPISGFYTGMRKTANMNGVASQPLSGPSSTVNLQQVGKCNSIESPDAASLSAHHKAENKSNGYVSMPPETNASIRPLNSYSLLDGPLDGVACSSLSKLVV

SEQ ID NO: 87441 - protein, 311 aa, Setaria italica
  Transcript Sequence Number=SeqID_21467
  Gene Ontology: Cellular component=nucleus
  Homolog annotation: Hit_ID=B9SFK7; Match level="QueryCoverage=96%, HitCoverage=29%, E-value=1e-104, Identity=67%"; Hit description =Breast carcinoma amplified sequence, putative
  Subcellular localization annotation: CTP_CleavageSite=33; ConfidenceScore=5.39e-01
MRRGKGGRNGLLPSSLRIISSCLKTVSSNAGSVASTVRSAGASVAASIAPQAEDEKDQVLWAGFDKLELHPSSFKHVLLVGYSNGFQVLDVEDAANVCELVSKRDGPVTFLQMQPTPVSSEGAEGFRASHPMLLVVAGDETNGLGAVQGGRLSALIRDTNSEPQAGNCISTPTVVRFYSLRSHTYVHVLRFRSAVYLVRCSPRIVAVALAAQIYCFDAVTLENKLSVLSYPLQGAPGVNIGYGPMAVGPRWLAYATNSPLLSNTGRLSPQNLTPSPGVSPSTSPSSGSLVARYAMESSKQLLPVLLFLVKG

SEQ ID NO: 87442 - protein, 53 aa, Setaria italica
  Transcript Sequence Number=SeqID_21468
KCWRRKSVSFRKSVLLKFEKAKDYTKSKNKNGKQALLWREKTHLSVLHVITIL

SEQ ID NO: 87443 - protein, 247 aa, Setaria italica
  Transcript Sequence Number=SeqID_21469
  Gene Ontology: Mol. function=protein transporter activity; Cellular component=plasma membrane; Biological process=protein transport
  Homolog annotation: Hit_ID=O82197; Match level="QueryCoverage=79%, HitCoverage=91%, E-value=9e-51, Identity=52%"; Hit description =Vacuolar protein sorting-associated protein 32 homolog 1
  Pfam annotation: Domain name=Snf7; Domain location=51-216; Score =156.1; E_value=1.1e-43; Accession=PF03357.13; Description=Snf7
MVYFYWICSFCCSGHHYTRLRISNDCRKMLKKLLPKTKSKKKKEAASSAIPTLDRLHETLEMLEKKERFLQKKCSAEIEKAKDYTKSKNKNAAIQCLKKKKLYETQIEQLSNFQLRVHDQIIMLESAKATTDTVDALRSGSSAVKSIQQSLNIDDIENAIDEANEQTENMRQIQEALATPVGASADFDEDELEAELEDLEEEELEEELPEPPARIPAPVEPLAKAASSSRQGSDLSELTKLQAEMAL

SEQ ID NO: 87444 - protein, 144 aa, Setaria italica
  Transcript Sequence Number=SeqID_21470
  Gene Ontology: Mol. function=oxidoreductase activity; Biological process=metabolic process
  Homolog annotation: Hit_ID=B6TRS7; Match level="QueryCoverage=100%, HitCoverage=45%, E-value=6e-58, Identity=75%"; Hit description =Carbonyl reductase 3
VNNAAVSGVMCSQDPVDGPVASGEKFKGMDRGERLEWLWGNCWETYDAAKEGLQTNYYGTKHVIEAFLPLLQASSDGRIVNVSSDFGLLRHFRNEELKQEMNDIDNLTEERLDELLDMFLKDFEAGVAEARGWPAEFAAYKVAK

SEQ ID NO: 87445 - protein, 126 aa, Setaria italica
  Transcript Sequence Number=SeqID_21471
  Gene Ontology: Mol. function=protein serine/threonine kinase activity; Biological process=protein amino acid phosphorylation
  Homolog annotation: Hit_ID=B9RJ59; Match level="QueryCoverage=66%, HitCoverage=10%, E-value=2e-18, Identity=48%"; Hit description=S -receptor kinase, putative
DEYFPMVALELHEQGRHLDIIDARLEGRADEAEVARAVRIALCCLHEDPAQRPSMAAVVRMLEGTVSPPEPRVEALGFLRLYGRGYAVPTTSLVAMAGTSGSAGTPSSTAGASQLTDSLQGVSEPR

SEQ ID NO: 87446 - protein, 62 aa, Setaria italica
  Transcript Sequence Number=SeqID_21472
SRRPPPRWTGRWRSASASSSLDATLVTVLSPDWLTGADQLAVRNRLILSVVFLATKRAVLCV

SEQ ID NO: 87447 - protein, 168 aa, Setaria italica
  Transcript Sequence Number=SeqID_21473
  Gene Ontology: Mol. function=substrate-specific transmembrane transporter activity; Cellular component=integral to membrane; Biological process=transmembrane transport
  Homolog annotation: Hit_ID=B6TMZ9; Match level="QueryCoverage=100%, HitCoverage=32%, E-value=3e-83, Identity=90%"; Hit description=Sugar carrier protein A
LISGGIQMIVCQVIVAVILGVKFGADKQLSRSYSIAVVVVICLFVLAFGWSWGPLGWTVPSEIFPLETRSAGQSITVAVNLLFTFAIAQAFLSLLCAFKFGIFLFFAGWITVMTVFVYVFLPETKGVPIEEMVLLWRKHWFWKKVMPDMPLEDGWGAAGGHAANNSHK

SEQ ID NO: 87448 - protein, 127 aa, Setaria italica
  Transcript Sequence Number=SeqID_21474
  Homolog annotation: Hit_ID=Q6YSC2; Match level="QueryCoverage=100%, HitCoverage=24%, E-value=4e-37, Identity=60%"; Hit description =Putative storekeeper protein
  Pfam annotation: Domain name=DUF573; Domain location=35-127; Score =33.2; E_value=1.7e-07; Accession=PF04504.6; Description=Protein of unknown function, DUF573
TRPMEAPRRAPAGSSQRRSKRRHSSPGRASPEHQKRPPRVWSPEDEITILSALVEYRAKKGQLPASIQDTGKVHSQISGQLTANASTTQLSDKVRRLKHKYKLLFTRARNGRDPDLPTQHERDVYEL

SEQ ID NO: 87449 - protein, 111 aa, Setaria italica
  Transcript Sequence Number=SeqID_21475
  Homolog annotation: Hit_ID=Q6YSC2; Match level="QueryCoverage=83%, HitCoverage=17%, E-value=4e-34, Identity=77%"; Hit description =Putative storekeeper protein
GQFKNLKNGNGNALAAVGRASHGNGSGRDDAEKGKQMYPYLWEAVAELSKEHPSGPIFRKAFGVLEKSKAQAMEEKLRKFRIMSEIRQQLHRMDLMKETMQMVLDALEGSY

SEQ ID NO: 87450 - protein, 216 aa, Setaria italica
  misc_feature (22)..(22): Xaa can be any naturally occurring amino acid
  Transcript Sequence Number=SeqID_21476
  Homolog annotation: Hit_ID=Q6YSC2; Match level="QueryCoverage=99%, HitCoverage=42%, E-value=3e-61, Identity=59%"; Hit description =Putative storekeeper protein
  Pfam annotation: Domain name=DUF573; Domain location=1-60; Score= -30.7; E_value=0.093; Accession=PF04504.6; Description=Protein of unknown function, DUF573
EISGQLTANASTTQLSDKVRRXLKHKYKLLFTRARNGRDPDLPTQHERDVYELSKKVWGFKSGDILGGSHAYEDTGDAESNEEQEIEESDDAMENGWEHHERQGKKPKAFRFENGNGNALAAVGRASHGNGSGRDDAEKGKQMYPYLWEAVAELSKEHPSGPIFRKAFGVLEKSKAQAMEEKLRKFRMSEIRQQLHRMDLMKETMRMVLDALEGSY

SEQ ID NO: 87451 - protein, 269 aa, Setaria italica
  Transcript Sequence Number=SeqID_21477
  Gene Ontology: Mol. function=nucleic acid binding
  Homolog annotation: Hit_ID=Q7F8R0; Match level="QueryCoverage=100%, HitCoverage=92%, E-value=1e-114, Identity=81%"; Hit description=Zinc finger CCCH domain-containing protein 14
  Pfam annotation: Domain name=KH_1; Domain location=142-204; Score =52.0; E_value=2.3e-12; Accession=PF00013.21; Description=KH domain
  Pfam annotation: Domain name=zf-CCCH; Domain location=10-36; Score =21.3; E_value=0.0024; Accession=PF00642.16; Description=Zinc finger C-x8-C-x5-C-x3-H type (and similar)
  Pfam annotation: Domain name=zf-CCCH; Domain location=235-260; Score =40.8; E_value=5.3e-09; Accession=PF00642.16; Description=Zinc finger C-x8-C-x5-C-x3-H type (and similar)
  Pfam annotation: Domain name=zf-CCCH; Domain location=70-96; Score =31.7; E_value=2.9e-06; Accession=PF00642.16; Description=Zinc finger C-x8-C-x5-C-x3-H type (and similar)
  Pfam module annotation: Pfam domain module=KH_1::zf-CCCH::zf-CCCH::zf- CCCH; Domain location=142-204::10-36::235-260::70-96
  Subcellular localization annotation: CTP_CleavageSite=9; ConfidenceScore=5.03e-01
SESFQTGVGSKTKPCTKFFSTSGCPFGEGCHFLHCFPGGYQAVSKITNLGGPAVTPPGRMMMDGPPTPTMKTRLCNKYKTADGCKWGDKCHFAHGERELGKPMLMDSSTHFPMGPGPTGHFAPPPMVNPGMATPASFGASATAKISVDASLAGRIIGRGGVNTKQISRVTGAKLAIRDHESDTKLKNIELEGTFDQIKNASAMVGELIVNISGSAPPPAKNPAGGPHRGGSGSNFKTKMCENFAKGSCTFGDRCHFAHGENELRKPAAA

SEQ ID NO: 87452 - protein, 140 aa, Setaria italica
  Transcript Sequence Number=SeqID_21478
  Homolog annotation: Hit_ID=Q4ABN8; Match level="QueryCoverage=48%, HitCoverage=16%, E-value=3e-21, Identity=70%"; Hit description=80A08_ 29
LLVSELLGKATPDTMEEVHHLTHLEGSHHLEADQNISSGALLQPNKKFKMHAEKSTIQAVPMVGFDAMTRAKSTLEDFCRSYFMFHGLDANNPQSIFKYLPVLSFTESYIYQLDASNEDSLNLIPDNRSSSKGVGKEKGS

SEQ ID NO: 87453 - protein, 185 aa, Setaria italica
  misc_feature (167)..(167): Xaa can be any naturally occurring amino acid
  Transcript Sequence Number=SeqID_21479
  Gene Ontology: Mol. function=DNA binding; Cellular component=nucleus; Biological process=regulation of transcription, DNA-dependent
  Homolog annotation: Hit_ID=B9S7K7; Match level="QueryCoverage=80%, HitCoverage=13%, E-value=2e-59, Identity=67%"; Hit description =Transcription factor, putative
NTIPKKSRRGGMMKKRRRLSETEEINHNQIGMQQNQERFGFEPGPEFTLQMFQKYADAFSDQYFIKDACGDLPPSVEDIEGEYWRIVERPTEEIEVIYGADLETGTFGSGFPKLSPEMKSDVERKYAESGWNLNNLPRLQGSVLSFEGGDISGVLIPWVYVGMCFSXSFCWHVEDHHLYSLNYMH

SEQ ID NO: 87454 - protein, 404 aa, Setaria italica
  Transcript Sequence Number=SeqID_21480
  Gene Ontology: Mol. function=inositol or phosphatidylinositol phosphatase activity
  Homolog annotation: Hit_ID=Q75GX7; Match level="QueryCoverage=98%, HitCoverage=72%, E-value=0.0, Identity=82%"; Hit description =Putative phosphatase (With alternative splicing)
  Pfam annotation: Domain name=Exo_endo_phos; Domain location=96-362; Score=97.0; E_value=6.5e-26; Accession=PF03372.15; Description =EndonucleaseExonucleasephosphatase family
  Subcellular localization annotation: CTP_CleavageSite=56; ConfidenceScore=5.28e-01
VSKNNYNLNNTRINKALVSTITTSPAPDPIVELNVDFERSSRRQRNSSFFHRRSFQSFNRSSRIDMMDPHSLVDRRFSVCDRISFGSRPSDVDTSMRCGGSSDDENIDEESPSGIFFPPMPCGYGAPLCTDSRYCLVASKQMVGIFLMVWVRSDIREHVKNLKVSCVGRGLMGYLGNKGSISISMSLHQTSFCFVCTHLTSGQKDGDQLRRNADVVEILRKTRFPHVHGASDKKSPETILDHDRIIWLGDLNYRIALSYRSVKALVEMHNWKQLLEKDQLRIEQRFGRVFAGWKEGRIYFPPTYKYSYNSDRYAGDDMHPNEKRRTPAWCDRILWYGRGLNQLCYVRGESRFSDHRPVYSIFTAEVQISSQTQFSGITRSASLLGVDELPYPTYPRSYMDINFY

SEQ ID NO: 87455 - protein, 110 aa, Setaria italica
  Transcript Sequence Number=SeqID_21481
REWAVTLEEYVGMAQDFFLLPQVIGNVVWRINCKPLKKSYYAGVTAVRLLPHLYDYIKAPAINPYFAEEYEFVNTSLDFYSRFGDVAIPLVAVALAAAVYVQQRWNYKII

SEQ ID NO: 87456 - protein, 135 aa, Setaria italica
  misc_feature (130)..(130): Xaa can be any naturally occurring amino acid
  Transcript Sequence Number=SeqID_21482
  Gene Ontology: Mol. function=hydrolase activity, acting on ester bonds; Biological process=lipid metabolic process
  Homolog annotation: Hit_ID=B9RLX9; Match level="QueryCoverage=100%, HitCoverage=36%, E-value=1e-38, Identity=54%"; Hit description=Zinc finger protein, putative
NNYLLPVYSDSWTYNGDTFVKHMVSTLEAQLRLLYALGARRLTFFGLGPMGCIPLQRYLTSSGGCQESTNKLAKNFNTQAGALVARLSASLPNATFRFGEAYDYFQDIIDRPYMYGFNHSSSPCCTLGRXRPTLT

SEQ ID NO: 87457 - protein, 86 aa, Setaria italica
  misc_feature (78)..(78): Xaa can be any naturally occurring amino acid
  Transcript Sequence Number=SeqID_21483
  Gene Ontology: Mol. function=nucleic acid binding; Biological process= regulation of transcription, DNA-dependent
  Homolog annotation: Hit_ID=B6SP06; Match level="QueryCoverage=96%, HitCoverage=39%, E-value=6e-26, Identity=78%"; Hit description =Glycine-rich protein 2b
  Pfam annotation: Domain name=CSD; Domain location=5-72; Score=102.1; E_value=1.9e-27; Accession=PF00313.14; Description='Cold-shock' DNA -binding domain
MAAERAKGTVKWFNGTKGFGFISPDDGSQDLFVHQSCVKADGYPNLKDGEAVEYTVGSDHDGRSKALDVTAPGGGSLXGGERPDSG

SEQ ID NO: 87458 - protein, 57 aa, Setaria italica
  Transcript Sequence Number=SeqID_21484
  Gene Ontology: Mol. function=diacylglycerol kinase activity; Biological process=activation of protein kinase C activity
VEIFNFVPAPGYEAYGEPIKQVKNFMVESLEQNGKSHPSSYPGPSVEFQASDWRFVD

SEQ ID NO: 87459 - protein, 253 aa, Setaria italica
  Transcript Sequence Number=SeqID_21485
  Gene Ontology: Mol. function=nucleic acid binding
  Homolog annotation: Hit_ID=B9SSN0; Match level="QueryCoverage=58%, HitCoverage=9%, E-value=5e-23, Identity=44%"; Hit description=ATP -dependent RNA helicase, putative
RLRGVYDKLALEGFSSAQIEQALSAIPDSATFESALDWLCFNLPGDELPLKFSSGGTSTTSSRKLGESSVKVLSTAKDNWVPQSREPEEVKVSTEQLEIRIGGRREENVSLDDGRSSQAAWIRQYMEQQEEDDDANSNDSSTWEDHCLESFEVVEAKPNRRKSKAAKKNSKHGSSKEHITHSAHPVSSNSETANIEGGQNDLGVAENKSDSLGNDEGPDLKKGIPNDVVETCTKEIDEEEIELGGIVFEDSSA

SEQ ID NO: 87460 - protein, 115 aa, Setaria italica
  Transcript Sequence Number=SeqID_21486
  Gene Ontology: Mol. function=protein serine/threonine kinase activity; Biological process=protein amino acid phosphorylation
  Homolog annotation: Hit_ID=Q5KQI5; Match level="QueryCoverage=100%, HitCoverage=11%, E-value=4e-45, Identity=78%"; Hit description =Unkown protein
  Pfam annotation: Domain name=LRRNT_2; Domain location=29-69; Score =35.3; E_value=2.4e-07; Accession=PF08263.4; Description=Leucine rich repeat N-terminal domain
MAKFGGVFSAVILVVLLPCLDVALGQSTDTSEVNALRAIKGRLVDPMNNLKNWNRGDPCRSNWTGVFCHKVNDDTYLHVTELQLFNRNLSGSLAPEVSLLSRLKTLDFMWNNLTG

SEQ ID NO: 87461 - protein, 512 aa, Setaria italica
  Transcript Sequence Number=SeqID_21487
  Gene Ontology: Mol. function=electron carrier activity; Cellular component=integral to membrane; Biological process=oxidation reduction
  Homolog annotation: Hit_ID=O48956; Match level="QueryCoverage=91%, HitCoverage=91%, E-value=0.0, Identity=95%"; Hit description =Cytochrome P450 98A1
  Pfam annotation: Domain name=p450; Domain location=32-486; Score =394.0; E_value=2.6e-115; Accession=PF00067.14; Description =Cytochrome P450
MDASLLLSVGLAAVLIPLSLALLNRLRVGRLPPGPRPWPVLGNLRQIKPIRCRCFQEWAERYGPIISVWFGSGLTVVVSTSELAKEVLKEKDQQLADRPRNRSTQRFSRNGQDLIWADYGPHYIKVRKLCNLELFTPKRLEALRPIREDEVTAMVESVHRDATAPGNEGKPVVVRNHLSMVAFNNITRLAFGKRFMNANGEVDEQGREFKTIVHNGIKIGASLSVAEFIWYLRWLCPLNEELYKTHNERRDRLTMKIIEEHAKALKESGAKQHFVDALFTLKEQYDLSEDTVIGLLWDMITAGMDTTVISVEWAMAELVRNPRVQKKLQEELDRVVGRDRVMLETDFQSLPYLQAVVKESLRLHPPTPLMLPHKASTSVKIGGYDIPKGTNVMVNVWAVARDPKVWSNPLEYRPERFMEESIDIKGSDFRVLPFGAGRRVCPGAQLGINLVASMIGHLLHHFEWSLPEGTRPEDVDMMESPGLVTFMGTPLQAVARPRLENEELYKRVPVEM

SEQ ID NO: 87462 - protein, 63 aa, Setaria italica
  Transcript Sequence Number=SeqID_21488
PIPFLIRERALASDKLAGSTSRRHQSFLEYANAQSVAPTICLMHYKNMLNYQSSGMNGLLRAK

SEQ ID NO: 87463 - protein, 134 aa, Setaria italica
  Transcript Sequence Number=SeqID_21489
  Gene Ontology: Mol. function=aspartic-type endopeptidase activity; Biological process=xylan catabolic process
  Homolog annotation: Hit_ID=Q8S1V1; Match level="QueryCoverage=82%, HitCoverage=25%, E-value=1e-37, Identity=67%"; Hit description =Putative xylanase inhibitor
  Subcellular localization annotation: CTP_CleavageSite=20; ConfidenceScore=5.00e-01
MALLLAVSLCLAASLSPCTLAAAAQGGKRPLVTAITKDPATSLYTSPLKDSRPLVLDLSGPLIWSTCDRAHPTLQCHHHDCAHAHSYHPPGCPHTGYGKADEEDRFRCKCTAHPYNPVAGRSATGDLTRTKLSA

SEQ ID NO: 87464 - protein, 188 aa, Setaria italica
  misc_feature (181)..(181): Xaa can be any naturally occurring amino acid
  Transcript Sequence Number=SeqID_21490
  Gene Ontology: Cellular component=integral to membrane; Biological process=transport
  Homolog annotation: Hit_ID=B6U001; Match level="QueryCoverage=100%, HitCoverage=53%, E-value=6e-89, Identity=86%"; Hit description =Solute carrier family 35, member F1
  Pfam annotation: Domain name=DUF914; Domain location=1-186; Score =176.6; E_value=6.9e-50; Accession=PF06027.4; Description=Eukaryotic protein of unknown function (DUF914)
CWSIPCVIVLTWIFLKTKYGLRKFVGVGVCVAGLVLVVFSDVHASDRAKGDNPLKGDLLVIGGSMLYAVSNVTEEYFVKKSSRVEVMAMLGVFGAIISGIQISILERHELRSTHWNAGAILPFIGFALAMFLFYSAVPIILKICGATMLNLSLLTSDMWAVLIRIFAYHEKVDWMYFVAFXAGTAAGL

SEQ ID NO: 87465 - protein, 191 aa, Setaria italica
  Transcript Sequence Number=SeqID_21491
  Gene Ontology: Mol. function=substrate-specific transmembrane transporter activity; Cellular component=integral to membrane; Biological process=transmembrane transport
  Homolog annotation: Hit_ID=B6TEX4; Match level="QueryCoverage=99%, HitCoverage=36%, E-value=4e-94, Identity=90%"; Hit description=Sugar transport protein 5
GALMGAVILGAVNLGSTLVSTVTVDRYGRRPLFLTGGFFMIICQVAVAWIMGSQIGGDGGSVMARPYSLAVLALTCVFSASFGWSWGPLTWVIPGEIFPVEIRSAGQGISVAVNLGATFLLTQTFLSMLCALKYATFIYYAAWVAVMTTFVVAFLPETKGVPLEGMGAVWERHWYWGRFVQPPVKVADEEP

SEQ ID NO: 87466 - protein, 157 aa, Setaria italica
  Transcript Sequence Number=SeqID_21492
  Gene Ontology: Mol. function=oxidoreductase activity; Biological process=oxidation reduction
  Homolog annotation: Hit_ID=B6SIR9; Match level="QueryCoverage=100%, HitCoverage=50%, E-value=2e-63, Identity=76%"; Hit description=1 -aminocyclopropane-1-carboxylate oxidase
MAIPVIDFSKLNGPERAETMAAIATGFEDVGFFQLVNTGIPDELLERVKKVCSDCYKLREQGFKESNPAVKALAELVEKEGEGLAPKKIENMDWEDVFTLHDDLPWPSNPPAFKETMMEYRKELKKLAEKMLGVMEELLGLEEGHIKKAFSNDGDFE

SEQ ID NO: 87467 - protein, 163 aa, Setaria italica
  Transcript Sequence Number=SeqID_21493
RSLFHWNLIICLDHRISAHAHSKHTQVDTTRLEHHSLDTRLGYVSWLSCSISTEDDLGRQSCSSVILSSSSKAHSSRSWLCCTMAVVDTCARTATTGVRIAGLVRVQRRIVGNVWVHRPAADNPSCCLGWGSVHAGDDKEGHQEHRHAKRPLLHLTSPFSLLT

SEQ ID NO: 87468 - protein, 114 aa, Setaria italica
  misc_feature (37)..(37): Xaa can be any naturally occurring amino acid
  Transcript Sequence Number=SeqID_21494
  Gene Ontology: Mol. function=binding
  Homolog annotation: Hit_ID=Q10D20; Match level="QueryCoverage=99%, HitCoverage=3%, E-value=2e-43, Identity=75%"; Hit description=WD-40 repeat family protein, putative, expressed
LGYGGGPCSAGATAVLDFVAQILADIISEQFKAALFXIRAFLESVPLFVDIESALVFQGLCLSRLMNFLERKLLLDDEEDGKKLDKSRWSANLDPLCWMIVDRVYMGCFPTPLR

SEQ ID NO: 87469 - protein, 247 aa, Setaria italica
  misc_feature (15)..(15): Xaa can be any naturally occurring amino acid
  Transcript Sequence Number=SeqID_21495
  Gene Ontology: Mol. function=aspartic-type endopeptidase activity; Biological process=proteolysis
  Homolog annotation: Hit_ID=B6TNN1; Match level="QueryCoverage=100%, HitCoverage=52%, E-value=2e-77, Identity=64%"; Hit description =Aspartic proteinase nepenthesin-2
  Pfam annotation: Domain name=Asp; Domain location=1-246; Score= -187.5; E_value=0.018; Accession=PF00026.15; Description=Eukaryotic aspartyl protease
GTYSSDTLTLGPNVXPGFQFGCSRAGSGFEVEKTAGLMGLGGGAQSLVAQTAATFGPAFSYCLPTPQASSGFLTLGAPSGGGGNFTTTRMFRSREVPTFYIVFLEEIRVGGTRVNVAPTVFSAGSVMDSGTIITRLPPRAYSAMRSAFRAGMLQYPRAKPLEILDTCYDFGNLTRVTVPAVELVFDGGAVVDLDVHGIMIFDCLAFAPSDDGGASSVPSIIGNVQQRTFEVLHDVGRGTIGFRAGAC

SEQ ID NO: 87470 - protein, 64 aa, Setaria italica
  Transcript Sequence Number=SeqID_21496
  Subcellular localization annotation: CTP_CleavageSite=51; ConfidenceScore=5.50e-01
SLEQVPAPPHRIQIFRAQRVNNTTPTTNLTISSVIACLRALSSALTFSSCPKKMAESFVLNTGA

SEQ ID NO: 87471 - protein, 79 aa, Setaria italica
  Transcript Sequence Number=SeqID_21497
  Gene Ontology: Mol. function=electron carrier activity; Cellular component=extracellular region; Biological process=response to oxidative stress
  Homolog annotation: Hit_ID=B6UBB5; Match level="QueryCoverage=100%, HitCoverage=23%, E-value=2e-34, Identity=91%"; Hit description =Peroxidase 51
  Pfam annotation: Domain name=peroxidase; Domain location=1-79; Score=- 79.7; E_value=0.00094; Accession=PF00141.15; Description=Peroxidase
VRSAKAAVEAACPDTVSCADVLALATRDAIAMSGGPSFPIELGRLDGLSSNASSVPGQLPEPNQTMDQLLAVFKAHGLN

SEQ ID NO: 87472 - protein, 126 aa, Setaria italica
  misc_feature (36)..(36): Xaa can be any naturally occurring amino acid
  Transcript Sequence Number=SeqID_21498
  Gene Ontology: Mol. function=RNA-directed DNA polymerase activity; Biological process=RNA-dependent DNA replication
  Homolog annotation: Hit_ID=Q7XBD9; Match level="QueryCoverage=96%, HitCoverage=6%, E-value=3e-46, Identity=62%"; Hit description =Putative gag-pol
FCFGFYWPTAITDAKDLVQRCKGCQFFFKQQHLPAXALHTIPLSWPFACWGLDMVGPFKTAPGGYTHIFMVVDKFTKWIEVKVITSIELAKAAQFIEELTHRFVVSNRIITDLGKQFIGSEFWDFC

SEQ ID NO: 87473 - protein, 180 aa, Setaria italica
  Transcript Sequence Number=SeqID_21499
DFMAFLETEPAPPEQGGEEEEDQQHPGVNQGCLEMAANTNGSEDLFQSHEEMLENVEYWSNYSHVDPSECQMEANMELNGGEQKFDHSEASRYGLFINDLQNQPGTYNLDNQHFPRDASNHANFEEATVHPHDGLSNGSYLEQQTICSDQIELQVENNTEGMETQMNTYFQVVYPESSQL

SEQ ID NO: 87474 - protein, 68 aa, Setaria italica
  Transcript Sequence Number=SeqID_21500
  Gene Ontology: Biological process=vesicle-mediated transport
  Homolog annotation: Hit_ID=Q9M7N1; Match level="QueryCoverage=55%, HitCoverage=66%, E-value=1e-13, Identity=94%"; Hit description=MFP1 attachment factor 1 (Fragment)
  Subcellular localization annotation: CTP_CleavageSite=37; ConfidenceScore=5.22e-01
MATDELAAAPAPAPSAPGDQSAAAFSFSIWPPTQRTRDAVVRRLVETLAGDTILCKRYGAVPAADRRR

SEQ ID NO: 87475 - protein, 183 aa, Setaria italica
  Transcript Sequence Number=SeqID_21501
  Gene Ontology: Cellular component=cell wall
  Homolog annotation: Hit_ID=B6TQI8; Match level="QueryCoverage=87%, HitCoverage=85%, E-value=4e-67, Identity=83%"; Hit description =Dirigent-like protein pDIR9
  Pfam annotation: Domain name=Dirigent; Domain location=12-183; Score =216.2; E_value=8.3e-62; Accession=PF03018.6; Description=Dirigent -like protein
MAKKAVALLLFLVLVVAAEAHHPEAHDGGRHKDAAAAPTHLHFYFHDTVSGKSPTAVRVLDPPSSSSPMTMFGMVNVMDDPLTEGPEQESNPVGRAQGLYMGSDQAKLGFLQAMNLVFTSGDFNGSTLALLGRNCPLDAVRELPVVGGTGAFRFARGYAQLRTHWLDFRTGDATVEYDVYVMH

SEQ ID NO: 87476 - protein, 135 aa, Setaria italica
  Transcript Sequence Number=SeqID_21502
SNSNTPLQSVSPATDLFLAKIDDEDDGGYDMDYDGGRDSCSWFGTSDRSALEARSSGASRRSAGKNTALIRRLWRSAIAESRNKTGGGWSPSSNRRSSATAEAPPAAPPQQSLREKLMEARMDDHKPVHALVKHN

SEQ ID NO: 87477 - protein, 97 aa, Setaria italica
  Transcript Sequence Number=SeqID_21503
  Subcellular localization annotation: CTP_CleavageSite=52; ConfidenceScore=5.76e-01
PPPPPPPGPGPRPSSSSPRRRRTAARTPPRLRRAPRPQQPPPQRTSRPAAVAASNNGALINGARAGRWLRHPWTQIKIAYLYISCPEIGRSERKEEG

SEQ ID NO: 87478 - protein, 112 aa, Setaria italica
  Transcript Sequence Number=SeqID_21504
  Gene Ontology: Mol. function=transferase activity; Biological process= response to stress
  Homolog annotation: Hit_ID=B6U3T3; Match level="QueryCoverage=97%, HitCoverage=46%, E-value=3e-40, Identity=72%"; Hit description =Glutathione S-transferase
DDEHKKAFVKEAKENLALLEAQLKGRRFFGGDAVGFLDIAACALARWVGVMEEVTGVTLLNDEELPAFCRWANDYVNDETVKQCLRSRDDLVAYFSARKEMYMARARATLHK

SEQ ID NO: 87479 - protein, 80 aa, Setaria italica
  Transcript Sequence Number=SeqID_21505
LAQSRKNLFPRTRRRAAYHYIKKKKAEKSVKQSVALKGTVHGETTTSRHLFIYYFGMMNNYIFSRICTLTITVFGKSRVS

SEQ ID NO: 87480 - protein, 51 aa, Setaria italica
  Transcript Sequence Number=SeqID_21506
  Gene Ontology: Cellular component=chloroplast
MGNSLRCCLACMVPCGALDVVRIVHLSGHVDEFSCPVAAASVLAANPNHTL

SEQ ID NO: 87481 - protein, 105 aa, Setaria italica
  Transcript Sequence Number=SeqID_21507
  Subcellular localization annotation: CTP_CleavageSite=22; ConfidenceScore=5.61e-01
FLDSARPPCRNSARAAPRGGPTCMRSPSSSLLRLPRPSRRSSWGRTASPIGQGGLVLPGLDAHPPHRRDKCPFLISYALPLLNHLAQFKTLAVLVISVLHSSACP

SEQ ID NO: 87482 - protein, 146 aa, Setaria italica
  Transcript Sequence Number=SeqID_21508
  Gene Ontology: Mol. function=steroid hormone receptor activity; Cellular component=nucleus; Biological process=regulation of transcription, DNA-dependent
  Homolog annotation: Hit_ID=Q2HU72; Match level="QueryCoverage=96%, HitCoverage=23%, E-value=2e-27, Identity=45%"; Hit description =Steroid nuclear receptor, ligand-binding
RNNTNDVLDMAPGSCFPRFKYQKDEASSHGGSLSRPASFKDKHDGKKAPQRVTSFKSSFDEFNPFKLLDLLFIECKHYGKDLVAEGVITPKDIEGTKAGKVSTGVLNFGLPAYVILKALLRSAKANSDGLVLSDGSEITSDNRPKS

SEQ ID NO: 87483 - protein, 142 aa, Setaria italica
  Transcript Sequence Number=SeqID_21509
FQSLSEDQTKGGLTGLAEKLEPLARACYPDGVGHMTPEELSTMLLRDGCFLLACMVDYADNKLAHSSTSKDRDPAQTVGGDVQDGGSFSGGDNNTVVRDTVFLVENQIPFFVLQKIHERVTGDTTSSALESIADYVRGGAAG

SEQ ID NO: 87484 - protein, 61 aa, Setaria italica
  Transcript Sequence Number=SeqID_21510
ACQGHLLGDHFVIGFCYCWLRCWCDIHRVSFGLGSYIHRVSFGLGSSSYIHRVSSGLGSFI

SEQ ID NO: 87485 - protein, 127 aa, Setaria italica
  Transcript Sequence Number=SeqID_21511
  Gene Ontology: Mol. function=microtubule motor activity; Cellular component=microtubule associated complex; Biological process =microtubule-based movement
  Homolog annotation: Hit_ID=Q2QMU6; Match level="QueryCoverage=70%, HitCoverage=3%, E-value=3e-30, Identity=78%"; Hit description =Kinesin motor domain containing protein, expressed
EELIELRRLIDERNICLQSLQNDFSKLSDEKQFSDTQLLILKEKLEMAQALAEESEAIATESRQIAEEHKAYAEGKDEEVKLLETSIEELENTVCALESKVDIVKEEAERQRMQREELEVELQKVRQ

SEQ ID NO: 87486 - protein, 73 aa, Setaria italica
  Transcript Sequence Number=SeqID_21512
  Homolog annotation: Hit_ID=Q6L4A9; Match level="QueryCoverage=89%, HitCoverage=9%, E-value=3e-11, Identity=49%"; Hit description =Putative microtubule-associated protein, identical
MANRPAGRQLRQAIAEAEAELAGICSAMGEPPIHVRQSNQKLQGLREELNAIVPYLEEMRKKKVERWDQFVDV

SEQ ID NO: 87487 - protein, 162 aa, Setaria italica
  Transcript Sequence Number=SeqID_21513
  Homolog annotation: Hit_ID=B9RNU1; Match level="QueryCoverage=58%, HitCoverage=18%, E-value=2e-35, Identity=68%"; Hit description =Transporter, putative
TNVLIEAAPGSPAKAAEGDGPGRSLSPAAWLRMLTRELHWSFVLGVVATYGVSQGLGGGINRVASDYYWKDVQRVQPSVAQVYQGVTSIPWMVKPLWGLFTDVLPVAGYRRRPYFILAGEELGAGLCWFFVKSCQLCLISGTTSEWSCSTRNFKIERYLAEM

SEQ ID NO: 87488 - protein, 65 aa, Setaria italica
  Transcript Sequence Number=SeqID_21514
LTIIISEFCEIQIKFARFQTTKIKFSRSLNVDTRYHDEADHDINNPYPRRPRRDPTRPSNPEGAG

SEQ ID NO: 87489 - protein, 92 aa, Setaria italica
  Transcript Sequence Number=SeqID_21515
  Gene Ontology: Mol. function=calcium ion binding; Cellular component =late endosome membrane; Biological process=protein transport
  Homolog annotation: Hit_ID=Q7X6L7; Match level="QueryCoverage=95%, HitCoverage=13%, E-value=9e-34, Identity=76%"; Hit description =OSJNBa0070C17.4 protein
PATATGGEFDCKCNGGQMYIKSEDTCIAKNMSSFGWLVTALVVSCLAGAGVAGYVFYKYRLRRYMDSEIMAIMAQYMPLDTQHNENQPLRTQ

SEQ ID NO: 87490 - protein, 47 aa, Setaria italica
  Transcript Sequence Number=SeqID_21516
IWLLYLLDLQKKTTMYFLKAKIILLCTLISKFRSQQIFTKGELRLLC

SEQ ID NO: 87491 - protein, 189 aa, Setaria italica
  misc_feature (17)..(17): Xaa can be any naturally occurring amino acid
  Transcript Sequence Number=SeqID_21517
  Gene Ontology: Mol. function=electron carrier activity; Biological process=response to oxidative stress
  Homolog annotation: Hit_ID=Q9LGU0; Match level="QueryCoverage=98%, HitCoverage=57%, E-value=3e-64, Identity=65%"; Hit description=Class III peroxidase 6
  Pfam annotation: Domain name=peroxidase; Domain location=1-153; Score= 81.6; E_value=2.8e-21; Accession=PF00141.15; Description=Peroxidase
  Subcellular localization annotation: CTP_CleavageSite=50; ConfidenceScore=5.21e-01
ARIMGGIRFAMPSGRLXGRVSSASEAIANLPPASFNLTQLVARFASKNLTAADVVTLSGAHSIGRSHCSSFSGRLYPQLDPAMNATLGAALRGRCPAATGRRDRVVDLDFKTPLQLDNQYYRNVQTHEVVFTSDQSLVDRNDTAALVALYAANRKLWSQQFAAAMVKMGSIEVLTGPPGEVRLKCNKVN

SEQ ID NO: 87492 - protein, 472 aa, Setaria italica
  Transcript Sequence Number=SeqID_21518
  Gene Ontology: Mol. function=electron carrier activity; Biological process=oxidation reduction
  Homolog annotation: Hit_ID=Q7XP33; Match level="QueryCoverage=92%, HitCoverage=89%, E-value=5e-98, Identity=49%"; Hit description =B1340F09.15 protein
  Pfam annotation: Domain name=p450; Domain location=9-472; Score=81.5; E_value=3.1e-21; Accession=PF00067.14; Description=Cytochrome P450
MEAAQLFTLGLAIILFLAVFRRRIMHGRAMAKPALIEISDSAAARTAMIDHADAFSNRPLTLFPVALVTGQRRRRSDSISSAQYGPLWRALRCNLTSEALHPSRFDQLAPLQRESIAALVASLSATVAGSNGDVVVRDSVHAAVFGLVARLCFGDLVGDARQLLAMRRVMQEFVRAIGEANVFARSWLTKLVYWRRWRRFLGYRGQQAAFFLPLVSERERRRRSGCCNDGGIRPYVDTLIDLRVPDDDDNDKDDVGRMNIDAGRRALTDDEMVSLLSEFLGASTESAVSCIEWALAHLVTQQEIQKKLRLEITGAHGEGVVSEERLRSLPYLHAVVLESLRLHPPVPFLMRDVHTEGVAVGMDTVPVGGTRVHFLIRDMARDRKDWTDPDEFQPERFLAGGEAEGVGAVPGPKEIRMMPFGAGRRYCPGAGMGMMHVKCFLAALVREFEWADGGGDVDFTELDGFFKVMKTP

SEQ ID NO: 87493 - protein, 312 aa, Setaria italica
  Transcript Sequence Number=SeqID_21519
  Gene Ontology: Cellular component=membrane
  Homolog annotation: Hit_ID=B6TIX8; Match level="QueryCoverage=80%, HitCoverage=67%, E-value=8e-69, Identity=53%"; Hit description =Nodulin-like protein
  Pfam annotation: Domain name=DUF6; Domain location=132-262; Score =43.3; E_value=9.4e-10; Accession=PF00892.12; Description=Integral membrane protein DUF6
  Subcellular localization annotation: CTP_CleavageSite=38; ConfidenceScore=5.46e-01
MSMPLALLLKLFLCALFGNTLSLNMYSVSLKLTSATLVAAAGNAVPAVTLCLALVLRMEVVNLRSSSGIAKVSGAALCLAGVLVMAFYTGPGLSPVKHHHAFAAHAPGSGGHTSTSKAAWIAGTFLMVINNMAYSLTAVWQARILKEFPLNRMLVAVSLCVFSALQSLVVAAVAERDFSRWKLRLDVSLLAIAYTGFVVTGVSYYLQAWIVEMKGPVFFAAWLPLYSVFTMFCSSFFLGEIVHLGSILGGILLIGGLYSVLWGKSRDSMSDGSNSEMNKIDGAQDEQERNKPDAPEEAKSAAAVKKSDGSRK

SEQ ID NO: 87494 - protein, 301 aa, Setaria italica
  Transcript Sequence Number=SeqID_21520
  Homolog annotation: Hit_ID=B6SQA7; Match level="QueryCoverage=83%, HitCoverage=78%, E-value=4e-24, Identity=32%"; Hit description=Plant viral-response family protein
  Pfam annotation: Domain name=DUF716; Domain location=118-264; Score =186.6; E_value=7e-53; Accession=PF04819.4; Description=Family of unknown function (DUF716)
  Subcellular localization annotation: CTP_CleavageSite=32; ConfidenceScore=5.09e-01
MGTFLGHFLPGLAFAILGVWHTLNTVRDYKLRGASGFRSATWFPFPSPLPWLRRLELYLLLSFSVLAIIDQLVDLPILALCLQPDSLEHATIYLHLAVYASVALAADVSGRRDDAAGVGGVVAALAASVFGQELFLLRFHSADHAGLEGHYHWLLQLVVAGSLAATAATAVLPGSFAVAVVRSASVLLQGVWFMAMGFALWVPALVPSGCHGVGVEEEGSSAAMRSAVACATEEAARGATVMANLQFSWALAAVWVVTAYLCLRVDSGCLEYVQLQAPPSGVLAGDGDTPRKIVFPVEEQV

SEQ ID NO: 87495 - protein, 204 aa, Setaria italica
  Transcript Sequence Number=SeqID_21521
  Gene Ontology: Cellular component=plasma membrane
  Homolog annotation: Hit_ID=B6T6N0; Match level="QueryCoverage=84%, HitCoverage=80%, E-value=3e-61, Identity=69%"; Hit description =Membrane protein
  Pfam annotation: Domain name=DUF568; Domain location=108-204; Score =90.6; E_value=5.4e-24; Accession=PF04526.5; Description=Protein of unknown function (DUF568)
  Subcellular localization annotation: CTP_CleavageSite=34; ConfidenceScore=5.62e-01
MAVSGNAHRRSASSAFVSLAVVVLACSSFLTSSVAEAASPCSSHTFTGNGGGRLYASCADLPRLGATLHYNYTAATNTVAVAFRAPTQGEDEGGWVAWGINPSGRAGMVGTNAVVAFRRANGTLAAYPTVLDSYAPSMAPAAPGDLAFPVSGVAAEHDAEGKEMVVYATVVLSGGKGSKFTQVWQRGNAVVNDVPAAHPTTGDN

SEQ ID NO: 87496 - protein, 84 aa, Setaria italica
  Transcript Sequence Number=SeqID_21522
VMNDEVNFLSEYYHSVIPVVFASPFFLIANYFLLPIVVTVLCLMSIILCGNGDVGYAFKSLGRDNYTLQHGVSKIVRCLLAKAL

SEQ ID NO: 87497 - protein, 63 aa, Setaria italica
  Transcript Sequence Number=SeqID_21523
IYSHMRADYIRTDLEQLRTAFPDTPLTLLAHKPATDSVSHTLMNTHTASKLSKSTVAASNLSH

SEQ ID NO: 87498 - protein, 101 aa, Setaria italica
  misc_feature (99)..(99): Xaa can be any naturally occurring amino acid
  Transcript Sequence Number=SeqID_21524
  Gene Ontology: Mol. function=protein binding; Cellular component =integral to membrane
  Homolog annotation: Hit_ID=Q1HTV3; Match level="QueryCoverage=99%, HitCoverage=50%, E-value=2e-25, Identity=50%"; Hit description=Green ripe-like 2
  Pfam annotation: Domain name=DUF778; Domain location=27-101; Score =74.6; E_value=3.6e-19; Accession=PF05608.4; Description=Protein of unknown function (DUF778)
MEDQRSQLGQIDPRRARFPCCIVWTPIPFITWLVPFIGHIGICREDGVILDFAGPNFISVDNFAFGAVARYIQVNCDECYKLLEPEGGATWDGALKEGXQG

SEQ ID NO: 87499 - protein, 173 aa, Setaria italica
  Transcript Sequence Number=SeqID_21525
  Gene Ontology: Cellular component=cell wall
  Homolog annotation: Hit_ID=B6STQ1; Match level="QueryCoverage=100%, HitCoverage=53%, E-value=2e-59, Identity=63%"; Hit description=Phi-1- like phosphate-induced protein
  Pfam annotation: Domain name=Phi_1; Domain location=1-173; Score =222.7; E_value=9.6e-64; Accession=PF04674.4; Description=Phosphate -induced protein 1 conserved region
NSLTLAQIEELAARAGGKKGGIALVFTDKDVAVEGFCSSRCGKHGADTKSAYIWVGNSVKQCPGQCAWPFAQPQYGPQGKPLVAPNGDVGMDGLVMVLATMVAGTVTNPYGDAFYQGPKEAPLEACTACPGVYGSGAYPGFPGNLLVDQTTGASYNANGVNGRKYLLPALYNP

SEQ ID NO: 87500 - protein, 126 aa, Setaria italica
  misc_feature (77)..(77): Xaa can be any naturally occurring amino acid
  misc_feature (85)..(85): Xaa can be any naturally occurring amino acid
  Transcript Sequence Number=SeqID_21526
  Gene Ontology: Mol. function=DNA binding; Cellular component =chromosome; Biological process=nucleosome assembly
  Homolog annotation: Hit_ID=B6SZ05; Match level="QueryCoverage=78%, HitCoverage=49%, E-value=3e-24, Identity=65%"; Hit description =Histone H2A
  Pfam annotation: Domain name=Histone; Domain location=31-96; Score =22.2; E_value=0.00057; Accession=PF00125.16; Description=Core histone H2AH2BH3H4
  Subcellular localization annotation: CTP_CleavageSite=30; ConfidenceScore=5.35e-01
MDVSGAGATGKVKKGAAGRKAGGPRKKSVSRSVKAGLQFPVGRIGRYLKKGRYAQRVGTGAPVYLAAVLEYLAAEVXTFLSAPEXSHVFNLILQRRINLGADSPFASLRDQVLELAGNAARDNKKT

SEQ ID NO: 87501 - protein, 86 aa, Setaria italica
  Transcript Sequence Number=SeqID_21527
  Gene Ontology: Mol. function=DNA binding; Cellular component =chromosome; Biological process=nucleosome assembly
  Homolog annotation: Hit_ID=Q75L11; Match level="QueryCoverage=77%, HitCoverage=42%, E-value=1e-17, Identity=71%"; Hit description =Probable histone H2A.6
  Pfam annotation: Domain name=Histone; Domain location=27-86; Score =51.2; E_value=4e-12; Accession=PF00125.16; Description=Core histone H2AH2BH3H4
  Subcellular localization annotation: CTP_CleavageSite=26; ConfidenceScore=5.12e-01
MDGGAAKVKKAAVGRKLGGPKKKPVSRSVKAGLQFPVGRIGRYLKKGRYAQRVGSGAPVYLAAVLEYLAAEVLELAGNAARDNKKN

SEQ ID NO: 87502 - protein, 87 aa, Setaria italica
  Transcript Sequence Number=SeqID_21528
  Gene Ontology: Mol. function=DNA binding; Cellular component =chromosome; Biological process=nucleosome assembly
  Homolog annotation: Hit_ID=Q677E4; Match level="QueryCoverage=66%, HitCoverage=38%, E-value=2e-12, Identity=67%"; Hit description =Histone H2A
  Pfam annotation: Domain name=Histone; Domain location=31-86; Score =39.6; E_value=1.2e-08; Accession=PF00125.16; Description=Core histone H2AH2BH3H4
  Subcellular localization annotation: CTP_CleavageSite=30; ConfidenceScore=5.31e-01
MDATGTGAGGKVKKGAAGRKAGGPRKKSVSRSVKAGLQFPVGRIGRYLKKGRYAQRVGTGAPVYLAAVLEYLAAEVLELAGNAARAT

SEQ ID NO: 87503 - protein, 153 aa, Setaria italica
  Transcript Sequence Number=SeqID_21529
  Gene Ontology: Mol. function=DNA binding; Cellular component =chromosome; Biological process=nucleosome assembly
  Homolog annotation: Hit_ID=Q677E4; Match level="QueryCoverage=67%, HitCoverage=67%, E-value=1e-38, Identity=79%"; Hit description =Histone H2A
  Pfam annotation: Domain name=CBFD_NFYB_HMF; Domain location=35-99; Score=14.4; E_value=0.0083; Accession=PF00808.15; Description =Histone-like transcription factor (CBFNF-Y) and archaeal histone
  Pfam annotation: Domain name=Histone; Domain location=29-102; Score =104.3; E_value=4.2e-28; Accession=PF00125.16; Description=Core histone H2AH2BH3H4
  Pfam module annotation: Pfam domain module=CBFD_NFYB_HMF::Histone; Domain location=35-99::29-102
  Subcellular localization annotation: CTP_CleavageSite=28; ConfidenceScore=5.35e-01
MDASGATGKVKKGAAGRKAGGPRKKSVSRSVKAGLQFPVGRIGRYLKKGRYAQRVGTGAPVYLAAVLEYLAAEVLELAGNAARDNKKTRIIPRHVLLAIRNDEELGKLLAGVTIAHGGVLPNINPVLLPKKAAEKAASGGAKEAKSPKKAAKS

SEQ ID NO: 87504 - protein, 148 aa, Setaria italica
  Transcript Sequence Number=SeqID_21530
  Gene Ontology: Mol. function=solute:hydrogen antiporter activity; Cellular component=integral to membrane; Biological process =regulation of pH
  Homolog annotation: Hit_ID=B9HXD0; Match level="QueryCoverage=52%, HitCoverage=10%, E-value=5e-12, Identity=46%"; Hit description =Cation proton exchanger (Fragment)
PSRRLQSGSGEEEAADEAAVEAFKAKVGAAKDGSVRFEEPEAYTREQVLETIESLSGFNVFVVGRMPPTAPLVERPDELGPVGSYLVSPEFRTSASVLVIKRYDPATNPKSKRFDPKARPPVATEEDVLDEEVGMGSAVVMPVTQSPM

SEQ ID NO: 87505 - protein, 399 aa, Setaria italica
  misc_feature (190)..(190): Xaa can be any naturally occurring amino acid
  Transcript Sequence Number=SeqID_21531
  Gene Ontology: Mol. function=electron carrier activity; Cellular component=integral to membrane; Biological process=oxidation reduction
  Homolog annotation: Hit_ID=B6UA52; Match level="QueryCoverage=100%, HitCoverage=74%, E-value=1e-138, Identity=62%"; Hit description =Cytochrome P450 CYP71C36
  Pfam annotation: Domain name=p450; Domain location=1-399; Score =168.1; E_value=2.6e-47; Accession=PF00067.14; Description=Cytochrome P450
SSPRAAEAVLRTHDHVFASRPLSLVADVVMYGTTDIGCAPYGDYWRKTRKLITTHLLTVKRVQLLRHAREEEVSTAMAQIGEAAAAGAAVDVGDLLGAFTNELACRAVMGKSSRNEDRSKLFRQLIVDTSPLLGGFHAEEFFPFLARFGVLSKLVRAKSERLRRRWDELLDRLIDDHERKSTTNRCQQRXSKNEDDDFIHVLLSVRQEYGLTRENMKAILLDVFFGGIDTAASVLEYTVIELIQRPQVMRRLQAEVRSIVPSGQDIVSEADLNSMAYLRAVIKESLRLRPVTPLLAPHFSMASCNIDGMVVPAGVRVLINVWAIGRDPRFWQDAEEFIPERFLDGGSAAGVSFKGNDFQFLPFSAGRRQCPGMNFGMAAVEVMLANLVHRFDWEMPPGK

SEQ ID NO: 87506 - protein, 51 aa, Setaria italica
  Transcript Sequence Number=SeqID_21532
  Homolog annotation: Hit_ID=B6SXL6; Match level="QueryCoverage=100%, HitCoverage=13%, E-value=9e-15, Identity=86%"; Hit description =Senescence-induced receptor-like serine/threonine-protein kinase
RIAVECAAAQPGLRPAMAQVRASIAEKAARSIAKADHGDHHIQLSKLLELT

SEQ ID NO: 87507 - protein, 118 aa, Setaria italica
  Transcript Sequence Number=SeqID_21533
  Gene Ontology: Mol. function=protein tyrosine kinase activity; Cellular component=plasma membrane; Biological process=protein amino acid phosphorylation
  Homolog annotation: Hit_ID=Q10MS0; Match level="QueryCoverage=100%, HitCoverage=14%, E-value=4e-56, Identity=88%"; Hit description =Leucine Rich Repeat family protein, expressed
  Pfam annotation: Domain name=Pkinase_Tyr; Domain location=1-118; Score=-140.4; E_value=0.00022; Accession=PF07714.9; Description =Protein tyrosine kinase
KATMEDGSYVAVKRLREKIAKSQKEFEAEVNALGKIRHPNLLALRAYYLGPKGEKLLVFDYMPKGNLNSLLHARAPDSSPVDWPTRMNIAMGVARGLHHLHTDANMVHGNLTSNNILL

SEQ ID NO: 87508 - protein, 83 aa, Setaria italica
  Transcript Sequence Number=SeqID_21534
CMGSCSSDRQPQDYHDVLLPLNAVAFAGVAACASAADASKKYMAAVMLLMREGSSRCTALVSGRRWSSHCLAFRIFSAVGSKN

SEQ ID NO: 87509 - protein, 54 aa, Setaria italica
  Transcript Sequence Number=SeqID_21535
RKVCTAESPIRQIPEGLWFCLIQHVGPGGFGPHMPVTAHASSSEVEPDDPPTAP

SEQ ID NO: 87510 - protein, 136 aa, Setaria italica
  Transcript Sequence Number=SeqID_21536
  Gene Ontology: Mol. function=metal ion binding
  Homolog annotation: Hit_ID=B6SPK3; Match level="QueryCoverage=63%, HitCoverage=17%, E-value=9e-14, Identity=53%"; Hit description=Zinc ion binding protein
RKVNKTQQIILRKGTSNHSRPAEETSWNEPSSSPVVTDLLSEFNNEDIDRAIALSLLEEEQRKAKTIDKDTHLEDDELLARAIQESLNVESPPCRNGSASGGNTYHPPREPGAANGGSTYQPPRENGTAKLVGLIV

SEQ ID NO: 87511 - protein, 146 aa, Setaria italica
  Transcript Sequence Number=SeqID_21537
  Subcellular localization annotation: CTP_CleavageSite=48; ConfidenceScore=5.64e-01
GQGTRGKVKSRRRQQHPSTPPRTNPNASSSLVRPSAPLYLLLYTCAPSSSSSSSCSAPPPGSLPLQLVGQIQIVPTDGGKKGEVPGSGPPSSPRKGDRARRRRSQPEISDPPSSTTHPSAVVITPLHRTRGGAPSRGGKVNPCIPR

SEQ ID NO: 87512 - protein, 38 aa, Setaria italica
  Transcript Sequence Number=SeqID_21538
LRVDHAVRHEVRGSLAVPVIDSSGPSDSCCAVLEVVMT

SEQ ID NO: 87513 - protein, 130 aa, Setaria italica
  Transcript Sequence Number=SeqID_21539
  Gene Ontology: Mol. function=protein disulfide oxidoreductase activity; Cellular component=cytoplasm; Biological process=electron transport chain
  Homolog annotation: Hit_ID=B6THA1; Match level="QueryCoverage=81%, HitCoverage=80%, E-value=2e-51, Identity=90%"; Hit description=Grx _C2.2-glutaredoxin subgroup I
  Pfam annotation: Domain name=Glutaredoxin; Domain location=30-92; Score=111.1; E_value=3.7e-30; Accession=PF00462.16; Description =Glutaredoxin
  Subcellular localization annotation: CTP_CleavageSite=14; ConfidenceScore=5.10e-01
MGIASSSSSSPESRAMALTKAKEIVASAPVVVFSKSYCPFCVRVKQLFEKLGATFKAIELDVESDGSELQDALKEWTGQRTVPNVFISGKHIGGCDDTMALNNDGKLVPLLTEAGAIAGSTSKKTTTTTA

SEQ ID NO: 87514 - protein, 419 aa, Setaria italica
  Transcript Sequence Number=SeqID_21540
  Gene Ontology: Mol. function=metal ion binding
  Homolog annotation: Hit_ID=B6TJ47; Match level="QueryCoverage=92%, HitCoverage=86%, E-value=1e-158, Identity=76%"; Hit description =Ankyrin repeat domain-containing protein 28
  Pfam annotation: Domain name=Ank; Domain location=10-42; Score=30.5; E_value=6.8e-06; Accession=PF00023.22; Description=Ankyrin repeat
  Pfam annotation: Domain name=Ank; Domain location=122-154; Score =36.3; E_value=1.2e-07; Accession=PF00023.22; Description=Ankyrin repeat
  Pfam annotation: Domain name=Ank; Domain location=159-191; Score =31.1; E_value=4.5e-06; Accession=PF00023.22; Description=Ankyrin repeat
  Pfam annotation: Domain name=Ank; Domain location=43-75; Score=33.8; E_value=6.9e-07; Accession=PF00023.22; Description=Ankyrin repeat
  Pfam annotation: Domain name=Ank; Domain location=77-108; Score=8.4; E_value=2.2; Accession=PF00023.22; Description=Ankyrin repeat
  Pfam annotation: Domain name=zf-C3HC4; Domain location=288-336; Score= 6.1; E_value=0.021; Accession=PF00097.17; Description=Zinc finger, C3HC4 type (RING finger)
  Pfam module annotation: Pfam domain module=Ank::Ank::Ank::Ank::Ank::zf -C3HC4; Domain location=10-42::122-154::159-191::43-75::77-108::288 -336
SLARRATLYDRLSALHIAAANGRIEVLSMILDHGVPPDVVNRHKQTPLMLAAMHGKIDCVLRLLQAGANILMFDSVHARSCLHHAAYFGHVDCLQAILSAAQTTPVADSWGFARFVNVRDDHGATPLHLAARQGRPGCLQMLLENGAIVSALTGSYGFPGSTSLHLAARSGNLDCIRKLLAWGADRLQRDSAGRIPYAVALKRNHEACAALLNPSSAEPMVWPSPLKFISELDPEAKALLEAALMEANREREKKILKGTKYSLPSPSPCAAADVMDDASSEVSDAELCCICFDQACTIEVQDCGHQMCAPCTLALCCHNKPNPTTLTLPSPACPFCRGSISRLLVARTSTSSDPDPEKAVSSPQLARRRSRRSHNLSDGGSSSFKGLSSAMGSFSRIGRGSSRMVDCDSGSLDKPEHDL

SEQ ID NO: 87515 - protein, 41 aa, Setaria italica
  misc_feature (10)..(10): Xaa can be any naturally occurring amino acid
  Transcript Sequence Number=SeqID_21541
KSVFFRKGKXVGDWVNHMSQEMGRKLDCIVEEKLKGTGFVL

SEQ ID NO: 87516 - protein, 320 aa, Setaria italica
  Transcript Sequence Number=SeqID_21542
  Gene Ontology: Mol. function=sulfotransferase activity; Cellular component=cytoplasm
  Homolog annotation: Hit_ID=B6TRN9; Match level="QueryCoverage=100%, HitCoverage=100%, E-value=5e-96, Identity=52%"; Hit description =Flavonol 4-sulfotransferase
  Pfam annotation: Domain name=Sulfotransfer_1; Domain location=59-317; Score=278.7; E_value=1.3e-80; Accession=PF00685.19; Description =Sulfotransferase domain
MAQAMEGSATNSHGTDDPLSKLPTREGWSEPLVLYKNYWLRPRFAATIMRLQNTFEARHDDIVLATNPKCGTTWIKALAFAITNRSRYEFGNHPLLFRHPQEVVPFLEIPRDGDMTYVETLPSPRLLATHMPLSLFPNSLATCGCRIVYVCRDPKDALVSRWHFEKKLHREHSIDFEAAFNMFSEGFSPYGPFWEHCLEYWRESIACPNKILFLKYEDMMSEPVKHVIRLATFLGVPFSIKEEEDGIPEEVVRLCSFDKLSSLDTNQTGDLVRRGNLIVEKSVFFRKGKVGDWVNHMSQEMGRKLDCIVEEKLKGTGLVL

SEQ ID NO: 87517 - protein, 85 aa, Setaria italica
  Transcript Sequence Number=SeqID_21543
  Gene Ontology: Mol. function=methyltransferase activity; Cellular component=nucleus; Biological process=nucleobase, nucleoside, nucleotide and nucleic acid metabolic process
  Homolog annotation: Hit_ID=Q8LFA9; Match level="QueryCoverage=69%, HitCoverage=14%, E-value=4e-13, Identity=52%"; Hit description =Methyltransferase-like protein 2
GSFHAQRTSFPLFNSIISVEAIDEAEGEFQNKRYILPRGSCFLMSDFKRVQDLIPGSSDEGYNLIVVDLVSFLSWAAEPEMEERK

SEQ ID NO: 87518 - protein, 150 aa, Setaria italica
  misc_feature (121)..(121): Xaa can be any naturally occurring amino acid
  Transcript Sequence Number=SeqID_21544
  Gene Ontology: Mol. function=methyltransferase activity; Cellular component=nucleus; Biological process=nucleobase, nucleoside, nucleotide and nucleic acid metabolic process
  Homolog annotation: Hit_ID=Q8LFA9; Match level="QueryCoverage=95%, HitCoverage=37%, E-value=7e-44, Identity=55%"; Hit description =Methyltransferase-like protein 2
  Pfam annotation: Domain name=MT-A70; Domain location=2-150; Score =38.7; E_value=8.6e-09; Accession=PF05063.6; Description=MT-A70
IIHSLCCRYPTLPNRYLLYLPVQELAHTAGALLVLWITNREKLRMFVEKELLPSWGVKDPTVFYWLKVKPDGSLIGDLDLFHHRPYECLLLGYINVNTDAKQELNFKLLEGSQVIMSVPGXLSEYIPGPKPPRCLELFARELFPRWTSWE

SEQ ID NO: 87519 - protein, 352 aa, Setaria italica
  Transcript Sequence Number=SeqID_21545
  Gene Ontology: Mol. function=methyltransferase activity; Cellular component=nucleus; Biological process=nucleobase, nucleoside, nucleotide and nucleic acid metabolic process
  Homolog annotation: Hit_ID=Q8LFA9; Match level="QueryCoverage=92%, HitCoverage=79%, E-value=2e-95, Identity=53%"; Hit description =Methyltransferase-like protein 2
  Pfam annotation: Domain name=MT-A70; Domain location=166-339; Score =140.0; E_value=7.5e-39; Accession=PF05063.6; Description=MT-A70
EQPEKRKKRKRNQKPKPRELNAMERIAEARHQEARTLLLSAHESLIKDKYLLDHLSKMIEGKEHTLDVGSGPENNFIELGTSWRAPFYEITICFRKPLVLGNGEGSFHAQRTSFPLFNSIISVEAIDEAEGEFQNKRYILPRGSCFLMSDFKRVQDLIPGSSDEGYNLIVVDPPWENGCVRQKEAYPTLPNRYLLYLPVQELAHTAGALLVLWITNREKLRMFVEKELLPSWGVKDPTVFYWLKVKPDGSLIGDLDLFHHRPYECLLLGYINVNTDAKQELNFKLLEGSQVIMSVPGAHSRKPPLEKLLSEYIPGPKPPRCLELFARELFPRWTSWGNEPLHFQDSVYFSEK

SEQ ID NO: 87520 - protein, 126 aa, Setaria italica
  misc_feature (117)..(117): Xaa can be any naturally occurring amino acid
  Transcript Sequence Number=SeqID_21546
  Gene Ontology: Mol. function=secondary active sulfate transmembrane transporter activity; Cellular component=integral to membrane; Biological process=sulfate transport
  Homolog annotation: Hit_ID=Q93YY1; Match level="QueryCoverage=100%, HitCoverage=40%, E-value=4e-53, Identity=81%"; Hit description =Sulfate transporter (Fragment)
  Pfam annotation: Domain name=Sulfate_transp; Domain location=1-126; Score=-58.6; E_value=1.6e-07; Accession=PF00916.12; Description =Sulfate transporter family
IVKDIKKGINPPSASLIYFTGPYLATGFRIGAVAGMIGLTEAIAIGRTFAALKDYQIDGNKEMVALGTMNIVGSMTSCYVATGSFSRSAVNYMAGCKTAVSNVVMAIVVMLTLLLIXTPLFKYTPN

SEQ ID NO: 87521 - protein, 198 aa, Setaria italica
  Transcript Sequence Number=SeqID_21547
  Gene Ontology: Mol. function=secondary active sulfate transmembrane transporter activity; Cellular component=integral to membrane; Biological process=sulfate transport
  Homolog annotation: Hit_ID=A7YF68; Match level="QueryCoverage=100%, HitCoverage=30%, E-value=1e-103, Identity=92%"; Hit description =Sulfate transporter
  Pfam annotation: Domain name=Sulfate_transp; Domain location=57-198; Score=-12.7; E_value=6e-10; Accession=PF00916.12; Description =Sulfate transporter family
YAAMGSSRDIAIGPVAVVSLLLGTLLQNEIDPNTHPLEYSRLAFTATFFAGVTQAALGFFRLGFLIEFLSHAAIVGFMAGAAITIALQQLKGFLGIAHFTKKSDIISVMESVWGNVHHGWNWQTILIGASFLAFLLVAKYIGKKNKRFFWVSAIAPLISVIISTFFVYITRADKHGVSIVKDIKKGINPPSASLIYFT

SEQ ID NO: 87522 - protein, 337 aa, Setaria italica
  Transcript Sequence Number=SeqID_21548
  Gene Ontology: Mol. function=secondary active sulfate transmembrane transporter activity; Cellular component=integral to membrane; Biological process=sulfate transport
  Homolog annotation: Hit_ID=A7YF68; Match level="QueryCoverage=100%, HitCoverage=51%, E-value=1e-167, Identity=86%"; Hit description =Sulfate transporter
  Pfam annotation: Domain name=STAS; Domain location=207-325; Score =150.3; E_value=5.8e-42; Accession=PF01740.13; Description=STAS domain
  Pfam annotation: Domain name=Sulfate_transp; Domain location=1-184; Score=149.6; E_value=9.3e-42; Accession=PF00916.12; Description =Sulfate transporter family
  Pfam module annotation: Pfam domain module=STAS::Sulfate_transp; Domain location=207-325::1-184
KVINPPSASLIYFTGPYLATGFRIGAVAGMIGLTEAIAIGRTFAALKDYQIDGNKEMVALGTMNIVGSMTSCYVATGSFSRSAVNYMAGCKTAVSNVVMAIVVMLTLLLITPLFKYTPNAILSSIIISAVLGLIDYESAYLVWKVDKLDFLACLGAFLGVIFSSVEYGLLIAVAISLAKILLQVTRPRTALLGNLPRTTLYRNVEQYPDATKVPGVLIVRVDSAIYFTNSNYVKERILRWLRDEEEQQKDQKLAKIEFLIVELSPVIDIDTSGIHALEELLKALEKRKIQLVLANPGPDVIQKLRAAKFTELIGEDKIFLTVSDAVKKFAPKVVDNV

SEQ ID NO: 87523 - protein, 113 aa, Setaria italica
  Transcript Sequence Number=SeqID_21549
  Gene Ontology: Mol. function=oxidoreductase activity; Cellular component=mitochondrion; Biological process=metabolic process
  Homolog annotation: Hit_ID=UPI0001A7B0FA; Match level="QueryCoverage =99%, HitCoverage=19%, E-value=1e-37, Identity=66%"; Hit description =NDB3; NADH dehydrogenase
  Pfam annotation: Domain name=Pyr_redox; Domain location=5-78; Score =10.9; E_value=0.00055; Accession=PF00070.19; Description=Pyridine nucleotide-disulphide oxidore
YPDVNKYVNISVIEAGGHILTMFDKRITQFAEEKFKRDGIDLKTNFKVVKVDHKDITMTNPATGEVAVPYGMAVWTTGIGTRPIIMDFMKQVGQENRRALATDEWLRVQGCEE

SEQ ID NO: 87524 - protein, 643 aa, Setaria italica
  misc_feature (63)..(63): Xaa can be any naturally occurring amino acid
  Transcript Sequence Number=SeqID_21550
  Gene Ontology: Mol. function=transferase activity, transferring glycosyl groups; Cellular component=integral to membrane; Biological process=cell wall organization and biogenesis
  Homolog annotation: Hit_ID=Q7PC69; Match level="QueryCoverage=100%, HitCoverage=82%, E-value=0.0, Identity=75%"; Hit description =Probable xyloglucan glycosyltransferase 3
  Pfam annotation: Domain name=Glycos_transf_2; Domain location=159 -334; Score=2.5; E_value=0.029; Accession=PF00535.18; Description =Glycosyl transferase
ETVAHLKGWQFPQHLPGNLQELEEQLQHLPEHLQHLPEHLRHLPENLRQLPEHLRVPERREIXEGWLHRAYVAWLEFRVDYIAWAIQKLSTFCILLFMVQSVDRIVQCLACFWIKIRGIKPRIATAAASGKRRGKKKSADVENGDADDAAAGGYFPMVLIQMPMCNEKEVYETSISHVCQMDWPRDRLLIQVLDDSDDEVCQMLIKAEVTKWSQRGVNIIYRHRLSRTGYKAGNLKSAMSCDYVKDYEFVAIFDADFQPNPDFLKLTVPHFKGNPELGLVQARWSFVNKDENLLTRLQNINLCFHFEVEQQVNGVYLNFFGFNGTAGVWRIKALEDSGGWMERTTVEDMDIAVRAHLNGWKFIFLNDVKVLCELPESYEAYRKQQHRWHSGPMQLFRLCLPAVFKSKIPFWKKANLVMLFFLLRKLVLPFYSFTLFCVILPLTMFVPEAELPIWVICYIPVLMSILNILPAPKSFPFVIPYLLFENTMSVTKFNAMVSGLFQLGSSYEWIVTKKAGRTSSASDILALAEETHVPTRPAAKLVRGVSEGGLEEWGKLREHEAAEWTNKEDAAAALAAAPATPKKSSKAKKPNRIFKKELALAFLLLTAATRSLLSAQGLHFYFLLFQGVTFLAVGLDLIGEQVS

SEQ ID NO: 87525 - protein, 56 aa, Setaria italica
  misc_feature (10)..(10): Xaa can be any naturally occurring amino acid
  Transcript Sequence Number=SeqID_21551
  Homolog annotation: Hit_ID=B6SNP7; Match level="QueryCoverage=100%, HitCoverage=18%, E-value=5e-24, Identity=91%"; Hit description=Eyes absent-like protein
CAIGDGHEEXSAAQVMKWPFIKIEFHPDAPHRFPGLDMPTVQTYMDVIYESSSKDG

SEQ ID NO: 87526 - protein, 303 aa, Setaria italica
  Transcript Sequence Number=SeqID_21552
  Gene Ontology: Mol. function=protein tyrosine phosphatase activity; Cellular component=cytoplasm; Biological process=regulation of transcription, DNA-dependent
  Homolog annotation: Hit_ID=B6SNP7; Match level="QueryCoverage=100%, HitCoverage=100%, E-value=1e-158, Identity=91%"; Hit description =Eyes absent-like protein
MDEVVPALATGEASVDAVTEQPLKVYIWDMDETLILLKSLLDGSYAGAFDGVKDREKSVEIGKRWENLILELCDEHFFYEEIENYNEPYLNALSEYDDGRDLTSYDFEADCFSSPYDDVNKKKLAYRHRAIGEKYAKGLEKILDKHMVKVWNDLYNLTDKYTDGWLSSAHKLLEEALGKSAAAPTTNSSSINCIVTSGSLIPSLAKCLLYRLNDVVSSENVYSSWEVGKLQCFKWIKERFDGPNVRFCAIGDGHEECSAAQVMKWPFIKIEFHPDAPHRFPGLDMPTVQTYMDVIYESSSKDG

SEQ ID NO: 87527 - protein, 264 aa, Setaria italica
  misc_feature (10)..(10): Xaa can be any naturally occurring amino acid
  Transcript Sequence Number=SeqID_21553
  Gene Ontology: Mol. function=voltage-gated potassium channel activity; Cellular component=integral to membrane; Biological process=potassium ion transport
  Homolog annotation: Hit_ID=Q7XUW4; Match level="QueryCoverage=98%, HitCoverage=36%, E-value=1e-123, Identity=82%"; Hit description =OSJNBa0027P08.8 protein
  Pfam annotation: Domain name=Ion_trans_2; Domain location=11-89; Score=42.5; E_value=1.7e-09; Accession=PF07885.8; Description=Ion channel
  Pfam annotation: Domain name=cNMP_binding; Domain location=181-263; Score=55.3; E_value=2.3e-13; Accession=PF00027.21; Description =Cyclic nucleotide-binding domain
  Pfam module annotation: Pfam domain module=Ion_trans_2::cNMP_binding; Domain location=11-89::181-263
PLPPAREGGXTWIGSLTLGDTKYINFREIDLLTRYVTSLYFAIVTMATVGYGDIHAVNPREMAFTVMYISFSILLSAYLIGNMTALIVKGSKTERFRDKMADLIRYMNRNKLGADIRSQVKDHLLLQYESSYTKDRVVDDIPVAVRSKMSQALYLDMVSKVHLFKGCSEDFLSQIVVKLHEEFFLPGEVILEQGTVVDQIYIVVHGCLEEVATGEGGSEEIISELLPYDIVGDVAVVCNVPQPYSVRVCELCSVLRIDRHVPDQ

SEQ ID NO: 87528 - protein, 276 aa, Setaria italica
  Transcript Sequence Number=SeqID_21554
  Gene Ontology: Cellular component=integral to peroxisomal membrane; Biological process=peroxisome organization and biogenesis
  Homolog annotation: Hit_ID=B9HJ04; Match level="QueryCoverage=100%, HitCoverage=63%, E-value=1e-97, Identity=60%"; Hit description =Lysine/histidine transporter
  Pfam annotation: Domain name=Aa_trans; Domain location=1-263; Score =91.8; E_value=2.3e-24; Accession=PF01490.10; Description =Transmembrane amino acid transporter protein
  Subcellular localization annotation: CTP_CleavageSite=65; ConfidenceScore=5.08e-01
LLSQLPNLDAITAVSFLAAAMSLSYSTISWAACVARGPVTGVSYAYRDGPAADSAFRVFGALGQVAFAYAGHGVVLEIQATIPSTPTKPSGATMWKGTVAAYMVTAACYFPVAIAGYWAFGRDVGDNVLVALQRPPWLVAAANMMVVIHVVGSYQVYAMPIFESIETILITRFRVPQGLLLRLVARSAYVAFTLFIAVTFPFFGDLLGFLGGFGFTPTSYFLPCILWLKIKKPPRFSASWFANWGCIVVGVLLMLTSTIGGLRSIIQDASTFQFYS

SEQ ID NO: 87529 - protein, 170 aa, Setaria italica
  misc_feature (36)..(36): Xaa can be any naturally occurring amino acid
  Transcript Sequence Number=SeqID_21555
  Gene Ontology: Mol. function=transporter activity; Cellular component= membrane; Biological process=transport
  Homolog annotation: Hit_ID=Q53RB3; Match level="QueryCoverage=98%, HitCoverage=13%, E-value=1e-55, Identity=64%"; Hit description =Natural resistance-associated macrophage protein, putative
MNQKNAMAIHFQEAIQLMNQIFTNPVAPIVLLVILXFSGHLISMTCIIGSDIISENLFGVKLPLFAHHILPKVFAMITTIYHAKVAGSEGLYQLLIICPVIQAMFLPSSVIPVFRVSSSRLLMGRYKISLYVQILALLAFLLTLFTNIIFAAEILFGDSTWTNDLKGNTG

SEQ ID NO: 87530 - protein, 71 aa, Setaria italica
  Transcript Sequence Number=SeqID_21556
  Gene Ontology: Mol. function=electron carrier activity; Biological process=response to oxidative stress
  Homolog annotation: Hit_ID=B6SNF9; Match level="QueryCoverage=100%, HitCoverage=22%, E-value=3e-24, Identity=71%"; Hit description =Peroxidase 52
EAFDNAYYTNLMGKRGLFHSDQELFNGGSQDVLVKKYSGNAGMFAADFAKAMMRMGAISPLTGAQGEVRLN

SEQ ID NO: 87531 - protein, 291 aa, Setaria italica
  Transcript Sequence Number=SeqID_21557
  Gene Ontology: Mol. function=electron carrier activity; Biological process=response to oxidative stress
  Homolog annotation: Hit_ID=B6TSH0; Match level="QueryCoverage=96%, HitCoverage=82%, E-value=1e-100, Identity=64%"; Hit description =Peroxidase
  Pfam annotation: Domain name=peroxidase; Domain location=7-248; Score= 357.1; E_value=3.3e-104; Accession=PF00141.15; Description=Peroxidase
DNKCPGAEGVVRKHVGSFNDGMKAGLIRLFFHDCFAQGCDASILLDPTDANRQPEMLGIPNLSLRGFEVIDAAKAKLEADCPGVVSCADIVAFAGRDASYFLSGSAISFAMPAGRYDGNVSLASKTLPNLPPPFADVPRLKAMFAAKGLDTVDMVALSGAHSIGSSHCSSFPDRLSNTSDMDRTLAAKLKANCTSPTGSDNLVAQDYKTPDQLDNQYYMNVINRRVLFASDAALLKSNETIRLVYEAAFSPKLWQYKFGQAMVKMGAVEVKTAANGEIRKVCGFINNPYSG

SEQ ID NO: 87532 - protein, 169 aa, Setaria italica
  misc_feature (18)..(18): Xaa can be any naturally occurring amino acid
  Transcript Sequence Number=SeqID_21558
  Gene Ontology: Mol. function=oxidoreductase activity; Cellular component=plasma membrane
  Homolog annotation: Hit_ID=B9SMX2; Match level="QueryCoverage=100%, HitCoverage=35%, E-value=8e-37, Identity=48%"; Hit description=Zinc binding dehydrogenase, putative
MVKAVVGDEAHLKAFEEXLSSSSPPPQAQVGLVVGKLSASSDRALVYSLLPTPPTEDAAPACSLRAAPKPKTSKPKATSSSDASLEFDVDWIAEHARQVSRMLLGGMSVVGIYIWASEASFKATSPAVLSQVIRAVSQAWYGRAFTERLLIHISYSPRRWACRVCELAS

SEQ ID NO: 87533 - protein, 104 aa, Setaria italica
  Transcript Sequence Number=SeqID_21559
  Gene Ontology: Mol. function=electron carrier activity; Cellular component=integral to membrane; Biological process=steroid biosynthetic process
  Homolog annotation: Hit_ID=Q2R3E2; Match level="QueryCoverage=100%, HitCoverage=21%, E-value=2e-36, Identity=69%"; Hit description =Cytochrome P450 51, putative, expressed
EAVRGNNLRSYVGQMVSEAEEYFTKWGDSGTVDLKYELEQIILLITSRCLLGREVRENLFNDVATLFRDLCNGMQPVSVIFPYLPIPAHRRRDRARARLGEMFS

SEQ ID NO: 87534 - protein, 130 aa, Setaria italica
  Transcript Sequence Number=SeqID_21560
  Homolog annotation: Hit_ID=C3SAC7; Match level="QueryCoverage=100%, HitCoverage=16%, E-value=2e-17, Identity=41%"; Hit description =Protein kinase
EDKANTPCATNKISGSSNLPTTDKATTVSNALQELMLSEDKDNANFEREKLRIKLGHMQGVCKLVHDESTSASQQMIDLIQKRAQEEARLVEVHSRINTAIEAARKEREQRYAVEAQARHVKELAKEEAL

SEQ ID NO: 87535 - protein, 122 aa, Setaria italica
  Transcript Sequence Number=SeqID_21561
KLECPVQQRLAVLSPMSKYCGVPEASVASTPEKGAILFYDIKRHLKVEGEASAVGLGALPLKPPWRELRRVAMDCGAATNRSGGVERRETKAGARLLDIDEECLPLHCTARRCSAAARPPVL

SEQ ID NO: 87536 - protein, 187 aa, Setaria italica
  Transcript Sequence Number=SeqID_21562
  Homolog annotation: Hit_ID=Q2RA11; Match level="QueryCoverage=98%, HitCoverage=36%, E-value=1e-77, Identity=70%"; Hit description=CBS domain-containing protein, putative, expressed
  Pfam annotation: Domain name=PB1; Domain location=71-155; Score=70.0; E_value=9e-18; Accession=PF00564.16; Description=PB1 domain
QLTHAAISMVEGGPGTANDAANTIMQKFWDSALALEPPDEDFDSHSELSLVMPSEAGDGRSSIYPPAVGNSFAFKLQDQKGRMHRFTCGSESLDELISSVMQRLGIGSEKSTVQLLYEDDEGDKVLLTTDSDLAGAVFNAKSSGLKALRLHIDDSDPNKEVTQPLPELASSHGSQLTHVHYGLMACT

SEQ ID NO: 87537 - protein, 125 aa, Setaria italica
  Transcript Sequence Number=SeqID_21563
VHWWPKTDQLTVKFSNWLRLGGKEAYNYGIFPFIFHGNSHYRIYSETCTFYDYFLVTTNSVMSRVISITMYIHLSKKTNAESLLCRNQIPKVEIHFFSQEFIVFTNCVKPVFLTTFLVTMNLVVI

SEQ ID NO: 87538 - protein, 70 aa, Setaria italica
  Transcript Sequence Number=SeqID_21564
VKRVPTCVTEEGAVWLRAEVESKIVLVGFGLESGLIALEKKTDTYFILSPFQTIVHLSVLRQTSLILTMI

SEQ ID NO: 87539 - protein, 219 aa, Setaria italica
  Transcript Sequence Number=SeqID_21565
  Homolog annotation: Hit_ID=Q9FQZ6; Match level="QueryCoverage=98%, HitCoverage=82%, E-value=4e-17, Identity=35%"; Hit description =Avr9/Cf-9 rapidly elicited protein 146
MAVEPNMARRMWHVVRAVLFMLRKGVSKRKLTMDLHLLLQRGKIAGKALGNLMTAHGHHDKAKAAEAAVPPAQQFSCRALDLASAVYNPRDVREVEFSCSNTPSYPSLHLIPTGKRRRRGNNRRSHRGANGAEPGWYNYDAADIARVFEILNNNEHLLSGVGGDDTGSPGAEQPSPLALIATPSPALWASFGRTPAHVRQLRITDSPFPLRDDAAGDGG

SEQ ID NO: 87540 - protein, 121 aa, Setaria italica
  Transcript Sequence Number=SeqID_21566
PRVFEILNNNEQTDVRTDEHDTGSPGAEQPSPLALIATPSPALWASFGRTPAHVRQLRITDSPFPLRDDAAGDGGEVDMEAEEFIKKFYEQLRTQQSLAAATPDCGYGSYGGYARPVSGIA

SEQ ID NO: 87541 - protein, 135 aa, Setaria italica
  Transcript Sequence Number=SeqID_21567
  Gene Ontology: Cellular component=integral to membrane
  Homolog annotation: Hit_ID=Q5ZA60; Match level="QueryCoverage=99%, HitCoverage=89%, E-value=3e-30, Identity=47%"; Hit description =Embryogenesis transmembrane protein-like
TLLVAMMLDMFALIGAYAAGSCRDLRTSVHVVALAGAVLAYVLVHVLFFTLRATDSDGTVPEKKHKRLLLVAILVATITYQVGLTPPGGFWIEENLRLGRHAGGAVLLDKYPRRFEVFFYCNTVSFMASIALILL

SEQ ID NO: 87542 - protein, 122 aa, Setaria italica
  Transcript Sequence Number=SeqID_21568
  Gene Ontology: Mol. function=alpha-1,6-mannosylglycoprotein 2-beta-N -acetylglucosaminyltransferase activity; Cellular component=integral to membrane; Biological process=oligosaccharide biosynthetic process
  Homolog annotation: Hit_ID=B9SW46; Match level="QueryCoverage=100%, HitCoverage=27%, E-value=3e-54, Identity=78%"; Hit description=Beta -1,2-n-acetylglucosaminyltransferase II, putative
  Pfam annotation: Domain name=MGAT2; Domain location=1-122; Score= -18.8; E_value=1.8e-14; Accession=PF05060.6; Description=N -acetylglucosaminyltransferase II (MGAT2)
LYVHNRPRYLRLVVDSLSRVEGIGEALLIVSHDGYFPEMDKIVQGIDFCQVKQIFAPYSPHLFPDAFPGVTPGDCQSKDKAKEKGCQGDPDQYGNHRSPRIVSLKHHWWWMMNTVWDGLEET

SEQ ID NO: 87543 - protein, 105 aa, Setaria italica
  Transcript Sequence Number=SeqID_21569
  Gene Ontology: Mol. function=transporter activity; Cellular component= membrane; Biological process=oligopeptide transport
  Homolog annotation: Hit_ID=Q94LJ2; Match level="QueryCoverage=98%, HitCoverage=17%, E-value=3e-39, Identity=70%"; Hit description=POT family protein
TETVDINNQPAPKQTTGNWRACFTILGSEFTECMAFFAIGKNLVRFLTSELHETNVDAAKNVSTWIGSCFLTPVIGAFLADTYWGKYKTIVIFLLVYTIGMLILT

SEQ ID NO: 87544 - protein, 87 aa, Setaria italica
  misc_feature (67)..(67): Xaa can be any naturally occurring amino acid
  Transcript Sequence Number=SeqID_21570
  Gene Ontology: Mol. function=zinc ion binding; Cellular component =intracellular
  Homolog annotation: Hit_ID=B6SZG1; Match level="QueryCoverage=79%, HitCoverage=19%, E-value=2e-15, Identity=67%"; Hit description =CONSTANS-like protein CO6
MNLAGTLMLLQGSSSEVGVVPEAFCGGGGGSFELDFTRPKPQAYMPYTATPQSHSVSSVDVEVVPEXGDMAAARPVPLSGGEAGRRG

SEQ ID NO: 87545 - protein, 35 aa, Setaria italica
  Transcript Sequence Number=SeqID_21571
AAAVVYKLYITSVLKASSMQKESTWDYYYYIACFC

SEQ ID NO: 87546 - protein, 128 aa, Setaria italica
  Transcript Sequence Number=SeqID_21572
  Gene Ontology: Mol. function=zinc ion binding; Cellular component =intracellular; Biological process=regulation of transcription, DNA -dependent
  Homolog annotation: Hit_ID=Q8LGM1; Match level="QueryCoverage=100%, HitCoverage=42%, E-value=2e-22, Identity=53%"; Hit description =CONSTANS-like protein CO7 (Fragment)
  Pfam annotation: Domain name=CCT; Domain location=32-76; Score=94.5; E_value=3.8e-25; Accession=PF06203.6; Description=CCT motif
  Pfam annotation: Domain name=CCT_2; Domain location=31-56; Score =12.9; E_value=0.088; Accession=PF09425.2; Description=Divergent CCT motif
  Pfam module annotation: Pfam domain module=CCT::CCT_2; Domain location=32-76::31-56
VSSLNVGAVPERGDGGVMAGRVAVATAAGESREARLMRYREKRKNRRFEKTIRYASRKAYAESRPRVKGRFAKRADDNDADAAAADDFVTSSTAAAPPPPQQQQPAAYPSYVLNFSPAAAGYGVVPTF

SEQ ID NO: 87547 - protein, 201 aa, Setaria italica
  misc_feature (65)..(65): Xaa can be any naturally occurring amino acid
  misc_feature (96)..(96): Xaa can be any naturally occurring amino acid
  misc_feature (115)..(115): Xaa can be any naturally occurring amino acid
  Transcript Sequence Number=SeqID_21573
  Gene Ontology: Mol. function=zinc ion binding; Cellular component =intracellular
  Homolog annotation: Hit_ID=B6SZG1; Match level="QueryCoverage=97%, HitCoverage=49%, E-value=7e-44, Identity=57%"; Hit description =CONSTANS-like protein CO6
IHEANPLARRHVRVPVAPIGSEAAAAAVEAMLFGTAEAAASEADEPHNTTAAAAAGHQHLAPPPXHALNLNVEAKDMKLDYLFSDLDPYLSVEIPXRFQHADSVVPNGVGAGAGXAIELDFTCGIGVKPSSYSSYTATSLAHSGSSSEVGVVPEAFCGGGGGSFELDFTRPKPQAYMPYTATPQSHSVRPQPSSDLPDAHV

SEQ ID NO: 87548 - protein, 206 aa, Setaria italica
  Transcript Sequence Number=SeqID_21574
  Gene Ontology: Mol. function=zinc ion binding; Cellular component =intracellular; Biological process=regulation of transcription, DNA -dependent
  Homolog annotation: Hit_ID=B6SU24; Match level="QueryCoverage=91%, HitCoverage=55%, E-value=3e-58, Identity=65%"; Hit description =CONSTANS-like protein CO5
  Pfam annotation: Domain name=CCT; Domain location=128-172; Score =91.6; E_value=2.7e-24; Accession=PF06203.6; Description=CCT motif
  Pfam annotation: Domain name=CCT_2; Domain location=125-152; Score =16.4; E_value=0.028; Accession=PF09425.2; Description=Divergent CCT motif
  Pfam module annotation: Pfam domain module=CCT::CCT_2; Domain location=128-172::125-152
PPRPPRGPDCTGGGWGRDDDGSNEAEAASWLLPEPDNSHEDSAAATDAFFADSDGYLGVDLDFARSMDGIKAIGVPVAPPELDIAAAGFFYPDHSMNHSVSSSEVAVVPDALAAGGPAVPVVSRGKEREARLMRYREKRKNRRFDKTIRYASRKAYAETRPRIKGRFAKRCSAEAEDEALEHEEGACFSPAVSAPAASDGVVPSFC

SEQ ID NO: 87549 - protein, 323 aa, Setaria italica
  misc_feature (155)..(155): Xaa can be any naturally occurring amino acid
  misc_feature (252)..(252): Xaa can be any naturally occurring amino acid
  Transcript Sequence Number=SeqID_21575
  Gene Ontology: Mol. function=zinc ion binding; Cellular component =intracellular
  Homolog annotation: Hit_ID=B6SZG1; Match level="QueryCoverage=91%, HitCoverage=77%, E-value=2e-89, Identity=62%"; Hit description =CONSTANS-like protein CO6
  Pfam annotation: Domain name=CCT; Domain location=256-300; Score =93.9; E_value=5.7e-25; Accession=PF06203.6; Description=CCT motif
  Pfam annotation: Domain name=CCT_2; Domain location=254-280; Score =13.4; E_value=0.076; Accession=PF09425.2; Description=Divergent CCT motif
  Pfam annotation: Domain name=zf-B_box; Domain location=11-58; Score =53.9; E_value=6.2e-13; Accession=PF00643.16; Description=B-box zinc finger
  Pfam module annotation: Pfam domain module=CCT::CCT_2::zf-B_box; Domain location=256-300::254-280::11-58
ARPGHARLAHERVWMCEVCELAPAAVTCKADAAVLCAACDADIHEANPLARRHVRVPVAPIGSEAAAAAVEAMLFGTAEAAASEADEPHNATAAAAAGHQHQHHHQHHALNLNVEAKDMKLDYLFSDLDPYLSVEIPRFQHADSVVPNGVGAGAXVAIELDFTCGIGVKPSSYSSYTATSLAHSGSSSEVGVVPEAFCGGGGGSFELDFTRPKPQAYMPYTATPQSHSVSSVDVEVVPERGDMAAARPVPLXGRGREARLMRYREKRKNRRFEKTIRYASRKAYAETRPRIKGRFAKRADHDADADDAEAEAAVPSASASWSA

SEQ ID NO: 87550 - protein, 262 aa, Setaria italica
  misc_feature (109)..(109): Xaa can be any naturally occurring amino acid
  misc_feature (179)..(179): Xaa can be any naturally occurring amino acid
  misc_feature (232)..(232): Xaa can be any naturally occurring amino acid
  Transcript Sequence Number=SeqID_21576
  Gene Ontology: Mol. function=zinc ion binding; Cellular component =intracellular; Biological process=regulation of transcription, DNA -dependent
  Homolog annotation: Hit_ID=B6SZG1; Match level="QueryCoverage=100%, HitCoverage=76%, E-value=5e-56, Identity=52%"; Hit description =CONSTANS-like protein CO6
  Pfam annotation: Domain name=CCT; Domain location=184-229; Score =79.4; E_value=1.3e-20; Accession=PF06203.6; Description=CCT motif
EANPLARRHVRVPVAPIGSAAGHQHQHHHQHHALNLNVEAKDMKLDYLFSDLDPYLSVEIPRFQHADSVVPNGVGAGAGGAIELDFTCGIGVKPSSYSSYTATSLAFFXHSGSSSEVGVVPEAFCGGGGGSFELDFTRPKPQAYMPYTATPQSHSVSSVDVEVVPERGGHGGGEAGAAXWGESREARAGWRYREKRKNRRFEKTIRYASRKAYAETRPRIKGRFAKRRPNQXNADDDGTAASASASSASYVLDFGYGVVPSF

SEQ ID NO: 87551 - protein, 175 aa, Setaria italica
  Transcript Sequence Number=SeqID_21577
  Gene Ontology: Mol. function=transferase activity; Biological process= response to stress
  Homolog annotation: Hit_ID=Q7G227; Match level="QueryCoverage=98%, HitCoverage=62%, E-value=1e-58, Identity=61%"; Hit description =Glutathione S-transferase GSTU6, putative, expressed
  Pfam annotation: Domain name=GST_C; Domain location=51-154; Score =29.0; E_value=2e-05; Accession=PF00043.17; Description=Glutathione S- transferase, C-terminal domain
NPVHNKVPVLIHDGKPVCESSVILQYIDEVFAGTGPSLLPADPYEHAIARFWAAYIDDKLLSSFMMMSMGNTEEERAEGRKQAFAAAEILEEALKECSKGRPFFGGDSVGYVDIVLGGFVPWVHLIDRSTGSKQFDAGKTPLLAAWLEHFGSLDAAKAVVPDLERLVAISKMRKA

SEQ ID NO: 87552 - protein, 232 aa, Setaria italica
  Transcript Sequence Number=SeqID_21578
  Gene Ontology: Mol. function=transferase activity
  Homolog annotation: Hit_ID=B6T033; Match level="QueryCoverage=94%, HitCoverage=92%, E-value=1e-105, Identity=83%"; Hit description =Glutathione S-transferase GSTU6
  Pfam annotation: Domain name=GST_C; Domain location=100-203; Score =24.6; E_value=0.00029; Accession=PF00043.17; Description=Glutathione S-transferase, C-terminal domain
  Pfam annotation: Domain name=GST_N; Domain location=5-78; Score=85.3; E_value=2.1e-22; Accession=PF02798.12; Description=Glutathione S -transferase, N-terminal domain
  Pfam module annotation: Pfam domain module=GST_C::GST_N; Domain location=100-203::5-78
MAGGDDLKLLGMWASPFVLRVKLALSLKGLSYEYVEEDLRNKSELLLKSNPVHNKVPVLIHDGKPVCESSVILQYIDEAFAGTGPPLLPADPYERAIARFWAAYIDDKMLAAWTQASRGKTEEDRAEGMKQSLATVETLEGALRDCGKGKPFFGGDNVGYVDVVLGGMLGWVRANEELQGAKPFDPERTPLLAAWADRFWSLEAVEPVMPDVSRLIEFGKARQAAAAAGAGN

SEQ ID NO: 87553 - protein, 58 aa, Setaria italica
  Transcript Sequence Number=SeqID_21579
SNFVLSRSKYPVFLGLVVGLGSLLSVFVWLEHFGSLDAAKAVVPDLERLVAISKMRKA

SEQ ID NO: 87554 - protein, 128 aa, Setaria italica
  misc_feature (9)..(9): Xaa can be any naturally occurring amino acid
  Transcript Sequence Number=SeqID_21580
  Gene Ontology: Mol. function=ribonuclease H activity
  Homolog annotation: Hit_ID=Q94LT0; Match level="QueryCoverage=100%, HitCoverage=44%, E-value=2e-61, Identity=85%"; Hit description =Putative RNase
  Pfam annotation: Domain name=RnaseH; Domain location=13-128; Score =4.1; E_value=0.00013; Accession=PF00075.16; Description=RNase H
GAVDAQPVXKQYMVGILHFDGASKGNPGKAGAGAVLMTEDGRVISRLREGLGVVTNNVAEYRGLILGLKYAIRHGFKRIKVHGDSQLVCNQVNGVWQTKHQNMMELCNEVRRLKENFLSFEINHVRRE

SEQ ID NO: 87555 - protein, 105 aa, Setaria italica
  misc_feature (27)..(27): Xaa can be any naturally occurring amino acid
  misc_feature (48)..(48): Xaa can be any naturally occurring amino acid
  Transcript Sequence Number=SeqID_21581
  Gene Ontology: Mol. function=ribonuclease H activity
  Homolog annotation: Hit_ID=Q94LT0; Match level="QueryCoverage=79%, HitCoverage=28%, E-value=2e-17, Identity=55%"; Hit description =Putative RNase
SGPAASAYKGHAWSREKEEYISSRGLXNASYVINATELREGYIWPLVXCSFQEIVGARSNQPAPNHFGIRNGIAYQTGSQSVDLNHVSIASTQNISNEIHIILCY

SEQ ID NO: 87556 - protein, 260 aa, Setaria italica
  misc_feature (28)..(28): Xaa can be any naturally occurring amino acid
  Transcript Sequence Number=SeqID_21582
  Gene Ontology: Mol. function=ribonuclease H activity
  Homolog annotation: Hit_ID=Q94LT0; Match level="QueryCoverage=98%, HitCoverage=87%, E-value=1e-106, Identity=74%"; Hit description =Putative RNase
  Pfam annotation: Domain name=RnaseH; Domain location=118-247; Score =42.9; E_value=1.3e-09; Accession=PF00075.16; Description=RNase H
YPGPAASAYKGHAWSREKEEYISSRGLXNASYVINATELREDIFGPLVPCSFQEIVGARSNQPAPNHFGIRNGIAYQTGSQSVDLNHEARSSSSRHISPVNFNHSGAVDAQPVSKQYMVGILHFDGASKGNPGKAGAGAVLMTEDGRVISRLREGLGVVTNNVAEYRGLILGLKYAIRHGFKRIKVHGDSQLVCNQVNGVWQTKHQNMMELCNEVRRLKENFLSFEINHVRREWNAEADRQANIGITLANGAVSEERGDF

SEQ ID NO: 87557 - protein, 99 aa, Setaria italica
  Transcript Sequence Number=SeqID_21583
  Gene Ontology: Mol. function=ribonuclease H activity
  Homolog annotation: Hit_ID=Q94LT0; Match level="QueryCoverage=73%, HitCoverage=24%, E-value=2e-16, Identity=56%"; Hit description =Putative RNase
DAWSREKEEYISSRGLSNASYVINATELREDIFGPLVPCSFQEIVGARSNQPAPNHFGIRNGIAYQTGSQSVDLNHVCVMCHSFLGCHLKTVDMRKGRL

SEQ ID NO: 87558 - protein, 96 aa, Setaria italica
  Transcript Sequence Number=SeqID_21584
LTTIIQNDSGSGEPGSESWQFTGNYEWFFRGNKLMLSSGMKKHLRELCGCVPPEIPFYIYQMNKSNLKRRGKMRLSARYISKPLLSCLDKGGLCSF

SEQ ID NO: 87559 - protein, 243 aa, Setaria italica
  Transcript Sequence Number=SeqID_21585
  Gene Ontology: Mol. function=electron carrier activity; Cellular component=extracellular region; Biological process=response to oxidative stress
  Homolog annotation: Hit_ID=Q9SMG8; Match level="QueryCoverage=91%, HitCoverage=67%, E-value=3e-97, Identity=77%"; Hit description =Peroxidase
  Pfam annotation: Domain name=peroxidase; Domain location=44-243; Score=313.9; E_value=3.4e-91; Accession=PF00141.15; Description =Peroxidase
MEHAYSRLLVVFSVLSLCLGNQGVRCQLTSDFYDETCPHLYTIVQQHVFTAMRAEMRMGASLLRLHFHDCFVNGCDGSILLDRSDGEKFAQPNLNSVRGYEVIDAIKADLESLCPEVVSCADIVALAAGYGVLFSGGPYWDVLLGRKDGLVANQSGADNGLPAPFEPIDSIIQKFNAVGLNTTDVVVLSGAHTIGRSRCVLFSNRLSNFSATNSVDPTLDASLADSLQSLCAGGDGNQTTALD

SEQ ID NO: 87560 - protein, 146 aa, Setaria italica
  Transcript Sequence Number=SeqID_21586
  Gene Ontology: Mol. function=electron carrier activity; Cellular component=extracellular region; Biological process=response to oxidative stress
  Homolog annotation: Hit_ID=Q9SMG8; Match level="QueryCoverage=97%, HitCoverage=43%, E-value=3e-45, Identity=65%"; Hit description =Peroxidase
  Pfam annotation: Domain name=peroxidase; Domain location=1-110; Score= -67.6; E_value=0.00011; Accession=PF00141.15; Description=Peroxidase
  Subcellular localization annotation: CTP_CleavageSite=50; ConfidenceScore=5.10e-01
MLSTLVLSGAHTIGRSRCVLFSNRLSNFSATNSVDPTLDASLADSLQSLCAGGDGNQTTALDVSSGDVFDNYYYQNLLANKGLLSSDQGLFSSPQGTANTKDLVRTYSHDEDQFFCDFGWSMIKMGNIPLTGSEGEIRKNCRVVNS

SEQ ID NO: 87561 - protein, 103 aa, Setaria italica
  misc_feature (53)..(53): Xaa can be any naturally occurring amino acid
  Transcript Sequence Number=SeqID_21587
  Subcellular localization annotation: CTP_CleavageSite=52; ConfidenceScore=5.28e-01
RPSLARPSPLRWNLPSAALRTTGPPPLDARAPLPRPPLPSATPPAAGLVPPRXDGHPSSPAPLRPCTLPCRRAPSLPPPPNTPWKPGWHTPHYQPPRRLPPFR

SEQ ID NO: 87562 - protein, 433 aa, Setaria italica
  Transcript Sequence Number=SeqID_21588
  Gene Ontology: Mol. function=protein binding; Cellular component =extracellular region
  Homolog annotation: Hit_ID=B6U0B5; Match level="QueryCoverage=87%, HitCoverage=90%, E-value=0.0, Identity=83%"; Hit description=Leucine- rich repeat, plant specific
  Pfam annotation: Domain name=LRR_1; Domain location=143-164; Score =5.2; E_value=31; Accession=PF00560.25; Description=Leucine Rich Repeat
  Pfam annotation: Domain name=LRR_1; Domain location=166-188; Score =9.0; E_value=5.8; Accession=PF00560.25; Description=Leucine Rich Repeat
  Pfam annotation: Domain name=LRR_1; Domain location=190-212; Score =1.1; E_value=1.9e+02; Accession=PF00560.25; Description=Leucine Rich Repeat
  Pfam annotation: Domain name=LRR_1; Domain location=213-235; Score =4.7; E_value=39; Accession=PF00560.25; Description=Leucine Rich Repeat
  Pfam annotation: Domain name=LRR_1; Domain location=236-258; Score =6.5; E_value=17; Accession=PF00560.25; Description=Leucine Rich Repeat
  Pfam annotation: Domain name=LRR_1; Domain location=261-283; Score =0.3; E_value=2.6e+02; Accession=PF00560.25; Description=Leucine Rich Repeat
  Pfam annotation: Domain name=LRR_1; Domain location=285-307; Score =7.3; E_value=12; Accession=PF00560.25; Description=Leucine Rich Repeat
  Pfam annotation: Domain name=LRR_1; Domain location=309-330; Score =5.8; E_value=24; Accession=PF00560.25; Description=Leucine Rich Repeat
  Pfam annotation: Domain name=LRR_1; Domain location=336-357; Score =9.5; E_value=4.6; Accession=PF00560.25; Description=Leucine Rich Repeat
  Pfam module annotation: Pfam domain module=LRR_1::LRR_1::LRR_1::LRR _1::LRR_1::LRR_1::LRR_1::LRR_1::LRR_1; Domain location=143-164::166 -188::190-212::213-235::236-258::261-283::285-307::309-330::336-357
  Subcellular localization annotation: CTP_CleavageSite=10; ConfidenceScore=5.07e-01
MSSSPPGSSRAAAAMRRRCGTRNERNVQRVAAGEPAPSPESSLVGCGCGPAPAPWQFLNYKLAALWPVIQAFKKTITCDPLGVTATWEGPDLCSSFFNGTKYRGFYCEYPPNANATLTVASIDFNGFGLCAPSLVGFVDQFPDLALFHANSNNFSGDVPDLTHLPFFYELDLSNNNFSGSFPDAVVPLGGLLFLDLRFNRYAGAVPPPVFALTVEALLLNNNGFDGRIPDNFGSTGAKYLVVANNQFTGPIPRSIYNTSATLSEVLFLNNRLSGCLPYEIGLVEGLAVFDAGGNEIAGPIPLSFGCLRDVEEINLAGNQLYGQVPDVVCLLAKTGKLQNLSLSDNFFHSVGHHCMELVRSRVLDVRRNCILGFPDQRPALECAAFYADPTKHCPFIPHIPCDLPGYHHYPPAKAAHGHVQGQRGWQLMGAVQN

SEQ ID NO: 87563 - protein, 47 aa, Setaria italica
  Transcript Sequence Number=SeqID_21589
DVRGKMTFLPPITPLNAPALFTSLNEKGRATGVKGGLKTTFRRKITH

SEQ ID NO: 87564 - protein, 219 aa, Setaria italica
  Transcript Sequence Number=SeqID_21590
  Homolog annotation: Hit_ID=B9RTF6; Match level="QueryCoverage=91%, HitCoverage=31%, E-value=2e-51, Identity=49%"; Hit description =Pentatricopeptide repeat-containing protein, putative
  Pfam annotation: Domain name=PPR; Domain location=131-165; Score=4.3; E_value=2.8; Accession=PF01535.12; Description=PPR repeat
  Pfam annotation: Domain name=PPR; Domain location=30-64; Score=32.0; E_value=2.4e-06; Accession=PF01535.12; Description=PPR repeat
  Pfam annotation: Domain name=PPR; Domain location=65-99; Score=3.0; E_ value=3.9; Accession=PF01535.12; Description=PPR repeat
  Pfam module annotation: Pfam domain module=PPR::PPR::PPR; Domain location=131-165::30-64::65-99
DHWFAAHGLPEMALSLFGEMRQLGIEPNGVTFVGVLNACSHGGLVDEGFKYFSLMRSMGIKPTIQHYGCLVDLLGRAGFLEEAFDLASNLPEDPGFVIWSSLLAACRSHGNVEMAELAASRLADAKPSHGSSYVLLSNTYARAKQWEDLKKTRRRMEEHRVTKKPGLSWIEVDGSVHSFATADKLHTESESIYQMLEDLKHNLTSSAYESEPFPLSEEL

SEQ ID NO: 87565 - protein, 120 aa, Setaria italica
  Transcript Sequence Number=SeqID_21591
  Gene Ontology: Mol. function=protein dimerization activity; Cellular component=nucleus; Biological process=regulation of transcription, DNA-dependent
  Homolog annotation: Hit_ID=B9SCS7; Match level="QueryCoverage=85%, HitCoverage=22%, E-value=7e-35, Identity=70%"; Hit description=DNA binding protein, putative
GLEQLHQSLADTMAGGSLIDDANMNFMGQMALALGKLSNLEGFVIQADNLRQQTLHQMHRILTVRQAARCFLAIGEYHNRLRALSSLWASRPREILVPDEGNCGEISIAAQSSQSQFSPF

SEQ ID NO: 87566 - protein, 102 aa, Setaria italica
  Transcript Sequence Number=SeqID_21592
  Gene Ontology: Mol. function=protein dimerization activity; Cellular component=nucleus; Biological process=regulation of transcription, DNA-dependent
  Homolog annotation: Hit_ID=Q52MZ2; Match level="QueryCoverage=88%, HitCoverage=17%, E-value=1e-10, Identity=43%"; Hit description=TGA10 transcription factor
DSRPSDLLKTLLPQLDPLTEQQVVGICNLQQSSQQAEEALSQGLEQLHQSLADTMAGGSLIDDANMNFMGQMALALGKLSNLEGFVIQAENIFIYTSSILQS

SEQ ID NO: 87567 - protein, 56 aa, Setaria italica
  Transcript Sequence Number=SeqID_21593
  Homolog annotation: Hit_ID=Q2RAC3; Match level="QueryCoverage=100%, HitCoverage=16%, E-value=4e-10, Identity=62%"; Hit description =Harpin-induced protein 1 containing protein, expressed
EVQVRLMAVAVFDRGGWRTRRRVMRVMCDGVQVVFRGKNSTEAAFNGPPRRCDVVL

SEQ ID NO: 87568 - protein, 88 aa, Setaria italica
  Transcript Sequence Number=SeqID_21594
PLKTHWTHYIQFVTMKHSKHKSVKINTNMTGFGHEAIRLKANINILLYIARYSVDSPQLPVKELSCFKIKIHITQLSSSTLWPIIYGK

SEQ ID NO: 87569 - protein, 92 aa, Setaria italica
  Transcript Sequence Number=SeqID_21595
NHHRYKGHIPTKHNHSGLLSLGILLQPAIFAQLLPHQINVDQLLVVPVSFSYLWNDLPLISIPGSQQTWMVIQAKLYVHLSSIALGASVIQP

SEQ ID NO: 87570 - protein, 92 aa, Setaria italica
  misc_feature (52)..(52): Xaa can be any naturally occurring amino acid
  Transcript Sequence Number=SeqID_21596
  Homolog annotation: Hit_ID=Q2RAC3; Match level="QueryCoverage=98%, HitCoverage=25%, E-value=2e-20, Identity=64%"; Hit description =Harpin-induced protein 1 containing protein, expressed
GNTTTLAFRLVVDDAYVGPDDAAPLKSGGGGGGTVEVQVRLMAVAVFDRGGXWRTRRRVMRVMCDGVQVVFRGKNSTEAAFNGPPRRCDVVL

SEQ ID NO: 87571 - protein, 403 aa, Setaria italica
  misc_feature (83)..(83): Xaa can be any naturally occurring amino acid
  misc_feature (140)..(140): Xaa can be any naturally occurring amino acid
  Transcript Sequence Number=SeqID_21597
  Gene Ontology: Mol. function=DNA-directed DNA polymerase activity; Cellular component=intracellular; Biological process=nucleobase, nucleoside, nucleotide and nucleic acid metabolic process
  Homolog annotation: Hit_ID=Q3LHS9; Match level="QueryCoverage=95%, HitCoverage=33%, E-value=1e-144, Identity=62%"; Hit description=DNA polymerase
  Pfam annotation: Domain name=3_5_exonuc; Domain location=14-219; Score=-38.3; E_value=0.064; Accession=PF01612.12; Description=3'-5' exonuclease
ARTIVQLLTTKYKNFIHACDTEVSNINVKEETPVGHGHVTCFSIYSANSNAQVADFGNGKTCIWVDVLDGGRDVLMEFAPFFXEDPSIKKVWHNYSFDSHVIENHGIKVAGFHADTMHLARLWDSSRKTDGGYSLEGLTXNDRRVMDAVLEDLPNAGKTSMKTIFGRKKVRKDGSEGKVISVDPVEKLQREDKELWICYSSLDSMSTLRLYESLKRKLETKEWIFDGCPRGTMYDFYEEYWRPFGAILVKMETEGMLVDRGYLSEIEKAAIAEREVAANKFRKWASKYCPDAKYMNVNSDTQIRQLLFGGIENRHKSGETWPLSKTFKVPNEETVDTEGKKTSKYRTIKLCSIVEDLKIDMFTPSGWPSVSGDALRSLAGKIPTEHIYTMDDCDEDSSGSEDP

SEQ ID NO: 87572 - protein, 152 aa, Setaria italica
  Transcript Sequence Number=SeqID_21598
PDDKHGVPRADELSNAQFKTWRKDQFGNIRSNRYIASPISNRNTLGSKLKEDECSHRRSFSSVIIRYSSSNKPSSVSSSSCSSSNSSSFSIPSSTDSGVGPVLRRSSSASSEMDNPIQGAIAYCKKSQQLASVRKSASDAGFRFMSSSASKM

SEQ ID NO: 87573 - protein, 50 aa, Setaria italica
  Transcript Sequence Number=SeqID_21599
  Homolog annotation: Hit_ID=B6T0E3; Match level="QueryCoverage=68%, HitCoverage=18%, E-value=4e-10, Identity=88%"; Hit description =Augmenter of liver regeneration
MPLSGWNPLAPVLQTVAAFSRHLLIAPDTGPDDHRLRPLLSLSLSPPPTP

SEQ ID NO: 87574 - protein, 228 aa, Setaria italica
  Transcript Sequence Number=SeqID_21600
  Gene Ontology: Cellular component=plasma membrane
  Pfam annotation: Domain name=DUF599; Domain location=1-206; Score =204.5; E_value=2.9e-58; Accession=PF04654.4; Description=Protein of unknown function, DUF599
  Subcellular localization annotation: CTP_CleavageSite=33; ConfidenceScore=5.32e-01
PAVYHLWLWRAVRRSPLSSTVGISAAARRLWVFSMMKNNEKQAILVVQSVRNVLMGSTLVATTSILFCTGVAAVLSSTYAVKKPLSDAVFGAHGEYMMALKYVVLLTVFLLAFLCHSLAICTLNQASFLVNALSPSPALHLPLTKDYVANVMERGFLLNLAGNRLFFAGAPLLLWIFGPVLPCICSMAMVPILYNIDTMEYVKEGRSNGEANAKVEMVDTESDQSTEV

SEQ ID NO: 87575 - protein, 121 aa, Setaria italica
  misc_feature (70)..(70): Xaa can be any naturally occurring amino acid
  Transcript Sequence Number=SeqID_21601
  Homolog annotation: Hit_ID=Q5NSW7; Match level="QueryCoverage=64%, HitCoverage=15%, E-value=1e-09, Identity=59%"; Hit description=Snm1
  Subcellular localization annotation: CTP_CleavageSite=30; ConfidenceScore=5.05e-01
MATAGGDADPPQPFPADLDDNGFPSLPSPPATAGSTSGFAEDFYRSGTDWSSLRDPPPRRPPEGHPGLRXKEKEGASLVQSSLFQAWGIERPRREGGGAGHSSPVQKSLFQTWGIERPKRE

SEQ ID NO: 87576 - protein, 205 aa, Setaria italica
  Transcript Sequence Number=SeqID_21602
  Gene Ontology: Cellular component=outer membrane
  Homolog annotation: Hit_ID=B9RIA3; Match level="QueryCoverage=77%, HitCoverage=22%, E-value=4e-16, Identity=30%"; Hit description =Sorting and assembly machinery (Sam50) protein, putative
SHGAQQSVNAGKAKVDMQIDLTHMLCEALLLPPLRSSGVALSQVVGRISLKHPSLFGRSEKLDVILDKGINDSNFVVAFRRPRPEWLSQQSFVIQHSMTPEVAVHGFPADNFTRSGSRGINLSRLSFGLELNEPATSNWTSGTSFKFEHIRPVNNQGRSIARDHDGFPLTCSGNLHDNMIILKQESGYADVNDNSFLKVSFMPTS

SEQ ID NO: 87577 - protein, 76 aa, Setaria italica
  Transcript Sequence Number=SeqID_21603
SAAPLAAPLAVVCREKREKGMGREIDRWVGGESREIKGREGAAEGIQKAGDACAATERVSSRSAARGSRGPSTRRR

SEQ ID NO: 87578 - protein, 223 aa, Setaria italica
  misc_feature (48)..(48): Xaa can be any naturally occurring amino acid
  Transcript Sequence Number=SeqID_21604
  Gene Ontology: Mol. function=protein binding; Biological process =defense response
  Homolog annotation: Hit_ID=Q8L4M1; Match level="QueryCoverage=90%, HitCoverage=54%, E-value=3e-58, Identity=56%"; Hit description =Putative WD-40 repeat protein
  Pfam annotation: Domain name=WD40; Domain location=43-81; Score=39.4; E_value=1.4e-08; Accession=PF00400.24; Description=WD domain, G-beta repeat
  Pfam annotation: Domain name=WD40; Domain location=91-128; Score=9.3; E_value=3.2; Accession=PF00400.24; Description=WD domain, G-beta repeat
  Pfam module annotation: Pfam domain module=WD40::WD40; Domain location=43-81::91-128
MTVLMFIDSVYLFYCYHEFNKQDGSIFAAAGDACAYCWDVETGKCKIXFKGHADYLHSVAIREANRQVVTGSEDGTARIWDCRSGKCTQVVRPVKNKAFQSSWVSCVAIDASESWLACGTSSGISVWSLLSNECIFNLDCHAPVQDLLFDKNQILAVGAEPVLSRFTINGTVLSQIKCAPQSAFSVSIHSSGMASVAGYGGLVDVISELGSHLCTFGSRGLDK

SEQ ID NO: 87579 - protein, 79 aa, Setaria italica
  Transcript Sequence Number=SeqID_21605
THRQQLQLEEVAAEGWLALHVVCLVWSCLPSLISRSCTLSPPISLASFFSLFCFDSSSSRLRQRLNCITSFIRSHALSF

SEQ ID NO: 87580 - protein, 112 aa, Setaria italica
  misc_feature (81)..(81): Xaa can be any naturally occurring amino acid
  Transcript Sequence Number=SeqID_21606
  Subcellular localization annotation: CTP_CleavageSite=17; ConfidenceScore=5.08e-01
PPRSEPVPGAVPAIPPAAAARVTPTTPPRRRPTGQPPYAAPPVGYPAGAYGYGGGPQPAYGAPPSAPAYAAAPVVGAPRGXGAAPQKSNKMGMGTGLAVGAAAGVLGGLALA

SEQ ID NO: 87581 - protein, 224 aa, Setaria italica
  Transcript Sequence Number=SeqID_21607
  Homolog annotation: Hit_ID=Q5DVL6; Match level="QueryCoverage=73%, HitCoverage=48%, E-value=5e-63, Identity=76%"; Hit description=C2 domain-containing protein
  Pfam annotation: Domain name=C2; Domain location=25-114; Score=55.1; E_value=2.7e-13; Accession=PF00168.22; Description=C2 domain
MSFGKGWFQKDQAATKASMGSRYEVEVTVGSARDLKNVNWRNGELKPYAVLWVDDGPKSSTHVDLDDGENPVWDEKLVVQLPPSAARLEDAVLHIDIVHANAAEGVKPLVGSARLPLRDVLDDAGVGGKVSRTLRLKRPSGRPQGKLDARVAIREAPPPRYHHDPSPYPAPYGHPAGSGGSRDPYYAAGPQPAYGAPPSAPAYAAAPVVGAPRRRALLRRRATR

SEQ ID NO: 87582 - protein, 185 aa, Setaria italica
  Transcript Sequence Number=SeqID_21608
  Pfam annotation: Domain name=Hin1; Domain location=42-182; Score =80.4; E_value=6.4e-21; Accession=PF07320.5; Description=Harpin -induced protein 1 (Hin1)
MGKLDDCWAECCYKWDEWKYCLACLGIVAGVVLFAVLLAAFGFVRRVSVSVDEASLTRFELSTTASPATSLAYNLTLTLVIRNPNWAMNLKNTKPLEAFYKFDDQVFDRFELAGKGEKHPAGKTRVYHLAAGATRFVATLGNAGEAEFRKENATGVFQVEVAVAGEVRYTARYTKCKGTKDVRRT

SEQ ID NO: 87583 - protein, 272 aa, Setaria italica
  Transcript Sequence Number=SeqID_21609
  Gene Ontology: Mol. function=protein transporter activity; Cellular component=mitochondrial inner membrane; Biological process=protein transport
  Homolog annotation: Hit_ID=B6SGQ2; Match level="QueryCoverage=99%, HitCoverage=99%, E-value=1e-79, Identity=61%"; Hit description=SAM domain family protein
  Pfam annotation: Domain name=SAM_1; Domain location=204-265; Score =24.1; E_value=0.00058; Accession=PF00536.22; Description=SAM domain (Sterile alpha motif)
  Pfam annotation: Domain name=Tim17; Domain location=52-193; Score =0.9; E_value=0.00038; Accession=PF02466.11; Description =Tim17Tim22Tim23 family
  Pfam module annotation: Pfam domain module=SAM_1::Tim17; Domain location=204-265::52-193
MADGKQGEGSAVALKASPSAAAMAWGLRGGSNPLEEWSARVKAIEAGFRAWMAKQPIHIEAAVTTAVGAVQGGALGGLMGSLSADGGSPFPMPQPPPNANPDAMASFKQAQALAGGPLVQARNFAVMTGANAGISCVMRRIRGQEDIQGSMAAAFGSGVLFSIVSGMGTPNPAVNAITTGAAFAVFQGGFFMIGQKFSKQQGGEDTYYSQTRSMLNKLGLEKYEKNFKKGLLTDQTLPLLTDSALRDVKIPPGPRLLILDQIKRDAELVRAN

SEQ ID NO: 87584 - protein, 72 aa, Setaria italica
  Transcript Sequence Number=SeqID_21610
MPPPLPVNPQRLSPAESRERTLRFFQGLGVDVPLPASAERPDAYADLVRAVLSSAAVSSSRVSCTLTMSPAL

SEQ ID NO: 87585 - protein, 214 aa, Setaria italica
  Transcript Sequence Number=SeqID_21611
  Subcellular localization annotation: CTP_CleavageSite=48; ConfidenceScore=5.28e-01
IASEGWNSVLAEVPLLSDPSINSISTSSSPAGLSKQSEVSNSGSALSMAETVMQSPLKISTAPQLSIDAQKIEERTMRQCILRPLTPSSNKISASNSLDKLKSKGARVGDSNGPIKVAPQLSLQPSSSSIRTPVKTELVKPSQSGSLQVLTREQNGTVNTAAKDSTSNPVSPVLGRSSSMEPMRKSVVNPKLNFGINGRSLHLLQGSIGDRKAS

SEQ ID NO: 87586 - protein, 304 aa, Setaria italica
  Transcript Sequence Number=SeqID_21612
LSHCLALSALIKLMSPKEVKDVFSILKDCAADANQNTSVELQITYGVLFSLVATFISDALSTSHEKGSLSSSDSSFRHEFHELVMRTGNNTTVEGFVGVVRLAWSVHLMLTQDRSNSRETSDIWSCLEIICCQNSFEFLRERVLKTAAYQNDDEDIVYMYTGYTHKLMMCFISHPTSRDKIKEIKEKAMTALSPYGPPRDHREDPARNGEQVGQATNEPFVSLLELIREIYQKEPELVHGNEELWTFVIYAGEDHTNTQTLVAFLGLLSILASTEVGAAKVYELLQGKIYRSVGWNTLFDCLSI

SEQ ID NO: 87587 - protein, 118 aa, Setaria italica
  Transcript Sequence Number=SeqID_21613
DALICLGCISHRQALLRNSRAAGIALLVAAGGKLQPRPWQMRSRSRSMPCPLIRIQAKLRVHLPRRREPRRRLRGLHQEHPAHKARMRQAPWGTNRVAQQRARETSSSAQWWPSSPSP

SEQ ID NO: 87588 - protein, 100 aa, Setaria italica
  Transcript Sequence Number=SeqID_21614
MLLLRAPTPFAYAKVEKVDAEEARHLRAQYLIQKVLEEKSPRSRPPALARVKARIGVRLKKLRLAVRSVRVRACRTLQRHLRNLRRLIALGGQQGSGEPS

SEQ ID NO: 87589 - protein, 64 aa, Setaria italica
  Transcript Sequence Number=SeqID_21615
  Gene Ontology: Mol. function=serine-type endopeptidase inhibitor activity; Cellular component=extracellular region
  Homolog annotation: Hit_ID=Q7GC15; Match level="QueryCoverage=100%, HitCoverage=64%, E-value=4e-20, Identity=76%"; Hit description=Wound induced protein homolog
MKSSTLLVLLCLQAALVMGIFAAVAKENAVGESKAIDINPGQLKCCTNCNFSFSGLYTCDDVKK

SEQ ID NO: 87590 - protein, 98 aa, Setaria italica
  Transcript Sequence Number=SeqID_21616
  Gene Ontology: Mol. function=serine-type endopeptidase inhibitor activity; Cellular component=extracellular region
  Homolog annotation: Hit_ID=Q7GC15; Match level="QueryCoverage=100%, HitCoverage=98%, E-value=3e-25, Identity=63%"; Hit description=Wound induced protein homolog
  Pfam annotation: Domain name=Bowman-Birk_leg; Domain location=45-67; Score=16.7; E_value=0.017; Accession=PF00228.12; Description=Bowman -Birk serine protease inhibitor family
  Pfam annotation: Domain name=Bowman-Birk_leg; Domain location=69-95; Score=23.0; E_value=0.0012; Accession=PF00228.12; Description=Bowman- Birk serine protease inhibitor family
  Pfam module annotation: Pfam domain module=Bowman-Birk_leg::Bowman -Birk_leg; Domain location=45-67::69-95
MKSSTLLVLLCLQAALVMGIFAAVAKENAVGESKAIDINPGQLKCCTNCNFSFSGLYTCDDVKKDCDPVCKKCVAVKTYSGKKFKCTDTFLGMCGPKC

SEQ ID NO: 87591 - protein, 103 aa, Setaria italica
  Transcript Sequence Number=SeqID_21617
  Gene Ontology: Mol. function=electron carrier activity; Cellular component=extracellular region; Biological process=response to oxidative stress
  Homolog annotation: Hit_ID=Q9FEQ8; Match level="QueryCoverage=69%, HitCoverage=21%, E-value=2e-23, Identity=69%"; Hit description =Peroxidase 2
MASKVAAVLSCALLVVAATGYYTPPSPATCGLKVGYYHEKCPHAEAIVKHVVGAAVRKNPGVGAGLIRMLFHDCFVEGCDASVLLDPTPANPQPEKLSPPNNP

SEQ ID NO: 87592 - protein, 322 aa, Setaria italica
  Transcript Sequence Number=SeqID_21618
  Gene Ontology: Mol. function=electron carrier activity; Biological process=response to oxidative stress
  Homolog annotation: Hit_ID=Q9FEQ8; Match level="QueryCoverage=92%, HitCoverage=89%, E-value=1e-109, Identity=63%"; Hit description =Peroxidase 2
  Pfam annotation: Domain name=peroxidase; Domain location=40-286; Score=389.4; E_value=6.1e-114; Accession=PF00141.15; Description =Peroxidase
MAASIKLCLLVSCALVLATACDGLQVGYYRKTCPRAEALVRAEVKKAVRANTGVGAGLIRMLFHDCFVEGCDASVLLDPTAANPQPEKLGAPNNPSLRGYEVIDAAKAAVEKACPGTVSCADIVAFAGRDASYLLSHAKVSFHMPAGRLDGRKSLASETLTFLPGPSSNLSSLVSAFAAKGLSVEDVVVLSGAHSIGRSHCSSFVQARLSSPSDIAAPLATQLRKQCPASPTAANDPTVTQDVVSPDALDNQYYKNVLARKVLFTSDAALLSAPNTARMVRANARFPGSWEKKFAKAMVKMAAIGVKTGRDGEIRRNCRLVN

SEQ ID NO: 87593 - protein, 83 aa, Setaria italica
  Transcript Sequence Number=SeqID_21619
TLDRHMCTTKDPATWSYMALTCPRPVLLVGPQTDNGAHELTGGAQLVVDRSPLIKSPLNFRHAAPSRAPAWRDQKLTRVILIN

SEQ ID NO: 87594 - protein, 106 aa, Setaria italica
  Transcript Sequence Number=SeqID_21620
  Subcellular localization annotation: CTP_CleavageSite=53; ConfidenceScore=5.27e-01
GTICSRAFLLQPSQRKRSSRTLGHRPLRKRNNSSAAACRKLSHCESMQGYIITCSLIAEITRYSSFASNVHPDKDDPQPQIRFIIMDEDEKNSMHRFPFSGSTSID

SEQ ID NO: 87595 - protein, 320 aa, Setaria italica
  Transcript Sequence Number=SeqID_21621
  Gene Ontology: Mol. function=oxidoreductase activity, acting on the CH-CH group of donors; Cellular component=integral to membrane; Biological process=lipid metabolic process
  Homolog annotation: Hit_ID=B6U0E0; Match level="QueryCoverage=100%, HitCoverage=100%, E-value=1e-153, Identity=81%"; Hit description =Membrane protein
  Pfam annotation: Domain name=DUF1295; Domain location=62-301; Score =322.1; E_value=1.1e-93; Accession=PF06966.4; Description=Protein of unknown function (DUF1295)
  Pfam annotation: Domain name=ICMT; Domain location=186-294; Score= -18.1; E_value=0.026; Accession=PF04140.6; Description=Isoprenylcystei ne carboxyl methyltransferase (ICMT) family
  Pfam module annotation: Pfam domain module=DUF1295::ICMT; Domain location=62-301::186-294
MAGGNLKNLVVAFLVPLPSILFYLSFVRPGGNADAGPLSSWCAEHPLLLANVLFFLNVNVLFWLVGLLLSNHWLIDLYWTVIPVMLLHYYRGHPSSVTDAVRSAVVVALTWVWSARLTHNYLRREGWEFGKREDWRFNEMRGQYGKTWWWMSFFAVYLSQQVFLISICLPMYAIHSSNQPWGIWDVVATAACIAGIVIAHFADTHLHKFVTRNEKLKQLGEPTVPTLEDGLWRYSRHPNYFGEQLWWWGLYLFAWNLGQQWMFVGPLVNTLCLGYVTLLVERRMLKQEHRAEAYKLYQKRTSVWIPWFRKSVPELKQKET

SEQ ID NO: 87596 - protein, 137 aa, Setaria italica
  Transcript Sequence Number=SeqID_21622
  Gene Ontology: Mol. function=receptor activity; Cellular component =cell wall
  Homolog annotation: Hit_ID=B6UAZ2; Match level="QueryCoverage=96%, HitCoverage=33%, E-value=3e-40, Identity=60%"; Hit description =Systemin receptor SR160
  Pfam annotation: Domain name=LRR_1; Domain location=24-46; Score =16.5; E_value=0.11; Accession=PF00560.25; Description=Leucine Rich Repeat
  Pfam annotation: Domain name=LRR_1; Domain location=48-70; Score =13.0; E_value=1; Accession=PF00560.25; Description=Leucine Rich Repeat
  Pfam annotation: Domain name=LRR_1; Domain location=72-94; Score=2.0; E_value=1.2e+02; Accession=PF00560.25; Description=Leucine Rich Repeat
  Pfam module annotation: Pfam domain module=LRR_1::LRR_1::LRR_1; Domain location=24-46::48-70::72-94
LVELVLLNTSISSCIPPEIGKLKKLKVLDLSHNKLAGELPESVGDMESLEVLNVGYNQLSGVVPESICLLPKLRNLTVTGNYFCGEPVSCLHVPLRDDRMNCIPEWPHQRTHEECIAFEHRPPVHCGADGCILHHPL

SEQ ID NO: 87597 - protein, 177 aa, Setaria italica
  Transcript Sequence Number=SeqID_21623
  Gene Ontology: Mol. function=serine-type endopeptidase activity; Biological process=negative regulation of catalytic activity
  Homolog annotation: Hit_ID=Q6MW76; Match level="QueryCoverage=50%, HitCoverage=12%, E-value=7e-27, Identity=64%"; Hit description =B1340F09.7 protein
  Subcellular localization annotation: CTP_CleavageSite=47; ConfidenceScore=5.54e-01
MAEANPGGNHSHVQSQLLFAIIAVVRTISLVKMIVVSVLFVMMQTASLSSINGQLTLRVRSPQMIMGSFCNNFELFSDKFLTVLFRSPIAKITPALTVAGEEALAPKVAAFSSRGPSIDYPQVIKPDIAAPGATILAAQQDAYVFKSGTSMATPHVAGVIALLRALYPDWSPAALKI

SEQ ID NO: 87598 - protein, 123 aa, Setaria italica
  misc_feature (75)..(75): Xaa can be any naturally occurring amino acid
  Transcript Sequence Number=SeqID_21624
  Gene Ontology: Mol. function=aspartic-type endopeptidase activity; Biological process=DNA integration
  Homolog annotation: Hit_ID=Q9ZRJ0; Match level="QueryCoverage=97%, HitCoverage=8%, E-value=3e-16, Identity=39%"; Hit description =Retrotransposon Tto1 DNA
KTAVNNASMVKRLAKLEYRDGSSVIEHLNVFSGHTNQLSVMKINLDDKVQVLLLLNSLPDSWNTLVVSLSNSAPXKLTLEMVKNILLNEEARRKEKGNNLPSSSDAYVAQNKEESRSRSQVKI

SEQ ID NO: 87599 - protein, 475 aa, Setaria italica
  Transcript Sequence Number=SeqID_21625
  Gene Ontology: Mol. function=transferase activity, transferring hexosyl groups; Cellular component=integral to membrane
  Homolog annotation: Hit_ID=Q2P9N4; Match level="QueryCoverage=100%, HitCoverage=100%, E-value=0.0, Identity=85%"; Hit description =Putative glycosyltransferase
  Pfam annotation: Domain name=Glyco_transf_34; Domain location=169 -413; Score=394.1; E_value=2.4e-115; Accession=PF05637.4; Description= galactosyl transferase GMA12MNN10 family
  Subcellular localization annotation: CTP_CleavageSite=52; ConfidenceScore=5.21e-01
MGQEGMGYNSNKGGGGGGLPMTAPRPRGASPLHHSRSRKIHRTFNNLKITVLCGLVTILVLRGTIGLNLSLPSQPNDAEALAGAKAVEDIDRILREIRSDSGPDPDDEGGEFSANAGFNASALSAAEAAAAYAAAAGKYALGPKISDWDAQRRRWLAENPGFPATVAGGKPRIMLVTGSQPGPCDNPLGDHYLLKSTKNKMDYCRLHGIEIVHNLAHLDTELAGYWAKLPLLRRLMLSHPEVEWIWWMDSDALFTDMAFELPLSRYDGHNLIIHGYQDLLFEKHSWIALNTGSFLFRNCQWSLDLLDAWAPMGPKGFIRDQAGKVLTANLKGRPAFEADDQSALIYLLLSQKEKWMDKVFIENSYYLHGFWAGLVDKYEEMMENHHPGLGDERWPFVTHFVGCKPCGSYGDYPVERCLKSMERAFNFADNQVLRLYGFSHKGLESPKIKRIRDQTSKPINDVENLDMKAKILTAS

SEQ ID NO: 87600 - protein, 142 aa, Setaria italica
  misc_feature (33)..(33): Xaa can be any naturally occurring amino acid
  Transcript Sequence Number=SeqID_21626
  Gene Ontology: Mol. function=RNA-directed DNA polymerase activity; Cellular component=chromatin; Biological process=RNA-dependent DNA replication
  Homolog annotation: Hit_ID=Q6UUN7; Match level="QueryCoverage=99%, HitCoverage=8%, E-value=3e-31, Identity=49%"; Hit description =Putative gag-pol polyprotein
FQQGSKSVEEYFQELQIGMIRCGLLEETDAAMXRFRGGLNREIQDILDYKDYTDMTTLFEYACKAEREVQGRRSKTYSNSFAGRSSPSNSAPALPAPPTPTTTPRERTAKPASAAPSTGAAPPTGRTRDIQCHRCKGFGHVI

SEQ ID NO: 87601 - protein, 69 aa, Setaria italica
  Transcript Sequence Number=SeqID_21627
INTHVIQRKLLALLSCRNKTLLFPQLQARYFRHMQLTSMLPYYLDLSPGKINVSISLDVQCMGQYGPRI

SEQ ID NO: 87602 - protein, 187 aa, Setaria italica
  Transcript Sequence Number=SeqID_21628
  Gene Ontology: Mol. function=hydrolase activity, hydrolyzing O -glycosyl compounds; Biological process=carbohydrate metabolic process
  Homolog annotation: Hit_ID=Q7XKV5; Match level="QueryCoverage=90%, HitCoverage=32%, E-value=2e-69, Identity=74%"; Hit description =OSJNBa0022H21.2 protein
  Pfam annotation: Domain name=Glyco_hydro_1; Domain location=1-177; Score=-230.2; E_value=4.4e-07; Accession=PF00232.10; Description =Glycosyl hydrolase family 1
KGAFDFIGLNYYTGYYTKDVPPSLNKSYNTDSQANTTGVRNGFLIGRQAASPSLYIYPQGFRELLLYVKETYGNPTIYITENGVDETTNNSLPLHEALKDDIRIEYYHKHLLALLSAIRDGANVKGYFAWSLLDNFEWRDAFTVRFGINFVDYNDGLKRYPKNSAHWFRNSCRISVPLWEIMVASHT

SEQ ID NO: 87603 - protein, 257 aa, Setaria italica
  Transcript Sequence Number=SeqID_21629
  Gene Ontology: Mol. function=hydrolase activity, hydrolyzing O -glycosyl compounds; Biological process=carbohydrate metabolic process
  Homolog annotation: Hit_ID=Q01KA9; Match level="QueryCoverage=94%, HitCoverage=47%, E-value=1e-108, Identity=75%"; Hit description =OSIGBa0135C13.2 protein
  Pfam annotation: Domain name=Glyco_hydro_1; Domain location=1-253; Score=8.5; E_value=4.6e-19; Accession=PF00232.10; Description =Glycosyl hydrolase family 1
GVQPFVTLFYWDSPQALEDKYGGFLSPNIINDYKDYAEVCFREFGDRVKHWITFNEPWTFCSVGYASGTFPPARCSSWEEGKCSVGDSGREPYTACHYQLLAHAEAARLYKEKYQGVQKGKIGITLVSHWFTPFSRSKSDVAAARRQVDFMLGWSMDPLIRGDYPLNMRRLVGDRLPRFTKEQSELVKGAFDFIGLNYYTGYYTKDVPPSLNKSYNTDSQANTTGVRNGFLIGRQAASPSLYIYLRHAKGIGKAHRG

SEQ ID NO: 87604 - protein, 114 aa, Setaria italica
  Transcript Sequence Number=SeqID_21630
  Gene Ontology: Mol. function=oxidoreductase activity; Biological process=oxidation reduction
  Homolog annotation: Hit_ID=Q6EQL4; Match level="QueryCoverage=71%, HitCoverage=18%, E-value=6e-16, Identity=52%"; Hit description =Iron/ascorbate-dependent oxidoreductase-like
LDLIHGIDRFSSTCSLDPRHALDSYSVEISNLARRLLGFMATDLGVSQEALQGAFFGGGDADDDTGRQPKPQSTAMHYYPPCRHPEKVLGALPHTDTMGLLRHATGDRQGTQGI

SEQ ID NO: 87605 - protein, 369 aa, Setaria italica
  Transcript Sequence Number=SeqID_21631
  Gene Ontology: Mol. function=oxidoreductase activity; Biological process=oxidation reduction
  Homolog annotation: Hit_ID=B6TBV5; Match level="QueryCoverage=100%, HitCoverage=100%, E-value=1e-112, Identity=58%"; Hit description =Leucoanthocyanidin dioxygenase
  Pfam annotation: Domain name=2OG-FeII_Oxy; Domain location=219-319; Score=109.2; E_value=1.4e-29; Accession=PF03171.12; Description=2OG -Fe(II) oxygenase superfamily
MEAAAAKLVIREKITGATAAVFAGSVEIPEKFIRTTEVQEAGAVVSEDEVFELPVVDMAKLLDPELSASETAKLGSACRDWGFFQLTHHGVDEAAMQQMKDSAAQFFGLPLESKNSVAVRDGGFQGFGHHVNASSGDKIDWAENMFLFTEPVQDRDMDLWPANPPTFRHALDSYSVEISNLARRLLGFMATDLGVSQEALQGAFFGGGDADDDTGRQPKPQSTAMHYYPPCRHPEKVLGALPHTDTMGLTVLMQVDDTPGLQIKRGGRWIPLRPLLGAVVVIVGDILDVLTNGTYVSVEHRVVPDAERGRTSVVMFHEASVQGFVTPLPELLTGGEARPRYRSIGILEYRKGSSRALAQGRRFVDTLRM

SEQ ID NO: 87606 - protein, 152 aa, Setaria italica
  Transcript Sequence Number=SeqID_21632
  Gene Ontology: Mol. function=sequence-specific DNA binding; Cellular component=nucleus; Biological process=regulation of transcription, DNA-dependent
  Homolog annotation: Hit_ID=Q9LEE8; Match level="QueryCoverage=100%, HitCoverage=18%, E-value=4e-49, Identity=72%"; Hit description=OCL3 protein
ANCGGAALLGEVSLEEQHLRIENARLKDELDRVCALAGKFLGRPISSGGPIPSLQGCSGLELGVGTNGFGLGPLGATSALHPLPDLMSGGPVGSAGMRLPAGIGGLDGGMHGAAHGVDRTVLLELGLAAMEELMKVAQMEEPLWLPSPDGGG

SEQ ID NO: 87607 - protein, 316 aa, Setaria italica
  misc_feature (53)..(53): Xaa can be any naturally occurring amino acid
  Transcript Sequence Number=SeqID_21633
  Homolog annotation: Hit_ID=UPI0001A7B120; Match level="QueryCoverage =97%, HitCoverage=13%, E-value=2e-27, Identity=32%"; Hit description =DCAF1 (DDB1-CUL4 ASSOCIATED FACTOR 1); nucleotide binding
DFYELVFCKFLSDTSYSVAVRAAAARLLLSCHSASTPQYPHAFEDSIIENIKXWVTEDFEASSECEWKYLGINKPTDAEMLRTYAIGLLAMALCSGGQLVEDVLTMGVSAKLMRFLRIRVLGEASSSQKDSNHPQDTRHPRGRDDNRGKSRLAHDVSRLDGTRVGYGTLTGLTAEKDNEPGVGMRQALGERLMDDTVASSDNRDIPEADGTNDQSYGTSICDAKSKFGERHSAARLAKDEDISENGELLKRKLNRGTARLKVKGKAGESCPESEMTPLSPTSGLRIGGRATRERNAVRVDDPKKATDVNNRSAGLE

SEQ ID NO: 87608 - protein, 323 aa, Setaria italica
  misc_feature (158)..(158): Xaa can be any naturally occurring amino acid
  Transcript Sequence Number=SeqID_21634
  Homolog annotation: Hit_ID=O49432; Match level="QueryCoverage=79%, HitCoverage=55%, E-value=9e-68, Identity=50%"; Hit description =Polygalacturonase QRT3
PQETRRGRGSNHGACEAGEGRGAMLPLLGALLLALAAGVSAWPHDGAVGHGAAGFASGAGGERRYRDLAQRRMESVRSSFGATRRDLATASAGARVYHVTDYGADPTGAADATDAINKAIADAFRAPSNATMTGGIPDLGGAEVHLDGGTYLVKAPIXLPASGGGNFRIHGGSLRASDDFPTDRYLIELSAKGSSRSYDYEYATLRDLMLDCNYRGGGVSLVNSLRVGIDNLYVVHFNSDGVAVSGGHETMIRNSFLGQHMTAGTDPGERRFTGTGIRLDGNDNSVTDVVIFSAATGIMVTRPANSISGVHCYNKATGSAARG

SEQ ID NO: 87609 - protein, 97 aa, Setaria italica
  Transcript Sequence Number=SeqID_21635
MEPARRGGRGAMLPLLGALLLALAAGVSAWPHDGAVGHGAAGFASGAGGERRYRDLAQRRMESVRSSFGATRRDLATVSTRSKPYQHDYLSFSSLQE

SEQ ID NO: 87610 - protein, 140 aa, Setaria italica
  Transcript Sequence Number=SeqID_21636
  Gene Ontology: Mol. function=calcium ion binding
  Homolog annotation: Hit_ID=B6U193; Match level="QueryCoverage=100%, HitCoverage=25%, E-value=5e-69, Identity=89%"; Hit description=EH -domain-containing protein 1
DSKRQGYLGFAEFVIAMQLVSLAQAGNEITQDSLNREDLSTLDPPVMEGVDELVARSKAVVKRVHPEDNGTPQVQASSIYHWFGSKSAQKAQMPLTAVTSVIDGLKRLYLEKLKPLEVAYRFNDFASPLLTSSDFDAKPM

SEQ ID NO: 87611 - protein, 187 aa, Setaria italica
  Transcript Sequence Number=SeqID_21637
  Homolog annotation: Hit_ID=Q53LD3; Match level="QueryCoverage=98%, HitCoverage=53%, E-value=4e-31, Identity=46%"; Hit description=F-box domain containing protein, expressed
SFESVKELREFVEYLLLSRGGAPLDTFELRFGNFGDFNFLGFSDEDLPSLKIWFWYVVTRKAWVLRLRLHNDFEGFHALPELGGLPMASKHLTRLELHGVAVYRSFPDFSSCPALQHLEFNKCEFSLVKKISSDSLKYLSITESICGFYDSFRTHICAPNLVSLRLDKVYGCTPVLESMPSLVEAFV

SEQ ID NO: 87612 - protein, 65 aa, Setaria italica
  Transcript Sequence Number=SeqID_21638
PASACGMSSLEPLMPTNVIPAETFAINKGKGGRMPRMIERGWNLSGSVQGTGSSLVREESRHGDY

SEQ ID NO: 87613 - protein, 124 aa, Setaria italica
  Transcript Sequence Number=SeqID_21639
  Homolog annotation: Hit_ID=Q2R122; Match level="QueryCoverage=100%, HitCoverage=100%, E-value=8e-38, Identity=68%"; Hit description =Early flowering 4, putative, expressed
  Pfam annotation: Domain name=DUF1313; Domain location=17-107; Score =175.5; E_value=1.6e-49; Accession=PF07011.3; Description=Protein of unknown function (DUF1313)
MDGDSFSGMANSLLEQNRLLISEIIQTFHKSFVQVQSLLEQNRLLISEINQNHESRAPRNLTRNVGLIRELNNNIRRVVGLYADISASFARNADTAASSDGDSSGTLRSPDGRAGAGHKRVRPG

SEQ ID NO: 87614 - protein, 121 aa, Setaria italica
  Transcript Sequence Number=SeqID_21640
  Homolog annotation: Hit_ID=B6SXG0; Match level="QueryCoverage=100%, HitCoverage=97%, E-value=2e-42, Identity=83%"; Hit description=EARLY flowering 4 protein
  Pfam annotation: Domain name=DUF1313; Domain location=19-109; Score =161.0; E_value=3.5e-45; Accession=PF07011.3; Description=Protein of unknown function (DUF1313)
MEGGETTLSGFGGGAGAAGAGVDTKVLHAFQTSFVQVQSLLDQNRVLINEINQNHESKVPGDLSRNVGLIRELNNNIRRVVDLYADLSSLFAASDGGRAASEGGSVGTVRQAGAGHKRIRS

SEQ ID NO: 87615 - protein, 106 aa, Setaria italica
  Transcript Sequence Number=SeqID_21641
NITEQAQGTTHDAPSKLQIQSDKKEPQPSKDGGKQMKETTNSSSLSTSKEVLPSLPEKRKQEQQLKGDRSGISLQENVKQGYETTPLGSGTVQQKKDISTDADKNY

SEQ ID NO: 87616 - protein, 43 aa, Setaria italica
  Transcript Sequence Number=SeqID_21642
QGRRRPLADGAAQLLLCEDRHRLHGHHQPHQVNTVGGFATVVY

SEQ ID NO: 87617 - protein, 52 aa, Setaria italica
  Transcript Sequence Number=SeqID_21643
KGLSLLGKKEGRLLETKWRQQLDEEMQSQMRQHDLAKEVCGLLTDAIKGLGP

SEQ ID NO: 87618 - protein, 98 aa, Setaria italica
  Transcript Sequence Number=SeqID_21644
  Gene Ontology: Mol. function=oxidoreductase activity; Biological process=oxidation reduction
  Homolog annotation: Hit_ID=B6SHP9; Match level="QueryCoverage=92%, HitCoverage=28%, E-value=2e-39, Identity=84%"; Hit description =Flavonol synthase/flavanone 3-hydroxylase
  Pfam annotation: Domain name=2OG-FeII_Oxy; Domain location=1-94; Score=62.7; E_value=1.4e-15; Accession=PF03171.12; Description=2OG -Fe(II) oxygenase superfamily
NCYPKASQGATTIGLAPHSDYGFLTILLTSCPGLEVVDRSSNIWKTVQKLPHALHVHIGDHMEVLSNGRMKTVVHRALLKPEEARISIPSILLVLSTY

SEQ ID NO: 87619 - protein, 98 aa, Setaria italica
  Transcript Sequence Number=SeqID_21645
RHICLKIRTYQGMIFHAKPPKFSFPFHMVYFYVLHILLSKFEMVDLVSNCFFVAPCGSLFENLIKRILLYSSIFKSLMYMTSYLLKNVCSIFQHKYTI

SEQ ID NO: 87620 - protein, 106 aa, Setaria italica
  Transcript Sequence Number=SeqID_21646
  Gene Ontology: Mol. function=electron carrier activity; Biological process=response to oxidative stress
  Homolog annotation: Hit_ID=B6T173; Match level="QueryCoverage=100%, HitCoverage=31%, E-value=3e-49, Identity=88%"; Hit description =Peroxidase 1
  Pfam annotation: Domain name=peroxidase; Domain location=1-105; Score= 22.3; E_value=1.3e-11; Accession=PF00141.15; Description=Peroxidase
GLIRMHFHDCFVRGCDSSILINSTPGNRAEKDSVANNPSMRGFDVIDDAKAVLEAHCPRTVSCADVVAFAARDGAYLAGGIEYQVPSGRRDGRVSIEAEVLNNNVP

SEQ ID NO: 87621 - protein, 73 aa, Setaria italica
  Transcript Sequence Number=SeqID_21647
VSGAAATATAPPAPAINAQLRSHAAPLIGEEIEPLAYLSPPFRRGGSGRRAPPPGASFGHGPRRRRRRRRRRR

SEQ ID NO: 87622 - protein, 115 aa, Setaria italica
  Transcript Sequence Number=SeqID_21648
  Gene Ontology: Mol. function=sulfotransferase activity; Cellular component=cytoplasm
  Homolog annotation: Hit_ID=B6STJ6; Match level="QueryCoverage=100%, HitCoverage=31%, E-value=7e-26, Identity=50%"; Hit description =Flavonol 4-sulfotransferase
  Pfam annotation: Domain name=Sulfotransfer_1; Domain location=1-111; Score=-85.9; E_value=0.078; Accession=PF00685.19; Description =Sulfotransferase domain
FLRYEEILQDPASNVVKLSRLLGRPFSPAEEEAGVAMDVMRICSFEKLKDLEVNKAGSGSGSPSLRGVREGAFVNSSYVRRGEAGDWANHMTPEMARRLDAVMEERLCGSGFSFS

SEQ ID NO: 87623 - protein, 63 aa, Setaria italica
  Transcript Sequence Number=SeqID_21649
  Subcellular localization annotation: CTP_CleavageSite=25; ConfidenceScore=5.73e-01
SIAPDSPAGTASRWASIRTGFQNFRASLGSRKFLRLSPSSSLGTNASATESLDEIFRKLKRSS

SEQ ID NO: 87624 - protein, 55 aa, Setaria italica
  Transcript Sequence Number=SeqID_21650
SHAAYVTVRESFYLSDTMPVCLLPALLFFFFGANTILLFFSPNCCAFRLELLLES

SEQ ID NO: 87625 - protein, 254 aa, Setaria italica
  Transcript Sequence Number=SeqID_21651
  Gene Ontology: Mol. function=hydrolase activity; Cellular component =endoplasmic reticulum membrane; Biological process=biological_process
  Homolog annotation: Hit_ID=Q5VSV6; Match level="QueryCoverage=100%, HitCoverage=100%, E-value=1e-120, Identity=78%"; Hit description =OSJNBa0009P12.20 protein
  Pfam annotation: Domain name=SNARE_assoc; Domain location=84-205; Score=110.0; E_value=7.9e-30; Accession=PF09335.3; Description=SNARE associated Golgi protein
MGREERFPVWEAALGAGVAAAFAAGLVGVYLSMPDSDYSFLKLPRNLEELQILTGHLENYTSDYTLQVLVGYCAVYIFMQTFMIPGTIFMSLLAGALFGQLRGVALVVFAATAGASSCYFLSKMIGKPLVFSLWPDKLSFFQKQVAKRREKLLNYMLFLRVTPTLPNTFINLASPIVDVPYHTFLLATLIGLIPAAYVTVRAGIALGELTSLSDLYDTQSIALLFLIGVVSVTPALLGKDEAQEKPSEMVVGAS

SEQ ID NO: 87626 - protein, 58 aa, Setaria italica
  Transcript Sequence Number=SeqID_21652
GKGKLLRAGSKISYLPPFLIIAHSAEVFYTLYHFLLLILLRIEQTLTIVQHNVIFTLL

SEQ ID NO: 87627 - protein, 112 aa, Setaria italica
  Transcript Sequence Number=SeqID_21653
  Subcellular localization annotation: CTP_CleavageSite=35; ConfidenceScore=5.13e-01
STSARRISLQTSNVLFRKEHKKRLRSVFMFSSSAPAVLKSKIIAKSFELVRILDLEDGEVLKLPKEIGGLLHLRYLGLRGTKVKELPRTLQKLCHLQTLDIRKTQIKIVAFH

SEQ ID NO: 87628 - protein, 102 aa, Setaria italica
  Transcript Sequence Number=SeqID_21654
VGAHGLEGAALLRHFLSSPRSRESANTGREFIHGFLSLCSEAVAPISPQHDNLFDQMEILEQVAVTESISGAYCNLKHSAFCKPFLVNVCLIKDMSVLKEYE

SEQ ID NO: 87629 - protein, 274 aa, Setaria italica
  misc_feature (261)..(261): Xaa can be any naturally occurring amino acid
  Transcript Sequence Number=SeqID_21655
  Gene Ontology: Mol. function=binding; Cellular component=cellular _component; Biological process=response to unfolded protein
  Homolog annotation: Hit_ID=B6U6S4; Match level="QueryCoverage=100%, HitCoverage=100%, E-value=1e-147, Identity=66%"; Hit description =Heat shock protein STI
  Pfam annotation: Domain name=TPR_1; Domain location=118-151; Score =34.5; E_value=4.4e-07; Accession=PF00515.20; Description =Tetratricopeptide repeat
  Pfam annotation: Domain name=TPR_1; Domain location=152-185; Score =36.7; E_value=9.3e-08; Accession=PF00515.20; Description =Tetratricopeptide repeat
  Pfam annotation: Domain name=TPR_1; Domain location=20-57; Score =10.7; E_value=0.31; Accession=PF00515.20; Description=Tetratricopepti de repeat
  Pfam annotation: Domain name=TPR_1; Domain location=84-117; Score =33.5; E_value=8.4e-07; Accession=PF00515.20; Description =Tetratricopeptide repeat
  Pfam annotation: Domain name=TPR_2; Domain location=118-151; Score =24.6; E_value=0.00042; Accession=PF07719.9; Description =Tetratricopeptide repeat
  Pfam annotation: Domain name=TPR_2; Domain location=152-185; Score =25.2; E_value=0.00026; Accession=PF07719.9; Description =Tetratricopeptide repeat
  Pfam annotation: Domain name=TPR_2; Domain location=20-57; Score=7.2; E_value=4.3; Accession=PF07719.9; Description=Tetratricopeptide repeat
  Pfam annotation: Domain name=TPR_2; Domain location=84-117; Score =27.6; E_value=5.1e-05; Accession=PF07719.9; Description =Tetratricopeptide repeat
  Pfam module annotation: Pfam domain module=TPR_1::TPR_1::TPR_1::TPR _1::TPR_2::TPR_2::TPR_2::TPR_2; Domain location=118-151::152-185::20 -57::84-117::118-151::152-185::20-57::84-117
DCGKAVERGRELHADFKMISRALTRKGTALAKLAKSSKDYDVAIETFQKALTEHRNPDTLKKLNEAERAKKELEQQEYYDPKIADEEREKGNEFFKQQKYPEAVKHYTEALRRNPKDPRVYSNRAACYTKLGALPEGLKDAEKCIELDPTFSKGYTRKGAIQFFMKEYDKALETYQAGLKHDPKNQELLDGVRRCVEQINKASRGELSEEELKERQNKAMQDPEIQNILTDPIMRQVLTDLQENPRAAQAHLKNPGVMQKXIQKLVSAGIVQMK

SEQ ID NO: 87630 - protein, 84 aa, Setaria italica
  Transcript Sequence Number=SeqID_21656
  Gene Ontology: Mol. function=protein binding
EHKLNPIYNDEDTHVHDVLLYVVSGLGFGLGFSAIWWLLIFNEAVRKLYFQSIDSVCEKFFVRMILLKINVISIIMDRNRNPVS

SEQ ID NO: 87631 - protein, 108 aa, Setaria italica
  Transcript Sequence Number=SeqID_21657
  Homolog annotation: Hit_ID=Q4AC10; Match level="QueryCoverage=88%, HitCoverage=34%, E-value=7e-12, Identity=42%"; Hit description =117M18_10
GCLMWTDLHCQDARSRLSVLKKSIKFARLLEAKSKGDEYAANVAGYNSKRAVEMEFELSQQRRSLFLYTENALVRESTQLHSAFVKLKELRENCKTDVETIGNSSVGK

SEQ ID NO: 87632 - protein, 38 aa, Setaria italica
  Transcript Sequence Number=SeqID_21658
SLDDPDTKIMRPQQVYTGVWLRPHDLCIGIIERLFPMC

SEQ ID NO: 87633 - protein, 265 aa, Setaria italica
  Transcript Sequence Number=SeqID_21659
  Gene Ontology: Mol. function=protein serine/threonine kinase activity; Biological process=protein amino acid phosphorylation
  Homolog annotation: Hit_ID=B9S5G6; Match level="QueryCoverage=99%, HitCoverage=47%, E-value=1e-123, Identity=77%"; Hit description =Protein kinase, putative
  Pfam annotation: Domain name=Pkinase; Domain location=2-236; Score =212.0; E_value=1.6e-60; Accession=PF00069.17; Description=Protein kinase domain
  Pfam annotation: Domain name=Pkinase_Tyr; Domain location=2-236; Score=240.1; E_value=5.6e-69; Accession=PF07714.9; Description =Protein tyrosine kinase
  Pfam module annotation: Pfam domain module=Pkinase::Pkinase_Tyr; Domain location=2-236::2-236
LYRGSYCSQDVAIKVVMPERISADMYQDFAQEVYIMRKVRHRNVVQFIGACTRQPNLYIVTGFMSGGSVYDYLHKKNSAFKLPEILRVATDISKGMNYLHQNNIIHRDLKTVNLLMDENKVVKVADFGVARVKDQSGVMTAETGTYRWMAPEVIEHKPYGHKADVFSFAIVLWELLTGKIPYEYLTPLQAAIGVVQKGIRPTIPKDTHPKLVELLQKCWHRDPAERPDFFEILEILQRLSKEVGTDTEGRHKAKTGFLSALKRGR

SEQ ID NO: 87634 - protein, 200 aa, Setaria italica
  Transcript Sequence Number=SeqID_21660
  Gene Ontology: Mol. function=transferase activity, transferring glycosyl groups; Biological process=metabolic process
  Homolog annotation: Hit_ID=Q8W2B6; Match level="QueryCoverage=100%, HitCoverage=43%, E-value=1e-73, Identity=65%"; Hit description=UDP -glucosyltransferase BX9
LGPLNMVSPPVESSLYELQQDRRCLDWLDTKAPGSVIYVSFGSLAAMDPHEFAELAWGLADSKRPFIWVVRPSLIRGFESGDLPEGFREEISDRGRIVDWAPQDEVLAHPAVCAFLTHNGWNSTMEAISEGVPMISRPFFGDQYGSAMFVCDVWRVGVEVQVENQLERGKVRDAIEKLMGSKEGKEIRERMTNLKEIAEK

SEQ ID NO: 87635 - protein, 132 aa, Setaria italica
  Transcript Sequence Number=SeqID_21661
  Gene Ontology: Mol. function=enzyme inhibitor activity; Cellular component=cell wall; Biological process=cell wall modification
  Subcellular localization annotation: CTP_CleavageSite=23; ConfidenceScore=5.44e-01
MAADFRTTATALPALLVLSLLVVAARSDNTAATPVTPSTACNETTDPNFCRTVLPSNGTSNLYTYGRFSVAKSLANANRFLGLVNRYLSRGSGRLSPGALAALQDCQLLSGLNIDFLSAAGATLNTSANSTL

SEQ ID NO: 87636 - protein, 77 aa, Setaria italica
  Transcript Sequence Number=SeqID_21662
  Gene Ontology: Mol. function=sulfate adenylyltransferase (ATP) activity; Biological process=sulfate assimilation
  Homolog annotation: Hit_ID=O48888; Match level="QueryCoverage=100%, HitCoverage=17%, E-value=7e-11, Identity=56%"; Hit description=ATP sulfurylase
  Subcellular localization annotation: CTP_CleavageSite=47; ConfidenceScore=5.41e-01
MATQAAFLARFPQLAAQPGRDRAGMGCPARVSVAAIGSAAKVGVGMRAVARRGVRCRASLIEPDGGRLVDLVAPEEG

SEQ ID NO: 87637 - protein, 91 aa, Setaria italica
  Transcript Sequence Number=SeqID_21663
PNSSMAGSRRHGSGGERRREERAYLDLVTSMAASMKSMELTGRLLDGGEDRRGPPSWTAMATSPEPASMDPVVGFPHRHRLDLVRRRCCMR

SEQ ID NO: 87638 - protein, 78 aa, Setaria italica
  Transcript Sequence Number=SeqID_21664
RVLRYDLATRAMSVVHLPPASHNQRIVLTTAEGGGLGFARMDGYWLGLWSMDVGGGGGAVEWTQDRVIDLRTLLPVID

SEQ ID NO: 87639 - protein, 226 aa, Setaria italica
  Transcript Sequence Number=SeqID_21665
  Gene Ontology: Mol. function=transferase activity; Biological process= response to stress
  Homolog annotation: Hit_ID=B6UD80; Match level="QueryCoverage=100%, HitCoverage=93%, E-value=8e-80, Identity=62%"; Hit description =Glutathione S-transferase
  Pfam annotation: Domain name=GST_C; Domain location=96-193; Score =22.6; E_value=0.00047; Accession=PF00043.17; Description=Glutathione S-transferase, C-terminal domain
  Pfam annotation: Domain name=GST_N; Domain location=3-76; Score=71.8; E_value=2.6e-18; Accession=PF02798.12; Description=Glutathione S -transferase, N-terminal domain
  Pfam module annotation: Pfam domain module=GST_C::GST_N; Domain location=96-193::3-76
MSPPVKLIGAFGSPFVHRAEAALRLKGVPYELIQEDMKNKSELLLQHNPIHKKVPVLLHGDRAVCESLLIVEYVDEAFDGPPLLPSDPIGRATARFWAHFMDQKLRRPLVLSFCTEGEMQEGFIKETKENLALLEAQIDGKRFFGGDSIGYLDIALSGISHWMGVFEEVAGVSFMGDEYPALHRWAKEYTSDEAVKQCLPNREHLRDHFAAKRDKIKMVAMAMPQQ

SEQ ID NO: 87640 - protein, 230 aa, Setaria italica
  Transcript Sequence Number=SeqID_21666
CQSIAQRDYGRVQQFLTVIAEASIKTNEVEWANILQQNEHQFSVDALRDLINYLSTSGTIDADPALSLVRALQSQCEATSIKDTYLLVDGTGTQQYERSLLENEGENSSSNLTEQDQLTDTRKYWCTNKLLDAPDSDRDIPQLGVAAVMSRDISLSRPRLENKHGQCDLGQSGTQVSAIDEVLDSMSYYGDSLYREVPSASEILELWEQERINDMFDPKAESRTTRTRGS

SEQ ID NO: 87641 - protein, 112 aa, Setaria italica
  misc_feature (1)..(41): Xaa can be any naturally occurring amino acid
  Transcript Sequence Number=SeqID_21667
XXXXXXXXXXXXXXXXXXXXXXXXXXXXXXXXXXXXXXXXXTIKQATRFHQYIRSKFRDKKFNLVTSRNTNLCSINDLVLTSYQYKMTVSETWQTNRAVDTSTADALLTPAR

SEQ ID NO: 87642 - protein, 137 aa, Setaria italica
  Transcript Sequence Number=SeqID_21668
  Subcellular localization annotation: CTP_CleavageSite=49; ConfidenceScore=5.06e-01
DPTWLGVLVTVWSTALLVDSISSVPRTPTNSSDETNKERETGTRRGERRAGEERRPAKKEGGGRGREKEAKSRRCCLVGVCKYFLFCYPLGEDSPNLGEQRRQKAPAPAGVLSLSFSRGGRGLWLPRLQVAASSARG

SEQ ID NO: 87643 - protein, 48 aa, Setaria italica
  misc_feature (33)..(33): Xaa can be any naturally occurring amino acid
  Transcript Sequence Number=SeqID_21669
PDYSVMFLVSCQHEMLSSHSLSAVVSTPSVALXRQDEATDAMATSSKH

SEQ ID NO: 87644 - protein, 46 aa, Setaria italica
  Transcript Sequence Number=SeqID_21670
IVTSSCQTLNHALAFIYTHRLQVVTTQYAMTWLYFFLMYCLQLFPF

SEQ ID NO: 87645 - protein, 103 aa, Setaria italica
  Transcript Sequence Number=SeqID_21671
  Gene Ontology: Mol. function=protein serine/threonine kinase activity; Cellular component=integral to membrane
  Homolog annotation: Hit_ID=Q8SB69; Match level="QueryCoverage=100%, HitCoverage=8%, E-value=1e-36, Identity=70%"; Hit description =Leucine Rich Repeat family protein, expressed
  Subcellular localization annotation: CTP_CleavageSite=84; ConfidenceScore=5.27e-01
MLDLSKNSLSGPIPSQLSNMMALSFVNVSFNELSGQLPAGWVKLAERSPEGFLGNPQLCIQSNNAPCSRNQSAKRIRKNTRIIVALLVSALAIMAAGLFLVHY

SEQ ID NO: 87646 - protein, 230 aa, Setaria italica
  Transcript Sequence Number=SeqID_21672
  Homolog annotation: Hit_ID=B9RZY7; Match level="QueryCoverage=91%, HitCoverage=45%, E-value=2e-13, Identity=28%"; Hit description =Nucleic acid binding protein, putative
  Pfam annotation: Domain name=MATH; Domain location=2-123; Score=-2.5; E_value=0.078; Accession=PF00917.18; Description=MATH domain
LLDKQKGWTNSGYFEIKGLKWYLQLNLKDRKSGDTKDYVSLVLVLSKTSDLKPDIIVEASFKLLIYDQAYGKHKEHEVNHHFQTEESRKSRVSCMIPVETLKEPSSGFVIGDSCVFGVELIKLSTAKANHSSDKVQVIQKTNGFSAREAYTWVIDDFLALKGRCYSPEFEIGGLKWYLTMYPSGIDDSGEFASLYLHMAKPDASLQSSGVLVELSLSIKDQVTSNRNTMT

SEQ ID NO: 87647 - protein, 507 aa, Setaria italica
  misc_feature (60)..(60): Xaa can be any naturally occurring amino acid
  Transcript Sequence Number=SeqID_21673
  Gene Ontology: Cellular component=plasma membrane
  Homolog annotation: Hit_ID=B9RBN5; Match level="QueryCoverage=74%, HitCoverage=59%, E-value=1e-104, Identity=52%"; Hit description =Ankyrin repeat-containing protein, putative
  Pfam annotation: Domain name=Ank; Domain location=107-136; Score =19.9; E_value=0.011; Accession=PF00023.22; Description=Ankyrin repeat
  Pfam annotation: Domain name=Ank; Domain location=140-172; Score =32.5; E_value=1.7e-06; Accession=PF00023.22; Description=Ankyrin repeat
  Pfam annotation: Domain name=Ank; Domain location=174-215; Score=2.3; E_value=17; Accession=PF00023.22; Description=Ankyrin repeat
  Pfam annotation: Domain name=Ank; Domain location=222-256; Score =23.7; E_value=0.00075; Accession=PF00023.22; Description=Ankyrin repeat
  Pfam annotation: Domain name=Ank; Domain location=257-293; Score=3.6; E_value=11; Accession=PF00023.22; Description=Ankyrin repeat
  Pfam annotation: Domain name=Ank; Domain location=73-105; Score=9.3; E_value=1.6; Accession=PF00023.22; Description=Ankyrin repeat
  Pfam module annotation: Pfam domain module=Ank::Ank::Ank::Ank::Ank::An k; Domain location=107-136::140-172::174-215::222-256::257-293::73-105
LAPLHGRRGRGRRVRPGAARGAAAARVRRGGVRRHRHPLRRGEERAPRGVPAPARRGPVXPASCPGEEFRREMMNRAVHAAARGGNLEVLRELLRGCSDAAAYRDAQGSTILHAAAARGQVEVVNDLIASFDIANSVDDQGNTSLHIAAFRGHLPVVEALITASPSLISATNEAGDTFLHMALTGFGTPGFRRLDRQMELVRQLVGGAFVDVSSIINVQNDDGKTVLHLAVVGNLHSNLVELLMSMPSIDLNIHDNDGMTPLDLLRKQPRTASSEILIKQLILAGGITNSRDHETRSAIASQLKMHCIVGSPGTSFKISDAEIFLHAGIDVSGISERTTSFSSSVGRVDAEIPGPKLKRLNSFQDAAKHIKVLLKWPRRKGKKPGGGQKDLDDDASSVDSVKSWSHGETPTPLRQRYSRISSLFNNKRTYAGTSSPSEAMKKSGVLQPESVPASASWSSSSLVDKIEAVHLDNDQPSPYFSRLIRHTPKKYASLNSRLMNQPLRLGA

SEQ ID NO: 87648 - protein, 199 aa, Setaria italica
  Transcript Sequence Number=SeqID_21674
  Homolog annotation: Hit_ID=B6UQE3; Match level="QueryCoverage=100%, HitCoverage=55%, E-value=2e-77, Identity=69%"; Hit description=ALMT2 (Fragment)
  Pfam annotation: Domain name=UPF0005; Domain location=1-199; Score =126.3; E_value=1e-34; Accession=PF01027.12; Description =Uncharacterised protein family UPF0005
VYKSFNRVVATASAGVLALGVHWVAGKTGEFEPYILTGSLFLLAAAATFSRFIPTVKARFDYGVTIFILTYSLVAVSGYRVDELAVLAQQRVSTIAIGIFMCLAVAIFVCPVWAGQELHLLTTRNMDKLAAALEGCVEDYFAEGPAAQPQARSDGYRCVLNSKASEDAQANLARWEPAHGRFGFRHPYGQYGKVGAAMR

SEQ ID NO: 87649 - protein, 65 aa, Setaria italica
  Transcript Sequence Number=SeqID_21675
HASRDIFYYLLACFLTCVFYYRSSAWRFIHSDSEIQTISVAALIHQCDNYHLCLDSDDVFRASRD

SEQ ID NO: 87650 - protein, 223 aa, Setaria italica
  Transcript Sequence Number=SeqID_21676
  Gene Ontology: Mol. function=serine-type endopeptidase activity; Biological process=proteolysis
  Homolog annotation: Hit_ID=B6U2A2; Match level="QueryCoverage=100%, HitCoverage=28%, E-value=1e-113, Identity=86%"; Hit description =Protease 2
  Pfam annotation: Domain name=Peptidase_S9; Domain location=96-223; Score=-6.1; E_value=1.5e-06; Accession=PF00326.13; Description =Prolyl oligopeptidase family
LTILHQEEITSLSANLGTVGLQSNVSSIQQNLQLVENSQSWSDLSKLFSCKRIEVVSHDGVLIPLVILYSREAHRHGESPGILYGYGAYGEDLDKSWCSERLSLLSRGWVLAFADVRGGGDLSWHLAGTKANKINSIQDFSACGKHLIKEGLVHKNRLCAIGCSAGGLLVGAVINTLPDLFSAAVLKVPFLDICNTMLDPTLPLTVLDYEEFGDPNIPAEFEA

SEQ ID NO: 87651 - protein, 299 aa, Setaria italica
  Transcript Sequence Number=SeqID_21677
  Gene Ontology: Mol. function=unfolded protein binding; Cellular component=cytoplasm; Biological process=response to stress
  Homolog annotation: Hit_ID=Q08277; Match level="QueryCoverage=100%, HitCoverage=42%, E-value=1e-137, Identity=81%"; Hit description=Heat shock protein 82
  Pfam annotation: Domain name=HATPase_c; Domain location=1-155; Score =43.1; E_value=1.1e-09; Accession=PF02518.18; Description=Histidine kinase-, DNA gyrase B-, and HSP90-like ATPase
  Pfam annotation: Domain name=HSP90; Domain location=158-299; Score= -212.6; E_value=4.8e-07; Accession=PF00183.10; Description=Hsp90 protein
  Pfam module annotation: Pfam domain module=HATPase_c::HSP90; Domain location=1-155::158-299
KEIFLRELISNASDALDKIRFESLTDKSKLDAQPELFIRLVPDKASKTLSIIDSGVGMTKSDLVNNLGTIARSGTKEFMEALAAGATDVSMIGQFGVGFYSAYLVADKVVVTTKHNDDEQYVWESQAGGSFTVTLDTAGERLGRGTKITLFLKDDQLEYLEERRLKDLVKKHSEFISYPIYLWTEKTTEKEISDDEDEDDKKEGDVEELDDDGDKNKEKKKKKVKEVSHEWVQINKQKPIWLRKPEEITREEYASFYKSLTNDWEDHLAVKHFSVEGQLEFKAILFVPRRAPFDLFDTR

SEQ ID NO: 87652 - protein, 116 aa, Setaria italica
  Transcript Sequence Number=SeqID_21678
MLQGTTMAVHQARFGGGLAGCLPLPPCAGGGILVDEHTWALKDYGALLSAAANDGGYRYDRAAQSDLTCNGGGGGGGAVAVPSRKRGIEDELERYYAAASSAALLPIPGMHEPIAV

SEQ ID NO: 87653 - protein, 79 aa, Setaria italica
  Transcript Sequence Number=SeqID_21679
LPVVISHNPAAAAGFKLIRWIACGDIDPVVADLCRHRVVAVLTLYQMLSPLSCIKTSDRSEFHFLLRNHPVPPASMTIL

SEQ ID NO: 87654 - protein, 97 aa, Setaria italica
  Transcript Sequence Number=SeqID_21680
MVERAPSAKWFRRIHLGVFPYLIKPAVSGMHDYLMHNLISNHSMSMFSISPNLTLTNKLASLLSYALHICSSICHLQNSCLEANKIEILSFVLGSDE

SEQ ID NO: 87655 - protein, 275 aa, Setaria italica
  misc_feature (257)..(257): Xaa can be any naturally occurring amino acid
  Transcript Sequence Number=SeqID_21681
  Gene Ontology: Mol. function=transferase activity, transferring groups other than amino-acyl groups
  Homolog annotation: Hit_ID=Q6IYE4; Match level="QueryCoverage=100%, HitCoverage=59%, E-value=2e-81, Identity=58%"; Hit description=HCBT -like putative PR (Fragment)
  Pfam annotation: Domain name=Transferase; Domain location=1-274; Score=-134.9; E_value=0.00023; Accession=PF02458.7; Description =Transferase family
SVQVTELADGVFIGMTLNHSAGDGTAFWHFLNTWSEIHRRAGGGVGVSDDDLRDLSTPPPVLQRWFVETCPVPIPMPFSKLEHIVKKFERTAVQECFFTFSAASVKKLKAQANAEIAGTDTAAATISSLQAVLAHLWRAVCRARRLPREQVTFYSVVVGCRGRVNGIPPGYVGNAMVFGKAVATAGEIDDKGLGWTAWLLNRAVASFDEASMRESLESWVRDPDFTYMGNLSSAGTALVTGSSPRFDVFGNDFGWGXPVAIRSGAGNKADGKATV

SEQ ID NO: 87656 - protein, 34 aa, Setaria italica
  Transcript Sequence Number=SeqID_21682
FSSDFAASMVRLGNVSPLTGSAGEIRIDCRKVNS

SEQ ID NO: 87657 - protein, 193 aa, Setaria italica
  misc_feature (157)..(157): Xaa can be any naturally occurring amino acid
  misc_feature (165)..(165): Xaa can be any naturally occurring amino acid
  Transcript Sequence Number=SeqID_21683
  Gene Ontology: Mol. function=protein disulfide oxidoreductase activity; Biological process=intracellular signaling cascade
MESTDKDEKNLTVTKECTKPEENCGDAGDLSRKTEKLNVEEATNSSNVDLSEESEAQIREEGNSAKYLNGQMNESTSTDAMEPVDSNQITKEILAEDKSEEPVFDGTEVPEMEEMRRSSNQSVELDSEAQGSVLNERAVAIKNFVKEKSAIAVSTFXRRLSGKKXENEFKVEADKSDGSECINSEKTGSDAEP

SEQ ID NO: 87658 - protein, 76 aa, Setaria italica
  Transcript Sequence Number=SeqID_21684
MHPSGAGDYAPYYPPYPSPAAPPPATYPSVSAPASAPPYSPYPTDFAPAPSYPAYPPAQPVDLPHYAPPAAAPPPP

SEQ ID NO: 87659 - protein, 156 aa, Setaria italica
  misc_feature (126)..(126): Xaa can be any naturally occurring amino acid
  Transcript Sequence Number=SeqID_21685
  Homolog annotation: Hit_ID=B6TT03; Match level="QueryCoverage=100%, HitCoverage=92%, E-value=2e-15, Identity=36%"; Hit description =Calmodulin binding protein
  Pfam annotation: Domain name=Auxin_inducible; Domain location=50-113; Score=103.6; E_value=6.5e-28; Accession=PF02519.6; Description=Auxin responsive protein
MKEGGEKKNILAKTLQRCRTSLAAAHRRRPPPAQAPDRSASWGGAAVPAAGYFTVLVGPEKERFGVRARCANHPLFRALLDEAETEYGFAGCDGPLELPCAVDDFMQVMWEMEQGDPTASPGCGRXAAGSSRGHHLHQVTGYQMVSPARFLVAGRS

SEQ ID NO: 87660 - protein, 404 aa, Setaria italica
  misc_feature (377)..(377): Xaa can be any naturally occurring amino acid
  Transcript Sequence Number=SeqID_21686
  Gene Ontology: Mol. function=serine-type carboxypeptidase activity; Cellular component=extracellular region; Biological process =proteolysis
  Homolog annotation: Hit_ID=Q53PA1; Match level="QueryCoverage=100%, HitCoverage=83%, E-value=1e-160, Identity=64%"; Hit description =Serine carboxypeptidase
  Pfam annotation: Domain name=Peptidase_S10; Domain location=1-401; Score=419.2; E_value=6.6e-123; Accession=PF00450.14; Description =Serine carboxypeptidase
QSEGDAHHDPVLLWLTGGDRCSVLSGLAFEIGPVKFVIEPYNRSLPRLQYNPYTWTKAASIIFVDSPVGAGFSFSRNLKGYDVGDISASLQLKKFLAEWFSEHPDFLTNPFYIGGDSYAGKIIPFLAQKISEDLESGVSRPALNLKGYLVGNPGTGEGIDVESRVPYAHGHGIISDQLYETIMEHCHGEDYSKPKNVICAQALNRFSKLLDECMMAHILYKTCVYVSPRPKDGTEKRKSLKEETEALSRKPPRPPMDCVTYKNYLSYFWANNNITRDALGIRKGSKAEWLRCHDGDLPYSQDIKSSIKYHRNVTLKGYRVLVYSGDQDAVIPFIGTQAWVRSLNFPTVDDWRAWHLDGQSAGFTITYSNNLTFATIXGGGHTAPEYEPERSFAMFRRWISNETL

SEQ ID NO: 87661 - protein, 152 aa, Setaria italica
  misc_feature (110)..(110): Xaa can be any naturally occurring amino acid
  Transcript Sequence Number=SeqID_21687
  Gene Ontology: Mol. function=oxidoreductase activity, acting on single donors with incorporation of molecular oxygen, incorporation of two atoms of oxygen; Cellular component=cytoplasm; Biological process=oxidation reduction
  Homolog annotation: Hit_ID=B6UEM5; Match level="QueryCoverage=99%, HitCoverage=27%, E-value=8e-64, Identity=75%"; Hit description =Carotenoid cleavage dioxygenase
FGTDAKKPFLVIGVVSADGTRLKHRVDLKLDRCTLCHDIGVTLKYNIIMDVPLTIDIIRLIKGGPLIQFEKESYARIGVMPRYGDADSIIWFNVEPFCMFHLINCFEEGXIEIVVQGLRSPDSLIPGPRLAHNEYDSKISEPAEDNKSMKQG

SEQ ID NO: 87662 - protein, 337 aa, Setaria italica
  misc_feature (84)..(86): Xaa can be any naturally occurring amino acid
  misc_feature (125)..(125): Xaa can be any naturally occurring amino acid
  Transcript Sequence Number=SeqID_21688
  Gene Ontology: Mol. function=oxidoreductase activity, acting on single donors with incorporation of molecular oxygen, incorporation of two atoms of oxygen; Cellular component=cytoplasm; Biological process=oxidation reduction
  Homolog annotation: Hit_ID=B6UEM5; Match level="QueryCoverage=82%, HitCoverage=47%, E-value=9e-80, Identity=53%"; Hit description =Carotenoid cleavage dioxygenase
  Pfam annotation: Domain name=RPE65; Domain location=1-337; Score= -139.7; E_value=1.8e-07; Accession=PF03055.7; Description=Retinal pigment epithelial membrane protein
MQRKPFLVIGVVSADGTRLKHRVDLKLDRCTLCHDIGVTLKLIQFEKESYARIGVMPRYGDADSLSGSMLTILHVPSLSNCFEXXXGITMLRVVRLSHIAVIVLIKHLFILQITHYRSYLSLLLXVVQGLRSPDSLIPGPRLAHNEYDSKISEPAEDNKSMKQGTSNEFSFRLYQWRLNLKTKSVSGEYLTGTEDSLELPMINNMYTGLQHSYAYAQVVDSLTSSSGNCEKVNPKYRGFAKFFLKKRNNTEIAGSSLIKMHYHWLGKDQFCSGAAFVPRVGGSHEDDGWIISFVHNEKTNTSQVHIIDAQRFEDAPVAKITLPRRVPYGFHGTFIHR

SEQ ID NO: 87663 - protein, 268 aa, Setaria italica
  misc_feature (261)..(261): Xaa can be any naturally occurring amino acid
  Transcript Sequence Number=SeqID_21689
LGDGEGSEFDDEFDDYDDEDDYDDDGLDDDFYDDPKMMMKPMAMPPGAGGGDKKGGNGGGGGKKGGGGNEIPVHIKGNGQANHGGGKNGGGGQPHNAKGGAPGGGNQPGPGKKGGGAVGVGGPMGGMLPQQAMMRPNMMGGAGFPGAGQMGGGPMTMSMPMGHHPHMGIMQQGGGGGGAVQGMPAPGFYQGGANAGGGGGMPSGAEMLQAAAAAGNPMAQQQYMLMQQQQQQQQQQQQQQQQQQQMMMMNGHGHGPHGHRXHHHGHGG

SEQ ID NO: 87664 - protein, 519 aa, Setaria italica
  misc_feature (171)..(171): Xaa can be any naturally occurring amino acid
  Transcript Sequence Number=SeqID_21690
  Gene Ontology: Mol. function=electron carrier activity; Biological process=oxidation reduction
  Homolog annotation: Hit_ID=Q8VYA9; Match level="QueryCoverage=91%, HitCoverage=92%, E-value=0.0, Identity=72%"; Hit description =Cytochrome P450 monooxygenase CYP92A1
  Pfam annotation: Domain name=p450; Domain location=35-505; Score =334.2; E_value=2.6e-97; Accession=PF00067.14; Description=Cytochrome P450
MELPTLAAFLAIVLGLALFLGTLLLHRRRRAYNLPPGPKPWPIIGNMNLMGELPHSSIHELSKRYGPLMQLRFGSLPVVIAASAEMAKHILKINDAAFSDRPRFAVGKYIAYDCSDILWSPYGPYLRQTRRICAAELFSTKRLQSFDHIRDEEVRVMLRDLRRASGRTVGXLRDTLQMLTLGVISRVVLGRKYVEEEAAGEGASPPVITPAGYREMVDEFFVLHGAFNIGDFIPWLDWLDLQGYVRRMKKLSAMFDRFLEHVLDVHNERRRLEGERFAAKDMVDVLQDLADDPNLEVQLSRDNVKAITQDLIIGATDTSANTMEWALSELLKNPKILAKATDELNNVIGPDRLATEKDLPHLPYIDAILKETMRVHPAAPMLAPHLAREDTRVDGYDILAGTAVFINVWSIGRDPALWDAPEEFRPERFLERKIDMRGQDFELLPFGSGRRMCPGYSLAMKVMALGLANLLHGFVWRLPEGMTVEDLSMEETFFLAMPRKFPLEATVEPRLPAHLYLGG

SEQ ID NO: 87665 - protein, 352 aa, Setaria italica
  misc_feature (8)..(8): Xaa can be any naturally occurring amino acid
  misc_feature (168)..(168): Xaa can be any naturally occurring amino acid
  Transcript Sequence Number=SeqID_21691
  Gene Ontology: Mol. function=1,3-beta-glucan synthase activity; Cellular component=1,3-beta-glucan synthase complex; Biological process=cell wall organization and biogenesis
  Homolog annotation: Hit_ID=B9RVZ6; Match level="QueryCoverage=99%, HitCoverage=19%, E-value=1e-129, Identity=63%"; Hit description =Transferase, transferring glycosyl groups, putative
NSGRIGKXGFVEQRSFWNVYRSFDRVWVMLILFFQAAMIVAWDGRKPWDSLRYRDIQVRVLSVFITWAALRIVQAVLDAGTQYSLVRRETTLLAVRMVLKVLVAVGWTITFTVLYVRMWDQRWRDRRWSFAAETRVLNYLEAAAVFIIPQVLALVLFIVPWIRNLLEXTNWRILYVLTWWFQTRTFVGRGVREGLVDNIKYSTFWVCLLTAKFVFSYFLQIKPMVAPTKTILSLHDIRRNWFEFMPHTERIAVILLWIPVVLIYLMDIQIWYAVFSSLTGALIGLFSHLGEIRSVEQLRLRFQFFASAMQFNLMPEEHLDAVRGGLRSKLYDAINRLKLRYGFGRPYRKIEG

SEQ ID NO: 87666 - protein, 268 aa, Setaria italica
  Transcript Sequence Number=SeqID_21692
MCRDRADAEICECLRATVSDLSKFFMGKIAAPELKALLFGPLNQIKPVTDPSQKTVKRKCVNPNKTSTAKKKKKPLEQDKAVISPSQKDDRREKPLEQDKSAICPGQKDDKKKSGNMGRDSGSSHVLQKKVKATVYTSSSRPPSVSVPPQRMHQAVLTRPIINQFAHLPQHMIAPPAFGYGLPPPHLHSAYHHPHQGLLGRPQGDFLHVYPGIQLQHQSQAMFGPPAAHHPVLNGLHPYGTNGAQQVQRIDNRLVQRPPYGMGPGFWR

SEQ ID NO: 87667 - protein, 71 aa, Setaria italica
  Transcript Sequence Number=SeqID_21693
MATLAPGVLLKLLQSMHTDERVAGEHRSPVLQVTAVVPALTASTSDSLLVPSNGFLLNLSDGLHSTYVQLP

SEQ ID NO: 87668 - protein, 55 aa, Setaria italica
  Transcript Sequence Number=SeqID_21694
STITSKQHFCDTIIVLLFSHSKVPIYSYNSVLYNFINNCWSKPGLYFGTDGVIRV

SEQ ID NO: 87669 - protein, 145 aa, Setaria italica
  Transcript Sequence Number=SeqID_21695
  Gene Ontology: Mol. function=serine-type endopeptidase activity; Biological process=negative regulation of catalytic activity
  Homolog annotation: Hit_ID=O48610; Match level="QueryCoverage=60%, HitCoverage=83%, E-value=3e-29, Identity=67%"; Hit description =Subtilisin-like protease (Fragment)
MAIGTRTVFSPLGHINPNRAADPGLIYDIDPNDYTKFFGCTFKKFIQCNATMLPGYHLNLPSIAIPDLKHPITVSRTVTNVGEVDAVYHAVTESPAGIKMDVEPSVLVFNATNKVITFRVKLSPLWRLQGDYTFGRPYLGTMTKD

SEQ ID NO: 87670 - protein, 434 aa, Setaria italica
  Transcript Sequence Number=SeqID_21696
  Gene Ontology: Mol. function=serine-type endopeptidase activity; Biological process=negative regulation of catalytic activity
  Homolog annotation: Hit_ID=Q6MW77; Match level="QueryCoverage=99%, HitCoverage=55%, E-value=1e-113, Identity=50%"; Hit description =B1248C03.20 protein
  Pfam annotation: Domain name=PA; Domain location=45-154; Score=51.3; E_value=3.7e-12; Accession=PF02225.14; Description=PA domain
  Pfam annotation: Domain name=Peptidase_S8; Domain location=43-283; Score=-67.1; E_value=0.004; Accession=PF00082.14; Description =Subtilase family
  Pfam module annotation: Pfam domain module=PA::Peptidase_S8; Domain location=45-154::43-283
GDHLVYAAGNSGPMPQVVRNTAPWVITVAASKIDRSFPTVITLGNKKQIVGQSLYYEGRNSSGRTFRLLANGGLCTDDALNGTDVRGQIVLCVAFQVPPLALFPLALKNVLDAGASGLIFAQYSMDALDAEADCKGIPCVLVDFNMANQIGNYMGAASSPVAKIEPARSVTGEEVVAPKIAAFSSRGPSIDYPEVIKPDIAAPGASILAAKGDSYALLSGTSMATPHVAGAVALLKALYPDWSPAALKSAIMTTASITDARGMPILAQGLPRKIADPFDYGGGNINPNRAADPGLIYDIDPNDYTKFFGCIIKTSTVCNATVLPGYLLNLPSISVPDLRYPVTISRTVTNVGEVDVVYHASIESPAGIKMDVEPSVLVFNATNKVITFQVKLSPLWRLQGDYTFGSLTWHNDQKTVRIPIAVQMTIYDFYADVA

SEQ ID NO: 87671 - protein, 149 aa, Setaria italica
  misc_feature (32)..(32): Xaa can be any naturally occurring amino acid
  misc_feature (67)..(67): Xaa can be any naturally occurring amino acid
  Transcript Sequence Number=SeqID_21697
  Gene Ontology: Mol. function=transcription factor activity; Cellular component=transcription factor complex; Biological process =regulation of transcription, DNA-dependent
  Homolog annotation: Hit_ID=B6TKM3; Match level="QueryCoverage=97%, HitCoverage=32%, E-value=6e-63, Identity=82%"; Hit description =Transcription factor E2F2
YRIVLRSTMGPIDVYLVSQFEEMSGMETPPRXTPTISMDSLENPRTPLAAECSKSAGIEPNIQEGFXLPPDAPSSSQDNGGMMKIVPSELDTDADYWLLSDTGVSITDMWKTAPDVEWDGIEKFNAEDFLEVSTPRQQDKPADVVDPRV

SEQ ID NO: 87672 - protein, 330 aa, Setaria italica
  Transcript Sequence Number=SeqID_21698
  Gene Ontology: Mol. function=transcription factor activity; Cellular component=transcription factor complex; Biological process =regulation of transcription, DNA-dependent
  Homolog annotation: Hit_ID=B6TKM3; Match level="QueryCoverage=96%, HitCoverage=71%, E-value=1e-154, Identity=84%"; Hit description =Transcription factor E2F2
  Pfam annotation: Domain name=E2F_TDP; Domain location=31-96; Score =136.0; E_value=1.2e-37; Accession=PF02319.12; Description =Transcription factor E2Fdimerisation partner (TDP)
  Subcellular localization annotation: CTP_CleavageSite=47; ConfidenceScore=5.22e-01
PKATKGQKPCPQTPLNFGSPGNPSTPVGGCRYDSSLGLLTKKFLNLLKGAPGGIVDLNNAAETLEVQKRRIYDITNVLEGIGLIEKKLKNNIRWKGIDDSRPGEVSDDMSILQADIEALTLQEQNLDERINEMRDRLRELTEDENNQKWLYVTDDDIKSLPCFQNQTLIAIKAPHGTTLEVPDPDEVNDYPQRRYRIVLRSTMGPIDVYLVSQFEEMSGMETPPRPTPTISMDSLENPRTPLAAECSKSAGIEPNIQEGFTLPPDAPSSSQDNGGMMKIVPSELDTDADYWLLSDTGVSITDMWKTAPDVEWDGVIRFSCSISYVFVVNF

SEQ ID NO: 87673 - protein, 126 aa, Setaria italica
  Transcript Sequence Number=SeqID_21699
  Gene Ontology: Mol. function=electron carrier activity; Biological process=gibberellin catabolic process
  Homolog annotation: Hit_ID=A1KXL0; Match level="QueryCoverage=97%, HitCoverage=25%, E-value=2e-44, Identity=70%"; Hit description =Cytochrome P450-like protein (Fragment)
FRDMQLGKLRAPRGTYLFVPVSTMHHDAAIWGPTARRFDPGRFRDGVAAACKHPQAFMPFGLGARTCLGHNLALVEVKALVALVLSRFAVALSPDYRHAPAFRFIIEPEFVLRLLVRRLGHEDDGH

SEQ ID NO: 87674 - protein, 104 aa, Setaria italica
  Transcript Sequence Number=SeqID_21700
  Gene Ontology: Mol. function=protein serine/threonine kinase activity; Biological process=protein amino acid phosphorylation
  Homolog annotation: Hit_ID=Q6K4J3; Match level="QueryCoverage=89%, HitCoverage=11%, E-value=4e-19, Identity=50%"; Hit description =Putative wall-associated serine/threonine kinase
YLDGPEEDRSLVSRFTTSVKAGRHRELLDTQVRNEMDDEMLAEIAHLLMRCLSMNGEERPTMKEVAERLERLRRYQQHPWAEADRNAEENQSLLSMEQLNSNYQ

SEQ ID NO: 87675 - protein, 119 aa, Setaria italica
  Transcript Sequence Number=SeqID_21701
  Gene Ontology: Mol. function=protein serine/threonine kinase activity; Cellular component=plasma membrane; Biological process =protein amino acid phosphorylation
  Homolog annotation: Hit_ID=B9S327; Match level="QueryCoverage=84%, HitCoverage=25%, E-value=2e-44, Identity=87%"; Hit description =Serine/threonine-protein kinase PBS1, putative
DFSYLLDVYSYGVVLLELLTGRVPVDMKRPPGEGVLVNWALPMLTDREKVVRILDPALEGQYSLKDAVQVAAIAAMCVQPEADYRPLMADVVQSLVPLVKNRSAQKACNPNVQASKPLD

SEQ ID NO: 87676 - protein, 113 aa, Setaria italica
  misc_feature (62)..(62): Xaa can be any naturally occurring amino acid
  Transcript Sequence Number=SeqID_21702
  Gene Ontology: Mol. function=transferase activity
  Homolog annotation: Hit_ID=Q5QPY7; Match level="QueryCoverage=94%, HitCoverage=20%, E-value=5e-44, Identity=81%"; Hit description =Glycosyltransferase
GAGLTNAVFLPPGGVVIQVVPYGKLERMARADFGEPVADMGLRYLEYSVAVEESSLLEMLGXEHPVIKDPEAVHRSGWDKVAEYYLGKQDVRIDVGRFAPTLAQALDHLRQQR

SEQ ID NO: 87677 - protein, 140 aa, Setaria italica
  Transcript Sequence Number=SeqID_21703
  Gene Ontology: Mol. function=oxidoreductase activity; Cellular component=extracellular region; Biological process=oxidation reduction
  Homolog annotation: Hit_ID=B6SZ55; Match level="QueryCoverage=57%, HitCoverage=13%, E-value=1e-24, Identity=71%"; Hit description=L -ascorbate oxidase
  Pfam annotation: Domain name=Cu-oxidase; Domain location=8-96; Score=- 19.7; E_value=0.015; Accession=PF00394.14; Description=Multicopper oxidase
VELSSAIDQQRLRLADPPEGLGGEGDHLGVDALVVPVAEQQVQLAVDDIDLYSGDSYSVLLTADQDPSSNYWVSVGVRGRLPKTAPALAVLNYRPNAASKLPALAPPATPAWNDYGHSKAFTYRIRARAGTPPPPATADR

SEQ ID NO: 87678 - protein, 288 aa, Setaria italica
  Transcript Sequence Number=SeqID_21704
  Gene Ontology: Mol. function=oxidoreductase activity; Cellular component=extracellular region; Biological process=oxidation reduction
  Homolog annotation: Hit_ID=B6SZ55; Match level="QueryCoverage=89%, HitCoverage=45%, E-value=1e-143, Identity=92%"; Hit description=L -ascorbate oxidase
  Pfam annotation: Domain name=Cu-oxidase; Domain location=160-288; Score=92.0; E_value=2.1e-24; Accession=PF00394.14; Description =Multicopper oxidase
  Pfam annotation: Domain name=Cu-oxidase_2; Domain location=41-150; Score=-10.2; E_value=0.0094; Accession=PF07731.6; Description =Multicopper oxidase
  Pfam annotation: Domain name=Cu-oxidase_3; Domain location=34-151; Score=208.7; E_value=1.6e-59; Accession=PF07732.7; Description =Multicopper oxidase
  Pfam module annotation: Pfam domain module=Cu-oxidase::Cu-oxidase _2::Cu-oxidase_3; Domain location=160-288::41-150::34-151
MRLPLLAAACCALLACAARPQCAEAAKARHFKWEISNMFWSPDCEEKVVIGINGQFPGPTIRARAGDTIHVELKNALHTEGVVIHWHGIRQIGTPWMDGTAAISQCAINPEETFTYRFVVDKPGTYFYHGHYGMQRAAGLYGSLIVDVAEGEEEPFKYDGELNLLLSDWYHESIHTQMVALSSKPFRWIGEPQSLLINGRGQFNCSMAAAHTPGATQCAAVNRQCAPVILPVQPNKTYRLRVASTTSLASLNLAVGNHKLTVVEADGNYVDPFAVDDIDLYSGDSYSV

SEQ ID NO: 87679 - protein, 75 aa, Setaria italica
  Transcript Sequence Number=SeqID_21705
  Gene Ontology: Mol. function=heat shock protein binding; Biological process=protein folding
  Pfam annotation: Domain name=DnaJ_CXXCXGXG; Domain location=6-59; Score=-23.8; E_value=0.0024; Accession=PF00684.11; Description=DnaJ central domain (4 repeats)
  Subcellular localization annotation: CTP_CleavageSite=34; ConfidenceScore=5.04e-01
ISTPNGLAADMMNKPGIQKAVCRNCNGSGAVICRGKLVCPVCLGTGLPNNKGLLRRPEAKQLLDKMYNGKILPRS

SEQ ID NO: 87680 - protein, 76 aa, Setaria italica
  Transcript Sequence Number=SeqID_21706
  Gene Ontology: Mol. function=heat shock protein binding; Biological process=protein folding
  Homolog annotation: Hit_ID=A8JFP5; Match level="QueryCoverage=68%, HitCoverage=26%, E-value=1e-15, Identity=73%"; Hit description=DnaJ -like zinc-finger protein
MFLVKLHTGSSFFLEWIHFQLDSGDMCGGTGKWKALNRKRAKDVYEFTECPNCYGRGKLVCPVCLGTGLPNNKGLL

SEQ ID NO: 87681 - protein, 267 aa, Setaria italica
  Transcript Sequence Number=SeqID_21707
  Gene Ontology: Mol. function=serine-type carboxypeptidase activity; Cellular component=extracellular region; Biological process =proteolysis
  Homolog annotation: Hit_ID=B6U5U4; Match level="QueryCoverage=100%, HitCoverage=57%, E-value=1e-154, Identity=96%"; Hit description =Virulence-related protein Nf314
  Pfam annotation: Domain name=Peptidase_S10; Domain location=1-261; Score=151.8; E_value=2.1e-42; Accession=PF00450.14; Description =Serine carboxypeptidase
LAQLIYEKNKGIQNPTINLKGFMVGNAVTDDYHDYLGTFEYWWTHGLISDKTYHNLKATCLLESSQHPSPDCVKNLNLASAEEGNIDPYSLNTKPCNYTASLKVSLGGRYPWLSRAYDPCTERYASIYYNRPEVQMALHANTTGIHYPWQTCSDIVGTYWADSPRSMLPIYQELIAAGMKIWVFSGDTDAVVPVTATRYSIDALKLPTLVNWYPWYDHGKVGGWSQVYKGLTLVTIAGAGHEVPLHRPRQALIMFRHFLKNKPMPTQ

SEQ ID NO: 87682 - protein, 158 aa, Setaria italica
  Transcript Sequence Number=SeqID_21708
  Gene Ontology: Mol. function=nucleotide binding; Cellular component =cytoplasm; Biological process=response to stress
  Homolog annotation: Hit_ID=Q5EBY7; Match level="QueryCoverage=94%, HitCoverage=39%, E-value=8e-61, Identity=79%"; Hit description=Heat shock protein 70 (Fragment)
RYGRNKERTGQKNKITITNDKGRLSKEEIEKMVQEAEKYKAEDEEHKKKVDAKNALENYAYNMRNTIKDDKIASKLGADDKKRIEEAIDGAISWLDSNQLAEADEFEDKMKELEGICNPIIAKMYQGAGADMGGAAGMDEDIPAGGSSGAGPKIEEVD

SEQ ID NO: 87683 - protein, 75 aa, Setaria italica
  misc_feature (10)..(10): Xaa can be any naturally occurring amino acid
  misc_feature (12)..(12): Xaa can be any naturally occurring amino acid
  Transcript Sequence Number=SeqID_21709
SYHHPPCFPXKXTPLDYMMLPVVVVKSYVLVDTYILVSFNQLWGTYAFDTNSVDWHKVDNQLLPFIGRATPHGSL

SEQ ID NO: 87684 - protein, 203 aa, Setaria italica
  Transcript Sequence Number=SeqID_21710
  Homolog annotation: Hit_ID=Q6EPK9; Match level="QueryCoverage=94%, HitCoverage=25%, E-value=1e-18, Identity=36%"; Hit description =Ankyrin-like protein
  Pfam annotation: Domain name=Ank; Domain location=131-168; Score =10.9; E_value=0.99; Accession=PF00023.22; Description=Ankyrin repeat
  Pfam annotation: Domain name=Ank; Domain location=179-201; Score=5.8; E_value=5.3; Accession=PF00023.22; Description=Ankyrin repeat
  Pfam module annotation: Pfam domain module=Ank::Ank; Domain location =131-168::179-201
MATNTREEPRSPRASMVSSEADAKMVVATSREDCQKLKDLVCQKDATTMLVVMSSSKQDPHEVAPATMHPLVAAAACRGNREELNVLLNREGPQEHPIPVSIFGNQVAAYSCADMEQGTNEVSLLNGVTVEGNTALHLVAANGDGEDFLKCADLIHTKNKVLLSMEDKAGLLLSTQNKKGDTPLHCAARAGKTKMASHLIGLT

SEQ ID NO: 87685 - protein, 137 aa, Setaria italica
  misc_feature (18)..(18): Xaa can be any naturally occurring amino acid
  misc_feature (44)..(44): Xaa can be any naturally occurring amino acid
  misc_feature (66)..(66): Xaa can be any naturally occurring amino acid
  Transcript Sequence Number=SeqID_21711
  Gene Ontology: Mol. function=zinc ion binding; Cellular component =nucleus
  Subcellular localization annotation: CTP_CleavageSite=83; ConfidenceScore=5.14e-01
AERAIVNGDNHTQPGSSXGGPAKKRRGRPPKKSKEISVDSMVNXFGNKDSLLVSTDVTQKGAFHSXSTASNLGSHVRTHGVVDLMEEVNPSELSFDSRYGVQSGHPHNFGNQLHAGNTLQFGQPTSAAEHSRVQWVY

SEQ ID NO: 87686 - protein, 126 aa, Setaria italica
  Transcript Sequence Number=SeqID_21712
  Subcellular localization annotation: CTP_CleavageSite=44; ConfidenceScore=5.34e-01
MRSQQPKCNSIWPACFNAYAPSPRRQRRPKVQTKDSSSSFLHISCSIKQSQKTGTGFGNITHTECQHYIYWHGYFPAKHTKLLLYYQILHADGAVKRIFMFFFLLPDCVTLMITPQNNQRLFYRVT

SEQ ID NO: 87687 - protein, 570 aa, Setaria italica
  misc_feature (197)..(197): Xaa can be any naturally occurring amino acid
  Transcript Sequence Number=SeqID_21713
  Gene Ontology: Mol. function=zinc ion binding; Cellular component =nucleus
  Homolog annotation: Hit_ID=Q2QZM0; Match level="QueryCoverage=68%, HitCoverage=45%, E-value=4e-89, Identity=41%"; Hit description =Transposon protein, putative, unclassified
  Pfam annotation: Domain name=MULE; Domain location=16-112; Score =128.9; E_value=1.6e-35; Accession=PF10551.1; Description=MULE transposase domain
  Pfam annotation: Domain name=SWIM; Domain location=301-334; Score =18.9; E_value=0.0039; Accession=PF04434.9; Description=SWIM zinc finger
  Pfam module annotation: Pfam domain module=MULE::SWIM; Domain location=16-112::301-334
WADSRSRAAYQYFDDAILIDTTCLRNKYHVPLVSFLGVNNHGQLVLLGCGLLSDESTESFLWLFKSWLTCMKGRSPNAVVTDECVAIKAAVREVFPKTRHRISDWHVLRSVSEKLGELPEYEAMRTELETVIYDSLSDDEFEARWKNWIDRFGLQDNEWITFLYENRHLWAPAFLKDAFWAGLCTFSQRESPSAFFXDSINSETTLVSFLDSYMILLENKYKMEQQDDFDSSNSSRVVISKYPMEEQLSRLYTLNMFIRFQDELKATMHCQVQLDGSASSFIVIDLTEPASEMLNKKYEVVHCMAANKMECNCGLFQFCGIICRHALSVLKWQQVYDILPCYVLSRWRSDFKLLHYSDNPSKDLATSNHVERYDYISLQFLRLVEIGMSSDEKYRHAVRLIKDIKETLLDDNLCRDLEQKLTPAERAIVNGDNHTQPGSSEGGPAKKRRGRPPKKSKEISVDSMDSLLVSTDVTQKGAFHSSSTASNLGSHVRTHGVVDLMEEVNPSELSFDSRYGVQSGHPHNFGNQLHAGYTLQFGQPTSAAEHSRVQWVYPNSMYQDDQVPYGRRTS

SEQ ID NO: 87688 - protein, 123 aa, Setaria italica
  Transcript Sequence Number=SeqID_21714
  Gene Ontology: Mol. function=structural constituent of cell wall
  Homolog annotation: Hit_ID=Q1A4H2; Match level="QueryCoverage=66%, HitCoverage=23%, E-value=8e-26, Identity=63%"; Hit description=Late embryogenic abundant protein
  Subcellular localization annotation: CTP_CleavageSite=37; ConfidenceScore=5.80e-01
PLPQSPPPPVVVSSPPPPLPSSPPVPVPSPPTSNVVYCKNTTGYPTCTAPATCPKKCPQSCHMDCDTCKPVCDCNLPGAVCEDPRFIGGDGNTFYFHGRRDRDFCLLSDVNLHINGHFIGSHV

SEQ ID NO: 87689 - protein, 147 aa, Setaria italica
  Transcript Sequence Number=SeqID_21715
  Gene Ontology: Mol. function=aspartic-type endopeptidase activity; Biological process=DNA integration
  Homolog annotation: Hit_ID=Q9C8F4; Match level="QueryCoverage=77%, HitCoverage=9%, E-value=2e-10, Identity=30%"; Hit description =Ty1/copia-element polyprotein
MISDAAGATTEPRIADHPVFSTKFILDSGATTHATGNRDLFPWLFPVQEGGEIVAANGHGLAVRGFGPVVMENFRVNGVLYVPGLSCNVISLSKLIELDYGVAFSRAGCLIKDLRTGEIVGNASLVRGLYHFDRLEIPLDRAPAMAP

SEQ ID NO: 87690 - protein, 430 aa, Setaria italica
  Transcript Sequence Number=SeqID_21716
  Gene Ontology: Cellular component=membrane
  Homolog annotation: Hit_ID=B6TRP3; Match level="QueryCoverage=93%, HitCoverage=100%, E-value=0.0, Identity=84%"; Hit description =Nodulin-like protein
  Pfam annotation: Domain name=DUF6; Domain location=235-364; Score =56.6; E_value=9.6e-14; Accession=PF00892.12; Description=Integral membrane protein DUF6
  Pfam annotation: Domain name=DUF6; Domain location=54-187; Score =64.1; E_value=5.2e-16; Accession=PF00892.12; Description=Integral membrane protein DUF6
  Pfam annotation: Domain name=DUF914; Domain location=97-397; Score= -214.6; E_value=0.076; Accession=PF06027.4; Description=Eukaryotic protein of unknown function (DUF914)
  Pfam annotation: Domain name=TPT; Domain location=226-364; Score= -12.7; E_value=0.0035; Accession=PF03151.8; Description=Triose -phosphate Transporter family
  Pfam module annotation: Pfam domain module=DUF6::DUF6::DUF914::TPT; Domain location=235-364::54-187::97-397::226-364
PLSCSLSSVLAPSYPADRQACIACCYPRDTVAMGCCGDFFEKAKPYIAMISLQFGYAGMNVITKVSLNHGMSHYVLVVYRHAFATVSIAPFALILERKVRPKMTWSVFLQIFVLALLGPVIDQNFYYAGLKFTGPTFACAMSNILPAMTFVMAVIFRMEKVDLKKVRCQAKVAGTLVTVAGAMMMTLYKGPLMKMAGSSHVQPHGHGGAEAPIAAIDPSGREWFLGSLFVIIATLAWASLFILQAHTLKQYAAPLSLTTLICFVGTLQAIVVTFAMEHRPSVWTIGFDMNLLAAAYAGIVTSSIAYYVQGLVIQKTGPVFASAFSPLMMIIVAVMGSFILSEKIFLGGVLGAVLIVMGLYSVLWGKHKETQEKEEEEAMELPVASKANGVYDDATFIKEIAAAAVVGDDSECKKVNGVKSSSDGHGAGAV

SEQ ID NO: 87691 - protein, 59 aa, Setaria italica
  Transcript Sequence Number=SeqID_21717
  Gene Ontology: Mol. function=metal ion binding
  Homolog annotation: Hit_ID=B6TU96; Match level="QueryCoverage=100%, HitCoverage=35%, E-value=3e-23, Identity=86%"; Hit description =Protein binding protein
  Pfam annotation: Domain name=zf-C3HC4; Domain location=1-39; Score =35.2; E_value=2.6e-07; Accession=PF00097.17; Description=Zinc finger, C3HC4 type (RING finger)
CLAGFEAGAVVNRLPCGHVFHRGCLETWLRYERATCPLCRARVPIPADEAPGLRYPECE

SEQ ID NO: 87692 - protein, 95 aa, Setaria italica
  Transcript Sequence Number=SeqID_21718
AGWGEGEAAAAAASKAKKRRKETEARGKRRRQGGIFSGTQRRQQLVRGNQRLRLPAHQSNPIIPLGLVGSDSVCISDHPYQMITEIMSMSDEQVG

SEQ ID NO: 87693 - protein, 100 aa, Setaria italica
  Transcript Sequence Number=SeqID_21719
  Gene Ontology: Mol. function=triacylglycerol lipase activity; Biological process=lipid metabolic process
  Homolog annotation: Hit_ID=B4FGY5; Match level="QueryCoverage=79%, HitCoverage=22%, E-value=9e-20, Identity=51%"; Hit description=Lipase
KGNTTEQICDNSGEDPDCCRSVSMFSLSIQDHFTYLGVDMQADDWSTCRIIAAQSVKQFRKELTSNIITTKHNADISIVEPSVQTDWRQFLDSHQHSVRI

SEQ ID NO: 87694 - protein, 98 aa, Setaria italica
  Transcript Sequence Number=SeqID_21720
NFVSCDPSLPLSIGESGWIGVDDGWVPARRRLSPPPQPATPRIELVVDRPLVARRRVFMYILPIYVVSDKKTNGGSICAHWPCRRLCFFFFLLAPLGP

SEQ ID NO: 87695 - protein, 626 aa, Setaria italica
  Transcript Sequence Number=SeqID_21721
  Gene Ontology: Mol. function=oxidoreductase activity; Cellular component=extracellular region; Biological process=lignin catabolic process
  Homolog annotation: Hit_ID=Q339K6; Match level="QueryCoverage=93%, HitCoverage=96%, E-value=0.0, Identity=63%"; Hit description=Laccase- 15
  Pfam annotation: Domain name=Cu-oxidase; Domain location=165-319; Score=145.6; E_value=1.6e-40; Accession=PF00394.14; Description =Multicopper oxidase
  Pfam annotation: Domain name=Cu-oxidase_2; Domain location=443-585; Score=162.0; E_value=1.7e-45; Accession=PF07731.6; Description =Multicopper oxidase
  Pfam annotation: Domain name=Cu-oxidase_3; Domain location=38-154; Score=200.5; E_value=4.5e-57; Accession=PF07732.7; Description =Multicopper oxidase
  Pfam module annotation: Pfam domain module=Cu-oxidase::Cu-oxidase _2::Cu-oxidase_3; Domain location=165-319::443-585::38-154
MQTMERRSFPALVAATVILFLSATAQPAAGAIVEHTFIVGQMNMTHLCKEMLVTVVNGQLPGPVIEVTEGDTVVVHVVNKSPYNITIHWHGVKQQLNCWADGVPMITQCPIGPNNNFTYTFNVTGQEGTLWWHAHVAYLRGTLHGAIIIRPRHGVSSYPFPEPHREIPIVLGEWWQMDLQKASMDIKYSTADDDPSAATINGKLGDLYNCSGVKEDGFVLDVEAGKTYLLRIINAALFYEYYIRIAGHKFTVVAADANYVSPLTTDLLAVAPGQTLDALVVANAAPGRYYMVASPNQPPKPDFQHPTFTTRGIVQYTNENHSNGGSSGPGAEGPLSRNLSVVAPEMPDEHDTMTSYYFHGKLTALHPSRSLPVPARVDEHLLIALGLGSVCKRGQSCNRGESEETFTLATMNNISFELPAATAAGPLLEAHYYNTGSLDMLRELPDRPPRMYNFTDPSLIPSGPREASLEATSKATIVRRFRHGTVVEVVFQSTAMWQSDSNPMHLHGHDMFVLAQGLGNYNAATDVAKYNLVDPPVRNTVLVPRLGWVAVRFVANNPGAWFVHCHFSFHLSMGMAAVFVVEDGPTVNTSLPPPPADFLTCYRKNNPVADEFDIRSTKSEIPAETR

SEQ ID NO: 87696 - protein, 72 aa, Setaria italica
  Transcript Sequence Number=SeqID_21722
  Gene Ontology: Mol. function=electron carrier activity; Cellular component=integral to thylakoid membrane; Biological process =electron transport chain
  Homolog annotation: Hit_ID=P46617; Match level="QueryCoverage=100%, HitCoverage=22%, E-value=7e-36, Identity=98%"; Hit description =Apocytochrome f
MENRNTFSWLKEQMIRSISVSIMIYVITRTSISNAYPIFAQQGYENPREATGRIVCANCHLANKPVDIEVPQ

SEQ ID NO: 87697 - protein, 163 aa, Setaria italica
  Transcript Sequence Number=SeqID_21723
  Gene Ontology: Mol. function=protein serine/threonine kinase activity; Cellular component=peroxisome; Biological process=protein amino acid phosphorylation
  Homolog annotation: Hit_ID=B9SYH0; Match level="QueryCoverage=69%, HitCoverage=42%, E-value=1e-41, Identity=66%"; Hit description=ATP binding protein, putative
LAPEYFTHGIVDEKTDVFAFGVFLLELISGRKPVDGSHKSLIAWAKPYLSDGVVQGLVDPRLGDGYDAGQLRRLMFVASLCVRAAAAWRPTMTQVLELLESGEISQDQWQMPEKEEQDELWEFDDLDDFEEDDDDDYDNYDDESDSPSISSSACSIHPNVIPP

SEQ ID NO: 87698 - protein, 112 aa, Setaria italica
  misc_feature (22)..(23): Xaa can be any naturally occurring amino acid
  Transcript Sequence Number=SeqID_21724
  Gene Ontology: Mol. function=electron carrier activity; Biological process=oxidation reduction
  Homolog annotation: Hit_ID=B6SZ78; Match level="QueryCoverage=99%, HitCoverage=22%, E-value=3e-31, Identity=58%"; Hit description =Cytochrome P450 CYP71W7
FRPVREEEVANLLRSVSGECGXXPVNLREGICHAINDIAVRTAIGNRCKYQDEYLHELDEAVRLTGGFNLADLYPSSRLVRRLSAAARDMERCQKNMYRIIECIIQERKGSP

SEQ ID NO: 87699 - protein, 236 aa, Setaria italica
  Transcript Sequence Number=SeqID_21725
  Gene Ontology: Mol. function=electron carrier activity; Biological process=oxidation reduction
  Homolog annotation: Hit_ID=Q6ATT7; Match level="QueryCoverage=82%, HitCoverage=38%, E-value=1e-80, Identity=71%"; Hit description =Cytochrome P450, putative
  Pfam annotation: Domain name=p450; Domain location=1-236; Score= -98.6; E_value=6.8e-07; Accession=PF00067.14; Description=Cytochrome P450
MSGTFGPLMLLRFGAVPTLVVSSAEAAREVMKTPRPRLLQPPQKNMYRIIECIIQERKGSPTPEREDDLLGVLLRLQREGGLQFDLTNEIVSTVIFDIFSAGSETSSTVLVWAMAELVKNPRVMHKAQAELRETFKGQDKLTEGDMVKLRYLHLVIKETLRLHAPVPLLLPRECRQTCQVMGYDIPKGTKVFVNVWAIARDSKLWQDGDEFRPERFDGSSIDFKGTHFEYTPFGAG

SEQ ID NO: 87700 - protein, 154 aa, Setaria italica
  misc_feature (121)..(121): Xaa can be any naturally occurring amino acid
  misc_feature (134)..(134): Xaa can be any naturally occurring amino acid
  misc_feature (147)..(147): Xaa can be any naturally occurring amino acid
  Transcript Sequence Number=SeqID_21726
  Gene Ontology: Mol. function=microtubule binding
  Homolog annotation: Hit_ID=B6T577; Match level="QueryCoverage=100%, HitCoverage=48%, E-value=1e-82, Identity=94%"; Hit description =Microtubule-associated protein RP/EB family member 3
  Pfam annotation: Domain name=CH; Domain location=15-116; Score=44.8; E_value=3.4e-10; Accession=PF00307.23; Description=Calponin homology (CH) domain
MAASNIGMMDGAYFVGRNEILAWINTTLQLGLSKVEEAASGAVACQLMDAAHPGAVPMHKVNFDAKTEYEMIQNYKVLQDVFNKLKITKHIEVNKLTKGRPLDNLEFMQWMKRYCDSVNGXFMTSYNASERREXSKGGKETNRRTSXVPSHTPA

SEQ ID NO: 87701 - protein, 271 aa, Setaria italica
  Transcript Sequence Number=SeqID_21727
  Gene Ontology: Mol. function=microtubule binding; Cellular component =cortical microtubule cytoskeleton; Biological process=negative regulation of microtubule polymerization
  Homolog annotation: Hit_ID=B6T577; Match level="QueryCoverage=88%, HitCoverage=71%, E-value=1e-109, Identity=83%"; Hit description =Microtubule-associated protein RP/EB family member 3
  Pfam annotation: Domain name=EB1; Domain location=183-221; Score =76.4; E_value=1e-19; Accession=PF03271.9; Description=EB1-like C -terminal motif
GRSGRRFVVVLVLYWYVGRLPGGRLSVLSTKVNFDAKTEYEMIQNYKVLQDVFNKLKITKHIEVNKLTKGRPLDNLEFMQWMKRYCDSVNGGFMTSYNASERRENSKGGKETNRRTSVPSHTPAKSASAGHKAQASSHGAAKRASASGQAPNAPQRGAKPSPVNSGGPAYDEQITELKLLVDSLEKERDFYFSKLRDIEILCQNPEVEHVPVHAIQNILYTSDDDPAVVAEAQAMVSQQQNQQQPPALSPILEMSEERPKQETANKRKSIS

SEQ ID NO: 87702 - protein, 204 aa, Setaria italica
  Transcript Sequence Number=SeqID_21728
  Gene Ontology: Mol. function=oxidoreductase activity; Biological process=oxidation reduction
  Homolog annotation: Hit_ID=B6SIR9; Match level="QueryCoverage=99%, HitCoverage=64%, E-value=6e-89, Identity=81%"; Hit description=1 -aminocyclopropane-1-carboxylate oxidase
  Pfam annotation: Domain name=2OG-FeII_Oxy; Domain location=51-152; Score=139.5; E_value=1e-38; Accession=PF03171.12; Description=2OG -Fe(II) oxygenase superfamily
SNPPAFKETMMEYRKELKKLAEKMLGVMEELLGLEEGHIKKAFSNDGDFEPFYGTKVSHYPPCQRPDLVDGLRAHTDAGGLILLFQDDRFSGLQVKLADGRWVDVQPLENAIVINTGDQIEVLSNGRYKSAWHRILATRDGNRRSIASFYNPARLANIAPATPDAVEGAADYPSFVFGDYMEVYIKQKFGPKEPRFAAMATATK

SEQ ID NO: 87703 - protein, 140 aa, Setaria italica
  Transcript Sequence Number=SeqID_21729
EENAESKDTTNTARKEERGEKERMIFSVVVPGPVNSFHPARRPCLILILILIRCPVAVGVCSRVNRRLISSPRRNQTVDSDVGVGSGLLIPLLLDLPFLFSSMEQPWSRDRTIWCPQWRRACGGLQLAGTRVHGSARPVV

SEQ ID NO: 87704 - protein, 131 aa, Setaria italica
  Transcript Sequence Number=SeqID_21730
  Homolog annotation: Hit_ID=B6SSJ9; Match level="QueryCoverage=71%, HitCoverage=18%, E-value=1e-13, Identity=41%"; Hit description=SAG20
RFYHLALLCRWRAGDMLQLRQAYCKDGTCKPGERRHMVVVVMLLHLNCFAQYALCGLNLGYRRPQRPVVGVAITVSVAICAPAVAGLYNNLSPLGNDYEAQPEADDEESCGGSDPQLQRKTALHEESSGGG

SEQ ID NO: 87705 - protein, 194 aa, Setaria italica
  Transcript Sequence Number=SeqID_21731
  Homolog annotation: Hit_ID=Q6H4Z9; Match level="QueryCoverage=36%, HitCoverage=10%, E-value=1e-12, Identity=52%"; Hit description =Leucine zipper protein-like
  Pfam annotation: Domain name=DUF630; Domain location=1-60; Score =121.6; E_value=2.7e-33; Accession=PF04783.4; Description=Protein of unknown function (DUF630)
MGCAASRLEDEEAVKMCRDRRDFIKQALEQRNRFASSHIAYIESLKRVSMALQRFVAVDDHHELIFDTFISPVKQQKPEMLGLPYGSYEKRTIHVSKYLRSGPNPSVSVEEHPRPVETVRVESHYPMDNYSGTDRFFPSQSSPMRSSSYYPPPYNRPSYPPPSTQEPVRNSSYYMPYDRPSYAPPSPQEPMRTS

SEQ ID NO: 87706 - protein, 47 aa, Setaria italica
  Transcript Sequence Number=SeqID_21732
KRRASYRIVGAQNYLDDMGIQKSRKLKLCHPDINKPCWLPKRKVVQQ

SEQ ID NO: 87707 - protein, 59 aa, Setaria italica
  Transcript Sequence Number=SeqID_21733
NNASCNLHSLPEESIETLRPVFSSALKKLEESLESEAGKKSNSGDKIPSGSKRTRTNQK

SEQ ID NO: 87708 - protein, 87 aa, Setaria italica
  Transcript Sequence Number=SeqID_21734
LCHSSKWIDLLQYGESCAEIGQHIAQQTYEIISLTLGIHNERRASYRIVGAQNYLDDMGIQKSRKLKLCHPDINKPCWLPKRKVVQQ

SEQ ID NO: 87709 - protein, 84 aa, Setaria italica
  misc_feature (13)..(13): Xaa can be any naturally occurring amino acid
  Transcript Sequence Number=SeqID_21735
  Gene Ontology: Mol. function=protein serine/threonine kinase activity; Cellular component=cell surface; Biological process =protein amino acid phosphorylation
  Homolog annotation: Hit_ID=Q01K00; Match level="QueryCoverage=100%, HitCoverage=10%, E-value=6e-33, Identity=76%"; Hit description =H0525E10.8 protein
SSPEYFKDGDYSXFFPMQAARKLLNGEIASLVDADLHGDVNLEEVERVCKVACWCIQENELARPTMAEVVQVLEGLSELDMPPL

SEQ ID NO: 87710 - protein, 158 aa, Setaria italica
  Transcript Sequence Number=SeqID_21736
  Subcellular localization annotation: CTP_CleavageSite=56; ConfidenceScore=5.25e-01
YEKTKRTLTKGGKGKKNKTERVSDSAISLLLAGRSATPPPARLHSTPSNSPSQRARSMARGKPRCPKALALGGRGWRRHIHFLCASFRSFYRWRPLPAATGTKRKGSAGAGTEKRWAKRRIGQERAPSRSGTAKRKAAGGDDGLEKEAKRRKTDQDET

SEQ ID NO: 87711 - protein, 158 aa, Setaria italica
  Transcript Sequence Number=SeqID_21737
  Gene Ontology: Mol. function=microtubule motor activity; Cellular component=microtubule associated complex
  Homolog annotation: Hit_ID=B9RZY0; Match level="QueryCoverage=93%, HitCoverage=6%, E-value=7e-16, Identity=37%"; Hit description=ATP binding protein, putative
EDDLKRTNRELTEKLVIMAEESNRLSEIIVAKDVEIASLSEEWEAAIFDLMSFLTDGCRSLDDAYQNIDNMISSFPHSSSSVSEHVEKAMKVSIEKEKMIFKLQIELQAAQKIGREVKEKLHILRGATLAITEAQQLDNEESSQEELQLVGLLHQKDC

SEQ ID NO: 87712 - protein, 117 aa, Setaria italica
  Transcript Sequence Number=SeqID_21738
LLCLITEAQQLDNEESSQEELQLVGLLHQKDCIIQELKNHLKAGKCRFAETAEEHSCNDLILPDNSVDMIEEQPDENEPTGQANPDYQSKLDSMLHLVEDKSNKVLTLFSNFEAAQE

SEQ ID NO: 87713 - protein, 112 aa, Setaria italica
  Transcript Sequence Number=SeqID_21739
  Pfam annotation: Domain name=DUF588; Domain location=6-95; Score= -0.7; E_value=0.00024; Accession=PF04535.4; Description=Domain of unknown function (DUF588)
HGDWMEFARYQEYRYLLGASVVACLYSAVQALRNFRRRTSGGLLDFAGDQLVAYLLITASSAALPITIRMRSAVINIFTDAMVAAISLAFAAFAALALSATISGFRISSISY

SEQ ID NO: 87714 - protein, 86 aa, Setaria italica
  Transcript Sequence Number=SeqID_21740
  Gene Ontology: Mol. function=cation transmembrane transporter activity; Cellular component=membrane
  Homolog annotation: Hit_ID=B6TV88; Match level="QueryCoverage=73%, HitCoverage=16%, E-value=7e-30, Identity=95%"; Hit description=Metal tolerance protein C3
MGENKEGQGAPAEAGEIAAGPAASWRLNVSDFHMPERPKEPPFVTRVFLRSHGKQRKIAKYYKKQENLLKDFNEMETMNEVGGLDQ

SEQ ID NO: 87715 - protein, 47 aa, Setaria italica
  Transcript Sequence Number=SeqID_21741
  Gene Ontology: Mol. function=cation transmembrane transporter activity; Cellular component=membrane
GFILWFTAHANEKPNKYSYPIGKRRMQPVVRTLFVKLNYFGFFKNLR

SEQ ID NO: 87716 - protein, 388 aa, Setaria italica
  Transcript Sequence Number=SeqID_21742
  Gene Ontology: Mol. function=cation transmembrane transporter activity; Cellular component=membrane; Biological process=cation transport
  Homolog annotation: Hit_ID=B6TV88; Match level="QueryCoverage=95%, HitCoverage=95%, E-value=1e-178, Identity=82%"; Hit description =Metal tolerance protein C3
  Pfam annotation: Domain name=Cation_efflux; Domain location=102-381; Score=267.8; E_value=2.6e-77; Accession=PF01545.13; Description =Cation efflux family
MGSPSQGRGCDGSGEEAGSWRLRMGSEFHVPDRFHRQPPLYARIFGGSHGKQRKIAKYYKKQENLLKDFNEMETMNEVGGLDQNAPTEEELRQLAKSERFAINLSNIINLILFVTKVVASAESVSMAVIASTLDSLLDLLSGFILWFTAHAMKKPNKYSYPIGKRRMQPVGIIVFASIMGTLGFQVLIESGRQLITQEHANFKLKQELWMVGSMSSVAVVKFFLMLYCRTFKNEIVRAYAQDHFFDVITNSVGLVAALLAVRYKWWMDPVGAILIALYTITTWARTVLENVGTLIGKSAPAEYLTKLTYLIWNHHEEIQHIDTVRAYTFGTHYFVEVDIVLPGDMPLSQAHDIGESLQEKLEQLPEVERAFVHVDFEFTHRPEHKAEV

SEQ ID NO: 87717 - protein, 92 aa, Setaria italica
  Transcript Sequence Number=SeqID_21743
  Gene Ontology: Mol. function=electron carrier activity; Biological process=metabolic process
  Homolog annotation: Hit_ID=B9SVQ8; Match level="QueryCoverage=100%, HitCoverage=19%, E-value=5e-15, Identity=43%"; Hit description =Monoxygenase, putative
PAEKDAAGDPVRTLREVTGSLAGHMPAEYLDVVRRSDHGNLSWAPLLYRNPLSILTGAAARGAVTVAGDAFHPMTPDMAQGGCSALEDAVVL

SEQ ID NO: 87718 - protein, 160 aa, Setaria italica
  Transcript Sequence Number=SeqID_21744
  Gene Ontology: Mol. function=peptidase activity; Cellular component =voltage-gated potassium channel complex; Biological process=lipid transport
  Homolog annotation: Hit_ID=B6U3H8; Match level="QueryCoverage=82%, HitCoverage=73%, E-value=1e-39, Identity=68%"; Hit description=Non -specific lipid-transfer protein
  Pfam annotation: Domain name=Tryp_alpha_amyl; Domain location=31-108; Score=48.9; E_value=2e-11; Accession=PF00234.14; Description=Protease inhibitorseed storageLTP f
  Subcellular localization annotation: CTP_CleavageSite=57; ConfidenceScore=5.54e-01
MAAATLAAAGMMMVALLLAGGASAQSPSSQCTSVLVSLSPCLNYISGNESTAPASCCAQLGKVVQSDPQCLCVALSADPASLGLSVNRTRALGLPDACKVKTPDVSNCKGGGAAAGAPTTSPGTPAGQTPGAATGSKTTPSTESVPGTTTMQKGSAGLVA

SEQ ID NO: 87719 - protein, 93 aa, Setaria italica
  Transcript Sequence Number=SeqID_21745
MPPATTVRLLLAFSALLLCCGFTTAAAASSVDVDGGVARRVLHQPLFPIEWTPPPSPPPPPAPDFTSDPATPDGPPGDFFPPAPPTAPAAGGG

SEQ ID NO: 87720 - protein, 68 aa, Setaria italica
  Transcript Sequence Number=SeqID_21746
AATQASASCGPVSRRWSIASAGGVAGLLDMYGCKSAMGVAEGAFVVRRPVAVVRPGPGRAGLGRAGRR

SEQ ID NO: 87721 - protein, 164 aa, Setaria italica
  misc_feature (156)..(156): Xaa can be any naturally occurring amino acid
  Transcript Sequence Number=SeqID_21747
  Pfam annotation: Domain name=DUF640; Domain location=1-123; Score =310.8; E_value=2.9e-90; Accession=PF04852.4; Description=Protein of unknown function (DUF640)
GAALASPSRYESQKRRDWNTFVQYLRNHRPPLTLARCSGAHVIEFLRYLDQFGKTKVHTAGCAYFGQPAPPAPCPCPLRQAWGSLDALIGRLRAAYEENGGRPENNPFGARAVRLYLREVRDHQSRARGVSYEKKKRKKAPAAHPVPAAVISSSSXHDGNGHTH

SEQ ID NO: 87722 - protein, 51 aa, Setaria italica
  Transcript Sequence Number=SeqID_21748
MDNVLIDRSASGFDFMRWTDAVDDGCRMLAPHTSIYSSFPYVSQLPPFQYT

SEQ ID NO: 87723 - protein, 99 aa, Setaria italica
  misc_feature (65)..(65): Xaa can be any naturally occurring amino acid
  Transcript Sequence Number=SeqID_21749
  Subcellular localization annotation: CTP_CleavageSite=61; ConfidenceScore=5.25e-01
MRTLALVALLLASALGSRGTTLAPSPAVTDSPPDQGQASSPPEPAFALGPVTIPTAPSTPSASPXPEKAAVSPAAPTEPQNAPSPITPPEVYNAPPPIV

SEQ ID NO: 87724 - protein, 81 aa, Setaria italica
  Transcript Sequence Number=SeqID_21750
  Gene Ontology: Mol. function=transporter activity; Cellular component= membrane; Biological process=oligopeptide transport
  Homolog annotation: Hit_ID=B6U0T7; Match level="QueryCoverage=100%, HitCoverage=13%, E-value=9e-24, Identity=66%"; Hit description =Peptide transporter PTR2
EFFYDQSPGGMKSLGTSLAHIAIAAGSYLNSAVLGAVAWATARGGAAGWIPDDLNEGHLDYFFWLMAALSVVNLLHFVHCS

SEQ ID NO: 87725 - protein, 217 aa, Setaria italica
  Transcript Sequence Number=SeqID_21751
  Gene Ontology: Mol. function=catalytic activity; Cellular component =peroxisome; Biological process=metabolic process
  Homolog annotation: Hit_ID=Q69RG7; Match level="QueryCoverage=100%, HitCoverage=38%, E-value=1e-104, Identity=81%"; Hit description=4 -coumarate--CoA ligase-like 7
FPNVNLCMGYGSTEAGGISRMIDREECTRIGSVGRVSENVEVKIVDHITGKPLSVGQRGELFVRGPAVMTGYVGDDEANASTFDSEGWLKTGDLCYIDQDGFLFVVDRLKELIKYKGYQVPPAELELVLQTLPEVVEAAVMPYPHEEAGQIPIALVVRKPGSKVTEAQVMDHVAKRVASYKKIRKVLFVDSIPKSPAGKILRRQLTNYLQFGAVSRL

SEQ ID NO: 87726 - protein, 117 aa, Setaria italica
  Transcript Sequence Number=SeqID_21752
MSVRIKAVVDKFVKELQEALDADIQDRIMKEREMQSYIEEREREVAEREAAWKAELSRREAEIARQEARLKMEKENLEKEKSVLMGTASSQDNQDGALEITVSGEKYRCLRFSKAKK

SEQ ID NO: 87727 - protein, 106 aa, Setaria italica
  Transcript Sequence Number=SeqID_21753
  Gene Ontology: Mol. function=nucleotide binding; Biological process =defense response
  Homolog annotation: Hit_ID=Q8RUA3; Match level="QueryCoverage=99%, HitCoverage=11%, E-value=2e-17, Identity=54%"; Hit description =Putative disease resistance protein
GCTAAFWRIPTLRHVVAPLALPSRALGDLHSLQTLHGVRPCRWYGGDNPLAKAANLRSLELIELTAEHTGALEAALESLDLLAHLVLRGDSLPASVFAVPSLRRLQ

SEQ ID NO: 87728 - protein, 156 aa, Setaria italica
  Transcript Sequence Number=SeqID_21754
  Gene Ontology: Mol. function=RNA binding; Cellular component =chloroplast
  Homolog annotation: Hit_ID=Q2QM66; Match level="QueryCoverage=100%, HitCoverage=54%, E-value=3e-80, Identity=50%"; Hit description =Pentatricopeptide, putative
  Pfam annotation: Domain name=PPR; Domain location=110-144; Score =28.5; E_value=2.8e-05; Accession=PF01535.12; Description=PPR repeat
  Pfam annotation: Domain name=PPR; Domain location=40-74; Score=41.4; E_value=3.4e-09; Accession=PF01535.12; Description=PPR repeat
  Pfam annotation: Domain name=PPR; Domain location=5-39; Score=29.6; E_ value=1.3e-05; Accession=PF01535.12; Description=PPR repeat
  Pfam annotation: Domain name=PPR; Domain location=75-109; Score=42.8; E_value=1.3e-09; Accession=PF01535.12; Description=PPR repeat
  Pfam module annotation: Pfam domain module=PPR::PPR::PPR::PPR; Domain location=110-144::40-74::5-39::75-109
FPDQVTYNMLIHVLAKHGHADEALGFHWGVSGKGIRVDEVGYSAIVHSFCLNGRMPEAKEIVSEMISKGCRPDVVTYSAVVDGFCRIGELDQARKMMKHMYKNGCKPNTVTHTALLNGLCKVGKTSEAWELLNKSEEEWWTPSDITYSVVMHGFRR

SEQ ID NO: 87729 - protein, 84 aa, Setaria italica
  Transcript Sequence Number=SeqID_21755
  Gene Ontology: Mol. function=transferase activity, transferring groups other than amino-acyl groups
  Homolog annotation: Hit_ID=B6TT96; Match level="QueryCoverage=100%, HitCoverage=18%, E-value=8e-28, Identity=72%"; Hit description =Transferase
EPELLCSGRGVDVAEASAGDGTDMRDLRLGLPDESVEQLVPKKKAGVMAVQVTKFGCGGIVVGCTFDHRVCDAYSFNMFLVAWA

SEQ ID NO: 87730 - protein, 132 aa, Setaria italica
  Transcript Sequence Number=SeqID_21756
  Gene Ontology: Mol. function=transferase activity, transferring groups other than amino-acyl groups
  Homolog annotation: Hit_ID=B6TT96; Match level="QueryCoverage=92%, HitCoverage=28%, E-value=9e-21, Identity=46%"; Hit description =Transferase
MTSSFLASTCMHAQVTKFGCGGIVVGCTFDHRVCDAYSFNMFLVAWAAAARGGPAPPAPSFRRSFLAPRHPAPPCTGTLADRLFVPVSLAPALPDTAAANRIYRVSAADVAALQAAAGPGRTKLEAFTAHLW

SEQ ID NO: 87731 - protein, 162 aa, Setaria italica
  Transcript Sequence Number=SeqID_21757
  Gene Ontology: Mol. function=transferase activity, transferring groups other than amino-acyl groups
  Homolog annotation: Hit_ID=B6TT96; Match level="QueryCoverage=70%, HitCoverage=24%, E-value=7e-19, Identity=56%"; Hit description =Transferase
MVKEGTTDGSGARRGHGGEVTITAVTTVAPALPVQEHRLALSNLDLILPPIDVGVFFCYADPGGSSGAATVLKAALAKTLVAYYPLAGEVVANAAGEPELLCSGRGVDVAEASAGDGTDMRDLRLGLPDESVEQLVPKKKAGVMAVQVRSIHISSILYPKKN

SEQ ID NO: 87732 - protein, 41 aa, Setaria italica
  Transcript Sequence Number=SeqID_21758
SSSEAGSEVLPTMNQIPAMWEGLQNLPQMNFNPGAATGCHT

SEQ ID NO: 87733 - protein, 156 aa, Setaria italica
  misc_feature (78)..(78): Xaa can be any naturally occurring amino acid
  Transcript Sequence Number=SeqID_21759
  Gene Ontology: Mol. function=transcription regulator activity; Cellular component=nucleus; Biological process=regulation of transcription
  Homolog annotation: Hit_ID=B9R6V4; Match level="QueryCoverage=100%, HitCoverage=28%, E-value=2e-15, Identity=43%"; Hit description=DNA binding protein, putative
QITGKAVMLDEIINYVQSLQRQVEFLSMKLATVNPELGFDIEQILSNSKSTHQICCSLYISLDAVLDILCSMEILVLXMMLSQDRHFAIYGADPGSSSLAAQFNQGIMQPEIMCNISNPVDVLQGTIHDVSTMNQIPAMWEGLQNLPQMNFNPGVA

SEQ ID NO: 87734 - protein, 182 aa, Setaria italica
  Transcript Sequence Number=SeqID_21760
  Gene Ontology: Mol. function=transcription regulator activity; Cellular component=nucleus; Biological process=protein modification process
  Homolog annotation: Hit_ID=B9R6V4; Match level="QueryCoverage=99%, HitCoverage=41%, E-value=4e-44, Identity=57%"; Hit description=DNA binding protein, putative
  Pfam annotation: Domain name=HLH; Domain location=11-61; Score=39.0; E_value=1.9e-08; Accession=PF00010.18; Description=Helix-loop-helix DNA-binding domain
YVHIRAKRGQATNSHSLAERLRRKKISERMKLLQDLVPGCSKITGKAVMLDEIINYVQSLQRQVEFLSMKLATVNPELGFDIEQILSQQMMLSQDRHFAIYGADPGSSSLAAQFNQGIMQPEIMCNISNPVDVLQGTIHDVSTMNQIPAMWEGLQNLPQMNFNPGVAAGSSTNNSGSMKIEQ

SEQ ID NO: 87735 - protein, 275 aa, Setaria italica
  misc_feature (29)..(29): Xaa can be any naturally occurring amino acid
  Transcript Sequence Number=SeqID_21761
  Gene Ontology: Cellular component=nucleus
  Homolog annotation: Hit_ID=B6UCL1; Match level="QueryCoverage=82%, HitCoverage=31%, E-value=1e-72, Identity=64%"; Hit description =Nucleolar protein 10
  Pfam annotation: Domain name=NUC153; Domain location=71-100; Score =64.2; E_value=5e-16; Accession=PF08159.4; Description=NUC153 domain
ALKRTDDEKENRKKSKKSRITRVVRIPNXFNRQIFDSIIEDEMNADTENADKSSKKKKDRRLKVNKDLLEDERFKEMFENKDFQIDEESREYLALHPQVATKEPRLIEEHFESVSEDEQQSDASASDASGMSDSDNDMHNSKRIRLYEVKDERHAEAFLNSASLSNEDSVPIEDRIAALEKQQNSKALEKVKYGPGGSREISFISRSGRRHKEESPSDDEGPNDFKRRGVQALGLKQGKAEFYMFGGNRGRGRGGARGRGGRGRGGRGGRGRGRG

SEQ ID NO: 87736 - protein, 103 aa, Setaria italica
  Transcript Sequence Number=SeqID_21762
  Homolog annotation: Hit_ID=A5HEG0; Match level="QueryCoverage=89%, HitCoverage=23%, E-value=6e-24, Identity=63%"; Hit description =Putative growth-regulating factor 1
  Subcellular localization annotation: CTP_CleavageSite=61; ConfidenceScore=5.67e-01
AVSAAAPLAVTTNGSGFQNHSLYPAIAGSTGGGGGTSNISSTFFSPLGSSPQLHMDNAASYASLGSGTAKDLRYNAYGIRTLADEHNQLIAEAIDSSMENQWR

SEQ ID NO: 87737 - protein, 188 aa, Setaria italica
  Transcript Sequence Number=SeqID_21763
  Homolog annotation: Hit_ID=Q70LH5; Match level="QueryCoverage=79%, HitCoverage=66%, E-value=4e-61, Identity=77%"; Hit description =Transcription activator GRF2 (Fragment)
EGRTGNQDKQSPSTFSSPLGSSPQLHMDNAASYASLGSGTAKDLRYNAYGIRTLADEHNQLIAEAIDSSMENQWRLPPSQNSSFPLSSYPQLGALSDLGQNTVSSLSKMDRQPLSFLGNDFGAVDSGKQENQTLRPFFDEWPKARDSWPGLSDDNTNLASFPATQLSISIPMASSDFSVASSQSPNDD

SEQ ID NO: 87738 - protein, 83 aa, Setaria italica
  Transcript Sequence Number=SeqID_21764
  Gene Ontology: Mol. function=transcription regulator activity; Cellular component=nucleus; Biological process=regulation of transcription
SLTNGMDNQSNMHPLDPAFCQQMNSQHRFLNGVSDAASQVGTFWQDDLQSVVHMDIGQNQEIAATSSNSYNGSLQTVHMKMEL

SEQ ID NO: 87739 - protein, 469 aa, Setaria italica
  Transcript Sequence Number=SeqID_21765
  Gene Ontology: Mol. function=transcription regulator activity; Cellular component=nucleus; Biological process=regulation of transcription
  Homolog annotation: Hit_ID=Q70KS8; Match level="QueryCoverage=39%, HitCoverage=93%, E-value=1e-90, Identity=88%"; Hit description=TA1 protein (Fragment)
  Pfam annotation: Domain name=HLH; Domain location=286-336; Score =36.5; E_value=1.1e-07; Accession=PF00010.18; Description=Helix-loop -helix DNA-binding domain
  Subcellular localization annotation: CTP_CleavageSite=41; ConfidenceScore=5.19e-01
MNCGPPDQLPPASAPSCFLNLNWNQSMAAAAAAGDHLDPALSSMVSSPTSNSMAAAATDGLALHGISPQPQYGGTRLSSPPKLNLSMMGQFHHYPPPQVGGAGPSGLPILENLMPMGHLDQFLADPGFAERAARLSGFDGRTGGSGYGAVPGQFGLPEAGPVGALKELELGNGRDESSVSDPASASAEMALKAPSDGNAKKRKSSGKGKGKDGPGSAAAKDLAKEESSGKRCKSADEGNGAEDNSAKGKAAQSNSENGGKKQGKDTSKPPEPPKDYIHVRARRGEATDSHSLAERVRREKISQRMKLLQDLVPGCNKVVGKAVMLDEIINYVQSLQRQVEFLSMKLATVNPQLDFNNLPNLLPKDIQQSCGPLQNSHFPLETSGAPLPYLNQTHQGSPLGCSLTNGMDNQSNMHPLDPAFCQQMNSQHRFLNGVSDAASQVGTFWQDDLQSVVHMDIGYCLVLNLIGPN

SEQ ID NO: 87740 - protein, 50 aa, Setaria italica
  Transcript Sequence Number=SeqID_21766
DRIMKSNKENYEVFKTANIIAQIFTFLGSCAELTSHKYTASYCLTFFICL

SEQ ID NO: 87741 - protein, 62 aa, Setaria italica
  Transcript Sequence Number=SeqID_21767
KNNNWMGYNPAQVPWMLNCIKMGMGVFHPHVITENVVLAFIQGTEISLEYCYIIYVPYTRTY

SEQ ID NO: 87742 - protein, 272 aa, Setaria italica
  misc_feature (82)..(82): Xaa can be any naturally occurring amino acid
  misc_feature (97)..(97): Xaa can be any naturally occurring amino acid
  Transcript Sequence Number=SeqID_21768
  Homolog annotation: Hit_ID=B4FSC7; Match level="QueryCoverage=98%, HitCoverage=99%, E-value=1e-103, Identity=72%"; Hit description =Hepatocellular carcinoma-associated antigen 59 family protein
  Pfam annotation: Domain name=Hep_59; Domain location=102-189; Score =116.1; E_value=1.2e-31; Accession=PF07052.3; Description =Hepatocellular carcinoma-associated an
MQRKNFRKRSFEPDADDRSDDEDTRRVVLEEIKYMQKLRERKLGIPADPAAASTNGSAARGLVGGGGAAIGEAEKEDLVLQXDTFAQETAVTIEDPXMPEGMVETELAKKRGKTVDVGHKEEMDHVDELYTVPDHLKVKKKNSEESSTQWTTGIAEVQLPIEYKLRNIEETEAAKKMLQEKRLAAKPKSDSNIPSSYSADYFHRGKEYDEKLRRENPGLYKDKDSRPNESAGGKATDTKNTAGAGAGRREAASDDIMLERFRRREKIRVMRR

SEQ ID NO: 87743 - protein, 97 aa, Setaria italica
  misc_feature (63)..(63): Xaa can be any naturally occurring amino acid
  Transcript Sequence Number=SeqID_21769
MCPLCSVQRWSRRVATMLPWLVIPLIAIWATTQLLLPAAYRFEVTSPRLACVSVLLLTLFWYXILLPRLSLWRARRSARLREERRAHALELHKLRKT

SEQ ID NO: 87744 - protein, 78 aa, Setaria italica
  Transcript Sequence Number=SeqID_21770
ATRRHIYPQFLAQKACSHSTLEICCDVVIEHFSLVTNSIGIIFRSDHKPMPSMAHCSCTLYSDYGYDSLQLGYKFFPG

SEQ ID NO: 87745 - protein, 134 aa, Setaria italica
  misc_feature (23)..(23): Xaa can be any naturally occurring amino acid
  Transcript Sequence Number=SeqID_21771
  Gene Ontology: Mol. function=pyridoxal phosphate binding; Biological process=metabolic process
  Homolog annotation: Hit_ID=B9V0H0; Match level="QueryCoverage=95%, HitCoverage=20%, E-value=6e-54, Identity=79%"; Hit description=NifS -like protein
GWRARRRRGLASCAPEERWIVFXGPYEHHSNLLSWRRSLADVVEVPAAGDGLVDLEALRRALAAPEHADRPMLGAFSACSNVTGVLTDTRAIARILHQHGAFACFDFAASGPYVDIDMRSGEMDGYDAVFLSPA

SEQ ID NO: 87746 - protein, 39 aa, Setaria italica
  Transcript Sequence Number=SeqID_21772
HGYPKSKDVRFMHFSACGPLNSLKKVINPVVFGVGGVHN

SEQ ID NO: 87747 - protein, 77 aa, Setaria italica
  Transcript Sequence Number=SeqID_21773
GGGGGTNGGGGGESGGGGGGGGDGGSGGDNNDNGGGGEGGSSYSATHIHGYRQGGNDKGGNEGTGGRGSHRIPKEKP

SEQ ID NO: 87748 - protein, 90 aa, Setaria italica
  Transcript Sequence Number=SeqID_21774
KQSDFFLLLDRHTQQTIQSKRLEKGEERSLGSRRALVARRRRPPDRSLDSLAATEDDEIGSREEGGRILLRRRGGLLGRIRGGDCTGRRR

SEQ ID NO: 87749 - protein, 63 aa, Setaria italica
  Transcript Sequence Number=SeqID_21775
MAAPPGITMPAAVFGEAKPENDADALPRRPVLFHAHAHSQGPLRVVATDLRSLAWHCSLDLDD

SEQ ID NO: 87750 - protein, 72 aa, Setaria italica
  Transcript Sequence Number=SeqID_21776
  Pfam annotation: Domain name=DUF506; Domain location=1-72; Score= -102.6; E_value=0.1; Accession=PF04720.4; Description=Protein of unknown function (DUF506)
MTFDVPSDRLKNLTCAGEHSYVDVVVQTRSGKAVRVVVELSFRAEFEVARAGAEYRALVAALPEVFVGRADR

SEQ ID NO: 87751 - protein, 197 aa, Setaria italica
  Transcript Sequence Number=SeqID_21777
  Pfam annotation: Domain name=DUF506; Domain location=3-152; Score =156.1; E_value=1.1e-43; Accession=PF04720.4; Description=Protein of unknown function (DUF506)
AAAAGTACSCTGRPAAGGDCRRCMLRRVAERLRDAGYNSALCTSKWTRSPDIPSGEHSYVDVVVQTRSGKAVRVVVELSFRAEFEVARAGAEYRALVAALPEVFVGRADRLRAVVKAMCAAAKQCMKENNMHMGPWRKHKYMQAKWLGTPERTAAVAAAAAAPPVAPPVVVGSPEKQTKFRASMLTFDFGRTAVEVV

SEQ ID NO: 87752 - protein, 404 aa, Setaria italica
  misc_feature (239)..(239): Xaa can be any naturally occurring amino acid
  Transcript Sequence Number=SeqID_21778
  Gene Ontology: Mol. function=citrate transmembrane transporter activity; Cellular component=integral to membrane; Biological process=citrate transport
  Homolog annotation: Hit_ID=B9RVB9; Match level="QueryCoverage=96%, HitCoverage=83%, E-value=1e-103, Identity=48%"; Hit description =Arsenite transport protein, putative
  Pfam annotation: Domain name=CitMHS; Domain location=16-404; Score =356.9; E_value=3.9e-104; Accession=PF03600.8; Description=Citrate transporter
  Subcellular localization annotation: CTP_CleavageSite=37; ConfidenceScore=5.10e-01
MALASVSKVVLGSVAFGVFWVLAVFPSVPFMPIGRTAGALLSAVLMIIFHVISPDDAYASVDLPILGLLFATMVVGTYLKNAGMFKHLGTLLAWKSQGGRDLLCRVCIVTALASALFTNDTCCVVLTEFVLELAAERNLPAKPFLLALASSANIGSSATPIGNPQNLVIAFNSKISFPKFLLGILPAMLAGMAVNMVMLLCMYWKDLEGTSPDLVSDGKQMETVEEGMASKTPSPSQAXNGGGYSSPLMTEDISTKHPWFMQCTEQRRKLFLKSFAYIVTVGMVIAYMVGLNMSWTAITTAIALVVVDFRDAEPCLDKVSYSLLVFFSGMFITVSGFNKTGLPGAIWNFMAPYSKVNSVGGISVLSIIILLLSNLASNVPTVLLMGGEVASAAALISPAAVIRS

SEQ ID NO: 87753 - protein, 54 aa, Setaria italica
  Transcript Sequence Number=SeqID_21779
IYGPPHYGHPNITLPLFEPQESTRLRGHHDRSRSADSTSMNSDDPQDVDLELKL

SEQ ID NO: 87754 - protein, 55 aa, Setaria italica
  Transcript Sequence Number=SeqID_21780
  Gene Ontology: Mol. function=electron carrier activity; Biological process=response to oxidative stress
  Homolog annotation: Hit_ID=A5H8G4; Match level="QueryCoverage=100%, HitCoverage=16%, E-value=5e-16, Identity=77%"; Hit description =Peroxidase 1
EKFAAAMVKMGRIQVQTGTCGEVRLNCSVVNPSSSTIELGSSAPAADEDGGVATS

SEQ ID NO: 87755 - protein, 72 aa, Setaria italica
  Transcript Sequence Number=SeqID_21781
  Gene Ontology: Mol. function=oxidoreductase activity; Biological process=oxidation reduction
  Homolog annotation: Hit_ID=Q40061; Match level="QueryCoverage=95%, HitCoverage=20%, E-value=3e-28, Identity=86%"; Hit description=Ids2
NGLLRGVEHRASTNSAKPRLSVAAFIVPADDCVVGPAEEFVNEDNPPRYRTLTVGEFKRKHNVVNLGSSINQ

SEQ ID NO: 87756 - protein, 126 aa, Setaria italica
  misc_feature (114)..(114): Xaa can be any naturally occurring amino acid
  Transcript Sequence Number=SeqID_21782
PSGATSPLPAAGAGGGTTPVRLKMRLPRAQVEKLMGESKDPAEAAAKIMELCGAAMGGDAHASARVTPERPPGILRSPRFAKTPEWGAGFMLPPPAPAKTPQRWPTLPRTKEKXARFVELPDELIA

SEQ ID NO: 87757 - protein, 167 aa, Setaria italica
  Transcript Sequence Number=SeqID_21783
  Gene Ontology: Mol. function=peptidase activity; Cellular component =signal peptidase complex; Biological process=signal peptide processing
  Homolog annotation: Hit_ID=Q2HTM7; Match level="QueryCoverage=100%, HitCoverage=100%, E-value=1e-78, Identity=77%"; Hit description =Signal peptidase 22 kDa subunit
  Pfam annotation: Domain name=SPC22; Domain location=1-167; Score =277.5; E_value=3.1e-80; Accession=PF04573.4; Description=Signal peptidase subunit
  Subcellular localization annotation: CTP_CleavageSite=7; ConfidenceScore=5.32e-01
MHSFGHRANAVATFAVTILAAMCFAASFSDNFNTPTPTASVKILNINWFQKEANGNDEVSMTLNISADLSSLFTWNTKQVFVFVAAEYETSQNALNQVSLWDGIIPAKEHAKFLIHTTNKYRFIDQGSNLKGKEFNLTMHWHIMPKTGKMFADKIVMTGYRLPEQYR

SEQ ID NO: 87758 - protein, 77 aa, Setaria italica
  Transcript Sequence Number=SeqID_21784
TLLQIQTNFAQVARIFAISCRDLQLRRPSAQFTQGPCCSGHVGLMTCLVSHIYTVVCYFVITCRLLKCRTKRKFCQK

SEQ ID NO: 87759 - protein, 105 aa, Setaria italica
  Transcript Sequence Number=SeqID_21785
KESNETRLKFESDVQQKLNQQDLKIGDLESDVELLKGKVNEEIELYRKNQETSLEKITGSIDDLQFSFAKGAVAIVGLIPLFAHSWSMSIGSSVVNLSRWSCKWS

SEQ ID NO: 87760 - protein, 220 aa, Setaria italica
  Transcript Sequence Number=SeqID_21786
  Gene Ontology: Mol. function=calcium-dependent phospholipid binding; Cellular component=cytoplasm; Biological process=negative regulation of coagulation
  Homolog annotation: Hit_ID=B6SQ54; Match level="QueryCoverage=100%, HitCoverage=69%, E-value=1e-112, Identity=87%"; Hit description =Annexin A4
  Pfam annotation: Domain name=Annexin; Domain location=15-80; Score =78.0; E_value=3.4e-20; Accession=PF00191.12; Description=Annexin
  Pfam annotation: Domain name=Annexin; Domain location=171-220; Score =24.2; E_value=6e-05; Accession=PF00191.12; Description=Annexin
  Pfam annotation: Domain name=Annexin; Domain location=87-152; Score =58.8; E_value=2e-14; Accession=PF00191.12; Description=Annexin
  Pfam module annotation: Pfam domain module=Annexin::Annexin::Annexin; Domain location=15-80::171-220::87-152
MASLTVPPVPTWPRQDAIDLHRAFKGFGCDSTTVINILAHRDAAQRALIQQEYRAVFNQDLARRIASELSGHHKRAMLLWLLDPASRDATILKQALTGDVTDLRAATEVVCSRTPSQLQIIRHTYRARFGCYVEHDVTERTSGDHQRLLLAYLAIPRAEGAAAVDPSLAALDARELFKAGERRLGTDERAFIRVFSERSWAHLAAVARAYHHMYDRSLEQ

SEQ ID NO: 87761 - protein, 304 aa, Setaria italica
  misc_feature (24)..(24): Xaa can be any naturally occurring amino acid
  Transcript Sequence Number=SeqID_21787
  Gene Ontology: Mol. function=methyltransferase activity; Cellular component=nucleus; Biological process=metabolic process
  Homolog annotation: Hit_ID=B6T5Y7; Match level="QueryCoverage=99%, HitCoverage=77%, E-value=1e-151, Identity=86%"; Hit description =Protein arginine N-methyltransferase 6
  Pfam annotation: Domain name=Methyltransf_11; Domain location=1-100; Score=19.1; E_value=0.0015; Accession=PF08241.4; Description =Methyltransferase domain
  Pfam annotation: Domain name=Methyltransf_12; Domain location=1-98; Score=21.9; E_value=0.0027; Accession=PF08242.4; Description =Methyltransferase domain
  Pfam module annotation: Pfam domain module=Methyltransf _11::Methyltransf_12; Domain location=1-100::1-98
WSVGCGTGILSVFCARAGAKRVYXVEASEKEDQAREIVKANNLTDQVVVIHGRVEDVDLEEKVDVIISEWMGYMLLYESMLPSVLFARDKWLKPGGLILPSHATLFMAPITNPERYEGSVDFWCDVYGINMSALVPLAKKFTSEEPSIETIGGENVISWPSVVKHIDCYNFTAEEFKSITANYKVSSMMLAPIHGFGFWFEVEFNGPQESSHNIPSNLNPLEIIHKKRRRSSEDTVLLSTAPEDEPTHWQQTILYFPDPIEVKQDQTVEGSVTVSQSKENPRFLNIHLECSTGGQTLVKDCTMR

SEQ ID NO: 87762 - protein, 136 aa, Setaria italica
  Transcript Sequence Number=SeqID_21788
  Homolog annotation: Hit_ID=Q8H042; Match level="QueryCoverage=99%, HitCoverage=47%, E-value=4e-58, Identity=82%"; Hit description =Disease resistance-responsive family protein, putative
  Pfam annotation: Domain name=Dirigent; Domain location=1-136; Score =66.0; E_value=1.4e-16; Accession=PF03018.6; Description=Dirigent -like protein
APRNGVAIPNANGQVPTVNGNNGIPLDTGLSGAGFLQPGSGAAAAAAPAQVQLGPDGLSLGFGTITVIDDVLTSGPDLGAQPLGRAQGVYVASSADGSSQMMAFTAMMEGGEYGDTINFFGVYKVGTPLCRLSITG

SEQ ID NO: 87763 - protein, 212 aa, Setaria italica
  Transcript Sequence Number=SeqID_21789
  Gene Ontology: Cellular component=intracellular; Biological process =response to DNA damage stimulus
  Homolog annotation: Hit_ID=B9RSY3; Match level="QueryCoverage=98%, HitCoverage=17%, E-value=2e-73, Identity=61%"; Hit description=Pax transcription activation domain interacting protein, putative
KILARLGVCEAFSMADATHFVADSFFRTRNMLEAITLGKPVVTSMWLENCGQAGCFIDERKYILRDAKKEKELGFSMPMSLASAVKHPLLLGKRVFVTSNVKPSQVVVTSLVKASSGQPLERVGRSIMKENDVPDDLLVISCEEDYQTCAPLLEKGAIIFSTELLLNGIVIQKLEYERHRLFTDRVRQTRSSRWLKDTVRDRFVHVPKRPRG

SEQ ID NO: 87764 - protein, 226 aa, Setaria italica
  Transcript Sequence Number=SeqID_21790
  Gene Ontology: Mol. function=hydrolase activity, hydrolyzing O -glycosyl compounds; Biological process=polysaccharide catabolic process
  Homolog annotation: Hit_ID=B6SZG2; Match level="QueryCoverage=99%, HitCoverage=78%, E-value=1e-112, Identity=90%"; Hit description =Chitinase 1
  Pfam annotation: Domain name=Glyco_hydro_18; Domain location=2-206; Score=-4.6; E_value=2.9e-06; Accession=PF00704.20; Description =Glycosyl hydrolases family 18
GTTGNLSPAAVASIKAAHPNVAVMVGIGGDSVQDITKAVFTPTSINSWVANAATSLTNIINTYELDGVDVDYEHFAAGADVNTFVECMGRLLTQLKANMPWITTSIAPFEDPTIQRYYQPLWRKYNGVIDYVNFQFYGYGDNTDVPLYVQFYDQQSANYPGGKVLASFMTGNTTGLISPDLGINAAKELQRQNKLPGLFIWSADSSKKSSYGFKYEIQGQQIIANH

SEQ ID NO: 87765 - protein, 308 aa, Setaria italica
  Transcript Sequence Number=SeqID_21791
  Gene Ontology: Mol. function=hydrolase activity, hydrolyzing O -glycosyl compounds; Biological process=carbohydrate metabolic process
  Homolog annotation: Hit_ID=B6SZG2; Match level="QueryCoverage=92%, HitCoverage=100%, E-value=1e-125, Identity=76%"; Hit description =Chitinase 1
  Pfam annotation: Domain name=Glyco_hydro_18; Domain location=26-283; Score=29.0; E_value=4.3e-09; Accession=PF00704.20; Description =Glycosyl hydrolases family 18
MLLRDRDDNQRSSSLSAMTNGYLFREYIGAQFTGVQFSDVPINAFVSFHFILSFAIDYTPVNQQPTPVPTNGVFSPFWDTGSLSPAAVAAIKAAHPNVAVMAGLGGDSVQDVVKAVFTPTSVDSWVANAVSSLTGIINTYRLDGVDVDYEHFAAGADVNTFVECIGRLLTQLKANMPWITTSIAPFADTKIQRYYQPLWRKYNGVIDYVNFQFYGYGDNTDVPLYVQFYDQQSANYPGGKVLASFMTGNTTGLISPDLGINAAKELQRQNKLPGLFIWSADSSKKSSYGFKYLTNKDRLVGRQSNYRT

SEQ ID NO: 87766 - protein, 210 aa, Setaria italica
  misc_feature (50)..(50): Xaa can be any naturally occurring amino acid
  misc_feature (135)..(135): Xaa can be any naturally occurring amino acid
  misc_feature (154)..(154): Xaa can be any naturally occurring amino acid
  Transcript Sequence Number=SeqID_21792
  Gene Ontology: Mol. function=nucleotide binding; Biological process =defense response
  Homolog annotation: Hit_ID=Q2R8J7; Match level="QueryCoverage=84%, HitCoverage=22%, E-value=2e-58, Identity=62%"; Hit description=NB -ARC domain containing protein, expressed
  Pfam annotation: Domain name=NB-ARC; Domain location=43-210; Score= -69.3; E_value=4.8e-05; Accession=PF00931.14; Description=NB-ARC domain
ASKKLRKDYFPAVQVVPSSSVIVQRGYQVCLPELIQDEDLVGITLNQAKXVGWLHCNEPNSIVITVSGMGGLGKTTLVMNVYEREKTKFPVHAWITVSQTYTIEGLLRELLRNIGYTDEASDSLENMDAHQLREXIKNLHSNSKCLVVLDDVWXKEVYHQMADIFQIIKASRIIITTRRDDVASLASSERHLQLQPLESPDAFRLFAEGP

SEQ ID NO: 87767 - protein, 134 aa, Setaria italica
  Transcript Sequence Number=SeqID_21793
  Subcellular localization annotation: CTP_CleavageSite=20; ConfidenceScore=5.10e-01
MVSGAAGLKAAAAIAVFAVLVMSSQGHPSKKPLCSDCPSLCNANCTAEIAEKCRNECSYQSSCDQCKSQVLQACCQSFCSSNNGTSSFSCCPNGCASDCVTCSCGNCENAYINSCTSPCSDRYCRACEFGIGQQ

SEQ ID NO: 87768 - protein, 313 aa, Setaria italica
  Transcript Sequence Number=SeqID_21794
  Gene Ontology: Mol. function=cysteine-type peptidase activity; Cellular component=nucleus; Biological process=ubiquitin-dependent protein catabolic process
  Homolog annotation: Hit_ID=Q94ED6; Match level="QueryCoverage=98%, HitCoverage=25%, E-value=1e-134, Identity=76%"; Hit description =Ubiquitin carboxyl-terminal hydrolase
  Pfam annotation: Domain name=MATH; Domain location=76-196; Score =70.8; E_value=4.9e-18; Accession=PF00917.18; Description=MATH domain
  Pfam annotation: Domain name=UCH; Domain location=211-313; Score= -56.5; E_value=0.0013; Accession=PF00443.21; Description=Ubiquitin carboxyl-terminal hydrolase
  Pfam module annotation: Pfam domain module=MATH::UCH; Domain location= 76-196::211-313
MVVPRAPEDQDEEMLVPHQDVIEGAQQAVVEGPQQDVVEGPQQDVVEGPQPMEESASTVENQTVPDPCTSRFTWTIENFFKRNVRKHYSDDFVVGGYKWRVLVFPKGNNVDNLSMYLDVADANFLPPGWSRYAQFSLAVVNQIDSKMSLRKEATHQFNARESDWGFTSFMPLMDLYDSSKGYVVNDKCIIEAEVAVRKIVDFWNYDSKKMTGYVGLKNQGATCYMNSLLQTLYHIPYFRKAVYHMPTSENDTPSGSIPLALQSLFYKLQHNDNSVATKELTKSFGWDSYDSFMQHDVQELNRVLCEKAGEQDE

SEQ ID NO: 87769 - protein, 59 aa, Setaria italica
  Transcript Sequence Number=SeqID_21795
VKGSLLEINDRLIKQPDLLNTAADREGYIAIFQPKPADWLKIKDKFLSYEDYKNLRGVC

SEQ ID NO: 87770 - protein, 176 aa, Setaria italica
  Transcript Sequence Number=SeqID_21796
  Gene Ontology: Mol. function=protein binding; Cellular component =cellular_component; Biological process=biological_process
  Homolog annotation: Hit_ID=Q54TD9; Match level="QueryCoverage=87%, HitCoverage=88%, E-value=3e-21, Identity=35%"; Hit description =UPF0436 protein
DETRALVVPDAADLPASPPSAVEANFARYFIADFPNPGHDQYVYRHPNGLCVVGLAPAHVAFKEEGGITAVDFNVGKSDRSEMKVTGKRKRNAQHLQENSALCKVCVNDKSFVVRCCVKGSLLEINDRLIKQPDLLNTAADREGYIAIFQPKPADWLKIKDKFLSYEDYKNLRGVC

SEQ ID NO: 87771 - protein, 44 aa, Setaria italica
  Transcript Sequence Number=SeqID_21797
LVVVTICSASSEVREKMEVFIHEDYVNKRREQRRRQLQMLQVEG

SEQ ID NO: 87772 - protein, 245 aa, Setaria italica
  Transcript Sequence Number=SeqID_21798
  Gene Ontology: Mol. function=protein tyrosine kinase activity; Cellular component=plasma membrane; Biological process=protein amino acid phosphorylation
  Homolog annotation: Hit_ID=Q8LEI6; Match level="QueryCoverage=99%, HitCoverage=35%, E-value=2e-89, Identity=66%"; Hit description =Receptor-like protein kinase
  Pfam annotation: Domain name=Pkinase; Domain location=14-241; Score= -33.2; E_value=1.6e-06; Accession=PF00069.17; Description=Protein kinase domain
  Pfam annotation: Domain name=Pkinase_Tyr; Domain location=14-245; Score=-37.2; E_value=3e-11; Accession=PF07714.9; Description=Protein tyrosine kinase
  Pfam module annotation: Pfam domain module=Pkinase::Pkinase_Tyr; Domain location=14-241::14-245
GSNLEEVECATQYFSDVNLLGKSNFAATYKGIMRDGSVVAVKSINKSSCKSEEADFLKGLRLLTSLRHENLVGLRGFCRSRARGECFLIYEFMANGSLSRYLDVKDGEAGATVLDWPTRVSIIKGIAKGIDYLHSSKPNKPPLVHQSISADKVLIDHLFVPHLSGAGIHKLLADDVVFSTLKDSAAMGYLAPEYTTTGRSTDKGDVYAFGVVVLQVLTGRRAVSAHLRLGAAEPGTLDDLVDPRL

SEQ ID NO: 87773 - protein, 121 aa, Setaria italica
  Transcript Sequence Number=SeqID_21799
  Gene Ontology: Cellular component=cytoplasm
  Homolog annotation: Hit_ID=Q10PL9; Match level="QueryCoverage=97%, HitCoverage=56%, E-value=3e-23, Identity=44%"; Hit description=Maf family protein, putative, expressed
MVSKGMIRERPRSAEEAREFIKGYSGDRAFAVNFVLVSNLSTGATRGGWDIPEIKFQHIPDDFIDKVVNQGDMTCVAGGLKLTHPSVLPFIKELVGTADSVRGLPRELTEKLIRESLEAEA

SEQ ID NO: 87774 - protein, 76 aa, Setaria italica
  Transcript Sequence Number=SeqID_21800
MALTNFIVTVAVVGAGVLLFTTDIRRSGALFRRNARQLRQWLEEDTASAASKSAKEGAPKKLDSTIPKEKPKEDNH

SEQ ID NO: 87775 - protein, 128 aa, Setaria italica
  Transcript Sequence Number=SeqID_21801
HKQLQSVIVSLWLLLGDRRVKFLWSSFFCRPAALFDLCKETKHKQKASWYSLKTEKKVLCTSTIMSVQVVWIFLVTRLKAKNLGKFTPCYATAKALILSNTKATSYNSFTMIRQYSLRCTFSDWFKQL

SEQ ID NO: 87776 - protein, 69 aa, Setaria italica
  Transcript Sequence Number=SeqID_21802
  Gene Ontology: Mol. function=oxidoreductase activity; Cellular component=extracellular region; Biological process=oxidation reduction
  Homolog annotation: Hit_ID=Q2PAJ2; Match level="QueryCoverage=84%, HitCoverage=9%, E-value=3e-27, Identity=93%"; Hit description =Putative laccase
  Pfam annotation: Domain name=Cu-oxidase_3; Domain location=4-69; Score=45.2; E_value=2.9e-11; Accession=PF07732.7; Description =Multicopper oxidase
RNRLVGWIIRRHGVRQVRSGWADGPSFITQCPIRPGQSYAYNFRIIGQRGTLWWHAHFSWLRATLYGPL

SEQ ID NO: 87777 - protein, 93 aa, Setaria italica
  Transcript Sequence Number=SeqID_21803
  Gene Ontology: Mol. function=oxidoreductase activity; Cellular component=extracellular region; Biological process=lignin catabolic process
  Homolog annotation: Hit_ID=Q0DHL5; Match level="QueryCoverage=81%, HitCoverage=14%, E-value=2e-33, Identity=85%"; Hit description =Putative laccase-11
MKDGPLVILPPLGVPYPFPKPDREVPLMLGEWFNADPEAVIRQALQTGGGPNVSDAYTFNGLPGPTYNACSAGDTFRLRVRPGRTYMLRLVNA

SEQ ID NO: 87778 - protein, 157 aa, Setaria italica
  misc_feature (95)..(95): Xaa can be any naturally occurring amino acid
  misc_feature (97)..(97): Xaa can be any naturally occurring amino acid
  Transcript Sequence Number=SeqID_21804
  Gene Ontology: Mol. function=oxidoreductase activity; Cellular component=extracellular region; Biological process=lignin catabolic process
  Homolog annotation: Hit_ID=B6UCC4; Match level="QueryCoverage=67%, HitCoverage=19%, E-value=8e-51, Identity=84%"; Hit description=L -ascorbate oxidase
  Pfam annotation: Domain name=Cu-oxidase_3; Domain location=43-154; Score=201.8; E_value=1.8e-57; Accession=PF07732.7; Description =Multicopper oxidase
MGARHGLRRGHAAAASTCPFLAFAVLLALPALAAGDTHYYTFNVQMTNVTRLCVTKSIPTVNGKFPGPKLVVREGDRLVVKVHNHINYNVTFHWXRXGWADGPSFITQCPIRPGQSYAYNFRIIGQRGTLWWHAHFSWLRATLYGPLVILPPLGVPY

SEQ ID NO: 87779 - protein, 121 aa, Setaria italica
  Transcript Sequence Number=SeqID_21805
HPVLRRQPGGVAHALPLRRSLELGPVHGVARQRRPAAESEDATPAVRSPEMLMTDRIDCRRLILYRRRGVGGHFRKVLVHVCVFFLPRLKQFGLDYLIAVCRFCGKCLGFRSPPKPSFETE

SEQ ID NO: 87780 - protein, 187 aa, Setaria italica
  misc_feature (152)..(152): Xaa can be any naturally occurring amino acid
  misc_feature (164)..(164): Xaa can be any naturally occurring amino acid
  Transcript Sequence Number=SeqID_21806
  Gene Ontology: Mol. function=oxidoreductase activity; Cellular component=extracellular region; Biological process=oxidation reduction
  Homolog annotation: Hit_ID=B6SWG3; Match level="QueryCoverage=86%, HitCoverage=27%, E-value=6e-73, Identity=83%"; Hit description=L -ascorbate oxidase
  Pfam annotation: Domain name=Cu-oxidase_3; Domain location=36-152; Score=247.3; E_value=3.7e-71; Accession=PF07732.7; Description =Multicopper oxidase
MATSYMLLPYCVLVAVLVLLFSVDVAEGAIREYQFDVQMTSVTRLCSSKSIVTVNGLFPGPTVFAREGDRVVVRVVNHVQYNVSLHWHGIRQLRTGWADGPAYITQCPIQTGQSYVYKFTVTGQRGTLWWHAHISWLRATVYGPIVILPKPXGSPYPFPAPYNXESPSLFGEWWKADTEAVISQALQ

SEQ ID NO: 87781 - protein, 184 aa, Setaria italica
  Transcript Sequence Number=SeqID_21807
  Gene Ontology: Mol. function=oxidoreductase activity; Cellular component=extracellular region; Biological process=lignin catabolic process
  Homolog annotation: Hit_ID=B6UCC4; Match level="QueryCoverage=98%, HitCoverage=31%, E-value=2e-72, Identity=76%"; Hit description=L -ascorbate oxidase
RTIAVAPYTNTVGTFDNTTAVAALEYAPQAALRGLPLPALPLYNDTGAVANFSANFRSLASAQYPARVPRTVDRKFFFAVGLGADPCPSRVNGTCQGPNGTKFAASINNNSFFRPRSALLEAHYQRRYAGVLLANFPTTPPHPFNYTGTPPNNTFVQHGTRVVPLRFNTSVELVLQGTSIQGAE

SEQ ID NO: 87782 - protein, 77 aa, Setaria italica
  Transcript Sequence Number=SeqID_21808
  Gene Ontology: Mol. function=oxidoreductase activity; Cellular component=extracellular region; Biological process=oxidation reduction
  Homolog annotation: Hit_ID=O24043; Match level="QueryCoverage=98%, HitCoverage=12%, E-value=3e-36, Identity=89%"; Hit description =Laccase
  Pfam annotation: Domain name=Cu-oxidase_2; Domain location=1-61; Score=44.4; E_value=4.3e-10; Accession=PF07731.6; Description =Multicopper oxidase
NDPAKFNLVDPVERNTVGVPAGGWVAIRFRADNPGVWFMHCHLEVHMSWGLKMAWLVQDGSLPNQKLPPPPSDLPQC

SEQ ID NO: 87783 - protein, 275 aa, Setaria italica
  Transcript Sequence Number=SeqID_21809
  Gene Ontology: Mol. function=oxidoreductase activity; Cellular component=extracellular region; Biological process=lignin catabolic process
  Homolog annotation: Hit_ID=Q0DHL2; Match level="QueryCoverage=74%, HitCoverage=35%, E-value=4e-98, Identity=82%"; Hit description =Laccase-12/13
  Pfam annotation: Domain name=Cu-oxidase_2; Domain location=132-245; Score=122.0; E_value=2e-33; Accession=PF07731.6; Description =Multicopper oxidase
  Subcellular localization annotation: CTP_CleavageSite=52; ConfidenceScore=5.42e-01
PSSLPSFLPSLPPSSATTAAAANLPIFAPTLPQINDTNFVANYTARLRSLATAAYPAAVPQSIDRRFFFTVGLGTHPCAVNGTCQGPNGSRFAAAVNNVSFVLPTTALLQAHFAGRSNGVYTTDFPAVPLMPFNYTGPPPNNTNVMNGTRVVALPFGTTVELVLQDTSILGAESHPLHLHGFNFYVVGQGFGNFDPVNDPAKFNLVDPVERNTVGVPAGGWVAIRFFADNPGEYHASQIVVLPLQFLECSMTKILNSCYGKITSQVSGSCTAIWR

SEQ ID NO: 87784 - protein, 286 aa, Setaria italica
  Transcript Sequence Number=SeqID_21810
  Gene Ontology: Mol. function=oxidoreductase activity; Cellular component=extracellular region; Biological process=lignin catabolic process
  Homolog annotation: Hit_ID=Q10ND7; Match level="QueryCoverage=100%, HitCoverage=50%, E-value=1e-135, Identity=82%"; Hit description =Laccase-10
  Pfam annotation: Domain name=Cu-oxidase_2; Domain location=136-270; Score=188.8; E_value=1.5e-53; Accession=PF07731.6; Description =Multicopper oxidase
THLMLARPYGTGQPGTFDNTTVAAVLEYAPPGHIKSLPLFRPSLPALNDTAFAANYSARLRSLATPDYPANVPRGVDRSFFFAVGLGTNPCPANQTCQGPNGSMFTASMNNVSFDMPTTALLQAHYNNIAGVYTTDFPVAPLEPFNYTGTPPNNTNVSNGTKVVVLQYNTSVEVVLQDTSILGAESHPLHLHGFDFFVVGQGFGNYDSSKDPAKFNLVDPVQRNTVGVPAGGWVAIRFFADNPGVWFMHCHLEVHTSWGLKMAWVVNDGPLPEQKLMPPPADLPMC

SEQ ID NO: 87785 - protein, 576 aa, Setaria italica
  Transcript Sequence Number=SeqID_21811
  Gene Ontology: Mol. function=oxidoreductase activity; Cellular component=extracellular region; Biological process=lignin catabolic process
  Homolog annotation: Hit_ID=Q2PAJ2; Match level="QueryCoverage=94%, HitCoverage=94%, E-value=0.0, Identity=76%"; Hit description =Putative laccase
  Pfam annotation: Domain name=Cu-oxidase; Domain location=166-320; Score=206.3; E_value=8.3e-59; Accession=PF00394.14; Description =Multicopper oxidase
  Pfam annotation: Domain name=Cu-oxidase_2; Domain location=426-560; Score=186.8; E_value=6.2e-53; Accession=PF07731.6; Description =Multicopper oxidase
  Pfam annotation: Domain name=Cu-oxidase_3; Domain location=40-156; Score=222.6; E_value=1e-63; Accession=PF07732.7; Description =Multicopper oxidase
  Pfam module annotation: Pfam domain module=Cu-oxidase::Cu-oxidase _2::Cu-oxidase_3; Domain location=166-320::426-560::40-156
  Subcellular localization annotation: CTP_CleavageSite=42; ConfidenceScore=5.21e-01
MAGGRRLRCLSPACLFLAVAVALLAMPGLAAARTRRYTFNVTMATVTRLCATRSIPTVNGRFPGPKIVVREGDRLIVQVHNHINNNVSFHWHGVRQLRNGWADGPSYITQCPIQPGQSYAYDFTITGQRGTLWWHAHFSWLRVHLYGPLVILPKRAEGYPFPRPYKEVPILFGEWFNGDTEAIINQALQTGGGPNVSDAYTFNGLPGPTYNCSAQDTYKLKVQPGRTYMLRLINSALNDELFFAIANHTLTVVEADANYVKPFTVQTLVISPGQTMNVLLTTAAANPASPAYAMAISPYTNTVGTFDNTTAVAALEYAPQAALRGLPLPALPLYNDTGAVANFSANFRSLASAQYPARVPRTVDRKFFFAVGLGADPCPSRVNGTCQGPNGTRFAASMNNVSFTMPKTSLLQAHYQRRYSGVLTANFPAMPPMTFNYTGTPPNNTFVTHGTRVVPLRYNTTVEVVLQDTSILGAESHPLHLHGYDFYVVGTGFGNYDANNDTAKYNLVDPVQRNTISVPTAGWVAIRFVADNPGVWIMHCHLDVHLSWGLAMAWLVNDGPLPNQKLPPPPSDIPKC

SEQ ID NO: 87786 - protein, 208 aa, Setaria italica
  misc_feature (12)..(12): Xaa can be any naturally occurring amino acid
  misc_feature (22)..(22): Xaa can be any naturally occurring amino acid
  Transcript Sequence Number=SeqID_21812
  Homolog annotation: Hit_ID=B6THI9; Match level="QueryCoverage=100%, HitCoverage=78%, E-value=5e-97, Identity=84%"; Hit description=F-box domain containing protein
  Pfam annotation: Domain name=F-box; Domain location=48-95; Score =20.4; E_value=0.0074; Accession=PF00646.25; Description=F-box domain
  Subcellular localization annotation: CTP_CleavageSite=40; ConfidenceScore=5.10e-01
PQAGIIIESTTXFLSPARLNFXPFGSNKGQILPRTPRTPVAAEFDGDSRLESLPLDLLIKIMRCLHHDQLKAVFHVSKRIRKAVELARQYHFNYTTPDRSRQELLLNKTPLPTEHWPFLRIDGKDVRVSTPRTPRAPKHAARLSRLKLVDVKPITTVLFQESSTFPSKRLRRSVPPGLPRPVSKTAPSPRVLRYEEELCEAVAQNKLL

SEQ ID NO: 87787 - protein, 59 aa, Setaria italica
  Transcript Sequence Number=SeqID_21813
  Gene Ontology: Mol. function=transferase activity, transferring glycosyl groups; Biological process=metabolic process
  Subcellular localization annotation: CTP_CleavageSite=27; ConfidenceScore=5.04e-01
MAGVHEQADAPHVIVLASPGAGHVVPVAQLAARLAARHGFTATVVTFTNLSSREHSTAL

SEQ ID NO: 87788 - protein, 343 aa, Setaria italica
  misc_feature (29)..(29): Xaa can be any naturally occurring amino acid
  Transcript Sequence Number=SeqID_21814
  Gene Ontology: Mol. function=catalytic activity; Cellular component =brush border membrane; Biological process=metabolic process
  Homolog annotation: Hit_ID=Q7F0T4; Match level="QueryCoverage=99%, HitCoverage=30%, E-value=1e-147, Identity=72%"; Hit description =Putative phospholipase D-like protein
  Pfam annotation: Domain name=PH; Domain location=152-265; Score=27.6; E_value=5.1e-05; Accession=PF00169.21; Description=PH domain
FRWRLYKKASQVLYLHFALKRREFLEEFXKKQEQVKEWLQNLGIGEHMPVVHDEDEADDVNVPPQSDDNSIRNRNVPSSAVLPVIRPAIGRQNSISDRAKVAMQEYLNHFLGNLDIVNSQEVCKFLEVSCLSFLPEYGPKLKEDYVSVGHLPKIQKDRKKQCCSCGLFNCCKSNWQKVWVVLKPGFLALLEDPFDPKLLDVIIFDALPHMDINGEGQISLAKEIKERNPLHFGFQVSSGGRTIKLRTRSSSKVKDWVTAINAARQPPEGWCYPHRFGSFAPPRGLLEDGSMVQWFIDGQAAFEAIASSIEEAKSEIFITGWWLCPELYLRRPFQNHGSSRLDA

SEQ ID NO: 87789 - protein, 310 aa, Setaria italica
  misc_feature (246)..(246): Xaa can be any naturally occurring amino acid
  Transcript Sequence Number=SeqID_21815
  Gene Ontology: Mol. function=lactoylglutathione lyase activity
  Homolog annotation: Hit_ID=B6SSK1; Match level="QueryCoverage=100%, HitCoverage=87%, E-value=1e-143, Identity=81%"; Hit description =Lactoylglutathione lyase
  Pfam annotation: Domain name=Glyoxalase; Domain location=177-299; Score=75.5; E_value=1.9e-19; Accession=PF00903.17; Description =GlyoxalaseBleomycin resistance proteinDioxygenase superfamily
  Pfam annotation: Domain name=Glyoxalase; Domain location=47-168; Score=142.8; E_value=1.1e-39; Accession=PF00903.17; Description =GlyoxalaseBleomycin resistance proteinDioxygenase superfamily
  Pfam module annotation: Pfam domain module=Glyoxalase::Glyoxalase; Domain location=177-299::47-168
GTRPLRLTRNATGGAAAKIRASADAAQAATFSGADEAAAWAKKDNRRFLHVVYRVGDLDKTIKFYTECLGMKLLRKRDIPEEKYTNAFLGYGPEDSHFVVELTYNYGVDKYDIGAGFGHFGIGVDDVAKTVELVRAKGGKVTREPGPVKGGTTVIAFVEDPNGYKFEILERPGTPEPLCQVMLRVGDLDRAISFYEKACGMELLRKRDNPEYKYTVAMMGYGPEEKNAVLELTYNYGVTEYEKGNXAYAQIALGTDDVYKTAEVVKLFGGKVVREPGPLPGINTKITSILDPDGWKSVFVDNIDFAKELE

SEQ ID NO: 87790 - protein, 139 aa, Setaria italica
  misc_feature (9)..(9): Xaa can be any naturally occurring amino acid
  Transcript Sequence Number=SeqID_21816
APLGISVAXGGSGLRMRRRMDDPAPSCYDSGHLLDTATLCEGLKRRLHSDGIGVTVQGVDALNRGLDEFLRRLIKPCMDLSRVRASSRRIGKVNEKFTGRMNGLQQPNLGYSTTLQDFAVAVQSDPHSLGPNWPTQIEK

SEQ ID NO: 87791 - protein, 358 aa, Setaria italica
  misc_feature (51)..(51): Xaa can be any naturally occurring amino acid
  Transcript Sequence Number=SeqID_21817
  Gene Ontology: Mol. function=signal transducer activity; Cellular component=plasma membrane; Biological process=response to light stimulus
  Homolog annotation: Hit_ID=B9RNV5; Match level="QueryCoverage=88%, HitCoverage=51%, E-value=4e-73, Identity=47%"; Hit description =Protein binding protein, putative
  Pfam annotation: Domain name=NPH3; Domain location=1-207; Score =180.1; E_value=6.5e-51; Accession=PF03000.6; Description=NPH3 family
SYDALIAEDYMRRNQCLVETIIWLLPSDKSSGCSCRFLLKLLKVAILVGAXEHVKEELMRRISFQLHKATVKDLLLPAASPNDGTYDVQLVHNLVQRFVARTALSHNGGFVEKSDEKMIELNFEQESTLSVGELVDGYLSEVASDPDLSLSTFVEVATAVPEAARPIHDGLYYAVDAYLKEHPDISKTDKKKICSLVDVKKLSTDASMHATQNDRLPLRLVVQVLFFQQLRAGASKELALTDDGGHACTRPMPDQCDPCERRIPKHPNSLNKQVTSLSARESDHHRISEHRGSRNSFKDQLGGLLLQSRSRRIFDKLWSSKGQGEHGGGKGSETSGSSQSPPLSAKPAEVKPSPLPPS

SEQ ID NO: 87792 - protein, 81 aa, Setaria italica
  Transcript Sequence Number=SeqID_21818
FCFLALSTSSSIITASIRAIIRLGRCKSLYRAMSQLQQCGLVDGEGVVLGLGGSGPLDLVVFLRRRRSTPTTPNLFHACPV

SEQ ID NO: 87793 - protein, 102 aa, Setaria italica
  Transcript Sequence Number=SeqID_21819
  Subcellular localization annotation: CTP_CleavageSite=40; ConfidenceScore=5.68e-01
ATPAPARPSPRPPGTPAPASQPPSSASRGPNQRTAPADPRNAEAAGLPPSPKWRRSAEHWGTADRSGSRDQMLGEEGGGTRARLGWDSDARARIGDRIFRSR

SEQ ID NO: 87794 - protein, 48 aa, Setaria italica
  Transcript Sequence Number=SeqID_21820
NVYPTVSSLFFLFRTLIVYFQYTLELPSALYIHYHVFLVYVCGFSLNE

SEQ ID NO: 87795 - protein, 213 aa, Setaria italica
  misc_feature (9)..(9): Xaa can be any naturally occurring amino acid
  Transcript Sequence Number=SeqID_21821
  Gene Ontology: Mol. function=inorganic phosphate transmembrane transporter activity; Cellular component=membrane; Biological process=phosphate transport
  Homolog annotation: Hit_ID=B9S7S7; Match level="QueryCoverage=100%, HitCoverage=76%, E-value=5e-90, Identity=73%"; Hit description =Phosphate abc transporter, putative
  Pfam annotation: Domain name=ABC_tran; Domain location=4-186; Score =200.2; E_value=5.6e-57; Accession=PF00005.19; Description=ABC transporter
VPRGVVMGXVIGPSGSGKSTLLRALNRLWEPAPGAVLLDGADIRGIDVLALRRRVGMLFQLPAMFDGTVADNVRYGPQLRGKKLTEAEVKNLLSMADLDPALSSKPASELSVGQAQRVALARTLANDPEVLLLDEPTSALDPISTQNIEEAIVRLKKARGLTTVLVSHSVKQIQRIADLVCLVVSGEIVEVLAPSELSGAKHPMARRFLELSN

SEQ ID NO: 87796 - protein, 379 aa, Setaria italica
  Transcript Sequence Number=SeqID_21822
  Gene Ontology: Mol. function=pyruvate decarboxylase activity
  Homolog annotation: Hit_ID=B6TXL9; Match level="QueryCoverage=100%, HitCoverage=63%, E-value=0.0, Identity=84%"; Hit description =Pyruvate decarboxylase isozyme 1
  Pfam annotation: Domain name=TPP_enzyme_C; Domain location=203-350; Score=40.2; E_value=1e-09; Accession=PF02775.13; Description =Thiamine pyrophosphate enzyme, C-term
  Pfam annotation: Domain name=TPP_enzyme_M; Domain location=15-148; Score=94.9; E_value=2.8e-25; Accession=PF00205.14; Description =Thiamine pyrophosphate enzyme, central d
  Pfam module annotation: Pfam domain module=TPP_enzyme_C::TPP_enzyme _M; Domain location=203-350::15-148
LSPRLSNQMNLEAAVEAAAAFLNKAVKPVLVGGPKMRVSKACKAFVELADACGYPVAVMPSAKGLVPEHHSRFIGTYWGAVSTPFCAEIVESADAYLFAGPIFNDYSSVGYSLLLKKEKAIMVQPERVVIGHGPAFGCVLMKDFLHALATRLKKNTAAYENYRRIYVPPGEPLSSEPGEPLRVNILFKHIQAMLSGNSAIIAETGDSWFNCQKLKLPEGCGYEFQMQYGSIGWSVGATLGYAQAAKDKRVIACIGDGSFQVTVQEVSTMLRWGQNSIIFLINNGGYTIEVEIHDGPYNVIKNWNYTGLVEAFHNGEGKCYTAKVRTEEELKEALKAALGPKKDCLCFIEVIVHKDDTSKELLEWGSRVSAANSRPPNPQ

SEQ ID NO: 87797 - protein, 79 aa, Setaria italica
  Transcript Sequence Number=SeqID_21823
QVVCSCEDPRRRRPPPACAISLWTAASPVAFLASGRRLFLNHELLIEDVCAALELLPGQASTRRLLSGQASTQMSPNLR

SEQ ID NO: 87798 - protein, 137 aa, Setaria italica
  misc_feature (109)..(109): Xaa can be any naturally occurring amino acid
  Transcript Sequence Number=SeqID_21824
  Homolog annotation: Hit_ID=B6SWG5; Match level="QueryCoverage=97%, HitCoverage=18%, E-value=6e-20, Identity=45%"; Hit description =Signal transducer
  Subcellular localization annotation: CTP_CleavageSite=73; ConfidenceScore=5.56e-01
AIAIPWNGQKPSNPVSLASQILPPQGDNFWCMSKAVKCNSSRSEDSAINNFVSRFAPGIFNLNQEFSTESTCRSSATWPEEILPSHSIRAILDESQYKFLRNCFQSTSXNSWGQVIVTAGWDGKIRSFQNYGLPAHQ

SEQ ID NO: 87799 - protein, 71 aa, Setaria italica
  Transcript Sequence Number=SeqID_21825
  Homolog annotation: Hit_ID=B6SWG5; Match level="QueryCoverage=83%, HitCoverage=8%, E-value=6e-13, Identity=58%"; Hit description=Signal transducer
VTNLDKEVTRLTWPEEILPSHSIRAILDESQYKFLRNCFQSTSNSWGQVIVTAGWDGKIRSFQNYGLPAHQ

SEQ ID NO: 87800 - protein, 46 aa, Setaria italica
  Transcript Sequence Number=SeqID_21826
  Gene Ontology: Mol. function=nucleic acid binding; Cellular component= nucleus; Biological process=mRNA processing
  Homolog annotation: Hit_ID=Q84L59; Match level="QueryCoverage=97%, HitCoverage=10%, E-value=2e-14, Identity=84%"; Hit description =Polypyrimidine track-binding protein homologue
TFQKSAGFQALIQYHSRQEAVEAFGSLHGRNIYDGCCQLDIQYSNY

SEQ ID NO: 87801 - protein, 79 aa, Setaria italica
  misc_feature (71)..(71): Xaa can be any naturally occurring amino acid
  Transcript Sequence Number=SeqID_21827
  Gene Ontology: Mol. function=nucleic acid binding; Cellular component= nucleus; Biological process=mRNA processing
  Homolog annotation: Hit_ID=B9SE84; Match level="QueryCoverage=100%, HitCoverage=18%, E-value=2e-30, Identity=73%"; Hit description =Polypyrimidine tract binding protein, putative
  Pfam annotation: Domain name=RRM_1; Domain location=8-74; Score=4.8; E_value=0.071; Accession=PF00076.14; Description=RNA recognition motif. (a.k.a. RRM, RBD, o
MAEPSKVIHIRNVGHEIAESDLLQLLQPFGLVSKIVMLRAKNQALLQMEDIHASVTALQYYSSVQPSVRGXNVYMQFSS

SEQ ID NO: 87802 - protein, 193 aa, Setaria italica
  Transcript Sequence Number=SeqID_21828
  Gene Ontology: Mol. function=nucleic acid binding; Cellular component= nucleus; Biological process=mRNA processing
  Homolog annotation: Hit_ID=C0J4I8; Match level="QueryCoverage=100%, HitCoverage=44%, E-value=2e-71, Identity=67%"; Hit description=RBP50
  Pfam annotation: Domain name=RRM_1; Domain location=120-186; Score =35.6; E_value=2e-07; Accession=PF00076.14; Description=RNA recognition motif. (a.k.a. RRM, RBD, o
AGFQALIQYHSRQEAVEAFGSLHGRNIYDGCCQLDIQYSNLSELQVHYNNDRSRDFTNPSLPTEQRPRTSQQGYPDPAGLYAFQQPGASYAQMGRAAMIAAAFGGTLPHGVTGTNERCTLIVSNLNTDKIDEDKLFNLFSLYGNIVRIKILRNKPDHALVEMADGLQAELAVHYLKGAILFGKKLEVNYSKYP

SEQ ID NO: 87803 - protein, 444 aa, Setaria italica
  Transcript Sequence Number=SeqID_21829
  Gene Ontology: Mol. function=nucleic acid binding; Cellular component= nucleus; Biological process=mRNA processing
  Homolog annotation: Hit_ID=C0J4I8; Match level="QueryCoverage=100%, HitCoverage=100%, E-value=0.0, Identity=70%"; Hit description=RBP50
  Pfam annotation: Domain name=RRM_1; Domain location=259-325; Score =35.6; E_value=2e-07; Accession=PF00076.14; Description=RNA recognition motif. (a.k.a. RRM, RBD, o
  Pfam annotation: Domain name=RRM_1; Domain location=369-435; Score =33.7; E_value=7.4e-07; Accession=PF00076.14; Description=RNA recognition motif. (a.k.a. RRM, RBD, o
  Pfam annotation: Domain name=RRM_1; Domain location=8-74; Score=8.9; E_value=0.03; Accession=PF00076.14; Description=RNA recognition motif. (a.k.a. RRM, RBD, o
  Pfam module annotation: Pfam domain module=RRM_1::RRM_1::RRM_1; Domain location=259-325::369-435::8-74
MAEPSKVIHIRNVGHEIAESDLLQLLQPFGLVSKIVMLRAKNQALLQMEDIHASVTALQYYSSVQPSVRGRNVYMQFSSHQELTTDQSSHGRNSDQESEPNRILLVTIHHMIYPITVEVLHQVFKAYGFVEKIVTFQKSAGFQALIQYHSRQEAVEAFGSLHGRNIYDGCCQLDIQYSNLSELQVHYNNDRSRDFTNPSLPTEQRPRTSQQGYPDPAGLYAFQQPGASYAQMGRAAMIAAAFGGTLPHGVTGTNERCTLIVSNLNTDKIDEDKLFNLFSLYGNIVRIKILRNKPDHALVEMADGLQAELAVHYLKGAILFGKKLEVNYSKYPNITPAPDAHDYLNSSLNRFNSNVVKNYRHCCAPTKMIHISALPQEITEEAILNHVSEHGSVINTKLFEVNGKRQALVMFETEEEATEALVSKHASTLEGNTIRISFSQMQSI

SEQ ID NO: 87804 - protein, 244 aa, Setaria italica
  Transcript Sequence Number=SeqID_21830
RRDGEEDWEEVVAAGARPGIAGFRGEATEEQGVVFGAPPTDDEVCAAVASIKQVFEKPSDVDSDAPELTLALPMSGHPSCGLIVNHFALDSGASEVGSDEWTEPAMLVRNSSALLTKEHGSVLDALRLLHEDPSVQKMVMALSKDKAVWHAVMENEVVQEFKRSFQDAKETDLNGRSTAPPGFMMWVLENTQAKIKEFLEKILGLVNMLFQSGDKDYDMSDDIVRMSFMLSVFVFIVVTIARIH

SEQ ID NO: 87805 - protein, 582 aa, Setaria italica
  Transcript Sequence Number=SeqID_21831
  Homolog annotation: Hit_ID=Q7DM36; Match level="QueryCoverage=79%, HitCoverage=87%, E-value=1e-140, Identity=56%"; Hit description =H1flk (Fragment)
  Subcellular localization annotation: CTP_CleavageSite=46; ConfidenceScore=5.06e-01
PFPPTDSDPPPSRELSGAPSAMARDGGGLARALLLHVAALSTAGAVATAAAALVRRRLGVGKKEEVPAVMAEMPRLQVAQSGRLEDLEKFSHYVARQMGFEDINECPQLCKLANNYLRSSKNCMEDIYGFFANVKDAESLYVNFIEELDKCILGYFAFHWDHATYLISSALTVDSGSTKKLRNVFMEATRKQRFARVTRDLKVTRVFATLVEEMKAIGIAATTNGEEAAQCTDVMAPVAHSDRSPVLLLMGGGMGAGKSTVLMEIKREALWSNADQGNAVVVEADAFKETDVIYRAISSMGHHNDMLQTAELVHQSSTDAASSLLVTALNEGRDVILDGTLSWEPFVEQTIAMARAVHRQRYRMGVGYKVGDDGTVTESYWEVDDDAGSGAPPPGASRKPYRIEVVGVVCDAYLAVARGIRRAIITRRAVRVRSQLQSHKRFAAAFRRYSRLVDGARLYSTNSMGSAQLIAWKDGINSSLLVEPGEIDCLEKVSRLNEDATSVHDLYPDGTTTCGSRSIWEDMIASPSRAATQRDLREAIRSAEEAAANGEPKTAQRELLEAIRSAEEAANGVPETPTAAAS

SEQ ID NO: 87806 - protein, 36 aa, Setaria italica
  Transcript Sequence Number=SeqID_21832
VIALGELSQTMFLFHNFRQQAHIIYDTSLYQDVSHD

SEQ ID NO: 87807 - protein, 75 aa, Setaria italica
  Transcript Sequence Number=SeqID_21833
  Gene Ontology: Mol. function=actin binding; Cellular component=plasma membrane; Biological process=actin filament fragmentation
  Homolog annotation: Hit_ID=B9SYJ9; Match level="QueryCoverage=100%, HitCoverage=12%, E-value=8e-25, Identity=66%"; Hit description=WD -repeat protein, putative
MAQLVETYACSPATERGRGILLAGDPKTDSIAYCTGRSVIIRRLDAPLDCWAYQDHAYPTTVARFSPNGEWVASA

SEQ ID NO: 87808 - protein, 269 aa, Setaria italica
  misc_feature (26)..(26): Xaa can be any naturally occurring amino acid
  Transcript Sequence Number=SeqID_21834
GEFDYVSRYLEAEQIGAMVREQEKKXLKKTEQLQHLRRSEEHKRQRNMQVERMKSEMYNLQSQLNRMNSFTPINDTSHNEGLRRRRNTKLYSDTDTLHEDNETGSPTKQDKIGSTESAESFEFSIADTQKNMRDLMFQHSSDTMRSPIRGRSDEFVLTDNIRNSLGSTPEITEFEESDEKVNYNLSKWEKARGQPKENPLKSAVQLIGDGVSQVQSFGNQAVTNIVSFLNIDPDEPHSNEHPAEGDIYDVVESQTETQDGQLPRTHSVF

SEQ ID NO: 87809 - protein, 73 aa, Setaria italica
  misc_feature (9)..(9): Xaa can be any naturally occurring amino acid
  Transcript Sequence Number=SeqID_21835
  Homolog annotation: Hit_ID=Q10SN0; Match level="QueryCoverage=100%, HitCoverage=26%, E-value=1e-26, Identity=71%"; Hit description=F-box family protein, putative, expressed
DETIDNTLXPQERINHRPSYWSSGGEVDPDVPESLTYRLNSDICIIDEVRIRPFKAFFQIGDPIYSSKAVRIR

SEQ ID NO: 87810 - protein, 371 aa, Setaria italica
  Transcript Sequence Number=SeqID_21836
  Gene Ontology: Mol. function=aspartic-type endopeptidase activity; Cellular component=integral to membrane; Biological process =regulation of neuron apoptosis
  Homolog annotation: Hit_ID=B9RIX2; Match level="QueryCoverage=100%, HitCoverage=100%, E-value=1e-151, Identity=72%"; Hit description=D -alanyl-D-alanine endopeptidase, putative
  Pfam annotation: Domain name=Peptidase_A22B; Domain location=45-359; Score=264.7; E_value=2.1e-76; Accession=PF04258.5; Description =Signal peptide peptidase
MESLWKLAYLLEPASLALIATAISVAYASASRALDYGKEMERNLDFSEASITLDRSQALMIPLASSCSLLLMFYLFSSVSHLMTAFTTVASAMALFFCLSPYITYLKTQFNLMDPFVSRCCSKSFTRLQGLLMLFCITTVLAWLVSGHWLLNNVLGISICIAFVSHVRLPNIKICALLLVCLFVYDIFWVFFSERFFGANVMVSVATQKASNPVHTVANKLSLPGLQLITKKLELPVKLVFPRNLLGGIVPGSSPGDYMMLGLGDMAIPGMLLALVLFFDNRKHKDVNVPSDVSSSKRRNYVWYALTGYGVGLVAALAAGILSQSPQPALLYLVPSTLGPVMYLSWLRNELWELWEGSGPILNEKARLLEV

SEQ ID NO: 87811 - protein, 191 aa, Setaria italica
  Transcript Sequence Number=SeqID_21837
  Gene Ontology: Mol. function=ATPase activity, coupled to transmembrane movement of ions, phosphorylative mechanism; Cellular component=integral to membrane; Biological process=phospholipid transport
  Homolog annotation: Hit_ID=P98204; Match level="QueryCoverage=98%, HitCoverage=16%, E-value=3e-75, Identity=68%"; Hit description =Phospholipid-transporting ATPase 1
NLEIDEKRVSLGPSNIVLRGCELKNTTWAIGVVVYAGKETKAMLNSSGAPSKRSRLETQLNRETVILSIMLIGMCTTASVLAGIWVLNHQGELEFTQFFREKDYTTGKNYNYYGVGMQIFITFLMAVIVYQVIIPISLYISMELVRLGQAYFMGADKDLYDESSRSKFQCRALNINEDLGQIRYVFSDKNK

SEQ ID NO: 87812 - protein, 65 aa, Setaria italica
  misc_feature (19)..(19): Xaa can be any naturally occurring amino acid
  Transcript Sequence Number=SeqID_21838
MAQAVHDRLPFLASPRCRXPPARERGRNPSLAEMLRLVGAATVDPAAAAADDDGSASVFSLPLPL

SEQ ID NO: 87813 - protein, 74 aa, Setaria italica
  Transcript Sequence Number=SeqID_21839
  Subcellular localization annotation: CTP_CleavageSite=68; ConfidenceScore=5.25e-01
YRRDLRRKLKIGQKNDLPPMEAAAVRQGKLSSCRASYLVVSSLTSSRSSASLLEKSLRARTSTASLVREEAEVC

SEQ ID NO: 87814 - protein, 238 aa, Setaria italica
  Transcript Sequence Number=SeqID_21840
  Gene Ontology: Mol. function=pyridoxal phosphate binding; Cellular component=mitochondrion; Biological process=photorespiration
  Homolog annotation: Hit_ID=B6U6Q5; Match level="QueryCoverage=88%, HitCoverage=44%, E-value=1e-120, Identity=97%"; Hit description =Alanine--glyoxylate aminotransferase 2
  Pfam annotation: Domain name=Aminotran_3; Domain location=70-237; Score=-92.2; E_value=8.5e-09; Accession=PF00202.13; Description =Aminotransferase class-III
MMRQGARNFARRFSRLAAAAETAAAPAVPRMPAFDHVPLPYDGPSAAEIARKRAEYLSPSLFHFYSKPLNIVEGKRQYLYDEHGRRYLDAFAGIATVCCGHCHPDVVDAITAQAGRLQHSTVLYLNHAIADFAEALASKLPGDLKVVFLTNSGTEANELAILMARLYTGSHDIISLRNSYHGNAAGTMGATAQKNWKFNVIQTGVHHAVNPDPYRGAFGSDAEKYVRDVQEIIEFGTT

SEQ ID NO: 87815 - protein, 182 aa, Setaria italica
  Transcript Sequence Number=SeqID_21841
  Pfam annotation: Domain name=IQ; Domain location=118-138; Score=29.2; E_value=1.7e-05; Accession=PF00612.19; Description=IQ calmodulin -binding motif
MGLAGGIVRRVFSKSPCSSAGSGRAHSEKGAADHRRRWSSLRLYLCGDEMNAAPEDDDDETLSVKSFETCVMPQEAHVPVAQPSDVHNADDNTGEPEDQRVPGEHSHIVAPTEPAEKEGAATLIQSAFRGFMARRDLQELRKRKEMDGGADEPRSPTSVSVATSVVVQVGESVSNLRLSGED

SEQ ID NO: 87816 - protein, 182 aa, Setaria italica
  Transcript Sequence Number=SeqID_21842
  Gene Ontology: Mol. function=protein binding; Biological process =protein amino acid phosphorylation
  Homolog annotation: Hit_ID=Q5KQI5; Match level="QueryCoverage=99%, HitCoverage=19%, E-value=3e-60, Identity=65%"; Hit description =Unkown protein
  Pfam annotation: Domain name=LRR_1; Domain location=114-134; Score =3.1; E_value=79; Accession=PF00560.25; Description=Leucine Rich Repeat
  Pfam annotation: Domain name=LRR_1; Domain location=137-159; Score =13.7; E_value=0.72; Accession=PF00560.25; Description=Leucine Rich Repeat
  Pfam annotation: Domain name=LRR_1; Domain location=161-180; Score =6.8; E_value=15; Accession=PF00560.25; Description=Leucine Rich Repeat
  Pfam annotation: Domain name=LRR_1; Domain location=18-40; Score =12.8; E_value=1.1; Accession=PF00560.25; Description=Leucine Rich Repeat
  Pfam annotation: Domain name=LRR_1; Domain location=42-61; Score=9.3; E_value=5.1; Accession=PF00560.25; Description=Leucine Rich Repeat
  Pfam annotation: Domain name=LRR_1; Domain location=66-89; Score=8.5; E_value=7.3; Accession=PF00560.25; Description=Leucine Rich Repeat
  Pfam annotation: Domain name=LRR_1; Domain location=91-112; Score =7.1; E_value=14; Accession=PF00560.25; Description=Leucine Rich Repeat
  Pfam module annotation: Pfam domain module=LRR_1::LRR_1::LRR_1::LRR _1::LRR_1::LRR_1::LRR_1; Domain location=114-134::137-159::161 -180::18-40::42-61::66-89::91-112
GENKISGPIPKSFANLTSIKHFHMNNNSLSGQIPSELSKLPSLLHLLVDNNNLSGPLPPKLAEAQSLEILQADNNNFSGSSIPAEYSNIRTLLKLSLRNCSLQGAVPDMSGIPKFGYLDVSWNQLKGSIPTNRLASTITTIDLSHNFLDGTIPPNFSGLPNLQLLSVNGNLLNGSVPPTIWS

SEQ ID NO: 87817 - protein, 46 aa, Setaria italica
  misc_feature (23)..(23): Xaa can be any naturally occurring amino acid
  Transcript Sequence Number=SeqID_21843
FYTRRACAAYLSASCRRSSLKPXPPSLPEESPWSPRCPHPPGASYG

SEQ ID NO: 87818 - protein, 186 aa, Setaria italica
  misc_feature (174)..(174): Xaa can be any naturally occurring amino acid
  Transcript Sequence Number=SeqID_21844
  Gene Ontology: Cellular component=membrane
NDQQAPQIALHCGADAAQFLLFERASFLILAAVAGAAVVAALPLNLLAGDAAIIDQFATTTISHIPKSSPLLWLHLLLTAAVVAIAHLGISRMEDALRITRFRDGNGNPSDPNSSSVAVFTIMIQGIPKTLAADRTPLKDYFEHKYPGKVYRVIVPFDLCTLEYLVQELGKVRXNKISWLEQSWAL

SEQ ID NO: 87819 - protein, 66 aa, Setaria italica
  Transcript Sequence Number=SeqID_21845
PLGTYGRHWHDGSVGRHRRRPRAQLATAGELIVAAGRRCEAPVLAVRPHHQVQVASASKFLVCSMF

SEQ ID NO: 87820 - protein, 128 aa, Setaria italica
  Transcript Sequence Number=SeqID_21846
  Gene Ontology: Mol. function=potassium ion transmembrane transporter activity; Cellular component=integral to membrane; Biological process=potassium ion transport
  Homolog annotation: Hit_ID=B6SS13; Match level="QueryCoverage=70%, HitCoverage=11%, E-value=1e-45, Identity=97%"; Hit description =Potassium transporter 10
PPDEEEEKRGGRKGVPWRMTLSLAYQSLGVVYGDLSTSPLYVYKAAFAEDIQHTESNEEILGVLSFVFWTLTLVPLLKYVCIVLRADDNGEGGTFALYSLLCRHARAALLPPGRAAAGDDDQLLDAAA

SEQ ID NO: 87821 - protein, 171 aa, Setaria italica
  Transcript Sequence Number=SeqID_21847
  Homolog annotation: Hit_ID=B6TQD1; Match level="QueryCoverage=76%, HitCoverage=46%, E-value=3e-54, Identity=83%"; Hit description=Sec20 family protein
  Pfam annotation: Domain name=Sec20; Domain location=32-123; Score =134.4; E_value=3.6e-37; Accession=PF03908.5; Description=Sec20
KAAQEERELLLGGGEESTIRRRNLQTKTGMTSSAESITESLRRSRQMMVQEVERSASTLATFDESTSVLRKAEGEYQGHRSLLSRTRGLLSTMQRQDVLDRVILTAGFIIFSLAVLYVVSRRIGLLTLQRKLADAIRSGSLSAEDIVAKAQQHGPAAADAAGPAPPIYDEL

SEQ ID NO: 87822 - protein, 69 aa, Setaria italica
  Transcript Sequence Number=SeqID_21848
  Gene Ontology: Mol. function=oxidoreductase activity; Biological process=metabolic process
  Homolog annotation: Hit_ID=Q2QUJ9; Match level="QueryCoverage=78%, HitCoverage=14%, E-value=3e-17, Identity=79%"; Hit description =Oxidoreductase, short chain dehydrogenase/reductase family protein, expressed
SQRLAGKVAVITGGASGIGKATATEFVKNGAKVVIADVHDDLGHAVAAELGPDAACWPGSSTPRASWSR

SEQ ID NO: 87823 - protein, 274 aa, Setaria italica
  misc_feature (260)..(260): Xaa can be any naturally occurring amino acid
  Transcript Sequence Number=SeqID_21849
  Gene Ontology: Mol. function=oxidoreductase activity; Biological process=oxidation reduction
  Homolog annotation: Hit_ID=Q2EFH6; Match level="QueryCoverage=82%, HitCoverage=95%, E-value=3e-70, Identity=63%"; Hit description=Short- chain dehydrogenase/reductase (Fragment)
  Pfam annotation: Domain name=Epimerase; Domain location=45-270; Score= -71.3; E_value=0.081; Accession=PF01370.13; Description=NAD dependent epimerasedehydratase family
  Pfam annotation: Domain name=KR; Domain location=44-216; Score=-60.4; E_value=0.0016; Accession=PF08659.2; Description=KR domain
  Pfam annotation: Domain name=adh_short; Domain location=43-212; Score= 102.1; E_value=1.9e-27; Accession=PF00106.17; Description=short chain dehydrogenase
  Pfam module annotation: Pfam domain module=Epimerase::KR::adh_short; Domain location=45-270::44-216::43-212
MFIRALQLVVREKKSGVIASGCLGVVNAFSSASAAQSQRLAGKVAVITGGASGIGKATAAEFVRNGAKVVIADVQDELGHAVAAELGPDAASYTRCDVTDEAQVAAAVDLAVARHGQLDVMFNNAGIGGNHGPPPPLDAVDLAEFDQVMATNARGVLAGLKHAARVMVPRRRGSIICTASTTSLVGGIAAPAYGASKAAVAGLVRTVAVELARSGVRVNAISPHIIPTPLVMEPLALLLPGKSAEELRRLVEVGMNVTVXGTVLEVDDVARAAV

SEQ ID NO: 87824 - protein, 54 aa, Setaria italica
  misc_feature (31)..(31): Xaa can be any naturally occurring amino acid
  Transcript Sequence Number=SeqID_21850
VSRMYSLVIICCVHASYGDVLPSPYQCCCKXGILRNTLRMCIYTDAHTLLSILT

SEQ ID NO: 87825 - protein, 271 aa, Setaria italica
  Transcript Sequence Number=SeqID_21851
  Gene Ontology: Mol. function=transferase activity, transferring hexosyl groups; Cellular component=Gram-negative-bacterium-type cell wall; Biological process=carbohydrate metabolic process
  Homolog annotation: Hit_ID=B6TJ06; Match level="QueryCoverage=92%, HitCoverage=56%, E-value=1e-133, Identity=91%"; Hit description =Glycosyltransferase family 28 C-terminal domain containing protein
  Pfam annotation: Domain name=Glyco_tran_28_C; Domain location=74-239; Score=87.9; E_value=3.6e-23; Accession=PF04101.8; Description =Glycosyltransferase family 28 C-terminal domain
  Subcellular localization annotation: CTP_CleavageSite=49; ConfidenceScore=5.43e-01
TASPAPATRLLAPFALRVFLAFNAPVRLLPKRKCAVYGNPVRMSILKCQASKAEALARFFPREEGLLGEQDAQVVLVLGGAEGSPEINVAVLNVYYEMLRKRKDRYIIWQTGTETFCEMESLVRGHRRLFLTPFLHELEMAYAASDVVISRAGAMTCTEILVTGKPSILIPLPTILDHHQTRNAYIMADVMGAKVITEDELDSSSLTSAVHEIFGDEKLMADMSQKALTAARPNASADIIRHSCSLIGSTYPTVIWAQKYRELVPPATLIW

SEQ ID NO: 87826 - protein, 61 aa, Setaria italica
  Transcript Sequence Number=SeqID_21852
  Gene Ontology: Mol. function=protein binding
  Homolog annotation: Hit_ID=Q2R0M2; Match level="QueryCoverage=85%, HitCoverage=9%, E-value=2e-10, Identity=55%"; Hit description =Leucine Rich Repeat family protein, expressed
IRYSFDPVEQHLDDALETLDAERIHAGLLAVDAGIDAIKTTIRAAYNIPCDGGGGDGYEYL

SEQ ID NO: 87827 - protein, 97 aa, Setaria italica
  Transcript Sequence Number=SeqID_21853
  Gene Ontology: Mol. function=aspartic-type endopeptidase activity; Biological process=proteolysis
  Homolog annotation: Hit_ID=Q7XKB9; Match level="QueryCoverage=100%, HitCoverage=21%, E-value=1e-41, Identity=84%"; Hit description =OSJNBa0064G10.12 protein
AVGALPRAPGVSLLDTCYDLSGYTSVRVPTVSFYFDEGATLTLPARNLLVEVDGGIYCLAFAPSPSGMSILGNIQQEGIQITVDSANGFIGFGPGTC

SEQ ID NO: 87828 - protein, 163 aa, Setaria italica
  Transcript Sequence Number=SeqID_21854
  Gene Ontology: Mol. function=oxidoreductase activity; Biological process=oxidation reduction
  Homolog annotation: Hit_ID=Q7XC87; Match level="QueryCoverage=99%, HitCoverage=39%, E-value=4e-58, Identity=67%"; Hit description =Oxidoreductase, 2OG-Fe oxygenase family protein
  Pfam annotation: Domain name=2OG-FeII_Oxy; Domain location=21-121; Score=144.3; E_value=3.9e-40; Accession=PF03171.12; Description=2OG -Fe(II) oxygenase superfamily
RFVAMDMGVEPESLLERFRGQPQSMRMTYYPPCKQAEKVVGLSPHTDGTGLTLLLQANDVQGLQIPKDGKWVAINALDGAFIVNVGDILEILSNGRYKSIEHRAVVHPTRERMSAAVFHQPCKYATVGPLPELVKKDGEAFYNSIGYMDFITRFFAAKLDGRD

SEQ ID NO: 87829 - protein, 38 aa, Setaria italica
  Transcript Sequence Number=SeqID_21855
ELNRIIFIDRDYRGLNTAPAALPLRLNAETSVQTSNQG

SEQ ID NO: 87830 - protein, 105 aa, Setaria italica
  Transcript Sequence Number=SeqID_21856
IPYRYVKIWSLHNHRRSHAIQLKAQTPHWMQPVDEAVEWTLKKTAGSLPVPEVTNRDMDITTGMLPAWEIGSEEMLSQQQLRPPCLETAPLRGENPKSVWPPQPP

SEQ ID NO: 87831 - protein, 86 aa, Setaria italica
  Transcript Sequence Number=SeqID_21857
  Gene Ontology: Mol. function=transferase activity, transferring glycosyl groups; Biological process=metabolic process
  Homolog annotation: Hit_ID=Q6AVQ5; Match level="QueryCoverage=55%, HitCoverage=10%, E-value=2e-12, Identity=68%"; Hit description =Putative UDP-glycosyltransferase
TSRSPVQLVQFPLCQSQSSSQLQQPWTEAGIEAPGRRSMAKKTFVLYPSLGVGHLIPMVELAKHLLRHGIGALIAVVDPPDTDAVS

SEQ ID NO: 87832 - protein, 62 aa, Setaria italica
  Transcript Sequence Number=SeqID_21858
TLLATAGASVLAGFIDPPDTGLQMPLVPPRRVLAYMYICACASVVAHQCVQYSVPVANLCFF

SEQ ID NO: 87833 - protein, 141 aa, Setaria italica
  Transcript Sequence Number=SeqID_21859
  Gene Ontology: Mol. function=transporter activity; Cellular component= integral to membrane; Biological process=silicate transport
  Homolog annotation: Hit_ID=Q19KC1; Match level="QueryCoverage=100%, HitCoverage=47%, E-value=2e-74, Identity=95%"; Hit description =Aquaporin NIP2-1
  Pfam annotation: Domain name=MIP; Domain location=1-98; Score=-81.8; E_value=0.00021; Accession=PF00230.12; Description=Major intrinsic protein
TTPTGPHWHALVIEVIVTFNMMFVTLAVATDTRAVGELAGLAVGSAVCITSIFAGAVSGGSMNPARTLGPALASNLYTGLWIYFLGPVLGTLSGAWTYTYIRFEEAPSNKDAPQKLSSFKLRRLQSQSVAADDDELDHIQV

SEQ ID NO: 87834 - protein, 96 aa, Setaria italica
  Transcript Sequence Number=SeqID_21860
  Gene Ontology: Mol. function=transporter activity; Cellular component= integral to membrane; Biological process=transport
  Homolog annotation: Hit_ID=Q9AT74; Match level="QueryCoverage=100%, HitCoverage=32%, E-value=3e-45, Identity=92%"; Hit description =Aquaporin NIP2-3
  Subcellular localization annotation: CTP_CleavageSite=27; ConfidenceScore=5.08e-01
AVGSAVCITSIFAGPVSGGSMNPARTLAPAVASNVYTGLWIYFLGPVIGTLSGAWVYTYIRFEEAPAKDAPQRLSSFKLRRMQSQSALAADEFDTV

SEQ ID NO: 87835 - protein, 265 aa, Setaria italica
  Transcript Sequence Number=SeqID_21861
  Gene Ontology: Mol. function=transporter activity; Cellular component= integral to membrane; Biological process=transport
  Homolog annotation: Hit_ID=Q19KC1; Match level="QueryCoverage=98%, HitCoverage=89%, E-value=1e-136, Identity=90%"; Hit description =Aquaporin NIP2-1
  Pfam annotation: Domain name=MIP; Domain location=9-222; Score=196.8; E_value=5.8e-56; Accession=PF00230.12; Description=Major intrinsic protein
VRKLPYDRTIFPPHLGKKVISEVVATFLLVFVTCGAASIYGEDLKRISQLGQSVAGGLIVTVMIYATGHISGAHMNPAVTLSFACFRHFPWIQVPFYWAAQFTGAMCAAFVLKAVLHPIEVIGTTTPTGPHWHALVIEVIVTFNMMFVTLAVATDTRAVGELAGLAVGSAVCITSIFAGPVSGGSMNPARTLGPALASNLYTGLWIYFLGPVLGTLSGAWTYTYIRFEEAPSNKDAPQKLSSFKLRRLQSQSVAADDDELDHIQV

SEQ ID NO: 87836 - protein, 179 aa, Setaria italica
  Transcript Sequence Number=SeqID_21862
  Gene Ontology: Mol. function=transporter activity; Cellular component= integral to membrane; Biological process=transport
  Homolog annotation: Hit_ID=Q67WJ8; Match level="QueryCoverage=72%, HitCoverage=43%, E-value=9e-62, Identity=90%"; Hit description =Aquaporin NIP2-2
  Pfam annotation: Domain name=MIP; Domain location=45-178; Score= -66.1; E_value=2e-05; Accession=PF00230.12; Description=Major intrinsic protein
MAASTAPSRTNSRVNYSNEIHDLSTVQSGGSAVPTMYYPEKSLADIFPPHLGKKVISEVVATFLLVFVTCGAASIYGEDLKRISQLGQSVAGGLIVTVMIYATGHISGAHMNPAVTLSFACFRHFPWIQVCVRCTNCTAHRSVPSACLALLFLFSAPNLFRDRPATGKSSLLLACWHHI

SEQ ID NO: 87837 - protein, 210 aa, Setaria italica
  Transcript Sequence Number=SeqID_21863
  Gene Ontology: Mol. function=silicate transmembrane transporter activity; Cellular component=integral to membrane; Biological process=silicate transport
  Homolog annotation: Hit_ID=Q6Z2T3; Match level="QueryCoverage=92%, HitCoverage=65%, E-value=3e-92, Identity=84%"; Hit description =Aquaporin NIP2-1
  Pfam annotation: Domain name=MIP; Domain location=40-210; Score=70.8; E_value=5e-18; Accession=PF00230.12; Description=Major intrinsic protein
MSTNSRSNSRANFNNEIHDISTVQNSTMPPMYYSDRSLADFFPPHLLKKVVSEVVSTFLLVFVTCGAAAISASDLNRISQLGQSVAGGLIVTVMIYAVGHISGAHMNPAVTLAFAVFRHFPWIQVPFYWAAQFTGAICASFVLKAVLHPITVIGTTTPTGPHWHALVIEVIVTFNMMFVTLAVATDTRAVGELAGLAVGSAVCITSIFAG

SEQ ID NO: 87838 - protein, 142 aa, Setaria italica
  Transcript Sequence Number=SeqID_21864
  Gene Ontology: Mol. function=transferase activity, transferring groups other than amino-acyl groups
  Homolog annotation: Hit_ID=C3SAB0; Match level="QueryCoverage=65%, HitCoverage=38%, E-value=4e-33, Identity=79%"; Hit description =Putative hydroxycinnamoyl transferase
DAETRLYSMIDMRARLAPPLPPGYFGNAVVRTSVSATAGEVVSNPVGYAARRALAATSQGDDYARSLVDYLEGVDAMNLPRSGISRAHLRAISWMGMSLHDSDFGWGAPVFMGPALMYYSGFVYVMQAPGKDGAVALALSLE

SEQ ID NO: 87839 - protein, 73 aa, Setaria italica
  Transcript Sequence Number=SeqID_21865
MLGGSLLELIAPAPEEIPPACREVVFEYTNHVQMLGGSLLELMSEALGLHRRYLSHDAGCLDGISIVGHYYPP

SEQ ID NO: 87840 - protein, 162 aa, Setaria italica
  Transcript Sequence Number=SeqID_21866
  Gene Ontology: Mol. function=oxidoreductase activity; Cellular component=cytoplasm; Biological process=oxidation reduction
  Homolog annotation: Hit_ID=B9STI1; Match level="QueryCoverage=100%, HitCoverage=43%, E-value=6e-29, Identity=41%"; Hit description =Desacetoxyvindoline 4-hydroxylase, putative
  Pfam annotation: Domain name=2OG-FeII_Oxy; Domain location=71-162; Score=108.3; E_value=2.6e-29; Accession=PF03171.12; Description=2OG -Fe(II) oxygenase superfamily
FQSPAATWRDTLYLDMAPIAPAPEEIPPACREVVFEYTNHVQMLGGSLLELMSEALGLHRRYLSHDAGCLDGISIVGHYYPPCPEPDLTLGTTRHSDPSFLTVLLQDGVVGGLQVLVGGRWVPVPPVAGAFVVNVGDFLQLMSNDRFKSVEHRVVAVGAAGP

SEQ ID NO: 87841 - protein, 363 aa, Setaria italica
  Transcript Sequence Number=SeqID_21867
  Gene Ontology: Mol. function=oxidoreductase activity; Biological process=oxidation reduction
  Homolog annotation: Hit_ID=B9STI1; Match level="QueryCoverage=98%, HitCoverage=98%, E-value=8e-70, Identity=39%"; Hit description =Desacetoxyvindoline 4-hydroxylase, putative
  Pfam annotation: Domain name=2OG-FeII_Oxy; Domain location=206-308; Score=143.2; E_value=8e-40; Accession=PF03171.12; Description=2OG -Fe(II) oxygenase superfamily
MASAPIVYDRLSELKAFDDTKAGVKGLVDAGITAIPRIFRHPPDPYTPPDHHADSIIPTIDFTGAARRAELVAEVKKAAETVGFFQVINHGVPATVMSEMLDGLRAFHEEPAEAKRPYYTRDMGSRVRYHSNFDLFQSPAATWRDTLYLDMAPIAPAPEEIPPACREVVFEYTNHVQMLGGSLLELMSEALGLHRRYLSHDAGCLDGISIVGHYYPPCPEPDLTLGTTRHSDPSFLTVLLQDGVVGGLQVLVGGRWVPVPPVAGAFVVNVGDFLQLMSNDRFKSVEHRVVAVGAAGPPRVSVACFFRPRGVAASTRVYGPIVMDAAAGPRSPPRYRSITAEEFINHYMDKGLVGKSALDHFRI

SEQ ID NO: 87842 - protein, 90 aa, Setaria italica
  Transcript Sequence Number=SeqID_21868
  Gene Ontology: Mol. function=transferase activity, transferring glycosyl groups; Cellular component=nucleus; Biological process =gibberellic acid mediated signaling
  Homolog annotation: Hit_ID=Q6YZI0; Match level="QueryCoverage=100%, HitCoverage=9%, E-value=2e-35, Identity=80%"; Hit description =Probable UDP-N-acetylglucosamine--peptide N-acetylglucosaminyltransfe rase SPINDLY
MGQPGMDSVQGKESNGVAPDCNGGASPAKQQLEGKEALRYANILRSRNKFADAIQLYNVVLEKEGTNVEALIGKGICLQAQSLPRQAIEC

SEQ ID NO: 87843 - protein, 325 aa, Setaria italica
  Transcript Sequence Number=SeqID_21869
  Gene Ontology: Cellular component=integral to membrane; Biological process=transport
  Homolog annotation: Hit_ID=B6U001; Match level="QueryCoverage=96%, HitCoverage=89%, E-value=1e-139, Identity=77%"; Hit description =Solute carrier family 35, member F1
  Pfam annotation: Domain name=DUF6; Domain location=141-268; Score =5.8; E_value=0.036; Accession=PF00892.12; Description=Integral membrane protein DUF6
  Pfam annotation: Domain name=DUF914; Domain location=1-296; Score =504.9; E_value=1.1e-148; Accession=PF06027.4; Description=Eukaryotic protein of unknown function (DUF914)
  Pfam annotation: Domain name=TPT; Domain location=132-268; Score= -17.6; E_value=0.0068; Accession=PF03151.8; Description=Triose -phosphate Transporter family
  Pfam annotation: Domain name=UAA; Domain location=10-274; Score= -142.1; E_value=0.003; Accession=PF08449.3; Description=UAA transporter family
  Pfam module annotation: Pfam domain module=DUF6::DUF914::TPT::UAA; Domain location=141-268::1-296::132-268::10-274
RLLRARRRGVNAPTSQSLLNYILLALVYGSVLLYRRQPLTIKWYYYLILGIIDVEANYIVVKSYQYTSLTSVMLLDCWSIPCVIVLTWIFLKTKYGLRKFFGVGVCVAGLILVVFSDVHASDRAKGPNPLKGDLLVILGSMLYACSNVTEEYVIKKSNRVELMAMLGLFGAIVGGIQISILERKELHSVTWNAGAVLPFLGFAVAMFLFYSTVPTVLKICGATMLNLSLLTSDMWAVLIRIFAYHEKVDWIYFVAFACTAAGIIIYSYKDSKEAEETAQVAGASYEQDKEGDEEAGAHNAGEGSGSSVHSKEVPSAAGTSRRLLG

SEQ ID NO: 87844 - protein, 160 aa, Setaria italica
  Transcript Sequence Number=SeqID_21870
  Gene Ontology: Cellular component=chloroplast envelope
  Subcellular localization annotation: CTP_CleavageSite=23; ConfidenceScore=5.43e-01
MASLTTTTTSSPAALPAATTAPAASSVSPHAGSKRPLLAGDDAPWRATAAGGQGIRPVPRIHHAPVLRVAAQDDSAAYALAVMKHPDPIGEGLAMEAFAEAAGPECIVPGQQAPLRLMGLKVWPLDIDLKFLEPFGRELHSMKKFMDKSCSVMDSSMANN

SEQ ID NO: 87845 - protein, 76 aa, Setaria italica
  Transcript Sequence Number=SeqID_21871
  Gene Ontology: Mol. function=protein tyrosine kinase activity; Cellular component=plasma membrane; Biological process=protein amino acid phosphorylation
  Homolog annotation: Hit_ID=B6V3C2; Match level="QueryCoverage=98%, HitCoverage=11%, E-value=1e-35, Identity=97%"; Hit description=PAN1
GEPAEGEGGMDLEAWVRRAFKEERPLSEVVDPTLLGEVHAKKQVLAVFHVALGCTEPDPEMRPRMRAVAESLDRIG

SEQ ID NO: 87846 - protein, 80 aa, Setaria italica
  Transcript Sequence Number=SeqID_21872
SRNMVCKDSQLQHSNQHANSTKYLWRWHIIPKTFQSGHCHETPEEKKDILNIAEQLRQMSSHAETVLQLQSGTSRLYLNR

SEQ ID NO: 87847 - protein, 317 aa, Setaria italica
  Transcript Sequence Number=SeqID_21873
  Gene Ontology: Cellular component=vacuole
  Homolog annotation: Hit_ID=UPI0001A7B2D3; Match level="QueryCoverage =98%, HitCoverage=21%, E-value=1e-107, Identity=62%"; Hit description= glycine-rich protein
  Pfam annotation: Domain name=NCD3G; Domain location=136-176; Score= -7.3; E_value=0.061; Accession=PF07562.6; Description=Nine Cysteines Domain of family 3 GPC
NVSASSTAGGGIIVMGSLEQSLPNLSLSGSIEANGGSFTGLASHATIGGPGGGSGGTILLFVRTLLLKEDSVLSSVGGIGNNGSGGGGGGRIHFHWSDIPTGDDYVPFATVKGTILTRGGVSEGHGFPGENGTVTGKDCPKGLYGTFCKECPSGTYKNITGSSKSLCSPCPPNELPRRAVYISVRGGVAETPCPYKCVSDRYRMPHCFTALEELIYTFGGPWLFGLLLSGLLVLLALVLSIARMKFVGTDELPGPAPTQHSSQIDHSFPFLESLNEVLETNRAEESHCHVHRMYFMGPNTFSEPWHLPHTPPEQISE

SEQ ID NO: 87848 - protein, 278 aa, Setaria italica
  Transcript Sequence Number=SeqID_21874
  Gene Ontology: Mol. function=transferase activity, transferring hexosyl groups; Biological process=metabolic process
  Homolog annotation: Hit_ID=Q2R4X7; Match level="QueryCoverage=83%, HitCoverage=49%, E-value=3e-72, Identity=60%"; Hit description =Flavonol 3-O-glucosyltransferase, putative, expressed
  Subcellular localization annotation: CTP_CleavageSite=9; ConfidenceScore=5.38e-01
QPVPTHQTQTMSGSGNGSGRAGVATHVVMFPWLAFGHISPFAQLTRKLISGDETLRVTFLTAAGNVPRVEAMLAEAAGAVAVLPLDLPSVPGLPPVAASTAELSADGAELLKVALDGTRPQVATLLAELRPDAVLFDFAVPWVCDVAAPLGVRALYFNVYSAATLALTVPARCPGGQRPSAHELTAAPAGFPSDSPLVTLPAYQAANLTYVFESFYGMPSAYDRFIECLKGCFGIVMKTCAEMEGPYIDYILAQIGKPVLLAGPVVPEPPEGELEERW

SEQ ID NO: 87849 - protein, 443 aa, Setaria italica
  Transcript Sequence Number=SeqID_21875
  Gene Ontology: Mol. function=transferase activity, transferring glycosyl groups; Biological process=metabolic process
  Homolog annotation: Hit_ID=Q2R4X7; Match level="QueryCoverage=98%, HitCoverage=91%, E-value=1e-152, Identity=62%"; Hit description =Flavonol 3-O-glucosyltransferase, putative, expressed
MPGEAIHVVMLPWLAFGHISPFAQLARKLFSVEGGHNIRVTFLTADGNLPRVQAMLAPAAGAAAVVPLHLPHVPGLPEGAASTAELTADGAELLKVAFDGTRDQVSALLSELRPDAALIDFATPWVTDIAAPLGIKVLYFSVFSAVASTYTVVPARRLHGAAPSAGDFTAAPSGFPKGSALATIPPYQAADLTYLFTSFYGQPCVYDRVTAGIKACDAIVIKTCVEMEGPYISYLSAQFGRPVLLAGPVVPEPPQGHLDERWASWLSSFPENSVVFASFGSETFLPTAAATELLLGLEATNRPFLAVLNFPKGADTEAELRARIPPGFEERVKGRGAVHTGWVQQQHILQHQSVGCYLNHAGFSSAVEGLVAGCRLVLLPMKGDQYLNAALLARELRVGVEVARRDEDGWFGGQDVSDAVALAMAEGGDRDGRKWREFLTDDA

SEQ ID NO: 87850 - protein, 84 aa, Setaria italica
  Transcript Sequence Number=SeqID_21876
  Gene Ontology: Mol. function=transcription regulator activity; Cellular component=nucleus; Biological process=regulation of transcription
  Homolog annotation: Hit_ID=A2Q2N8; Match level="QueryCoverage=52%, HitCoverage=7%, E-value=1e-11, Identity=72%"; Hit description=Helix -loop-helix DNA-binding (Fragment)
FGLTILKGLMELRDGKIWARFLVETNREVTRMDIFLSLVQLLEQNSLVRSNEQMAKVMNSGVPSFTDHQRSPLPIPVGVAERLQ

SEQ ID NO: 87851 - protein, 229 aa, Setaria italica
  Transcript Sequence Number=SeqID_21877
  Gene Ontology: Mol. function=transferase activity; Biological process= response to stress
  Homolog annotation: Hit_ID=B4FSR6; Match level="QueryCoverage=98%, HitCoverage=97%, E-value=4e-83, Identity=67%"; Hit description =Glutathione S-transferase
  Pfam annotation: Domain name=GST_C; Domain location=99-196; Score =28.6; E_value=2.6e-05; Accession=PF00043.17; Description=Glutathione S-transferase, C-terminal domain
  Pfam annotation: Domain name=GST_N; Domain location=4-78; Score=71.0; E_value=4.4e-18; Accession=PF02798.12; Description=Glutathione S -transferase, N-terminal domain
  Pfam module annotation: Pfam domain module=GST_C::GST_N; Domain location=99-196::4-78
MASPPVKLIGFFGSPYAFRAQAALCLKGVPYELLMEDLFGTKSDLLLQLNPVHKKVPVLIHGDRAISESLVVAEYIDEAFDGPPLLPTDPYDRAMARFWADFIENKLTKPFFMAHWVEGEAREKFEKEGLELLTLLEAQLKGKKFFGGDRPGYLDIAASALGPWRSVVEEVIGVTVVKEDEHPGIVQWVKDYSSHEALKPCIPDRERLLAYFTKNKEMYKAGVKAMLQQ

SEQ ID NO: 87852 - protein, 35 aa, Setaria italica
  Transcript Sequence Number=SeqID_21878
PVSVASLYIPNHACDRMPLVSTLYNQTEFDTLSYG

SEQ ID NO: 87853 - protein, 136 aa, Setaria italica
  Transcript Sequence Number=SeqID_21879
  Gene Ontology: Mol. function=zinc ion binding
  Homolog annotation: Hit_ID=B9RYP2; Match level="QueryCoverage=76%, HitCoverage=9%, E-value=2e-21, Identity=49%"; Hit description =Transcription factor, putative
  Pfam annotation: Domain name=PB1; Domain location=31-124; Score=72.2; E_value=1.8e-18; Accession=PF00564.16; Description=PB1 domain
VASSQGSCHAPPPPPRDAALRTPLHGVDAGVVTVKASYKGDIIRFRVPSSAGVATVKREVAKRLGLEASEFDVKYLDDDNEWVLLSCDADFQECLDVVPALSGTSTSSGSGAAQPVIRLMVQELAEIDGSSCGSSD

SEQ ID NO: 87854 - protein, 132 aa, Setaria italica
  Transcript Sequence Number=SeqID_21880
  Homolog annotation: Hit_ID=A7U438; Match level="QueryCoverage=81%, HitCoverage=74%, E-value=3e-10, Identity=37%"; Hit description =Tryptophanin
  Pfam annotation: Domain name=Tryp_alpha_amyl; Domain location=27-118; Score=50.3; E_value=7.4e-12; Accession=PF00234.14; Description =Protease inhibitorseed storageLTP f
LASSIIGAAHAQVEEKQCQEGQTMDACRDYLKQQCTASAMPITWPWKWRMSSCRRLRLRCCEQLEQMPPSCRCRAIRSTVEELQRGGLPGSDHHQMMSKVMEMAKTLPSICNMDPSYCSSIPTRNCRSPYVV

SEQ ID NO: 87855 - protein, 174 aa, Setaria italica
  Transcript Sequence Number=SeqID_21881
  Gene Ontology: Mol. function=protein binding; Cellular component =integral to membrane; Biological process=protein transport
  Homolog annotation: Hit_ID=B9RW98; Match level="QueryCoverage=100%, HitCoverage=100%, E-value=4e-68, Identity=74%"; Hit description =Vesicle transport protein SFT2B, putative
  Pfam annotation: Domain name=SFT2; Domain location=43-162; Score =203.0; E_value=8e-58; Accession=PF07770.4; Description=SFT2-like protein
MDTMRGALERAKMLVGMEVDEESALPPPEEQSFFDDINRQCTLNTTQRLYGFAICLAAGLTCTFLSMLVFFNPVKFGVTFTLGNLMALGSTAFLIGPKRQFDMMLDSVRIYATALYIASIIIALFCALLVHSKLLTLLAIILEFGALVWYSLSYIPFARSIVSKVMTSCFDTDF

SEQ ID NO: 87856 - protein, 50 aa, Setaria italica
  Transcript Sequence Number=SeqID_21882
GTQFTPQDVSTVGKKMTVRFTLTFGTVHIKEINVRTCAVVQHENMCNKLI

SEQ ID NO: 87857 - protein, 120 aa, Setaria italica
  Transcript Sequence Number=SeqID_21883
  Subcellular localization annotation: CTP_CleavageSite=39; ConfidenceScore=5.01e-01
HQHLANRSSQRPEPEQSKAAPKRAPTRSTAALLTGARTRSQELVPLDRHGCGGRHGEGRARVVTPAQASRSPIKTQRLQTLALPVPGHSAPPDTPHAGAATIPWSEEHTVRADTPHAGWA

SEQ ID NO: 87858 - protein, 114 aa, Setaria italica
  Transcript Sequence Number=SeqID_21884
  Gene Ontology: Mol. function=N-acetyltransferase activity; Cellular component=nucleus; Biological process=metabolic process
  Homolog annotation: Hit_ID=Q6ZA58; Match level="QueryCoverage=91%, HitCoverage=7%, E-value=1e-27, Identity=60%"; Hit description=PHD finger transcription factor-like
DNGWNIELRQRKNKDYEDSVYVSPEGTGYWSITKAYAVYQEQFQNQRDMGCSSKLKNIMPGASDAISTDDLAMLKKNIVRRRTNKEIYGAKKKPGANRSKGSKDILADSKFLVK

SEQ ID NO: 87859 - protein, 92 aa, Setaria italica
  misc_feature (36)..(36): Xaa can be any naturally occurring amino acid
  Transcript Sequence Number=SeqID_21885
MNLQEMDAAKLSIMGSCDGRYNLCGMESTSGSLVQXYSLKKFGNENGSQQLQSLDHGDSSDGFQKHDSEHSLLKTPQGMLSLYHILDDNSSC

SEQ ID NO: 87860 - protein, 573 aa, Setaria italica
  misc_feature (10)..(10): Xaa can be any naturally occurring amino acid
  misc_feature (23)..(23): Xaa can be any naturally occurring amino acid
  Transcript Sequence Number=SeqID_21886
  Homolog annotation: Hit_ID=Q9SH55; Match level="QueryCoverage=73%, HitCoverage=61%, E-value=2e-20, Identity=28%"; Hit description =F22C12.19
LHKQDSKIVXKKTIKLLDGPPCXKRPKLEPVQTGRDAEAKGHDFISQKNVPELAQCAASEKSRLLKQKRISDAKRIDKKNIRSGVRSKYDCFSSKAGLANFDSGFSGNSVLGAHGLKSDVRDITNHIENLSLSELLDGTYKYSSLGRDKGKKVLRTKDELLVSVRKAFSMLSDMDYCNGKDANLILSPKLPSASTSSYDIKEQCGDKPPPLVKDSSQINVCDTSLCPPKDILSRLTLPHGQDLDSLLAPGSESTAAVKPYMPSMTVHGASLPPFPWSHSQAGGYRQSVDCGKHGSSRSSSQWQWMRVGCNLTLDYEDSSVHKIDDLLQEMDAAKLSIMGSCDGRYNLCGMESTSGSLVQNIHSRKIGSENGSQQLQSLDHGDSSDGFQKHDSEHSLLKTPQVSPKIQRAAEILCDMRRSTESWSAQGYSNGAIKWPKSPSEKVMKARKASSQFGTAESSSGSRNNDATWNGSNHSTKKIVDRKNDSARLNNPSKGTIRWPVPIEDGASPVRSERGLMLDTKQPHGNGGRHPVQVSSQARLEKEYENQQKLRKATLTSSLGSAGDWNRERNRRM

SEQ ID NO: 87861 - protein, 152 aa, Setaria italica
  Transcript Sequence Number=SeqID_21887
  Gene Ontology: Mol. function=nucleic acid binding
  Homolog annotation: Hit_ID=Q7XK21; Match level="QueryCoverage=94%, HitCoverage=20%, E-value=3e-23, Identity=42%"; Hit description =OSJNBa0044K18.24 protein
DNKTGEERDEGGSVESSSYRLPALERIVSLQRGRGREGRRRKMRAGNESIAPVNKRKGSTYQQEEDGDSQAVPELPEDILCHIHSLMPLRDAARSACLSRAFLHSWRCRPNLTLNSDTLCSKAHVHKEDFSNIIDSIMRNHSGIRVKIICKS

SEQ ID NO: 87862 - protein, 103 aa, Setaria italica
  Transcript Sequence Number=SeqID_21888
  Gene Ontology: Mol. function=lipid binding; Biological process=lipid transport
  Homolog annotation: Hit_ID=B6U7K0; Match level="QueryCoverage=86%, HitCoverage=52%, E-value=7e-30, Identity=74%"; Hit description=Non -specific lipid-transfer protein
  Pfam annotation: Domain name=Tryp_alpha_amyl; Domain location=16-94; Score=28.5; E_value=2.8e-05; Accession=PF00234.14; Description =Protease inhibitorseed storageLTP f
  Subcellular localization annotation: CTP_CleavageSite=26; ConfidenceScore=5.18e-01
AASQALAPAPSSSMDCGAAVAGLLPCLSYVQQGSPQGKPAMECCAGVKGALKSPATVACLCAAFKQKYPVAINMTRAATLPAACGEDQAAFSKCNIKVPGAPT

SEQ ID NO: 87863 - protein, 76 aa, Setaria italica
  Transcript Sequence Number=SeqID_21889
  Gene Ontology: Mol. function=nucleoside-triphosphatase activity
  Homolog annotation: Hit_ID=Q2R029; Match level="QueryCoverage=82%, HitCoverage=9%, E-value=1e-17, Identity=66%"; Hit description=AAA -type ATPase family protein, putative, expressed
YPLCALPIPCCVSQLERDTETLKAKANVLNIHKFLTSRGIECNDLQELSIKAQILTNESVDKIVGHAISHHIQHNK

SEQ ID NO: 87864 - protein, 182 aa, Setaria italica
  Transcript Sequence Number=SeqID_21890
  Gene Ontology: Mol. function=protein serine/threonine kinase activity; Biological process=protein amino acid phosphorylation
  Homolog annotation: Hit_ID=B9SRB8; Match level="QueryCoverage=62%, HitCoverage=15%, E-value=5e-30, Identity=58%"; Hit description =Serine-threonine protein kinase, plant-type, putative
AWNMTLEKLPCDDGDGDARRRTVGLAVGVPVGVTVLAAAAVLAYVCVAKRRKAAHGGGDDSSAITGTMIRSLAGGPREFEYREIRKATNNFDEKMKLGQGGYGVVYRGVVVGDHTCPGGAGSAVEVAVKKFSRANTQGQNDFLAELSIINRLRHKHLVRLVGWSHDNGELLLVYEFMPNGSL

SEQ ID NO: 87865 - protein, 121 aa, Setaria italica
  misc_feature (68)..(68): Xaa can be any naturally occurring amino acid
  Transcript Sequence Number=SeqID_21891
  Homolog annotation: Hit_ID=B6SJ34; Match level="QueryCoverage=100%, HitCoverage=100%, E-value=1e-39, Identity=68%"; Hit description =Keratinocytes-associated protein 2
  Pfam annotation: Domain name=Keratin_assoc; Domain location=1-120; Score=222.2; E_value=1.3e-63; Accession=PF09775.1; Description =Keratinocyte-associated protein 2
MASTGRSMLLSLLLFAVTLSLLEMYRAKFASSELMTIAGGFICSLLFLLLLTFIGNYQEASGDRTGWXAVVVAQLVALIVAGTVHRVCITTCFLFSAGLLYEVDKLSGMILARSESKVRRH

SEQ ID NO: 87866 - protein, 79 aa, Setaria italica
  Transcript Sequence Number=SeqID_21892
  Gene Ontology: Mol. function=transporter activity; Cellular component= membrane; Biological process=oligopeptide transport
  Homolog annotation: Hit_ID=B6ST62; Match level="QueryCoverage=100%, HitCoverage=16%, E-value=1e-22, Identity=65%"; Hit description=POT family protein
DQVPDAFRSVGLALCMSIFGVGNYVSGMLVFATDWATRSKGAQSWFSDNLNRAHLDYFYWLLAGLAALEVAAFLHFASR

SEQ ID NO: 87867 - protein, 60 aa, Setaria italica
  Transcript Sequence Number=SeqID_21893
VISLPFGDWVVWNSVRQSALCNVWVFKHAMCNQLTLLVSEERLNPGVLRTLLFLSMALPG

SEQ ID NO: 87868 - protein, 73 aa, Setaria italica
  Transcript Sequence Number=SeqID_21894
SLWDAKNSQLVFHWPKLHERHTFFQPTSRGFGGVVRAAVTDLQVLSHGFISCGGDGSVKLVQLKDDLATVHQQ

SEQ ID NO: 87869 - protein, 121 aa, Setaria italica
  Transcript Sequence Number=SeqID_21895
  Gene Ontology: Mol. function=sequence-specific DNA binding; Cellular component=nucleus; Biological process=regulation of transcription, DNA-dependent
  Homolog annotation: Hit_ID=B6SUJ1; Match level="QueryCoverage=100%, HitCoverage=52%, E-value=1e-53, Identity=84%"; Hit description =WRKY46-superfamily of TFs having WRKY and zinc finger domains
  Pfam annotation: Domain name=WRKY; Domain location=41-104; Score =84.8; E_value=3e-22; Accession=PF03106.7; Description=WRKY DNA -binding domain
MALDSVPTYLRDLGSHRATRTQQQRVRKDERTWTSDTYAPYDDGHQWRKYGEKKLSNSNFPRFYYRCTYKNDMKCPATKQVQQKDTSDPPLFSVTYFNHHTCSTSSAPIGGTRDTTAQSSS

SEQ ID NO: 87870 - protein, 116 aa, Setaria italica
  Transcript Sequence Number=SeqID_21896
  Gene Ontology: Cellular component=plasma membrane
  Homolog annotation: Hit_ID=Q0VH26; Match level="QueryCoverage=69%, HitCoverage=39%, E-value=6e-36, Identity=85%"; Hit description=High affinity nitrate transporter
MARQGGVVSFSLLLVLLLGAYLPAPAAAGVHLSTLPKALDVTASPKPGQVLHAGVDTVTVTWSLNTTEPAGADAAFKNVKVNLCYAPVSQKDRGWRKSEDDLSKDKACQFKHSMPG

SEQ ID NO: 87871 - protein, 203 aa, Setaria italica
  Transcript Sequence Number=SeqID_21897
  Gene Ontology: Cellular component=plasma membrane
  Homolog annotation: Hit_ID=Q0VH26; Match level="QueryCoverage=100%, HitCoverage=100%, E-value=4e-66, Identity=63%"; Hit description=High affinity nitrate transporter
MARQQGAVVFSLLAAVLLCGCLPAPAAAGVHLSTLPKALAVTASPKPGQVLHAGVDTVTVTWSLNTTEPAGADAAYKNVKVNLCYAPVSQKDRGWRKSEDDLSKDKACQFKLTQQAYAAGARRSFDYAVAKDIPSGTYYVRAYALDASGTQVAYGQTGPEAAFVVAGITGIHASIKVAAGVFSAFSVVALAFFFVIENRKKNK

SEQ ID NO: 87872 - protein, 77 aa, Setaria italica
  Transcript Sequence Number=SeqID_21898
  Gene Ontology: Mol. function=serine-type endopeptidase activity; Cellular component=cytoplasm; Biological process=proteolysis
  Homolog annotation: Hit_ID=B6U134; Match level="QueryCoverage=100%, HitCoverage=10%, E-value=3e-30, Identity=80%"; Hit description =Prolyl endopeptidase
QYPPTMLLTADHDDRVVPSHTLKFLATLQHVLRAGAEGSPQTNPIIGRIERKSGHGCGRSTQKIIDEAADRYAFAAK

SEQ ID NO: 87873 - protein, 147 aa, Setaria italica
  Transcript Sequence Number=SeqID_21899
  Gene Ontology: Mol. function=transporter activity; Cellular component= integral to membrane; Biological process=transport
  Homolog annotation: Hit_ID=Q6H4F0; Match level="QueryCoverage=100%, HitCoverage=27%, E-value=9e-52, Identity=70%"; Hit description =Membrane transport protein-like
IISIAVGILNWFFAVDPHFPAGDDSTTANHQRDGKHPATAREVVAEMIEEAKFVVRIPTFQIFVAQGVSGSFPWSALSFASMWLELKGFSHGDTAVLMTIFWVASSLGGLLGGKMGDFLAVRYPDAGRIVLSQISAGSAVPLATVLL

SEQ ID NO: 87874 - protein, 109 aa, Setaria italica
  Transcript Sequence Number=SeqID_21900
  Gene Ontology: Mol. function=methyltransferase activity; Cellular component=cytoplasm; Biological process=metabolic process
  Homolog annotation: Hit_ID=Q75G68; Match level="QueryCoverage=100%, HitCoverage=25%, E-value=2e-30, Identity=66%"; Hit description =Probable protein arginine N-methyltransferase 6.2
MFGGGADGNGHLPRPRRPRRGGVGGGGGMRPLQGQLASGVQSHPAAPPCTDYDVAYFKAYSHIGVHEEMLKDHVRTITYRNAIMHHQDLISGKVVLDVGCGTGVLSIFC

SEQ ID NO: 87875 - protein, 131 aa, Setaria italica
  Transcript Sequence Number=SeqID_21901
  Gene Ontology: Mol. function=transcription regulator activity; Cellular component=nucleus; Biological process=regulation of transcription
  Homolog annotation: Hit_ID=B9RKM4; Match level="QueryCoverage=96%, HitCoverage=30%, E-value=8e-37, Identity=65%"; Hit description =Transcription factor, putative
  Pfam annotation: Domain name=HLH; Domain location=14-63; Score=3.1; E_ value=0.08; Accession=PF00010.18; Description=Helix-loop-helix DNA -binding domain
TASGSAFKKARVQEPSPAQSTVKVRKEKLGDRITALHQLVSPFGKTDTASVLLEAIGYIRFLHSQIEALSSPYVGGSNDGGGAGSSISSSSKHQQQLHIHESSVHGERHSIFPEDPGQLLHDNALEKTRTA

SEQ ID NO: 87876 - protein, 103 aa, Setaria italica
  Transcript Sequence Number=SeqID_21902
  Gene Ontology: Mol. function=DNA binding; Cellular component =nucleosome; Biological process=nucleosome assembly
  Homolog annotation: Hit_ID=B6T0P4; Match level="QueryCoverage=79%, HitCoverage=55%, E-value=5e-40, Identity=100%"; Hit description =Histone H4
  Pfam annotation: Domain name=CBFD_NFYB_HMF; Domain location=28-91; Score=5.0; E_value=0.061; Accession=PF00808.15; Description=Histone -like transcription factor (CBFNF-Y) and archaeal histone
  Pfam annotation: Domain name=Histone; Domain location=25-94; Score =64.2; E_value=4.9e-16; Accession=PF00125.16; Description=Core histone H2AH2BH3H4
  Pfam annotation: Domain name=TAF; Domain location=28-92; Score=-6.7; E_value=0.027; Accession=PF02969.9; Description=TATA box binding protein associated factor (TAF)
  Pfam module annotation: Pfam domain module=CBFD_NFYB_HMF::Histone::TAF ; Domain location=28-91::25-94::28-92
MSGRGKGGKGLGKGGAKRHRKVLRDNIQGITKPAIRRLARRGGVKRISGLIYEETRGVLKIFLENVIRDAVTYTEHARRKTVTAMDVVYALKRQGRTLYGFGG

SEQ ID NO: 87877 - protein, 126 aa, Setaria italica
  Transcript Sequence Number=SeqID_21903
  Gene Ontology: Mol. function=DNA binding; Cellular component =chromosome; Biological process=nucleosome assembly
  Homolog annotation: Hit_ID=B6T0P4; Match level="QueryCoverage=65%, HitCoverage=55%, E-value=5e-41, Identity=100%"; Hit description =Histone H4
  Pfam annotation: Domain name=CBFD_NFYB_HMF; Domain location=51-114; Score=5.0; E_value=0.061; Accession=PF00808.15; Description=Histone -like transcription factor (CBFNF-Y) and archaeal histone
  Pfam annotation: Domain name=Histone; Domain location=48-117; Score =64.2; E_value=4.9e-16; Accession=PF00125.16; Description=Core histone H2AH2BH3H4
  Pfam annotation: Domain name=TAF; Domain location=51-115; Score=-6.7; E_value=0.027; Accession=PF02969.9; Description=TATA box binding protein associated factor (TAF)
  Pfam module annotation: Pfam domain module=CBFD_NFYB_HMF::Histone::TAF ; Domain location=51-114::48-117::51-115
  Subcellular localization annotation: CTP_CleavageSite=21; ConfidenceScore=5.14e-01
QSHLESPSSLRSTPPRNPAPLASMSGRGKGGKGLGKGGAKRHRKVLRDNIQGITKPAIRRLARRGGVKRISGLIYEETRGVLKIFLENVIRDAVTYTEHARRKTVTAMDVVYALKRQGRTLYGFGG

SEQ ID NO: 87878 - protein, 103 aa, Setaria italica; identical to SEQ ID NO: 87876
  Transcript Sequence Number=SeqID_21904
  Gene Ontology: Mol. function=DNA binding; Cellular component =nucleosome; Biological process=nucleosome assembly
  Homolog annotation: Hit_ID=B6T0P4; Match level="QueryCoverage=79%, HitCoverage=55%, E-value=5e-40, Identity=100%"; Hit description =Histone H4
  Pfam annotation: Domain name=CBFD_NFYB_HMF; Domain location=28-91; Score=5.0; E_value=0.061; Accession=PF00808.15; Description=Histone -like transcription factor (CBFNF-Y) and archaeal histone
  Pfam annotation: Domain name=Histone; Domain location=25-94; Score =64.2; E_value=4.9e-16; Accession=PF00125.16; Description=Core histone H2AH2BH3H4
  Pfam annotation: Domain name=TAF; Domain location=28-92; Score=-6.7; E_value=0.027; Accession=PF02969.9; Description=TATA box binding protein associated factor (TAF)
  Pfam module annotation: Pfam domain module=CBFD_NFYB_HMF::Histone::TAF ; Domain location=28-91::25-94::28-92

SEQ ID NO: 87879 - protein, 103 aa, Setaria italica; identical to SEQ ID NO: 87876
  Transcript Sequence Number=SeqID_21905
  Gene Ontology: Mol. function=DNA binding; Cellular component =nucleosome; Biological process=nucleosome assembly
  Homolog annotation: Hit_ID=B6T0P4; Match level="QueryCoverage=79%, HitCoverage=55%, E-value=5e-40, Identity=100%"; Hit description =Histone H4
  Pfam annotation: Domain name=CBFD_NFYB_HMF; Domain location=28-91; Score=5.0; E_value=0.061; Accession=PF00808.15; Description=Histone -like transcription factor (CBFNF-Y) and archaeal histone
  Pfam annotation: Domain name=Histone; Domain location=25-94; Score =64.2; E_value=4.9e-16; Accession=PF00125.16; Description=Core histone H2AH2BH3H4
  Pfam annotation: Domain name=TAF; Domain location=28-92; Score=-6.7; E_value=0.027; Accession=PF02969.9; Description=TATA box binding protein associated factor (TAF)
  Pfam module annotation: Pfam domain module=CBFD_NFYB_HMF::Histone::TAF ; Domain location=28-91::25-94::28-92

SEQ ID NO: 87880 - protein, 129 aa, Setaria italica
  Transcript Sequence Number=SeqID_21906
  Gene Ontology: Mol. function=DNA binding; Cellular component =chromosome; Biological process=nucleosome assembly
  Homolog annotation: Hit_ID=B6T0P4; Match level="QueryCoverage=63%, HitCoverage=55%, E-value=2e-40, Identity=100%"; Hit description =Histone H4
  Pfam annotation: Domain name=CBFD_NFYB_HMF; Domain location=54-117; Score=5.0; E_value=0.061; Accession=PF00808.15; Description=Histone -like transcription factor (CBFNF-Y) and archaeal histone
  Pfam annotation: Domain name=Histone; Domain location=51-120; Score =64.2; E_value=4.9e-16; Accession=PF00125.16; Description=Core histone H2AH2BH3H4
  Pfam annotation: Domain name=TAF; Domain location=54-118; Score=-6.7; E_value=0.027; Accession=PF02969.9; Description=TATA box binding protein associated factor (TAF)
  Pfam module annotation: Pfam domain module=CBFD_NFYB_HMF::Histone::TAF ; Domain location=54-117::51-120::54-118
KDKLPPPKNPPISFVPQEERVFAAAAMSGRGKGGKGLGKGGAKRHRKVLRDNIQGITKPAIRRLARRGGVKRISGLIYEETRGVLKIFLENVIRDAVTYTEHARRKTVTAMDVVYALKRQGRTLYGFGG

SEQ ID NO: 87881 - protein, 107 aa, Setaria italica
  misc_feature (12)..(12): Xaa can be any naturally occurring amino acid
  Transcript Sequence Number=SeqID_21907
  Gene Ontology: Mol. function=DNA binding; Cellular component =nucleosome; Biological process=nucleosome assembly
  Homolog annotation: Hit_ID=B6T0P4; Match level="QueryCoverage=76%, HitCoverage=55%, E-value=9e-40, Identity=98%"; Hit description =Histone H4
  Pfam annotation: Domain name=CBFD_NFYB_HMF; Domain location=32-95; Score=4.1; E_value=0.075; Accession=PF00808.15; Description=Histone -like transcription factor (CBFNF-Y) and archaeal histone
  Pfam annotation: Domain name=Histone; Domain location=29-98; Score =59.9; E_value=9.7e-15; Accession=PF00125.16; Description=Core histone H2AH2BH3H4
  Pfam annotation: Domain name=TAF; Domain location=32-96; Score=-6.9; E_value=0.028; Accession=PF02969.9; Description=TATA box binding protein associated factor (TAF)
  Pfam module annotation: Pfam domain module=CBFD_NFYB_HMF::Histone::TAF ; Domain location=32-95::29-98::32-96
MGAGVSRGKGGXKGLGKGGAKRHRKVLRDNIQGVTKPAIRRLARRGGVKRISGLIYEETRGVLKIFLENVIRDAVTYTEHARRKTVTAMDVVYALKRQGRTLYGFGG

SEQ ID NO: 87882 - protein, 101 aa, Setaria italica
  Transcript Sequence Number=SeqID_21908
  Gene Ontology: Mol. function=DNA binding; Cellular component =nucleosome; Biological process=nucleosome assembly
  Homolog annotation: Hit_ID=B6T0P4; Match level="QueryCoverage=81%, HitCoverage=55%, E-value=7e-40, Identity=100%"; Hit description =Histone H4
  Pfam annotation: Domain name=CBFD_NFYB_HMF; Domain location=26-89; Score=5.0; E_value=0.061; Accession=PF00808.15; Description=Histone -like transcription factor (CBFNF-Y) and archaeal histone
  Pfam annotation: Domain name=Histone; Domain location=23-92; Score =64.2; E_value=4.9e-16; Accession=PF00125.16; Description=Core histone H2AH2BH3H4
  Pfam annotation: Domain name=TAF; Domain location=26-90; Score=-6.7; E_value=0.027; Accession=PF02969.9; Description=TATA box binding protein associated factor (TAF)
  Pfam module annotation: Pfam domain module=CBFD_NFYB_HMF::Histone::TAF ; Domain location=26-89::23-92::26-90
GRGKGGKGLGKGGAKRHRKVLRDNIQGITKPAIRRLARRGGVKRISGLIYEETRGVLKIFLENVIRDAVTYTEHARRKTVTAMDVVYALKRQGRTLYGFGG

SEQ ID NO: 87883 - protein, 103 aa, Setaria italica; identical to SEQ ID NO: 87876
  Transcript Sequence Number=SeqID_21909
  Gene Ontology: Mol. function=DNA binding; Cellular component =nucleosome; Biological process=nucleosome assembly
  Homolog annotation: Hit_ID=B6T0P4; Match level="QueryCoverage=79%, HitCoverage=55%, E-value=5e-40, Identity=100%"; Hit description =Histone H4
  Pfam annotation: Domain name=CBFD_NFYB_HMF; Domain location=28-91; Score=5.0; E_value=0.061; Accession=PF00808.15; Description=Histone -like transcription factor (CBFNF-Y) and archaeal histone
  Pfam annotation: Domain name=Histone; Domain location=25-94; Score =64.2; E_value=4.9e-16; Accession=PF00125.16; Description=Core histone H2AH2BH3H4
  Pfam annotation: Domain name=TAF; Domain location=28-92; Score=-6.7; E_value=0.027; Accession=PF02969.9; Description=TATA box binding protein associated factor (TAF)
  Pfam module annotation: Pfam domain module=CBFD_NFYB_HMF::Histone::TAF ; Domain location=28-91::25-94::28-92

SEQ ID NO: 87884 - protein, 103 aa, Setaria italica; identical to SEQ ID NO: 87876
  Transcript Sequence Number=SeqID_21910
  Gene Ontology: Mol. function=DNA binding; Cellular component =nucleosome; Biological process=nucleosome assembly
  Homolog annotation: Hit_ID=B6T0P4; Match level="QueryCoverage=79%, HitCoverage=55%, E-value=5e-40, Identity=100%"; Hit description =Histone H4
  Pfam annotation: Domain name=CBFD_NFYB_HMF; Domain location=28-91; Score=5.0; E_value=0.061; Accession=PF00808.15; Description=Histone -like transcription factor (CBFNF-Y) and archaeal histone
  Pfam annotation: Domain name=Histone; Domain location=25-94; Score =64.2; E_value=4.9e-16; Accession=PF00125.16; Description=Core histone H2AH2BH3H4
  Pfam annotation: Domain name=TAF; Domain location=28-92; Score=-6.7; E_value=0.027; Accession=PF02969.9; Description=TATA box binding protein associated factor (TAF)
  Pfam module annotation: Pfam domain module=CBFD_NFYB_HMF::Histone::TAF ; Domain location=28-91::25-94::28-92

SEQ ID NO: 87885 - protein, 103 aa, Setaria italica; identical to SEQ ID NO: 87876
  Transcript Sequence Number=SeqID_21911
  Gene Ontology: Mol. function=DNA binding; Cellular component =nucleosome; Biological process=nucleosome assembly
  Homolog annotation: Hit_ID=B6T0P4; Match level="QueryCoverage=79%, HitCoverage=55%, E-value=5e-40, Identity=100%"; Hit description =Histone H4
  Pfam annotation: Domain name=CBFD_NFYB_HMF; Domain location=28-91; Score=5.0; E_value=0.061; Accession=PF00808.15; Description=Histone -like transcription factor (CBFNF-Y) and archaeal histone
  Pfam annotation: Domain name=Histone; Domain location=25-94; Score =64.2; E_value=4.9e-16; Accession=PF00125.16; Description=Core histone H2AH2BH3H4
  Pfam annotation: Domain name=TAF; Domain location=28-92; Score=-6.7; E_value=0.027; Accession=PF02969.9; Description=TATA box binding protein associated factor (TAF)
  Pfam module annotation: Pfam domain module=CBFD_NFYB_HMF::Histone::TAF ; Domain location=28-91::25-94::28-92

SEQ ID NO: 87886 - protein, 74 aa, Setaria italica
  misc_feature (31)..(31): Xaa can be any naturally occurring amino acid
  Transcript Sequence Number=SeqID_21912
  Gene Ontology: Mol. function=protein dimerization activity; Cellular component=nucleus; Biological process=regulation of transcription, DNA-dependent
  Homolog annotation: Hit_ID=B6TN24; Match level="QueryCoverage=100%, HitCoverage=22%, E-value=9e-27, Identity=82%"; Hit description=BZIP transcription factor
  Pfam annotation: Domain name=bZIP_1; Domain location=4-55; Score =37.9; E_value=3.9e-08; Accession=PF00170.13; Description=bZIP transcription factor
  Pfam annotation: Domain name=bZIP_2; Domain location=3-53; Score =32.5; E_value=1.7e-06; Accession=PF07716.7; Description=Basic region leucine zipper
  Pfam module annotation: Pfam domain module=bZIP_1::bZIP_2; Domain location=4-55::3-53
LMERRQKRMIKNRESAARSRARKQAYTNELXNKVSLLEEENERLKRQKELEKILFSAPLPEPKYQLRRTGSATF

SEQ ID NO: 87887 - protein, 181 aa, Setaria italica
  Transcript Sequence Number=SeqID_21913
  Gene Ontology: Mol. function=protein dimerization activity; Cellular component=nucleus; Biological process=regulation of transcription, DNA-dependent
  Homolog annotation: Hit_ID=B6TN24; Match level="QueryCoverage=96%, HitCoverage=54%, E-value=7e-45, Identity=63%"; Hit description=BZIP transcription factor
  Pfam annotation: Domain name=bZIP_1; Domain location=128-180; Score =39.3; E_value=1.5e-08; Accession=PF00170.13; Description=bZIP transcription factor
  Pfam annotation: Domain name=bZIP_2; Domain location=128-175; Score =33.0; E_value=1.2e-06; Accession=PF07716.7; Description=Basic region leucine zipper
  Pfam module annotation: Pfam domain module=bZIP_1::bZIP_2; Domain location=128-180::128-175
ETTLGEMTLEDFLVKAGVVTQGYLKDLNDVGNVEQVGSAGVSGLTAGAQWLDRYQQQITAIEPHQHGQHGVPGAYMPSQLALQPLNVGPGAILESYSDGHITSPMMGALSDSPTPGRKRGAPGDVADKLMERRQKRMIKNRESAARSRARKQAYTNELENKVSLLEEENERLKRQKGSLGK

SEQ ID NO: 87888 - protein, 84 aa, Setaria italica
  Transcript Sequence Number=SeqID_21914
  Gene Ontology: Mol. function=hydrolase activity, hydrolyzing O -glycosyl compounds; Biological process=carbohydrate metabolic process
  Homolog annotation: Hit_ID=Q10QC0; Match level="QueryCoverage=100%, HitCoverage=14%, E-value=2e-33, Identity=79%"; Hit description=1,4 -beta-xylanase, putative, expressed
CYVMCLTDNNFRNLPTGDVVDKLIREWQTRSHAGVADADGYYEAELFHGDYEVTVSHPAANSTVVQSLSVDRKTDPNHVYPIHV

SEQ ID NO: 87889 - protein, 168 aa, Setaria italica
  Transcript Sequence Number=SeqID_21915
  Gene Ontology: Mol. function=hydrolase activity, hydrolyzing O -glycosyl compounds; Cellular component=anchored to membrane; Biological process=carbohydrate metabolic process
  Homolog annotation: Hit_ID=B9SP53; Match level="QueryCoverage=91%, HitCoverage=28%, E-value=4e-56, Identity=69%"; Hit description =Glucan endo-1,3-beta-glucosidase, putative
  Pfam annotation: Domain name=Glyco_hydro_17; Domain location=26-168; Score=-115.1; E_value=0.0002; Accession=PF00332.10; Description =Glycosyl hydrolases family 17
MKKLFFIFFLFLLTGAAVRGEDGAYIGVNIGTAMSSVPAATQITTLLRSQNIRHVRLYDADPAMLAALANTGIRVIVSVPNEQLLAIGNSNATAANWVARNVAAHFPSVNITAIAVGSEVLSAQPNAAPLLMPAMRYLQNALVAAALDRYIKISTPHSSSIILDSFPP

SEQ ID NO: 87890 - protein, 44 aa, Setaria italica
  Transcript Sequence Number=SeqID_21916
CGGGSNDHFIIPLARTGCQMKPDTAFCRLIRWLIKNDESGVTVT

SEQ ID NO: 87891 - protein, 81 aa, Setaria italica
  Transcript Sequence Number=SeqID_21917
  Gene Ontology: Mol. function=binding; Cellular component=chloroplast envelope
INEDPRDFRPHLCQGIVYALLDRKEDADKQFDIYRSLVPDEFPDKSFINDVILAARMESNDRIQKEFGTEFLSKNDPLTFS

SEQ ID NO: 87892 - protein, 50 aa, Setaria italica
  Transcript Sequence Number=SeqID_21918
CRVPHLAELRANLEAREGGGGRDRRRRRKGLVAARSCRCGSGGSAVGENK

SEQ ID NO: 87893 - protein, 91 aa, Setaria italica
  Transcript Sequence Number=SeqID_21919
PIPCVPCLSPVACLSLMLQETTQFPSRLPKEDAYACNRIRNVAERKSHGWAYSRSCSHTTELQMSSSCVITPPAYHFRASSSSKTRSVDSS

SEQ ID NO: 87894 - protein, 87 aa, Setaria italica
  misc_feature (68)..(68): Xaa can be any naturally occurring amino acid
  Transcript Sequence Number=SeqID_21920
KGMPYRAIMWVGKLLDAGFEASIEDFSATINRLCKRQFTEEALMLIPIMLSVGVYPDIQLYHVLGAAXRKRNELFYLPILQALAIKT

SEQ ID NO: 87895 - protein, 75 aa, Setaria italica
  misc_feature (70)..(70): Xaa can be any naturally occurring amino acid
  Transcript Sequence Number=SeqID_21921
  Gene Ontology: Mol. function=sequence-specific DNA binding; Cellular component=nucleus; Biological process=regulation of transcription, DNA-dependent
  Homolog annotation: Hit_ID=Q6AST1; Match level="QueryCoverage=81%, HitCoverage=7%, E-value=1e-27, Identity=96%"; Hit description =Homeobox-leucine zipper protein HOX32
  Pfam annotation: Domain name=Homeobox; Domain location=22-75; Score =30.9; E_value=5.1e-06; Accession=PF00046.21; Description=Homeobox domain
GRGGKDRSSPGGGGAPQVDTGKYVRYTPEQVEALERVYSECPKPSSLRRQQLIRECPILSNIEPKQIKVXFQNRR

SEQ ID NO: 87896 - protein, 221 aa, Setaria italica
  Transcript Sequence Number=SeqID_21922
  Gene Ontology: Mol. function=signal transducer activity; Cellular component=plasma membrane; Biological process=response to light stimulus
  Homolog annotation: Hit_ID=Q9SA69; Match level="QueryCoverage=95%, HitCoverage=34%, E-value=2e-45, Identity=47%"; Hit description =F10O3.17
  Pfam annotation: Domain name=NPH3; Domain location=1-221; Score =169.9; E_value=7.2e-48; Accession=PF03000.6; Description=NPH3 family
ACEGQGDVKQETVTRILINYAQNSLHGLMARDVHGGAKCGGGGADADAARKQRAVVEAIVGLLPAQSKRSPVPMAFLSGLLKTAMSVSASSICTADLEKRIGMQLDQAILEDILIAAGAGAGAATACGQLHGLYDTDVVARIFSVFLNLDDDSEEDGGFDYDSPRSPKQSLLVKAAKLLDSYLAEVALDSNILPSKFISLAELLPDHARLVTDGLYRAVDI

SEQ ID NO: 87897 - protein, 193 aa, Setaria italica
  Transcript Sequence Number=SeqID_21923
MAFHLRSVSLPSKRLSNEAEIEAELQSLEASTSSPSATIESACDRFRRKDLGRMYYSHIEEIIHLPSNQVCSIQQRKELDEEMESSLEIIDLCNAMQENFAELKTTIQDLLVVLRRGDDSNTQAKVLSYIRLVKKAQKQSKKTSKKPTSNECKLVRLLLKARLVAASLLELALRLVSKQGVMPKRSLVSKAFQ

SEQ ID NO: 87898 - protein, 60 aa, Setaria italica
  Transcript Sequence Number=SeqID_21924
FIVECSSLRVLLRYSPSSLGVPQVLYLAESSKLLKAAMRLWCAQSLDHLHIVVFMYGGRR

SEQ ID NO: 87899 - protein, 139 aa, Setaria italica
  misc_feature (45)..(45): Xaa can be any naturally occurring amino acid
  Transcript Sequence Number=SeqID_21925
  Gene Ontology: Mol. function=nucleoside-triphosphatase activity; Cellular component=nucleus
SAADFACAREQGFNVIEVNTSDMRNGAYVRQKFEEATKSHGLEKXWSQEEIINSLKGDFLDPDSGTPDRTEYQHSMSRATRLVIDCDQQKSPVGYYPGSKVSDEASKQVLNKTLILFEDVDTVFDEDRGFISTILKMAE

SEQ ID NO: 87900 - protein, 70 aa, Setaria italica
  Transcript Sequence Number=SeqID_21926
YIYIYIYIYIYIYIYMSSFILVVCLYIPSEKYTGDTISNLDVIVPLKLTFYRLTKGFVSVWKKLKQHMHL

SEQ ID NO: 87901 - protein, 355 aa, Setaria italica
  Transcript Sequence Number=SeqID_21927
  Gene Ontology: Mol. function=protein dimerization activity
  Homolog annotation: Hit_ID=B4G1R5; Match level="QueryCoverage=100%, HitCoverage=98%, E-value=1e-133, Identity=69%"; Hit description=O -methyltransferase ZRP4
  Pfam annotation: Domain name=Dimerisation; Domain location=33-81; Score=66.9; E_value=7.7e-17; Accession=PF08100.3; Description =Dimerisation domain
  Pfam annotation: Domain name=Methyltransf_2; Domain location=94-338; Score=302.6; E_value=8.4e-88; Accession=PF00891.10; Description=O -methyltransferase
  Pfam module annotation: Pfam domain module=Dimerisation::Methyltransf_ 2; Domain location=33-81::94-338
MGSTQEQHYTDQQALLDAQLELWHSTFAYIKSMALKSAMELRIADAIHHHGGTATITQIATKVQLHPSKIPCMRRLMRVLSVTGIFSIANAKHSAGDGDCVYGLTPASRLLVGTLSLTPTLSLILHNTFVSPFLGLATWLEHELPDLTLFEISHGKTVWDVIGHDETVSPLFNAGMVADSRFLMDIAIKECGYVFQGISSLIDVAGGHGAAAQAISKAFPHIDCSVLDLSHVVASAPASTGLKYIAGDMFESIPPANAVFLKWVMHDWDDSKCVTILKNCKKAIPPRDAGGKVIIVDTVVGAGPSNLKHRETEVLYDLFIMVVNGIERDEQEWRKIIFEAGFTEYKIIPVLGVRS

SEQ ID NO: 87902 - protein, 100 aa, Setaria italica
  Transcript Sequence Number=SeqID_21928
  Gene Ontology: Mol. function=DNA binding
ITVDINKAFPDGTNWALLQQDLASQSLEVRKRLLQIEEKNLELKKQCVKWERFRKKKDREIERMAMENEHMMIENKQLELELRQKELELELKLKGQANHA

SEQ ID NO: 87903 - protein, 434 aa, Setaria italica
  Transcript Sequence Number=SeqID_21929
  Gene Ontology: Mol. function=DNA binding
  Homolog annotation: Hit_ID=B9T2G2; Match level="QueryCoverage=94%, HitCoverage=96%, E-value=3e-72, Identity=41%"; Hit description =Transcription factor, putative
MEGTNQPPGSRMQGAPFGSLDLHGNSMETHAPNLGKQIFINSQIPGTLTMNRASEPDDFPGFQFKEDGRSDKNHHQHSHHSKNGLIDDEGHYMTEDATNTPSVKGKKASMWHRMKWTDSMVKLLITAVSYTGDDHGADLGGGRRNSTIMQKKGKWKAISKVMGERDCHVSPQQCEDKFNDLNKRYKRLIDILGRGTACDVVEKPELLDSMNHLSDKMKDDVKKLLNSKQLFFEEMCSYHNNNRRKLPEDHALQHSLLLALRCKEDHDPLRDASGDADEDDQSADSDHEENDDEEQHPVHTNMREPSMDKRARHGDAALLTSSSHEGIKRSDPHGITVDINKAFPDGTNWALLQQDLASQSLEVRKRLLQIEEKNLELKKQCVKWERFRKKKDREIERMAMENEHMMIENKQLELELRQKELELELKLKGQANHA

SEQ ID NO: 87904 - protein, 85 aa, Setaria italica
  Transcript Sequence Number=SeqID_21930
MAPSSPSSAAPTRASGRKRAAKAEEIHRNQEEEEEVAAASSAKRRRGASSGKKPKPPPKQAKTAKAGRKKKAEAERAEPVEDDVC

SEQ ID NO: 87905 - protein, 138 aa, Setaria italica
  misc_feature (10)..(10): Xaa can be any naturally occurring amino acid
  Transcript Sequence Number=SeqID_21931
  Homolog annotation: Hit_ID=Q9XES3; Match level="QueryCoverage=71%, HitCoverage=87%, E-value=4e-15, Identity=43%"; Hit description=Wound- induced protein WI12
  Pfam annotation: Domain name=WI12; Domain location=27-138; Score =118.0; E_value=3e-32; Accession=PF07107.3; Description=Wound-induced protein WI12
AVRRLLNPDXVDWRFHGPRAHQHLVLMRLLTGGAGAGGLPFKIRSLDAFGPTVLAEGTDATGALYWVHAWTVGPGGRVTEVREYCNTALVVTRLGGGRDMEARAAPASEDVCSKAQQVWQSRLPDQARRNLPGLVLAI

SEQ ID NO: 87906 - protein, 86 aa, Setaria italica
  Transcript Sequence Number=SeqID_21932
  Gene Ontology: Mol. function=enzyme inhibitor activity
  Homolog annotation: Hit_ID=B6ST95; Match level="QueryCoverage=80%, HitCoverage=31%, E-value=7e-28, Identity=86%"; Hit description =Ripening-related protein
GASRGAGSRKKSGGAAGPVRDCLENLADSVGHLRDAAQEMGGAGMGRAGSPSFKWHLSNVQTWCSAALTDENTCLDGLSGGRGVDA

SEQ ID NO: 87907 - protein, 94 aa, Setaria italica
  Transcript Sequence Number=SeqID_21933
  Subcellular localization annotation: CTP_CleavageSite=19; ConfidenceScore=5.53e-01
PKSSLPPALLGPSPSLRPQAAAAAGSRATAPSTLPFPLSLHPYCCLPPPDPVLVVVPVGLRLGATGWCCRPSPPLFLLSACCRPRPPPPRPCRP

SEQ ID NO: 87908 - protein, 598 aa, Setaria italica
  Transcript Sequence Number=SeqID_21934
  Gene Ontology: Mol. function=phosphotransferase activity, carboxyl group as acceptor
  Homolog annotation: Hit_ID=B5SVV3; Match level="QueryCoverage=99%, HitCoverage=86%, E-value=0.0, Identity=73%"; Hit description=Mutant low phytic acid protein 1
LLHTPKNLERSSSSIPFELYKNQTTVVISREQFVSVVCDALSMYKYVGPNQKADFLLACRIKERKESVTILLCGTSGCGKSTLSSLLGSRLGITTVVSTDSIRHMMRGFADEKQNPLLYASTYHAGDYLDPIAVAQAKAKRKANKPTIVSHPNTSGGKDDSSDGKSHHGSSELPPRTELIGNKQMAVEGYKAQSEMVIDSLDRLITSWEEQKESVIVEGVHLSLNFVMGLMKKHPSIIPFMIYITNEEKHMERFAVRAKYMTLDPAKNRYIKYIRNIRAIQEYLCNRADKHLVPKINNTNVDQSVAAIHATVFSCLRRREAGEQLYDLNTNTVAVVDEEYRNQCAANTLGSKGMFQLIQRKGSSRNLMALLNTDGSVTKAWHVGTSDGNGDLNDITNSKKSAENPMLDPSQIGKAEAVNLQFGPFGISAWMSDTGGTSHTGSVEDLRVDSVETGGRNLSSCCSSPKMSDSTSKELMKEYSVYGSEEEADDPRDGETDEDLTDEERDNREIDAGSVDEHSTKSDEEYEDLAMQDVMENGDWSDDEQAVSSSKNSLALESTIHGRGTGEDDGMEGQYHHNLDLFLKMSQEVAGTRMPCAS

SEQ ID NO: 87909 - protein, 98 aa, Setaria italica
  Transcript Sequence Number=SeqID_21935
  Gene Ontology: Mol. function=ATPase activity, coupled to transmembrane movement of ions, phosphorylative mechanism; Cellular component=integral to membrane; Biological process=phospholipid transport
  Homolog annotation: Hit_ID=Q9SGG3; Match level="QueryCoverage=86%, HitCoverage=6%, E-value=1e-31, Identity=77%"; Hit description =Putative phospholipid-transporting ATPase 5
DIRVGDIVKVEKDEFFPADLVVLSSSYEDAICYVETMNLDGETNLKLKQSLEATSSSLPDDESFGGFGAVIRCEDPNAHLYSFVGNIEIEGQEPQQQQ

SEQ ID NO: 87910 - protein, 87 aa, Setaria italica
  Transcript Sequence Number=SeqID_21936
  Gene Ontology: Mol. function=amino acid binding; Biological process =metabolic process
  Homolog annotation: Hit_ID=B6U791; Match level="QueryCoverage=97%, HitCoverage=20%, E-value=9e-30, Identity=76%"; Hit description=ACR8
DRDQDLRAFPTPAVSVDSWAERGYSVVTVQCRDRPKLLFDVVCTLHDMDYVVFHGTVDTTGDQARQEFYIRHADGSPIRSEAERERV

SEQ ID NO: 87911 - protein, 204 aa, Setaria italica
  Transcript Sequence Number=SeqID_21937
  Gene Ontology: Mol. function=metal ion binding
  Pfam annotation: Domain name=DUF594; Domain location=129-190; Score =103.6; E_value=6.7e-28; Accession=PF04578.5; Description=Protein of unknown function, DUF594
AIKLSNYCAYLVAFHPELLPDNKEKAEDVFEAMKKELKDMLGCRVYFLSSKSTRVEKMMKAVEDESNKQQETSTEDESNKQQETSTAVQIRDIEVETPGHSEQDNKKTEAAAGKSDGSKVVLNGAKLGKLLMDEVDPEAVWKLLADVWTELIVYVAPSNDEERVKGHEEVLVQGGEFITVLWALTTHIGVARPPPQTKQSTPGP

SEQ ID NO: 87912 - protein, 60 aa, Setaria italica
  Transcript Sequence Number=SeqID_21938
  Gene Ontology: Mol. function=phospholipase D activity; Cellular component=membrane; Biological process=phosphatidylcholine metabolic process
  Homolog annotation: Hit_ID=Q75KP6; Match level="QueryCoverage=98%, HitCoverage=7%, E-value=3e-17, Identity=70%"; Hit description =Phospholipase D alpha 1, putative, expressed
MAQLLLHGLIDARIVAADLSVTSDGQLQPTKKTRMKRKVFSWISKLPFCKCQQRLENAIR

SEQ ID NO: 87913 - protein, 215 aa, Setaria italica
  misc_feature (79)..(79): Xaa can be any naturally occurring amino acid
  Transcript Sequence Number=SeqID_21939
  Gene Ontology: Biological process=nitrogen fixation
  Homolog annotation: Hit_ID=B6U6B5; Match level="QueryCoverage=90%, HitCoverage=89%, E-value=3e-64, Identity=77%"; Hit description =Integral membrane protein
  Pfam annotation: Domain name=DUF125; Domain location=43-209; Score =173.2; E_value=7.4e-49; Accession=PF01988.11; Description=Integral membrane protein DUF125
MAALINNVDGANKLAGVVDAENPRALPCGGVDEDDVLSQRANWLRAAVLGANDGLVSTASLMLGVGAVKADARAMVLSXCAVPIRGGSQSMAIGEFVSVCSQRDVELAQLDRDGKRGGEEEKALPSPVQAAVASALAFSVGALVPLLAAGFIRDYRLRIGVVIALATATLAAFGCVGAVLGRAPVARSCARVVTGGWAAMGVTFGLMRLFKASGI

SEQ ID NO: 87914 - protein, 57 aa, Setaria italica
  Transcript Sequence Number=SeqID_21940
  Subcellular localization annotation: CTP_CleavageSite=36; ConfidenceScore=5.24e-01
PTASAAAGVNAWAGTVLVLPLVGGVLYLLSLGMLTASSALQTARPHSGSSAPSTTSP

SEQ ID NO: 87915 - protein, 89 aa, Setaria italica
  misc_feature (7)..(7): Xaa can be any naturally occurring amino acid
  misc_feature (86)..(86): Xaa can be any naturally occurring amino acid
  Transcript Sequence Number=SeqID_21941
  Gene Ontology: Mol. function=transporter activity; Cellular component= membrane; Biological process=oligopeptide transport
  Homolog annotation: Hit_ID=Q5N742; Match level="QueryCoverage=98%, HitCoverage=13%, E-value=2e-15, Identity=54%"; Hit description =Putative peptide transporter
VVAFLEXLGFYGVQGNLIMYLTGPLGMPTASAAAGVNAWAGTVLVLPLVGALAADSRLGRYRAVLAAGVLYLLSLGMLTASSALQXARP

SEQ ID NO: 87916 - protein, 113 aa, Setaria italica
  Transcript Sequence Number=SeqID_21942
  Gene Ontology: Mol. function=kinase activity
  Homolog annotation: Hit_ID=Q7XL24; Match level="QueryCoverage=92%, HitCoverage=11%, E-value=5e-09, Identity=36%"; Hit description =OSJNBa0079M09.4 protein
  Pfam annotation: Domain name=PAN_1; Domain location=15-104; Score =10.2; E_value=0.019; Accession=PF00024.18; Description=PAN domain
  Pfam annotation: Domain name=PAN_2; Domain location=15-86; Score= -12.9; E_value=0.033; Accession=PF08276.3; Description=PAN-like domain
  Pfam module annotation: Pfam domain module=PAN_1::PAN_2; Domain location=15-104::15-86
RPNRGCVPAAPPVSCATPRRAQRLVSLPGLAYFNDHATSMRTLERVSQDACKKACLDDCKCVAAQFIYGNNAGDGFCYLQSEVFSLETSLPEVVHYNSTMHLKVQAARTSAGL

SEQ ID NO: 87917 - protein, 286 aa, Setaria italica
  misc_feature (5)..(5): Xaa can be any naturally occurring amino acid
  Transcript Sequence Number=SeqID_21943
  Gene Ontology: Mol. function=hydrolase activity
  Homolog annotation: Hit_ID=Q5N7L1; Match level="QueryCoverage=78%, HitCoverage=99%, E-value=1e-119, Identity=92%"; Hit description =Lipase-like
  Pfam annotation: Domain name=Abhydrolase_1; Domain location=40-260; Score=38.9; E_value=2e-08; Accession=PF00561.12; Description =alphabeta hydrolase fold
WLPRXEGTATKAALFFCHGYGDTCTFFFEGVAKRIAAAGYAVYAMDYPGFGLSYGLHGYIASFDGMVDHVIEQYARIRGMKEVRELPHFLLGQSMGGAVALKVHLKQQKEWDGVLLVAPMCKISEEVTPPAPVLKALNILSCLLPEAKLFPQKDIGDLAFRDPRKRKVAEYNAISYSDQMRLRTAVELLKATKDIESQLEKISSPLLILHGAADMVTDPHVSKFLYEKASTKDKTLKLYEGSYHSILEGEPDDRISTAINDIISWLDSHLFVITLGLWVTSIVVDL

SEQ ID NO: 87918 - protein, 187 aa, Setaria italica
  Transcript Sequence Number=SeqID_21944
  Subcellular localization annotation: CTP_CleavageSite=83; ConfidenceScore=5.29e-01
SAGRSKGPKWPFFPLLHDLAGGGVPDPSPNAIVKIKTKGPAPLASTPSPVSSPSSEEGVRSRSLHGLISNGGAGSGLRFTIPKASRSKPAGVAAVKPERNGGEDDAESEAMAEVADALRAVGEGFLRMEERRLELSLQMEKEWMESEMKRTQTMLDAQQLFFEAFLGKQQQHKKARHSPASNAMEED

SEQ ID NO: 87919 - protein, 105 aa, Setaria italica
  Transcript Sequence Number=SeqID_21945
  Gene Ontology: Mol. function=sequence-specific DNA binding; Cellular component=nucleus; Biological process=regulation of transcription
  Homolog annotation: Hit_ID=B6TYR0; Match level="QueryCoverage=80%, HitCoverage=36%, E-value=3e-21, Identity=67%"; Hit description=DNA -binding WRKY
  Subcellular localization annotation: CTP_CleavageSite=3; ConfidenceScore=5.24e-01
MARAAAAGASPRKVGPEVLSPSVLDFPSLALGSPVTPLVADPFNRSPASASPGEEEEAAERAAIARKGFFLHPSPRGAEPPRLLPLFPVTSPRMAPSPAAAAAAP

SEQ ID NO: 87920 - protein, 104 aa, Setaria italica
  Transcript Sequence Number=SeqID_21946
  Gene Ontology: Cellular component=integral to membrane
  Homolog annotation: Hit_ID=B6SQ55; Match level="QueryCoverage=96%, HitCoverage=25%, E-value=2e-22, Identity=55%"; Hit description=Inner membrane transport protein
  Subcellular localization annotation: CTP_CleavageSite=49; ConfidenceScore=5.42e-01
TCCKMLFFVSLFLFASLVSRPALFRRAMRRFSVAWWAYSFPVTVLALASAEYAQEVRQAAANALMLALAVLSVAVTLALMLFSALRTADLLPHDDPFDCPHLPM

SEQ ID NO: 87921 - protein, 233 aa, Setaria italica
  Transcript Sequence Number=SeqID_21947
  Gene Ontology: Mol. function=oxidoreductase activity; Biological process=oxidation reduction
  Homolog annotation: Hit_ID=B6SUN2; Match level="QueryCoverage=98%, HitCoverage=60%, E-value=5e-55, Identity=47%"; Hit description=1 -aminocyclopropane-1-carboxylate oxidase
  Pfam annotation: Domain name=2OG-FeII_Oxy; Domain location=73-179; Score=118.3; E_value=2.5e-32; Accession=PF03171.12; Description=2OG -Fe(II) oxygenase superfamily
QEGAPLLPWRDSLRVRFGPWDGEPDLGRLPAACRDTLREYQRALTGFGKEMAGLLSEALGVGVERLEQAMQVEGWLMACHYYPPCPEPARVVGSLEHTDPSLFTVLAQDWVGGLQVRRDDGTGGGGEWVDVAPVAGALLVNIGDVLKVVSNDELKSVEHRVVIKSTQDARVSIALFINPAKRDKSDLFGPLPELVTAEKPAQYRSFTVPEFMSSRREYGHSRSSIERFKVSSS

SEQ ID NO: 87922 - protein, 94 aa, Setaria italica
  Transcript Sequence Number=SeqID_21948
  Gene Ontology: Mol. function=oxidoreductase activity; Biological process=oxidation reduction
  Homolog annotation: Hit_ID=P93824; Match level="QueryCoverage=94%, HitCoverage=25%, E-value=2e-12, Identity=39%"; Hit description =F19P19.22 protein
MAATEDYDAEAALASFHESRAGVRGLVESGVTAVPPIFLTATAPSPQSPASTTTAFAIPAVDLSLPRSDTVALVRAAARSCGFFHAINHGVPAG

SEQ ID NO: 87923 - protein, 138 aa, Setaria italica
  misc_feature (42)..(42): Xaa can be any naturally occurring amino acid
  misc_feature (88)..(88): Xaa can be any naturally occurring amino acid
  Transcript Sequence Number=SeqID_21949
  Homolog annotation: Hit_ID=Q2QU92; Match level="QueryCoverage=86%, HitCoverage=28%, E-value=5e-22, Identity=41%"; Hit description =Retrotransposon protein, putative, unclassified
  Pfam annotation: Domain name=Transposase_28; Domain location=3-138; Score=29.5; E_value=4.8e-09; Accession=PF04195.4; Description =Putative gypsy type transposon
GSTNQIALPLPGAMWQHSVMKEEAVQALVDAKLLQPKEVLEXRPAFANAWQFKEHPNETVMLAHFVERGLAVPTSDFFKGILEYYKLXLVHLNPNGVLHMSIFVHLCEVYLEVPPSLELFRKLFRCKPQPSALRTEVF

SEQ ID NO: 87924 - protein, 111 aa, Setaria italica
  Transcript Sequence Number=SeqID_21950
  Subcellular localization annotation: CTP_CleavageSite=78; ConfidenceScore=5.72e-01
DEPASDVAYIQTAAVTSSSSKASVSQKKKHNTQATRTSPIESLSSSPQRNSNIDKVSHSRISVGVAGNDQRSSEPVLVGSSRRKSDKDNGQVQLTQGHASDGIHFEKGSND

SEQ ID NO: 87925 - protein, 494 aa, Setaria italica
  misc_feature (10)..(10): Xaa can be any naturally occurring amino acid
  misc_feature (23)..(23): Xaa can be any naturally occurring amino acid
  Transcript Sequence Number=SeqID_21951
  Gene Ontology: Mol. function=zinc ion binding
  Subcellular localization annotation: CTP_CleavageSite=83; ConfidenceScore=5.70e-01
FLPTYQRSPXLPQTRSPPKAAAXVTSKSPFHQSFEVEGMSQNPSAVSVPSVPQNNGSVVPFPGDSSKKETRPITKSERGSGPSGSHDSYGPSKSSDQNRFKVRIKVGSDNVLARNNAAIYSGLGLDISSPSSIEDSPDGCGSLSPEVNNVSHESPRTILQIMTCFSVPGGFLLSPLPANILQLTKKVVASSKKWESNVDIENVQEAYEGHVAKKVKSDGRKKKQVDAKNSKSRNDVSAVMRKEIDIETVAGQKIVSEALNIALLSDSRAMEAKGENRLEEEPTENNLGGNKDARLKERAIKSDSLTIKVEPPKAEVTECLENSSFGSSEMEFSASKGEPKPKTEKGETILEERNTTNDKNLILDRKQEKKIKPESKSNASNFEGNNVINERAPVVSRSMGKVPCKETLPYDTNGENNSKSEAKKMQREQKTNASTPSDFLEDEKHIHSSAAVKERKNEMQSKSSHTGKKPKAKSHRDVRDNVLEGSYAGKEHDV

SEQ ID NO: 87926 - protein, 1038 aa, Setaria italica
  Transcript Sequence Number=SeqID_21952
  Gene Ontology: Mol. function=zinc ion binding
  Homolog annotation: Hit_ID=Q9SRZ1; Match level="QueryCoverage=23%, HitCoverage=19%, E-value=1e-46, Identity=44%"; Hit description =F22D16.1 protein
  Pfam annotation: Domain name=zf-CW; Domain location=90-138; Score =61.4; E_value=3.4e-15; Accession=PF07496.7; Description=CW-type Zinc Finger
NVLEGSYAGKEHDVLENESGFGDPRPKEKPWKNDSERDSDVPGASRRETSSSVKHDRHAASEEQKMNIPPPATVSTTNAAPLPAPVVIEEHWVCCDICQKWRLLPYEMNPSSLPKKWKCSMLQWLPGMNRCEISEEETTNALNALYVIPAPANGIPSVGHPHVASAGLVTSSTSHLNGPVEQSRKRKNTLNDGNFVTEGSHQAQASGHLMSNQHAPSKSKSYADGSQYSIERDSVSKLVDPTIEKKKSKSKHRSSYSDGGDLIERSKKHSKVKSKRDMDHDEYKASKKIRKEERHRFDRDRNPDLASGDIPDEAKALPTKTATSKGSGERSDVSSSKQKNVSRHNRLENSKKARQEDVVVPEDENKEYFHQSDVQRSDLSSKKRIVKEWEESQYNSVAHVSKGATVNHNSVTKETYKDQNLKEAKLKSLKSEELFYADSKPGKIQHADQILSYDGSHMNSELVEDNTLFSGKRGPPELENNLCDQALDLDEPASDVAYIQTAAVTSSSSKASVSQKKKHNTQATRTSPIESLSSSPQRNSNIDKVSHSRISGKDGSLNANSSTIPSMVKQLNTEVGVAGNDQRSSEPVLVGSSRRKSDKDNGQVQLTQGHASDGIHFEKGSNDDLQHESGRKDSNLKGSHIPRGSNHLHSVEKNNHHADGSPMQPGKHTVDPKTSVLDAKGDSSMHENKKSANSLQDRNGSTHGPPDGNPLPGLPSGKEKSYLKSNKQDSQKPKPQMVCSPPKESKLDSHSTPSKPNGSKLTPQIRQYNSENGGRHGTAKQVIPSPAHAASPARKDNTSTAYALKEARDLKHKANRLKEEGKELESTRLYFEAALKFLHVASLLEPPSCDGSKQGDAAQSMYSDTAKLCNFVGHAYEKCKKMAAAALAYKCVEVAYLKAAYYKYPTASKDRQVLQAVVQTAPGESPSSSASDIDNLNNNALSKGSSSKDANSPQVAGNHLLLAARNQPHLMRLLAYTNDVNGAFEATRKSQLAISSAAGNHENGADGLSSVRTVLDFNFRSVNDLLRLVRISMESISC

SEQ ID NO: 87927 - protein, 213 aa, Setaria italica
  Transcript Sequence Number=SeqID_21953
  Gene Ontology: Mol. function=molecular_function; Cellular component =cellular_component; Biological process=cell proliferation
  Homolog annotation: Hit_ID=A4QP78; Match level="QueryCoverage=100%, HitCoverage=47%, E-value=3e-73, Identity=65%"; Hit description =Zgc:163002 protein
  Pfam annotation: Domain name=DUF2363; Domain location=86-211; Score =284.0; E_value=3.4e-82; Accession=PF10155.1; Description =Uncharacterized conserved protein (DUF2363)
RPPPPRLEILEGELQWLNLDNNHELLWDGSMCADTSRGAVIRDLVEKACKGPLAPAQQEKIVLDLGKDWKLVYHCGMTPQKLRGLVEHNTCIAVEVLSRLINSPDMDEYFNVLVHMEMSLHSMEVVNRLTTAVVLPPGFIHDYISNCIRSCDDIQDKYMQNRLVRLVCVFLQSLIRNKIINVQDLFVEVQAFCIAFSRIREAAGLFRLLKSLE

SEQ ID NO: 87928 - protein, 133 aa, Setaria italica
  misc_feature (19)..(19): Xaa can be any naturally occurring amino acid
  Transcript Sequence Number=SeqID_21954
  Gene Ontology: Cellular component=membrane
  Homolog annotation: Hit_ID=O80600; Match level="QueryCoverage=93%, HitCoverage=50%, E-value=2e-33, Identity=56%"; Hit description =T27I1.11 protein
MKVGGLLTSAGINIGLCVXLFLSLYSILRKQPQNVKVYFGRRIAEEHNRLRDAFILERFVPSPSWIVKSLRCTEDEILDTAGLDAVVFNRIMVFSIRIFSLAAILCVFGVLPLNYFGQDMHHVRIPSAYNLSK

SEQ ID NO: 87929 - protein, 111 aa, Setaria italica
  Transcript Sequence Number=SeqID_21955
STMAIARATAMNKYGSMMLVLLLIIVEVSATAAAEQSCNIPATELEQCVVDVVNSGLRIMQPKCCNRMAKEFWLWLRPSGDPQKLRIRPTEALLPRGHRLRQGLTNVPTMS

SEQ ID NO: 87930 - protein, 60 aa, Setaria italica
  Transcript Sequence Number=SeqID_21956
  Gene Ontology: Mol. function=inorganic phosphate transmembrane transporter activity; Cellular component=integral to membrane; Biological process=phosphate transport
  Homolog annotation: Hit_ID=Q8H6H4; Match level="QueryCoverage=93%, HitCoverage=10%, E-value=2e-24, Identity=94%"; Hit description =Inorganic phosphate transporter 1-1
MAGAQLNVLATLDQAKTQWYHFMAIVIAGMGFFTDAYDLFCIALVTKLLGRIYYTDPNSK

SEQ ID NO: 87931 - protein, 55 aa, Setaria italica
  Transcript Sequence Number=SeqID_21957
MARNDRARMAFICSRGRRRAAETGGTRATATEKHKAAPAAEAFAMPLSSGAYTGT

SEQ ID NO: 87932 - protein, 174 aa, Setaria italica
  Transcript Sequence Number=SeqID_21958
  Gene Ontology: Mol. function=metal ion binding; Cellular component =histone methyltransferase complex; Biological process=regulation of transcription, DNA-dependent
  Homolog annotation: Hit_ID=B6SV09; Match level="QueryCoverage=73%, HitCoverage=22%, E-value=1e-35, Identity=53%"; Hit description=PHD -finger family protein
  Pfam annotation: Domain name=PHD; Domain location=17-73; Score=7.4; E_ value=0.0041; Accession=PF00628.21; Description=PHD-finger
  Pfam annotation: Domain name=PHD; Domain location=74-119; Score=57.1; E_value=6.5e-14; Accession=PF00628.21; Description=PHD-finger
  Pfam annotation: Domain name=zf-C3HC4; Domain location=18-70; Score =0.9; E_value=0.079; Accession=PF00097.17; Description=Zinc finger, C3HC4 type (RING finger)
  Pfam annotation: Domain name=zf-C3HC4; Domain location=72-116; Score =12.2; E_value=0.0041; Accession=PF00097.17; Description=Zinc finger, C3HC4 type (RING finger)
  Pfam module annotation: Pfam domain module=PHD::PHD::zf-C3HC4::zf -C3HC4; Domain location=17-73::74-119::18-70::72-116
MAASKVPNLSETARRGCCKLCGEPEEDSKRFLICGHPPCMYKYYHIRCMSPDQIASKKQLNEQCWYCPSCLCRVCHRDEDDKKIILCDGCDEAYHLYCLRPRRTRVPKGKWYCKLCLKARAREVKVKEYEDRMLSEHRKHDLTMVKSDKYTGVDLLLSRVKKWRADDEAAAAEA

SEQ ID NO: 87933 - protein, 88 aa, Setaria italica
  misc_feature (68)..(68): Xaa can be any naturally occurring amino acid
  Transcript Sequence Number=SeqID_21959
  Subcellular localization annotation: CTP_CleavageSite=59; ConfidenceScore=5.27e-01
YQCSDDLHLIKISTSLKSVLFKASSSQPKQKTLLGKCSYHVLFLLKVKQNRRVFLTDFRVAALIYSMXEKLPRSITYHVASYSAGTVI

SEQ ID NO: 87934 - protein, 332 aa, Setaria italica
  Transcript Sequence Number=SeqID_21960
  Gene Ontology: Mol. function=protein binding; Cellular component =plasma membrane; Biological process=small GTPase mediated signal transduction
  Homolog annotation: Hit_ID=Q7XK44; Match level="QueryCoverage=96%, HitCoverage=74%, E-value=1e-156, Identity=84%"; Hit description =OSJNBa0044K18.1 protein
  Pfam annotation: Domain name=LRR_1; Domain location=119-141; Score =5.6; E_value=26; Accession=PF00560.25; Description=Leucine Rich Repeat
  Pfam annotation: Domain name=LRR_1; Domain location=143-164; Score =6.3; E_value=19; Accession=PF00560.25; Description=Leucine Rich Repeat
  Pfam annotation: Domain name=LRR_1; Domain location=166-187; Score =8.0; E_value=9; Accession=PF00560.25; Description=Leucine Rich Repeat
  Pfam annotation: Domain name=LRR_1; Domain location=189-212; Score =10.4; E_value=3.1; Accession=PF00560.25; Description=Leucine Rich Repeat
  Pfam annotation: Domain name=LRR_1; Domain location=214-235; Score =18.5; E_value=0.028; Accession=PF00560.25; Description=Leucine Rich Repeat
  Pfam annotation: Domain name=LRR_1; Domain location=237-258; Score =4.9; E_value=36; Accession=PF00560.25; Description=Leucine Rich Repeat
  Pfam annotation: Domain name=LRR_1; Domain location=50-71; Score =15.0; E_value=0.31; Accession=PF00560.25; Description=Leucine Rich Repeat
  Pfam annotation: Domain name=LRR_1; Domain location=73-94; Score=7.4; E_value=12; Accession=PF00560.25; Description=Leucine Rich Repeat
  Pfam annotation: Domain name=LRR_1; Domain location=96-117; Score =14.2; E_value=0.54; Accession=PF00560.25; Description=Leucine Rich Repeat
  Pfam module annotation: Pfam domain module=LRR_1::LRR_1::LRR_1::LRR _1::LRR_1::LRR_1::LRR_1::LRR_1::LRR_1; Domain location=119-141::143 -164::166-187::189-212::214-235::237-258::50-71::73-94::96-117
AAGADGGDAAVQEEVVAVLRQAEEGKPVESVRLVDRQLRLLPEAFGRIQGLRVLDVSRNQLEVIPDAIGGLDHVEELHLAANALISLPDTIGLLSNLKILNVSSNRLRALPDSISKCRLLVELDASYNGLTYLPTNIGYELVNLRKLWVHMNKLRSLPSSVCEMTSLYLLDAHFNELCGLPSAFGKLSSLEILNLSSNFSDLKELPASFGDLLNLRELDLSNNQIHALPDTFGRLDKLEKLNLEQNPLAMPPMDIVNKGVDAVKEYMSKRWLDILLEEEQRRIAAETPQASSTPKAWLARSVSWVTDVSGSFVGYLSGSEKSEKDAYLDQQF

SEQ ID NO: 87935 - protein, 266 aa, Setaria italica
  Transcript Sequence Number=SeqID_21961
  Gene Ontology: Mol. function=DNA binding; Cellular component=nucleus
  Homolog annotation: Hit_ID=B9S1G1; Match level="QueryCoverage=86%, HitCoverage=76%, E-value=4e-60, Identity=59%"; Hit description=ESC, putative
  Pfam annotation: Domain name=DUF296; Domain location=69-187; Score =203.2; E_value=6.9e-58; Accession=PF03479.7; Description=Domain of unknown function (DUF296)
SGGGNSNNGGPFGEHDGGSSSSGPAGDGPGSGGGGNGEMVARRPRGRPPGSKNKPKPPVIITRESANTLRAHILEVGSGCDVFESVSTYARRRQRGVCVLSGSGVVTNVTLRQPSAPTGAVVTLHGRFEILSLSGSFLPPPAPPGATSLTIFLAGGQGQVVGGNVVGALYAAGPVIVIAASFANVAYERLPLEEEEAQAAPPGLQMQPPGGADGAGGMGGGGPFPSDPSAAGLPFFNLPLNNMAGGGSQLPPGADSHGWAGARPPF

SEQ ID NO: 87936 - protein, 145 aa, Setaria italica
  Transcript Sequence Number=SeqID_21962
  Gene Ontology: Mol. function=transferase activity, transferring groups other than amino-acyl groups; Cellular component=chloroplast; Biological process=fatty acid biosynthetic process
  Homolog annotation: Hit_ID=B6SJZ0; Match level="QueryCoverage=84%, HitCoverage=24%, E-value=9e-53, Identity=83%"; Hit description=3 -oxoacyl-synthase I
  Pfam annotation: Domain name=Ketoacyl-synt_C; Domain location=3-101; Score=75.5; E_value=1.9e-19; Accession=PF02801.14; Description=Beta -ketoacyl synthase, C-terminal do
GNLTYLLSTNYVKRYYLSLSNCLGVASEEINYVNAHATSTQSGDLKEYEAIVRCFGQNPQLRVNSTKSMTGHLIGAAGGIEAVASIQAIRTGWVHPNLNLENPEDVVDVGVLVGPKKERCEVNVALSNSFGFGGHNSSILFAPFK

SEQ ID NO: 87937 - protein, 75 aa, Setaria italica
  Transcript Sequence Number=SeqID_21963
  Gene Ontology: Mol. function=transferase activity, transferring groups other than amino-acyl groups; Biological process=fatty acid biosynthetic process
  Homolog annotation: Hit_ID=B6SJZ0; Match level="QueryCoverage=93%, HitCoverage=14%, E-value=4e-18, Identity=64%"; Hit description=3 -oxoacyl-synthase I
MQAWWAHHGNSSSCSLQAIRTGWVHPNLNLENPEDVVDVGVLVGPKKERCEVNVALSNSFGFGGHNSSILFAPFK

SEQ ID NO: 87938 - protein, 147 aa, Setaria italica
  misc_feature (17)..(17): Xaa can be any naturally occurring amino acid
  misc_feature (37)..(37): Xaa can be any naturally occurring amino acid
  misc_feature (83)..(83): Xaa can be any naturally occurring amino acid
  Transcript Sequence Number=SeqID_21964
  Gene Ontology: Mol. function=transferase activity, transferring groups other than amino-acyl groups; Biological process=fatty acid biosynthetic process
  Homolog annotation: Hit_ID=Q40028; Match level="QueryCoverage=91%, HitCoverage=26%, E-value=8e-53, Identity=74%"; Hit description=Beta -ketoacyl-ACP synthase
  Pfam annotation: Domain name=Ketoacyl-synt_C; Domain location=13-129; Score=158.2; E_value=2.4e-44; Accession=PF02801.14; Description=Beta -ketoacyl synthase, C-terminal do
ELEHAKQRGAQIYAEFXLGGSFTCDAYHMTEPHPEGXRGYLCIENALADSGVRKEDINYVNAHATSTQMGDLKEFEALTRCFXAKNPQLRVNSTKSMTGHLLGAAGGIEAVAAIQAIRTGWLHPNINLDNPEKNEFDSATFTSHLSP

SEQ ID NO: 87939 - protein, 170 aa, Setaria italica
  Transcript Sequence Number=SeqID_21965
  Gene Ontology: Mol. function=transferase activity, transferring groups other than amino-acyl groups; Cellular component=chloroplast; Biological process=fatty acid biosynthetic process
  Homolog annotation: Hit_ID=B6SJZ0; Match level="QueryCoverage=90%, HitCoverage=31%, E-value=9e-72, Identity=86%"; Hit description=3 -oxoacyl-synthase I
  Pfam annotation: Domain name=Ketoacyl-synt_C; Domain location=73-170; Score=107.0; E_value=6.4e-29; Accession=PF02801.14; Description=Beta -ketoacyl synthase, C-terminal do
FILIFVDTIILTTCHAGLGGFVACRALSQRNSDPTKASRPWDMDRDWFCYGEGAGVLVLEELEHAKERGAKIYAEFLGGSFTCDAYHMTEPHPEGRGITLCIEKALADAGVASEEINYVNAHATSTQSGDLKEYEAIVRCFGQNPQLRVNSTKSMTGHLIGAAGGIEAVA

SEQ ID NO: 87940 - protein, 198 aa, Setaria italica
  misc_feature (14)..(14): Xaa can be any naturally occurring amino acid
  misc_feature (29)..(29): Xaa can be any naturally occurring amino acid
  misc_feature (186)..(187): Xaa can be any naturally occurring amino acid
  Transcript Sequence Number=SeqID_21966
  Gene Ontology: Mol. function=transferase activity, transferring groups other than amino-acyl groups; Cellular component=chloroplast; Biological process=fatty acid biosynthetic process
  Homolog annotation: Hit_ID=B6SJZ0; Match level="QueryCoverage=100%, HitCoverage=39%, E-value=5e-95, Identity=87%"; Hit description=3 -oxoacyl-synthase I
  Pfam annotation: Domain name=Ketoacyl-synt_C; Domain location=147 -198; Score=-26.5; E_value=0.0015; Accession=PF02801.14; Description =Beta-ketoacyl synthase, C-terminal do
  Pfam annotation: Domain name=ketoacyl-synt; Domain location=1-139; Score=46.4; E_value=1.2e-10; Accession=PF00109.18; Description=Beta -ketoacyl synthase, N-terminal domain
  Pfam module annotation: Pfam domain module=Ketoacyl-synt_C::ketoacyl -synt; Domain location=147-198::1-139
GIVRFFNDAIEALXRVSYKKMNPFCVPFXATTNMGSAILAMDLGWMGPNYSISTACATSNFCILNAANHIRRGEADVMLCGGSDAPLIPIGLGGFVACRALSQRNSDPTKASRPWDMDRDGFVMGEGAGVLVLEELEHAKERGAKIYAEFLGGSFTCDAYHMTEPHPEGRGITLCIEKALADAGVXXEEINYVNAHAT

SEQ ID NO: 87941 - protein, 419 aa, Setaria italica
  misc_feature (186)..(186): Xaa can be any naturally occurring amino acid
  misc_feature (315)..(315): Xaa can be any naturally occurring amino acid
  Transcript Sequence Number=SeqID_21967
  Gene Ontology: Mol. function=transferase activity, transferring groups other than amino-acyl groups; Cellular component=chloroplast; Biological process=fatty acid biosynthetic process
  Homolog annotation: Hit_ID=B6SJZ0; Match level="QueryCoverage=100%, HitCoverage=83%, E-value=0.0, Identity=82%"; Hit description=3 -oxoacyl-synthase I
  Pfam annotation: Domain name=Ketoacyl-synt_C; Domain location=342 -419; Score=43.3; E_value=8.3e-10; Accession=PF02801.14; Description =Beta-ketoacyl synthase, C-terminal do
  Pfam annotation: Domain name=ketoacyl-synt; Domain location=88-334; Score=284.6; E_value=2.2e-82; Accession=PF00109.18; Description=Beta- ketoacyl synthase, N-terminal domain
  Pfam module annotation: Pfam domain module=Ketoacyl-synt_C::ketoacyl -synt; Domain location=342-419::88-334
MAAVTGPLCTWLVAACLSAACDADEHKQKHCCPGGSGAGGGVMFGQGRERRRLGARRRGAARSGMAMSVALQAERNVIEKKKPDIKQRRVVVTGMGVVTPLGHDPDVFYNNLLDGVSGISEIERFDCSNFPTRIAGEIKSFSTDGWVAPKLAKRMDKFMLYLITAGKKALENGGLTEELRNELDKXRCGVLIGSAMGGMKVFNDAIEALRVSYKKMNPFCVPFATTNMGSAILAMDLGWMGPNYSISTACATSNFCILNAANHIRRGEADVMLCGGSDAPLIPIGLGGFVACRALSQRNSDPTKASRPWDMDRDXGFVMGEGAGVLVLEELEHAKERGAKIYAEFLGGSFTCDAYHMTEPHPEGRGITLCIEKALADAGVASEEINYVNAHATSTQSGDLKEYEAIVRCFGQNPQLRVN

SEQ ID NO: 87942 - protein, 179 aa, Setaria italica
  Transcript Sequence Number=SeqID_21968
  Gene Ontology: Mol. function=transferase activity, transferring groups other than amino-acyl groups; Cellular component=chloroplast; Biological process=fatty acid biosynthetic process
  Homolog annotation: Hit_ID=B6SJZ0; Match level="QueryCoverage=99%, HitCoverage=35%, E-value=2e-86, Identity=88%"; Hit description=3 -oxoacyl-synthase I
  Pfam annotation: Domain name=Ketoacyl-synt_C; Domain location=21-135; Score=170.9; E_value=3.6e-48; Accession=PF02801.14; Description=Beta -ketoacyl synthase, C-terminal do
LAGVLVLEELEHAKERGAKIYAEFLGGSFTCDAYHMTEPHPEGRGITLCIEKALADAGVASEEINYVNAHATSTQSGDLKEYEAIVRCFGQNPQLRVNSTKSMTGHLIGAAGGIEAVASIQAIRTGWVHPNLNLENPEDVVDVGVLVGPKKERCEVNVALSNSFGFGGHNSSILFAPFK

SEQ ID NO: 87943 - protein, 496 aa, Setaria italica
  Transcript Sequence Number=SeqID_21969
  Gene Ontology: Mol. function=transferase activity, transferring groups other than amino-acyl groups; Cellular component=chloroplast; Biological process=fatty acid biosynthetic process
  Homolog annotation: Hit_ID=Q40028; Match level="QueryCoverage=98%, HitCoverage=99%, E-value=0.0, Identity=71%"; Hit description=Beta -ketoacyl-ACP synthase
  Pfam annotation: Domain name=Ketoacyl-synt_C; Domain location=338 -452; Score=175.7; E_value=1.4e-49; Accession=PF02801.14; Description= Beta-ketoacyl synthase, C-terminal do
  Pfam annotation: Domain name=ketoacyl-synt; Domain location=85-330; Score=303.8; E_value=3.6e-88; Accession=PF00109.18; Description=Beta- ketoacyl synthase, N-terminal domain
  Pfam module annotation: Pfam domain module=Ketoacyl-synt_C::ketoacyl -synt; Domain location=338-452::85-330
MAAPVAPPLCTWLVAACLSAACGSGEKEKHRRHRGGGVGVGGLFGTRRRPGSGRRGGARSGMSMAVALHPERGVVETKKADVKERRVVVTGMGVVTPLGHDPDEFYNNLLQGISGISEIEAFDCSRYPTRIAGEIKSFSTDGWVAPKLAKRMDKFMQYLITAGKKALENAGITEEIMNELEKSRCGVLIGSAMGGMKVFSDAIEALRVSYKKMNPFCVPFATTNMGSAILAMDLGWMGPNYSISTACATSNFCILNAANHIRKGEADVMLCGGSDAPIIPIGLGGFVACRALSQRNSDPTKASRPWDVDRDGFVMGEGSGVLVLEELEHAKQRGAQIYAEFLGGSFTCDAYHMTEPHPEGRGVILCIENALADSGVRKEDINYVNAHATSTQMGDLKEFEALTRCFGQNPQLRVNSTKSMTGHLLGAAGGIEAVAAIQAIRTGWLHPNINLDNPEKNVDVSLLVGQQKERCDVKVALSNSFGFGGHNSSILFAPFK

SEQ ID NO: 87944 - protein, 98 aa, Setaria italica
  Transcript Sequence Number=SeqID_21970
  Gene Ontology: Mol. function=protein transporter activity; Cellular component=mitochondrial inner membrane; Biological process=protein transport
  Homolog annotation: Hit_ID=B6SJS3; Match level="QueryCoverage=98%, HitCoverage=49%, E-value=3e-32, Identity=73%"; Hit description =Mitochondrial import inner membrane translocase subunit tim23
  Pfam annotation: Domain name=Tim17; Domain location=1-91; Score=72.8; E_value=1.2e-18; Accession=PF02466.11; Description=Tim17Tim22Tim23 family
TAKIRANRVLNACGSSGRRVGNTLGVIGLMYAGIESAMVAARDRDDWINSVAAGLGTGALFRAANGPRSAAVAGALGGVLAAAATGGKQLAKRYVPVI

SEQ ID NO: 87945 - protein, 77 aa, Setaria italica
  Transcript Sequence Number=SeqID_21971
MKLLPLYLLAMLILNASTAAPHMAARDELVHGVKAGTEDGTSVDNHHAIPRPEYDSWSSPGNMPGSGHDIGGEAAKP

SEQ ID NO: 87946 - protein, 227 aa, Setaria italica
  Transcript Sequence Number=SeqID_21972
  Gene Ontology: Mol. function=hydrolase activity
  Homolog annotation: Hit_ID=Q94DR5; Match level="QueryCoverage=64%, HitCoverage=14%, E-value=3e-29, Identity=49%"; Hit description =P0460E08.35 protein
LSEEISAVATSSTQQGTVLVVGTPNISHHVRCNSHDGSESESETIDLNCWTRSGGPLMRTASADKFISFIQNLETDTDFFKPCTLEGETTGILSESTFPNDPCPNNSSRVTTPGTEISETESYNTVNTRGSQASTPTSIAVSEGDLLQPESTANGILLNIVKRDALHAQHDSVTELAERSLAEAYVEPCGAISGSDSTEDSKDAADSSNPSPDNADSVTSYQFSADD

SEQ ID NO: 87947 - protein, 86 aa, Setaria italica
  Transcript Sequence Number=SeqID_21973
LLNFLIAISIMSCILHSHCTIPCTSNLMLLWLYSQPTKQYVHNDVQNMLHKYKFFSYCASVQNNVFNLFKESFFNISLNCFVVNTK

SEQ ID NO: 87948 - protein, 91 aa, Setaria italica
  misc_feature (49)..(49): Xaa can be any naturally occurring amino acid
  Transcript Sequence Number=SeqID_21974
MARPSATAALLLLLLSLLAVVAHCRPIEAQSATDDAEPVAAVAAGDDDXMARPTPYLPAEAGAAAGVALPAEEQQHHGFLRLPSHRLRHHR

SEQ ID NO: 87949 - protein, 232 aa, Setaria italica
  Transcript Sequence Number=SeqID_21975
  Gene Ontology: Mol. function=nucleic acid binding; Cellular component= mitochondrion
  Homolog annotation: Hit_ID=B6TR84; Match level="QueryCoverage=41%, HitCoverage=37%, E-value=4e-32, Identity=68%"; Hit description =Glycine-rich RNA-binding protein 7
  Pfam annotation: Domain name=GRP; Domain location=71-155; Score= -10.3; E_value=0.00091; Accession=PF07172.3; Description=Glycine rich protein family
  Pfam annotation: Domain name=RRM_1; Domain location=33-103; Score =101.0; E_value=4e-27; Accession=PF00076.14; Description=RNA recognition motif. (a.k.a. RRM, RBD, o
  Pfam module annotation: Pfam domain module=GRP::RRM_1; Domain location=71-155::33-103
  Subcellular localization annotation: CTP_CleavageSite=81; ConfidenceScore=5.12e-01
MALANKLGGLLKKATSSNPSIYQAIRCMSSSKLFVGGLSYGTDDQGLKNAFTRYGQVIEARVIMDRESGRSRGFGFVTYTSTEEASAAITAMDGSDLDGRNIRVNHATERTGGFRGSGGGGYGGGGGYGGGYGGGGGGGYGGNYGNRGGGGYGGGVAGGDEGNFAAGGSNNFGNSFGGDSGFGGNPAGGFGAANGSPGGDEFSPSFSGNKNDEIMDDMFKDDEPDNYADKRA

SEQ ID NO: 87950 - protein, 57 aa, Setaria italica
  Transcript Sequence Number=SeqID_21976
  Homolog annotation: Hit_ID=B6TPT6; Match level="QueryCoverage=100%, HitCoverage=10%, E-value=3e-11, Identity=59%"; Hit description=Auxin transporter-like protein 3
TFRSASARENAVEPPPRLVGRWTGTYMINAFVVAWVLVVGFGFGGWASMTNFVHQID

SEQ ID NO: 87951 - protein, 89 aa, Setaria italica
  Transcript Sequence Number=SeqID_21977
  Homolog annotation: Hit_ID=Q2R2B4; Match level="QueryCoverage=97%, HitCoverage=7%, E-value=7e-21, Identity=66%"; Hit description=BRCA1 C Terminus domain containing protein, expressed
MSSDIRKWFMKTQDKGGASGAVKPSGPAAAEKKKPVLSIPEKKQAPPSLASCDHDPSARRKTSKYFGSKTEKDSDVGMADATAGKSTEK

SEQ ID NO: 87952 - protein, 67 aa, Setaria italica
  Transcript Sequence Number=SeqID_21978
  Gene Ontology: Mol. function=hydrolase activity
  Homolog annotation: Hit_ID=Q4JF06; Match level="QueryCoverage=61%, HitCoverage=10%, E-value=3e-12, Identity=80%"; Hit description =OSJNBa0042I15.22 protein
IHGHHCFPVQAYHKNRNGNFNTVTIWFQDLTGKHTIVVSGHHGQLHIDGLRFIIDEGGGYEDKPIAA

SEQ ID NO: 87953 - protein, 161 aa, Setaria italica
  Transcript Sequence Number=SeqID_21979
  Gene Ontology: Mol. function=hydrolase activity
  Homolog annotation: Hit_ID=B6T2X6; Match level="QueryCoverage=100%, HitCoverage=50%, E-value=4e-88, Identity=95%"; Hit description=ACI14
MSAPSAPPRTVICVGDVHGYIAKLESLWSNLQSALPADAFATALVIFLGDYNDRGPHTREVLDFLLALPGRHPAQRHVFLCGNHDLAFAAFVGVLPPPPDGSPFSATWDEYIHNEEHEGWFRGPGYEGMHVQGRRWGGVIKERWNPKKGLPYRGSIYDAQP

SEQ ID NO: 87954 - protein, 314 aa, Setaria italica
  Transcript Sequence Number=SeqID_21980
  Gene Ontology: Mol. function=hydrolase activity
  Homolog annotation: Hit_ID=B6T2X6; Match level="QueryCoverage=100%, HitCoverage=99%, E-value=1e-162, Identity=88%"; Hit description=ACI14
  Pfam annotation: Domain name=Metallophos; Domain location=9-273; Score=18.7; E_value=0.023; Accession=PF00149.20; Description =Calcineurin-like phosphoesterase
MSAPSAPPRTVICVGDVHGYIAKLESLWSNLQSALPADAFATALVIFLGDYNDRGPHTREVLDFLLALPGRQTSLNQTKTDKPHDLAFAAFVGVLPPPPDGSPFSATWDEYIHNEEHEGWFRGPGYEGMHVQGRRWGGVIKERWNPKKGLPYRGSIYDAQPTFESYGVAHGSPDLAKAVPEDHKMFLHDLVWIHEEENVPIDTDEGQIICNLIAVHAGLEKSIDLNEQLRVLRTRDTRVPKVPMLSGRQDVWNTPKDLTGKHTIVVSGHHGQLHIDGLRFIIDEGGGYEDKPIAAIVFPSKTLIRSTEGAASQN

SEQ ID NO: 87955 - protein, 239 aa, Setaria italica
  misc_feature (233)..(233): Xaa can be any naturally occurring amino acid
  Transcript Sequence Number=SeqID_21981
  Homolog annotation: Hit_ID=B6TMZ7; Match level="QueryCoverage=100%, HitCoverage=77%, E-value=3e-64, Identity=62%"; Hit description =Cytochrome c oxidoreductase
  Pfam annotation: Domain name=MtN3_slv; Domain location=77-163; Score =111.0; E_value=4e-30; Accession=PF03083.8; Description=MtN3saliva family
TSLWTFYGLLNAGGLLVVTVNGAGAALEAAYVTLYLIYAPRETKAKMVKLVLAVNVGFLAAVVVVTLAALHGGARLLTVGVLCAVLTIGMYAAPLGAMRTVVKTRSVEYMPFSLSFFLFLNGGVWSVYSVLVKDYFIGVPNAIGFVLGTAQLVLYMAYRKAAPARKDDDDEAASEEADEEEGLAHLMGQVEMAQRRVRLHKGLSLPKPTGAPLSSPRNGFGSSIIKSLSATPXELHSVM

SEQ ID NO: 87956 - protein, 137 aa, Setaria italica
  Transcript Sequence Number=SeqID_21982
  Homolog annotation: Hit_ID=B6TMZ7; Match level="QueryCoverage=75%, HitCoverage=35%, E-value=6e-22, Identity=56%"; Hit description =Cytochrome c oxidoreductase
  Pfam annotation: Domain name=MtN3_slv; Domain location=1-67; Score =46.6; E_value=1e-10; Accession=PF03083.8; Description=MtN3saliva family
MQRTVVKTRSVEYMPFSLSFFLFLNGGVWSVYSVLVKDYFIGVPNAIGFVLGTAQLVLYMAYRKAAPARKDDDDEAASEEADEEEGLAHLMGQVEMAQRRVRLHKGLSLPKPTGDDRLVRTTDDKRVNGKEQRTNNK

SEQ ID NO: 87957 - protein, 116 aa, Setaria italica
  Transcript Sequence Number=SeqID_21983
  Homolog annotation: Hit_ID=B6TMZ7; Match level="QueryCoverage=67%, HitCoverage=24%, E-value=4e-14, Identity=70%"; Hit description =Cytochrome c oxidoreductase
VKVKGLCPYLVLAYRKAAPARKDDDDEAASEEADEEEGLAHLMGQVEMAQRRVRLHKGLSLPKPTGAPLSSPRNGFGSSIIKSLSATPVELHSVMHQHGHGRFEPVKKHDDAEANE

SEQ ID NO: 87958 - protein, 117 aa, Setaria italica
  Transcript Sequence Number=SeqID_21984
  Gene Ontology: Mol. function=transferase activity; Biological process= response to stress
  Homolog annotation: Hit_ID=B6U3T3; Match level="QueryCoverage=98%, HitCoverage=50%, E-value=1e-49, Identity=79%"; Hit description =Glutathione S-transferase
  Pfam annotation: Domain name=GST_N; Domain location=4-77; Score=69.4; E_value=1.3e-17; Accession=PF02798.12; Description=Glutathione S -transferase, N-terminal domain
MTSEPVRLIGGFGSPFAHRAEVALRLKGVPYELILEDLSNKSELLLKHNPVHKLVPVVLHGDRSVAESLVIVEYIDKAFDGPPLLPADPYERAQARFWAQFIDQRFARPFFMSFWIG

SEQ ID NO: 87959 - protein, 160 aa, Setaria italica
  misc_feature (153)..(153): Xaa can be any naturally occurring amino acid
  Transcript Sequence Number=SeqID_21985
  Gene Ontology: Mol. function=transferase activity; Biological process= response to stress
  Homolog annotation: Hit_ID=B6U3T3; Match level="QueryCoverage=98%, HitCoverage=68%, E-value=1e-65, Identity=76%"; Hit description =Glutathione S-transferase
  Pfam annotation: Domain name=GST_N; Domain location=4-77; Score=69.4; E_value=1.3e-17; Accession=PF02798.12; Description=Glutathione S -transferase, N-terminal domain
MTSEPVRLIGGFGSPFAHRAEVALRLKGVPYELILEDLSNKSELLLKHNPVHKLVPVVLHGDRSVAESLVIVEYIDKAFDGPPLLPADPYERAQARFWAQFIDQRFARPFFMSFWIGDDDEHKKAFVKEAKENLALLEAQLKGRRFWGDAVGXVDIAACR

SEQ ID NO: 87960 - protein, 416 aa, Setaria italica
  Transcript Sequence Number=SeqID_21986
  Gene Ontology: Cellular component=nucleus; Biological process=cell division
  Homolog annotation: Hit_ID=B6TF83; Match level="QueryCoverage=100%, HitCoverage=100%, E-value=0.0, Identity=80%"; Hit description=Cyclin- L2
  Pfam annotation: Domain name=Cyclin_N; Domain location=5-149; Score =5.2; E_value=0.00093; Accession=PF00134.15; Description=Cyclin, N -terminal domain
MIYTAIDTFYLTDEQLRDSPSRKDGIDEATETALRVYGCDLIQESGILLRLPQAVMATAQVLFHRFYCKKSFVRFSAKRVAASCVWLAGKLEESPRKSKHIIFVFHRMECRRENLPIEYLDVFSKKYSELRHDLIRTERHLLKEMGFICHVEHPHKFISNYLVTLEAPELTQEAWNLANDSLRTTLCVRFKSEVVACGVVYAAARRRGISLPEDPPWWTVFDADEAGIQEVCRVLAHLYSLPKSQYIPVYKDNDSFTIRTPDPQASKESPASAVASDKGTPVPSSSSQEKDSVTKAAPNKVKEKSDDEAKPLLAELNGKQDPAASSKSEKSELGVDRSRERERERSRGRDRDGRGRDSDRDSRGRDSDRERDRRRRSRERSSGHSDKEKSRRQSSRDRGDYYSSHSSREKDRHRHH

SEQ ID NO: 87961 - protein, 400 aa, Setaria italica
  Transcript Sequence Number=SeqID_21987
  Gene Ontology: Mol. function=phosphopyruvate hydratase activity; Cellular component=phosphopyruvate hydratase complex; Biological process=glycolysis
  Homolog annotation: Hit_ID=Q0J267; Match level="QueryCoverage=100%, HitCoverage=83%, E-value=0.0, Identity=93%"; Hit description=Enolase
  Pfam annotation: Domain name=Enolase_C; Domain location=159-400; Score=483.4; E_value=3.1e-142; Accession=PF00113.14; Description =Enolase, C-terminal TIM barrel domain
  Pfam annotation: Domain name=Enolase_N; Domain location=20-151; Score= 243.6; E_value=4.8e-70; Accession=PF03952.8; Description=Enolase, N -terminal domain
  Pfam module annotation: Pfam domain module=Enolase_C::Enolase_N; Domain location=159-400::20-151
VRAALSTASTPAKAAPGAEAVRSIRARQIVDSRGNPTVEVDLVSGDGRLHRSAVPSGASTGIYEALELRDGDKAVYGGKGVLQAVRNINDVIAPKLVGVDVRNQSDVDAIMLDIDGTPNKSKLGANAILGVSLSLCRAGAGAKGVPLYKHIQELAGIKELVMPVPAFNVINGGSHAGNNLAMQEFMLLPVGASSFAEALRMGSEVYHVLKGIIKAKYGQDACNVGDEGGFAPNVQDNREGLVLLMDAIEKAGYTGKIKIGMDVAASEFLTKDGSYDLNFKNQPNDGAHVLSAQRLGDLYRDFVKDFPIVSIEDPFDQDDWSSWASLQSSVDIQIVGDDLLVTNPKRIAEAIDKKACNALLLKVNQIGSVTESIQAALDSKAAGWGVMVSHRSGETEDNFI

SEQ ID NO: 87962 - protein, 79 aa, Setaria italica
  Transcript Sequence Number=SeqID_21988
DIATEEQHPLQTSTPGREAGEETPLLQAVQSIGFFSSTIQHIQVDVEIPMTDIAVMQFKAEAEEESEKSPLLSPRETSG

SEQ ID NO: 87963 - protein, 60 aa, Setaria italica
  Transcript Sequence Number=SeqID_21989
GARRCSMRQYRSQLEQEVKKLQRQLQEEVDLHLALADAITYNAALILKSSIKLPDKAHRG

SEQ ID NO: 87964 - protein, 209 aa, Setaria italica
  Transcript Sequence Number=SeqID_21990
  Gene Ontology: Cellular component=integral to membrane
  Homolog annotation: Hit_ID=O80539; Match level="QueryCoverage=79%, HitCoverage=59%, E-value=1e-57, Identity=65%"; Hit description =F14J9.24 protein
  Pfam annotation: Domain name=DUF607; Domain location=23-189; Score =326.3; E_value=6e-95; Accession=PF04678.5; Description=Protein of unknown function, DUF607
RRLRDGRDEVVGYSELLDACVEAGAARTHAEAEELARAMDDAGVVLLFRDKAYLHPEKVVDLVRRAVPLALGPENDPRKEEFKQLQEKKEEIDKLAHKQVRCILWSGLGFFMCQVGLFFRLTFWEFSWDVMEPIAFFTTASGLLVGYAYFLITSRDPTYQDFMERLFLSRQRKLCAAQKFDMERYMELQKHCRCPLEGHHPHGPKLHGL

SEQ ID NO: 87965 - protein, 48 aa, Setaria italica
  Transcript Sequence Number=SeqID_21991
QDKNKRSSFSNLKVWLGNSLAIKFHLICCQLINATKDSGFRVVPIYLR

SEQ ID NO: 87966 - protein, 176 aa, Setaria italica
  Transcript Sequence Number=SeqID_21992
  Gene Ontology: Mol. function=transferase activity; Cellular component= membrane
  Homolog annotation: Hit_ID=B6U626; Match level="QueryCoverage=93%, HitCoverage=33%, E-value=4e-89, Identity=93%"; Hit description =Secondary cell wall-related glycosyltransferase family 47
  Pfam annotation: Domain name=Exostosin; Domain location=2-114; Score=- 28.7; E_value=8.7e-05; Accession=PF03016.7; Description=Exostosin family
AIYRKEGGSIRQELYYMLKDEKNVYFSFGSVQDHGASKASQGMHSSKFCLNIAGDTPSSNRLFDAIVSHCVPVIISDDIELPYEDVLDYSKFSIFVRSSDAVKKGYLMRLISGVSKQQWTRMWNRLKEVDKHFEYQYPSQKDDAVQMIWQALARRVPAIQLKVHRSSRFSRSGRGK

SEQ ID NO: 87967 - protein, 52 aa, Setaria italica
  Transcript Sequence Number=SeqID_21993
PYIDILSEDLFIVFSCDVEIPFLSCRVPFISNLGLEIKFITAEALLKILMQI

SEQ ID NO: 87968 - protein, 57 aa, Setaria italica
  Transcript Sequence Number=SeqID_21994
MKMPRPSPAPLLLSAISLLVLAWPASCAHPVLIPVAKDPATSLYTILVRDGANHLVD

SEQ ID NO: 87969 - protein, 49 aa, Setaria italica
  Transcript Sequence Number=SeqID_21995
MKALAAHGADLLRGPHLLRAAVLAFAVALAFLVGYHWHDASPRLVFFSS

SEQ ID NO: 87970 - protein, 57 aa, Setaria italica
  Transcript Sequence Number=SeqID_21996
IYRIYHTWLHKHLSHLTKLPELLFKGIQTKQTESLVKQPLYNYPIIIEQTGMRTGHT

SEQ ID NO: 87971 - protein, 121 aa, Setaria italica
  Transcript Sequence Number=SeqID_21997
  Gene Ontology: Mol. function=heat shock protein binding; Cellular component=cytoplasm; Biological process=protein folding
  Homolog annotation: Hit_ID=Q6K8D7; Match level="QueryCoverage=83%, HitCoverage=75%, E-value=3e-29, Identity=61%"; Hit description=DNAJ heat shock N-terminal domain-containing protein-like
  Pfam annotation: Domain name=DnaJ; Domain location=12-74; Score =117.2; E_value=5.4e-32; Accession=PF00226.23; Description=DnaJ domain
MDGASKEPLHKDYYKVLEVDYDASDDTIKLSYRRLALMWHPDKHKGDSDVTAKFQEINEAYKVLSDPAKRLEYDLSGCYEINQYTLREYLTRFKGMILTCNGLGIGHPSKWSRHLRELKPH

SEQ ID NO: 87972 - protein, 115 aa, Setaria italica
  Transcript Sequence Number=SeqID_21998
  Homolog annotation: Hit_ID=B9SVM2; Match level="QueryCoverage=61%, HitCoverage=10%, E-value=9e-12, Identity=36%"; Hit description =Protein phosphatase 2c, putative
  Pfam annotation: Domain name=DUF868; Domain location=35-115; Score= -143.3; E_value=0.0024; Accession=PF05910.4; Description=Plant protein of unknown function (DUF868)
MQDHVSAYMHRSGDQQGAPSSCDLAAVDDVPANGHKPGKAVTASVYRAKIAGHSRVVTVSWSRDLLSHAFAVAISGADGASAECRVELRPWQFWRRAGSRRVELCGGASTAPATV

SEQ ID NO: 87973 - protein, 53 aa, Setaria italica
  Transcript Sequence Number=SeqID_21999
CVQRVRHNATATAGRCIARAAGDRNGTPKEPCRIGNCGTEADARRPLPRLTLG

SEQ ID NO: 87974 - protein, 164 aa, Setaria italica
  misc_feature (160)..(160): Xaa can be any naturally occurring amino acid
  Transcript Sequence Number=SeqID_22000
  Gene Ontology: Cellular component=membrane
  Homolog annotation: Hit_ID=Q9LPG3; Match level="QueryCoverage=100%, HitCoverage=22%, E-value=4e-25, Identity=36%"; Hit description =T3F20.21 protein
LASGLIGSVIWLVKTFLMKLVASTFHRKTFFDRIQESVFHQYVLQTLSGPPLMELAENVGREGSGLGRVSFSRAKEEKGKGVPEVIDVVKLRRMSQEKVSAWTMRGLITAIRSSRLSTISNTIESFNDVDGMEQKDREINSEWEAKAAAYAIFKNVARPXYKHI

SEQ ID NO: 87975 - protein, 124 aa, Setaria italica
  Transcript Sequence Number=SeqID_22001
  Gene Ontology: Mol. function=metal ion binding; Biological process =metal ion transport
  Homolog annotation: Hit_ID=B6SZ51; Match level="QueryCoverage=100%, HitCoverage=77%, E-value=4e-47, Identity=81%"; Hit description=Metal ion binding protein
  Pfam annotation: Domain name=HMA; Domain location=77-123; Score=23.3; E_value=0.001; Accession=PF00403.18; Description=Heavy-metal -associated domain
MGRRKLGLDRVLDCFSLSLCANACACVHSVEEEEDEDEADERRALVSSQLEELVKLRDLVDGAARTLAFHLEPKTVELKVSMHCYGCAKKVQKHISKMDGVTWFEVDLEKKKVVVTGDITPYEV

SEQ ID NO: 87976 - protein, 99 aa, Setaria italica
  misc_feature (66)..(66): Xaa can be any naturally occurring amino acid
  Transcript Sequence Number=SeqID_22002
  Gene Ontology: Mol. function=metal ion binding; Biological process =metal ion transport
  Homolog annotation: Hit_ID=B6SZ51; Match level="QueryCoverage=78%, HitCoverage=48%, E-value=2e-26, Identity=82%"; Hit description=Metal ion binding protein
  Pfam annotation: Domain name=HMA; Domain location=24-93; Score=50.4; E_value=6.8e-12; Accession=PF00403.18; Description=Heavy-metal -associated domain
AGYLCVIIDVYALCCCICVLQTVELKVSMHCYGCAKKVQKHISKMDGVTWFEVDLEKKKVVVTGDXVTPYEVLESISKVMKFAELWVAPQQQPQAASRG

SEQ ID NO: 87977 - protein, 163 aa, Setaria italica
  misc_feature (30)..(30): Xaa can be any naturally occurring amino acid
  Transcript Sequence Number=SeqID_22003
  Gene Ontology: Mol. function=transferase activity, transferring groups other than amino-acyl groups; Biological process=flavonoid biosynthetic process
  Homolog annotation: Hit_ID=B6TCS3; Match level="QueryCoverage=95%, HitCoverage=33%, E-value=6e-36, Identity=54%"; Hit description =Anthranilate N-benzoyltransferase protein 1
MVVMRSDVQVVESSLVTPSEATPRQQLWLXPLDVLLVNRGHTPAVYFYHPAADAAAAKDFFDVARLKESLARALVDFYPLAGRLTVDAGGRFVIDCNAEGALLAVARSDLTVADFADVVPSPELKDLFVPRVDPPSSVMLAVQVTFLGCGGVAFGTALHHAVA

SEQ ID NO: 87978 - protein, 279 aa, Setaria italica
  Transcript Sequence Number=SeqID_22004
MLLFCCNNKFFHFYLLKIVIDWQDGLLVERRLHRRKWKWDKHGAPMGHRLSSVAEVQQDELNDATSLFFTTTTGKIFEYQVPKYTGGAQSNKIRGQWLNHMYPEHAKVARNARGVQVQVGRMIFPLDDGRLGELHFPGIGGADFGPIPQSTVRKKLSNKYEWSILDAPETEGWNAEYCIEEHGPTNCITGAKSIATDTEPNDLSNTQPSRRRKVEEKQHYLHINSHQSDEIEPYNFLSRSIDLNFHMRVMHADRSLFLITDNGLTFEYLNSNGIWLWLR

SEQ ID NO: 87979 - protein, 80 aa, Setaria italica
  Transcript Sequence Number=SeqID_22005
  Gene Ontology: Mol. function=sequence-specific DNA binding; Cellular component=nucleus; Biological process=regulation of transcription, DNA-dependent
  Homolog annotation: Hit_ID=Q41812; Match level="QueryCoverage=97%, HitCoverage=13%, E-value=6e-18, Identity=56%"; Hit description=Hox2a protein
QIKEKIVSPSKLGSPGSSARVLRSASKYKDETCTEPSVEPAADRKKIASPSKVGSPNDTVRVLRSALKNKNEACTEPLND

SEQ ID NO: 87980 - protein, 102 aa, Setaria italica
  Transcript Sequence Number=SeqID_22006
  Subcellular localization annotation: CTP_CleavageSite=54; ConfidenceScore=5.37e-01
SPRRRPAPAQPPPDSATAAAPSRRWRLPHRRPPELHLRSLPGRPAREGAPRSVVACVDTSGGDLWLYRRGKRRQDGEGGRARGCPTVLRLLRSCRASGVPNL

SEQ ID NO: 87981 - protein, 105 aa, Setaria italica
  misc_feature (48)..(48): Xaa can be any naturally occurring amino acid
  misc_feature (71)..(71): Xaa can be any naturally occurring amino acid
  misc_feature (85)..(85): Xaa can be any naturally occurring amino acid
  Transcript Sequence Number=SeqID_22007
  Gene Ontology: Mol. function=small conjugating protein ligase activity; Biological process=ubiquitin-dependent protein catabolic process
  Homolog annotation: Hit_ID=B6TA94; Match level="QueryCoverage=94%, HitCoverage=49%, E-value=2e-27, Identity=54%"; Hit description =Ubiquitin carrier protein
  Pfam annotation: Domain name=UQ_con; Domain location=14-99; Score= -30.2; E_value=0.006; Accession=PF00179.18; Description=Ubiquitin -conjugating enzyme
MATNENLPPNVIRQLAKELKNLDESPPEGINVIVNDDDFTTIFADMEXTGGTPYENGALNISKNSGEVIIXTLKKDWNPGLGLRXVLLVVRCLLIEPLPPNSRPE

SEQ ID NO: 87982 - protein, 224 aa, Setaria italica
  Transcript Sequence Number=SeqID_22008
  Gene Ontology: Mol. function=small conjugating protein ligase activity; Biological process=ubiquitin-dependent protein catabolic process
  Homolog annotation: Hit_ID=A3BEA2; Match level="QueryCoverage=75%, HitCoverage=57%, E-value=9e-69, Identity=76%"; Hit description =Ubiquitin carrier protein
  Pfam annotation: Domain name=UQ_con; Domain location=11-124; Score =114.9; E_value=2.7e-31; Accession=PF00179.18; Description=Ubiquitin -conjugating enzyme
WLPFSISLLYNISSEFKSGHCAGGTPYENGVFRMKLLLSRDFPQSPPKGFFLTKIFHPNIATSGEICVNTLKKDWNPGLGLRHVLLVVRCLLIEPFPESALNEQAGKMLLENYEEYARHARLYTGIHALKPKNKSKSGAISESTTALNVGQSNTVLGEIPLASTPISTSAAAKALGKNSQDQNAATSDPVVGASTAPKKDAAHAAKVAVDKKKLDARKKSLKRL

SEQ ID NO: 87983 - protein, 253 aa, Setaria italica
  Transcript Sequence Number=SeqID_22009
  Gene Ontology: Mol. function=small conjugating protein ligase activity; Biological process=ubiquitin-dependent protein catabolic process
  Homolog annotation: Hit_ID=B6TA94; Match level="QueryCoverage=100%, HitCoverage=100%, E-value=1e-122, Identity=86%"; Hit description =Ubiquitin carrier protein
  Pfam annotation: Domain name=UQ_con; Domain location=14-151; Score =182.8; E_value=9.5e-52; Accession=PF00179.18; Description=Ubiquitin -conjugating enzyme
MATNENLPPNVIRQLAKELKNLDESPPEGINVSVNDDDFTTIFADIEGPAGTPYENGVFRMKLLLSRDFPQSPPKGFFLTKIFHPNIATSGEICVNTLKKDWNPGLGLRHVLLVVRCLLIEPFPESALNEQAGKMLLENYEEYARHARLYTGIHALKPKNKSKTGAISESTTALNVDKSSAASSENTPSMPPAVSTSTASRAFGTNLQDQNPTVSDPAAVGAAAARKKDGPMASKAPLDKKKMDARKKSLKRL

SEQ ID NO: 87984 - protein, 329 aa, Setaria italica
  misc_feature (223)..(223): Xaa can be any naturally occurring amino acid
  Transcript Sequence Number=SeqID_22010
  Gene Ontology: Mol. function=hydrolase activity; Biological process =metabolic process
  Homolog annotation: Hit_ID=B6TMI7; Match level="QueryCoverage=99%, HitCoverage=99%, E-value=1e-144, Identity=78%"; Hit description =Gibberellin receptor GID1L2
  Pfam annotation: Domain name=Abhydrolase_3; Domain location=83-308; Score=177.8; E_value=3.1e-50; Accession=PF07859.5; Description =alphabeta hydrolase fold
MGDSTTTNSSPAAAMDPDSEVAFDFPPYLCQYKSGRIHRPGGAPTAPAGTDPATGVVSKDIRAGPTSVRIYLPPGATGKIPVVVYFHGGGFVVGSPARPGTHNYLNDLIARSGAIGVSVYYRLAPEHKLPAAYDDAWAALRWAVTLGDGKEPWLIDHADLSRVFLAGCSAGANIAHNTAVRASAPGALPDGVTLRGLALVHPYFTGSEAISGETAFGPEIRGXMERTWRFVASETVGLDDPRVCPFVDDAARKASAGISCERVLVCVAENDFLLKERGLWYHRELKASGYAGELELFESKGVDHAFHFDKLDSEEGVALQERTVAFIKT

SEQ ID NO: 87985 - protein, 73 aa, Setaria italica
  misc_feature (73)..(73): Xaa can be any naturally occurring amino acid
  Transcript Sequence Number=SeqID_22011
DAQLNLSEISLQCRVSDQMCSPFSLQFSTWCNFCLYATFKRFLSDVYKIIQTILGTWQTAGYIMSSVWQTMPX

SEQ ID NO: 87986 - protein, 133 aa, Setaria italica
  Transcript Sequence Number=SeqID_22012
  Gene Ontology: Mol. function=serine-type carboxypeptidase activity; Cellular component=extracellular region; Biological process =proteolysis
  Homolog annotation: Hit_ID=Q2R0J2; Match level="QueryCoverage=99%, HitCoverage=27%, E-value=5e-52, Identity=71%"; Hit description =Serine carboxypeptidase family protein
  Pfam annotation: Domain name=Peptidase_S10; Domain location=6-133; Score=-211.9; E_value=0.009; Accession=PF00450.14; Description =Serine carboxypeptidase
NLNSGPREMLQLQEYTADAQLNLSEISLQCRTAGYIMSSVWANNASVREALGIHKGTVPSWSRCNYSIPYTSDIPSTVKYHLDVTTKDYRSLVYSGDHDMIIPHIGTQAWIKSLNFSIMDHWRPWFVDGQVAG

SEQ ID NO: 87987 - protein, 78 aa, Setaria italica
  Transcript Sequence Number=SeqID_22013
MVYFSKCLKGICPNHVLEPVCAFASPHAHKMETKPNLNSGPREMLQLQEYTADAQLNLSEISLQCRVSDQMCSPLQDT

SEQ ID NO: 87988 - protein, 161 aa, Setaria italica
  Transcript Sequence Number=SeqID_22014
  Gene Ontology: Mol. function=serine-type carboxypeptidase activity; Cellular component=extracellular region; Biological process =proteolysis
  Homolog annotation: Hit_ID=Q2R0J2; Match level="QueryCoverage=79%, HitCoverage=20%, E-value=1e-22, Identity=48%"; Hit description =Serine carboxypeptidase family protein
LGKIVPTIASEIARGKEGGHELNFNLKGYLVGNPVTDSNFDDPSKIPFAHGMGIISDEIYESYKKSCSVGDNSHQSIECINSLYAIQECLKGICPNHVLEPVCAFASPHAHKMETKPNLNSGPREMLQLQEYTADAQLNLSEISLQCRVSDQMCSPTAGYI

SEQ ID NO: 87989 - protein, 90 aa, Setaria italica
  Transcript Sequence Number=SeqID_22015
  Gene Ontology: Mol. function=serine-type carboxypeptidase activity; Cellular component=extracellular region; Biological process =proteolysis
  Homolog annotation: Hit_ID=B9R6Y3; Match level="QueryCoverage=97%, HitCoverage=19%, E-value=7e-33, Identity=68%"; Hit description =Serine carboxypeptidase, putative
VLGLRLIVCSGNHDMIIPHIGTQAWIKSLNFSIMDHWRPWFVDGQVAGFTRSYSNNLTFATVKGGGHTAPEYMPRQCFAMFARWISGDPL

SEQ ID NO: 87990 - protein, 317 aa, Setaria italica
  Transcript Sequence Number=SeqID_22016
  Gene Ontology: Mol. function=oxidoreductase activity; Biological process=oxidation reduction
  Homolog annotation: Hit_ID=B6THE1; Match level="QueryCoverage=93%, HitCoverage=95%, E-value=1e-121, Identity=75%"; Hit description =Aldose reductase
  Pfam annotation: Domain name=Aldo_ket_red; Domain location=1-269; Score=352.3; E_value=9.1e-103; Accession=PF00248.13; Description =Aldoketo reductase family
VGLGTWQIEHEAVCSAIYAAVKAGYRHINTAVAYRNQKEVGVALKKLFEDGVVKREDLFITSKLWPGNHAPEDVQEDICSALEDLQLNYVDLYLIHGPIRIKKGSMFIPDNLIRTDIPATWGAMEKLYDSGKARAIGVSNFSCKKVEDLLAVARVPPAVNEVECHPVWQQAKLRKLCQSTGIHLSAYSPLGSPGSPGYCGPSVLSNPVVISVAEKLQKTPAQIALRWGLQMGQSVLPKSADETRIKENFDIFDWSIPEDLMAKFSGIKQVRLLKVEFVIHPQSGYNSLEDLWDGEVEEDDGRAECEDHSDFLKCFSC

SEQ ID NO: 87991 - protein, 142 aa, Setaria italica
  Transcript Sequence Number=SeqID_22017
  Gene Ontology: Mol. function=substrate-specific transmembrane transporter activity; Cellular component=integral to membrane; Biological process=transmembrane transport
  Homolog annotation: Hit_ID=B6TAG3; Match level="QueryCoverage=99%, HitCoverage=26%, E-value=3e-46, Identity=65%"; Hit description =Arabinose-proton symporter
RTSDAIGRKWTIGLAAAVFQAGAAIMTFAPSFAALMTGRLLAGIGIGIGIMVAPVYISEISPATLRGTLASFPEIFISFGILLGYVSNLAFAGLPDHINWRVMLGAGILPSISIAFVLMIIPESPRWLVMQSRAADARAVLD

SEQ ID NO: 87992 - protein, 69 aa, Setaria italica
  Transcript Sequence Number=SeqID_22018
FLAETAAAAASCPGADDALRGVGHLIHDIMCKTNMEIDSSGWLAILKFLDALVKCSIEGACVKGLSSRT

SEQ ID NO: 87993 - protein, 195 aa, Setaria italica
  Transcript Sequence Number=SeqID_22019
  Gene Ontology: Mol. function=hydrolase activity, acting on ester bonds; Biological process=lipid metabolic process
  Homolog annotation: Hit_ID=B6TLP8; Match level="QueryCoverage=81%, HitCoverage=41%, E-value=1e-34, Identity=41%"; Hit description=Alpha- L-fucosidase 2
PTLNKQPTNRNVDKTSKWFDEVKQTICSDPEECRAFFSKALFVFGEFGGNDYSFAWKADWSLEKVKTMVPAVVSSLVRGIERLLDEGARHVVVPGNLPAGCIPITLTMYPSEDRSEYDPRMRCLKKYNSVALYHNAMLRIALDRLQRRRPEARIVYADYYTPYIQFARTPHLYGQFPCRPPSFFLPWFADSSIHH

SEQ ID NO: 87994 - protein, 372 aa, Setaria italica
  Transcript Sequence Number=SeqID_22020
  Gene Ontology: Mol. function=hydrolase activity, acting on ester bonds; Biological process=lipid metabolic process
  Homolog annotation: Hit_ID=B6TLP8; Match level="QueryCoverage=89%, HitCoverage=89%, E-value=5e-83, Identity=43%"; Hit description=Alpha- L-fucosidase 2
  Pfam annotation: Domain name=Lipase_GDSL; Domain location=35-352; Score=141.0; E_value=3.7e-39; Accession=PF00657.14; Description=GDSL- like LipaseAcylhydrolase
MAARSGFVPPACVLVLLCLAAGVAGEALPQYYNAIFSFGDSFSDTGNFVIINSGKLPNMPKFPPPYARCSNGRLVIDFLAEAFGLPLLPPSANKGTNFSQGANFAVMGATALDLKYFKDNNVWSIPPFNTSMNVQLQWFDEVKQTICSDPEECRAFFSKALFVFGEFGGNDYSFAWKADWSLEKVKTMVPAVVSSLVRGIERLLDEGARHVVVPGNLPAGCIPITLTMYPSEDRSEYDPRTGCLKKYNSVALYHNAMLRIALDRLQRRRPEARIVYADYYTPYIQFARTPHLYGYKRGALRACCGGGGPYNYNMSASCGLPGSTTCEDPDAHVSWDGIHLTEAPYRFIANTWLKGPYAHPPLATVVREDMVD

SEQ ID NO: 87995 - protein, 232 aa, Setaria italica
  Transcript Sequence Number=SeqID_22021
  Pfam annotation: Domain name=DUF829; Domain location=91-231; Score= -11.1; E_value=9.2e-06; Accession=PF05705.6; Description=Eukaryotic protein of unknown function (DUF829)
YWGGGRRPDPAAAGVVVMFAWLSSQERHVRAYVELYAARGWACLVCHSDFPTLFFPEKAAMLADRVLGELVKELKIRPVPVAFASFSGGPKGCTYKVLQLIERRCKGQLSLDEYQLVRDCLCGQMYDSSPVDFVSDLGTRFLLDPSVLKMSEPPRVLSWMAKGVASGLDTLFINKFEEQRKDYWETLYSSVNVGPILILCSEDDQLAPYSVVENFAKRLLELGGDVNLVKWH

SEQ ID NO: 87996 - protein, 120 aa, Setaria italica
  Transcript Sequence Number=SeqID_22022
  Homolog annotation: Hit_ID=B6SRE4; Match level="QueryCoverage=47%, HitCoverage=51%, E-value=3e-23, Identity=93%"; Hit description=SPR1
MGRGRGVSYGGGQSSLNYLFGGGDEAPAARAKPAAAADEQRVTATAADEQRVTAAAAAGHDDEKLKGIPAGVRGSQTNNYFRAQGQNCGNFLTDRPSTKVHAAPGGGSSLDYLFGGGAGK

SEQ ID NO: 87997 - protein, 114 aa, Setaria italica
  Transcript Sequence Number=SeqID_22023
  Gene Ontology: Mol. function=nucleoside-triphosphatase activity; Cellular component=membrane; Biological process=lipid transport
  Homolog annotation: Hit_ID=Q10A32; Match level="QueryCoverage=98%, HitCoverage=22%, E-value=2e-23, Identity=49%"; Hit description=ABC-2 type transporter family protein
RRNPSDHYLRIINKDFDEEISSLESPSAAEAIETLVNSFISLNNLATSMQAMGTENDVLPLIKERQAGFFTKLLVLTKRSSVNMHRDIGYYWLRFAILSFVSFCIGTVFYNISD

SEQ ID NO: 87998 - protein, 108 aa, Setaria italica
  Transcript Sequence Number=SeqID_22024
  Gene Ontology: Mol. function=nucleoside-triphosphatase activity; Cellular component=membrane; Biological process=lipid transport
  Homolog annotation: Hit_ID=B9T0A5; Match level="QueryCoverage=60%, HitCoverage=9%, E-value=2e-23, Identity=69%"; Hit description=ATP -binding cassette transporter, putative
VAAVHQPSAEVFDLFNGLCLLANGRMVYFGRIPEAAEFFTDNGFPCPLRRNPSDHYLRIINKDFDEVYTFLNPITKWLYYLFPCSKLYVILAFLNKYFFIIYLYVVYI

SEQ ID NO: 87999 - protein, 160 aa, Setaria italica
  Transcript Sequence Number=SeqID_22025
  Gene Ontology: Cellular component=mitochondrion; Biological process =cellular iron ion homeostasis
  Homolog annotation: Hit_ID=B6TSR5; Match level="QueryCoverage=76%, HitCoverage=60%, E-value=2e-29, Identity=60%"; Hit description =Frataxin
  Subcellular localization annotation: CTP_CleavageSite=77; ConfidenceScore=5.46e-01
IVLPPPPPWPSEQGCATSPTSVGCRVGTYTQAAAAAMASRKLLLVLTAGRRLRSRSRTGQLLWAANLPEATTSRSLAAAAAAAQQSGRSPAALLFASRTISTTRPATQSAGDAPGPSAVDPKLIMPEDEFHKLADETIHYLLEKLEEYGDSIQMDGFDID

SEQ ID NO: 88000 - protein, 163 aa, Setaria italica
  Transcript Sequence Number=SeqID_22026
  Gene Ontology: Mol. function=hydrolase activity; Cellular component =cell wall
  Homolog annotation: Hit_ID=B6TCT5; Match level="QueryCoverage=100%, HitCoverage=43%, E-value=7e-78, Identity=84%"; Hit description =Catalytic/ hydrolase
MGGEIMWSCLKYIPHRLAGVAILAPVGNYWWSGFPADVVEEAWYVQFPQDQRAVWVAHHLPWLTHWWNTQNLFHSSSVKGKNPIILSKEDMALSQKFLDRTYKEQVRQLGEHDSLHRDMMVGFGKWGWSPLEMENPFAGAGDEVKVHLWHGVEDLFVPVQLSR

SEQ ID NO: 88001 - protein, 368 aa, Setaria italica
  Transcript Sequence Number=SeqID_22027
  Gene Ontology: Mol. function=hydrolase activity; Cellular component =cell wall
  Homolog annotation: Hit_ID=B6TPP8; Match level="QueryCoverage=99%, HitCoverage=100%, E-value=1e-170, Identity=82%"; Hit description =Catalytic/ hydrolase
  Pfam annotation: Domain name=Abhydrolase_1; Domain location=119-360; Score=31.0; E_value=4.7e-06; Accession=PF00561.12; Description =alphabeta hydrolase fold
  Subcellular localization annotation: CTP_CleavageSite=56; ConfidenceScore=5.16e-01
MAADSGKKPSANGGKAPAPNKASDSGGIAKRLPRIALMFLLALLYRQLQAPPSKIPGAPGGPPVTAPRTRLQDGRHLAYHESGVPKDQAKHKIIFVHGFDSCRYDVLRVSPELAQELGIYLLSFDRPGYGESDPHPGRTVKSIALDIEQLADAMELGPKFYLTGFSMGGEIMWSCLKYIPHRLAGVAILGPVGNYWWSGFPANVSREAWNVQVAQDKWAVGVAHHAPWLTYWWNTQKLFPASSVISFNPAIMSQEDMAVIPKFAYRSYAYQSRQQGEHESLHRDMMVGFGKWSWSPLELEDPFPGGEGKVHLWHGAEDLIVPVGLSRYISQRLPWVRYHELPTAGHLFPIADGMPDVILKSLLLGDDE

SEQ ID NO: 88002 - protein, 104 aa, Setaria italica
  Transcript Sequence Number=SeqID_22028
SKEKTKLSGALRRLQESHELAHKQAMEIKKLKDALERFNSAVNLGTVCKSCSCGFCAMLIELSNCSIEGPSGARSPKSNHINGKLQDQALIEWHPDEASDGDGR

SEQ ID NO: 88003 - protein, 569 aa, Setaria italica
  Transcript Sequence Number=SeqID_22029
  Gene Ontology: Mol. function=magnesium ion binding; Cellular component=postsynaptic membrane; Biological process=Mo-molybdopterin cofactor biosynthetic process
  Homolog annotation: Hit_ID=Q309F9; Match level="QueryCoverage=97%, HitCoverage=84%, E-value=0.0, Identity=86%"; Hit description =Molybdenum cofactor biosynthesis protein
  Pfam annotation: Domain name=MoCF_biosynth; Domain location=374-522; Score=143.8; E_value=5.4e-40; Accession=PF00994.16; Description =Probable molybdopterin binding domain
  Pfam annotation: Domain name=MoCF_biosynth; Domain location=89-237; Score=159.7; E_value=8.5e-45; Accession=PF00994.16; Description =Probable molybdopterin binding domain
  Pfam annotation: Domain name=MoeA_C; Domain location=250-328; Score =78.5; E_value=2.3e-20; Accession=PF03454.7; Description=MoeA C -terminal region (domain IV)
  Pfam annotation: Domain name=MoeA_N; Domain location=1-76; Score= -12.1; E_value=1.4e-07; Accession=PF03453.9; Description=MoeA N -terminal region (domain I and II)
  Pfam module annotation: Pfam domain module=MoCF_biosynth::MoCF _biosynth::MoeA_C::MoeA_N; Domain location=374-522::89-237::250 -328::1-76
TTGGPIPDGADAVVQVEDTEQIPAGADGSKRVKILVRAAEGQDIRNVGCDIEKDSIVLKSGELIGPAEIGLLATVGVTTVKVYLRPTIAVFSTGDELVQPATATLSRGQIRDSNRAMLLAAAVQQKCKVVDLGIAEDTEESLKEHLDAALRSDADIILTSGGVSMGDRDLVKPCLAKMGKIHFEKIRMKPGKPLTFAEITTQDTSKPSKTVLAFGLPGNPVSCMVCFNLFVVPAIRLLSGWSNPHLQRVHVRLSHPLRADLHRTEFHRAVIRWMLNDGSGRPGYVAESTGHQASSRLLSMKSANALLEVPSTGQILAAGTSIQAILISDIISYPSNKPPAASDPPPSHFGPSSKSISTDVPQLSASQNTEVKVAILTVSDTVSSGAGPDRSGPRAVSVVNSSSEKLGGATVVATAVVPDEVDKIKGILVQWSDIDCVNLILTLGGTGFTPRDVTPEATKSIIEKEAPGLIFVMLQESLKITPFAMLSRAMAGIRGSTLIINMPGNPNAVAECMEALLPALKHALKQIKGDKREKHPRHTPHAAAAPVDQWERSFRAASAGSGGGCSCEP

SEQ ID NO: 88004 - protein, 99 aa, Setaria italica
  Transcript Sequence Number=SeqID_22030
  Homolog annotation: Hit_ID=B6SU93; Match level="QueryCoverage=60%, HitCoverage=25%, E-value=2e-20, Identity=86%"; Hit description =Groundhog protein 7
YHHGAAEPPPSHSPAPPMHGGQGGHHGYAYAHGYGRYAPSPLPRWEMLGTPRRPEYFSGEYRWYYPTPVREGIYSIATDANGRLSTIFSEENPNACTIV

SEQ ID NO: 88005 - protein, 331 aa, Setaria italica
  Transcript Sequence Number=SeqID_22031
  Gene Ontology: Mol. function=serine-type endopeptidase activity; Cellular component=plasma membrane; Biological process=negative regulation of catalytic activity
  Homolog annotation: Hit_ID=B9T899; Match level="QueryCoverage=91%, HitCoverage=80%, E-value=5e-66, Identity=47%"; Hit description =Cucumisin, putative
  Pfam annotation: Domain name=Inhibitor_I9; Domain location=25-109; Score=44.8; E_value=3.4e-10; Accession=PF05922.8; Description =Peptidase inhibitor I9
  Pfam annotation: Domain name=Peptidase_S8; Domain location=121-331; Score=-91.9; E_value=0.086; Accession=PF00082.14; Description =Subtilase family
  Pfam module annotation: Pfam domain module=Inhibitor_I9::Peptidase _S8; Domain location=25-109::121-331
SGWLCALLAAATVAAAAAAETEVQSSYIVHVAGEHAPRSSHPRLLARGYTSLLRDSLPASISRPAPRLLYSYAHAATGFAARLTERQAAHLASQPSVLAVAADGIRQLHTTLTPSFLRLSTSSGLLPASNGATDVVIGVLDTGIYPEDRASFAADPSMPPPPRRFRGSCVSTPSFNASAYCNNKLVGAKFFHEGYEAAYGNRLDETEDPRSPLDSNGHGTHTASTAAGSAVAGAAFYNYAKGKAVGMAPGARIAAYKVCWTNGCADSDILKAFDEAIKDGVDVISLSLGAVGEPPNFHEDQIAIGAFNAVRKGIVVSASAGNSGPGEYTET

SEQ ID NO: 88006 - protein, 238 aa, Setaria italica
  misc_feature (4)..(4): Xaa can be any naturally occurring amino acid
  Transcript Sequence Number=SeqID_22032
  Gene Ontology: Mol. function=transferase activity, transferring groups other than amino-acyl groups; Cellular component=chloroplast; Biological process=cellular amine metabolic process
  Homolog annotation: Hit_ID=B6TT96; Match level="QueryCoverage=92%, HitCoverage=49%, E-value=1e-109, Identity=87%"; Hit description =Transferase
  Subcellular localization annotation: CTP_CleavageSite=55; ConfidenceScore=5.13e-01
SPRXAAPPPPPVAASSVNRIYRIAAADVAVLKAAAGPGRTKMEAFAAHLWRLCSRAASPRQSQCCMGVVVDGRTRMFPDGAMKAYFGNVLTIPYGVIGSEELRRMALADVADDVHRWLVEAATGDHFRGLVDWVEALRPKPAAARAYLGGTGGSEAMACIVSSGMSFPVGKADFGTGLPAFASYHFPWPAGAGYVMPMPSARGDGDWVVYVHVAPELAKVMEEEPTVFRALENSYAFQ

SEQ ID NO: 88007 - protein, 52 aa, Setaria italica
  Transcript Sequence Number=SeqID_22033
RGPFLTEETRRGLVGLDYLTVIFLQEKKCGLSLSGGDILYCWFVDVLPDEEL

SEQ ID NO: 88008 - protein, 92 aa, Setaria italica
  Transcript Sequence Number=SeqID_22034
  Gene Ontology: Mol. function=extracellular-glutamate-gated ion channel activity; Cellular component=integral to membrane; Biological process=ion transport
  Homolog annotation: Hit_ID=Q69L05; Match level="QueryCoverage=100%, HitCoverage=9%, E-value=3e-34, Identity=72%"; Hit description =Putative Avr9/Cf-9 rapidly elicited protein 141
YRSAIPVSASSDQLEQELYKLMTMQTRVYIVHMSSSIASTLFTKAKKLGMISEMYAWIVTDGIANIINSLNPSILDAMNGALGVKFYVPKSK

SEQ ID NO: 88009 - protein, 67 aa, Setaria italica
  Transcript Sequence Number=SeqID_22035
  Subcellular localization annotation: CTP_CleavageSite=57; ConfidenceScore=5.27e-01
TVYNKLCLSSVTLAKLLMPAATFVVKLACPTFQYQISNSFVRWIVFPSSTDGSQRVRAVESYADHDI

SEQ ID NO: 88010 - protein, 136 aa, Setaria italica
  misc_feature (10)..(10): Xaa can be any naturally occurring amino acid
  misc_feature (50)..(50): Xaa can be any naturally occurring amino acid
  Transcript Sequence Number=SeqID_22036
  Homolog annotation: Hit_ID=B9RGP6; Match level="QueryCoverage=69%, HitCoverage=20%, E-value=3e-20, Identity=50%"; Hit description =Transporter, putative
FYALLMSLQXAGLLMSAWWGGLLLHKLNVTRMEFSNLWIAVLIRNISRTXNNTLLFLVPQSDQNSTLLPAEMLQDGESTEAVKAGSVEFSVLVQDDSGCISPNVAAEDERTKMFDAETDDVESTPLVNKSDPTTDS

SEQ ID NO: 88011 - protein, 50 aa, Setaria italica
  Transcript Sequence Number=SeqID_22037
SHKGIGDLILKGGTCKFHYKGGSRHEQLSKSRRSSSIACYTQFRHFNYSL

SEQ ID NO: 88012 - protein, 83 aa, Setaria italica
  Transcript Sequence Number=SeqID_22038
  Gene Ontology: Mol. function=transporter activity; Cellular component= membrane; Biological process=oligopeptide transport
  Homolog annotation: Hit_ID=Q7XUE5; Match level="QueryCoverage=92%, HitCoverage=13%, E-value=5e-30, Identity=74%"; Hit description =OSJNBa0076N16.17 protein
INIARFLDKACINHGKEGAWSLCSVTKVEETKIVFRMLPLFVSSMIGYVSNPIILTFTVQQGGMTNTRLGKIHISPATLFIHS

SEQ ID NO: 88013 - protein, 259 aa, Setaria italica
  Transcript Sequence Number=SeqID_22039
  Gene Ontology: Cellular component=chloroplast; Biological process =cell redox homeostasis
  Homolog annotation: Hit_ID=B6UAV4; Match level="QueryCoverage=100%, HitCoverage=100%, E-value=1e-112, Identity=80%"; Hit description =Thiol disulfide interchange protein txlA
  Pfam annotation: Domain name=AhpC-TSA; Domain location=101-212; Score= -11.6; E_value=0.0074; Accession=PF00578.13; Description=AhpCTSA family
  Pfam annotation: Domain name=Thioredoxin; Domain location=117-225; Score=41.5; E_value=3.2e-09; Accession=PF00085.12; Description =Thioredoxin
  Pfam module annotation: Pfam domain module=AhpC-TSA::Thioredoxin; Domain location=101-212::117-225
  Subcellular localization annotation: CTP_CleavageSite=64; ConfidenceScore=5.35e-01
MASVASSRCPGLLLRPSLAGARCCPRPSSSLRLRSRWGRRHPRTLACVAPPDSAEPQTDEHTVKAESTEEEAQTTSTTQDAGLPALPNKDLNRRVALLSTLGAVALFASQRLNLSEASLKDLAANAVPYEEALSNGKPTVVEFYADWCEVCRELAPDIYQVEQQYKDRVNFVMLNVDNTKWEQELDEFGVEGIPHFAFLDKEGNEEGNVVGRLPKQYFLDNVVALASGDPNIPHARVVGQFSSAESRKVHQVADPRSHG

SEQ ID NO: 88014 - protein, 71 aa, Setaria italica
  Transcript Sequence Number=SeqID_22040
  Gene Ontology: Cellular component=chloroplast; Biological process =cell redox homeostasis
  Homolog annotation: Hit_ID=B6UAV4; Match level="QueryCoverage=87%, HitCoverage=23%, E-value=4e-27, Identity=95%"; Hit description=Thiol disulfide interchange protein txlA
GLFPSIFVLFLGKLGNEEGNVVGRLPKQYFLDNVVALASGDPNIPHARVVGQFSSAESRKVHQVADPRSHG

SEQ ID NO: 88015 - protein, 336 aa, Setaria italica
  Transcript Sequence Number=SeqID_22041
  Gene Ontology: Mol. function=oxidoreductase activity; Biological process=oxidation reduction
  Homolog annotation: Hit_ID=Q8W2X5; Match level="QueryCoverage=99%, HitCoverage=97%, E-value=1e-153, Identity=75%"; Hit description =Oxidoreductase, 2OG-Fe oxygenase family protein, expressed
  Pfam annotation: Domain name=2OG-FeII_Oxy; Domain location=187-287; Score=159.2; E_value=1.2e-44; Accession=PF03171.12; Description=2OG -Fe(II) oxygenase superfamily
MADQLISTAVHEELPENYVRPEAQRPRLHEVVSDAQIPVVDLADPDPAAVVASIGEACTTHGFFQVLNHGVPVELMVAMLAVAYEFFRLPAEEKAKLYSDDPGKKMRLSTSFNVRKETVHNWRDYLRLHCYPLEQYVPDWPANPPSFREIVSAYCREVRALGFRLYEAISASLGLEDDYVKRTLGEQEQHMAVNFYPRCPAPELTYGLPAHTDPNALTILLMDQQVAGLQVLNDGRWIAVNPRPNALVINIGDQLQALSNGRYKSVWHRAVVNSDRPRMSVASFLCPCNDVRIGPAAKLVGEGAPAVYRDYTYAEYYGKFWSRNLDQEHCLELFRT

SEQ ID NO: 88016 - protein, 250 aa, Setaria italica
  Transcript Sequence Number=SeqID_22042
  Gene Ontology: Cellular component=mitochondrial membrane; Biological process=intracellular protein transmembrane transport
  Homolog annotation: Hit_ID=B9RD27; Match level="QueryCoverage=75%, HitCoverage=59%, E-value=2e-64, Identity=65%"; Hit description =Import inner membrane translocase subunit tim21, mitochondrial, putative
  Pfam annotation: Domain name=TIM21; Domain location=102-246; Score =43.9; E_value=6.1e-10; Accession=PF08294.3; Description=TIM21
  Subcellular localization annotation: CTP_CleavageSite=2; ConfidenceScore=5.19e-01
ATAAEASARHAPRAPCAGAAISKDVAKAEASSLKNSRWYMTRSNTSGPLTTHSECRKAFPSFMRPSASYSTKASDQNPKQEGKDLSTTEHPFDDITYNIPEKPVTFTEGASYSLVILAGLGIAALAGYAVFKELIFEPKEYKIFGKALARIQSDSQVTARIGHPITGYGQETRNRAARQRIPNKIWTDEDGVEHVEVNFLIRGPHGAGKVYSEMFKDNSDRTWKFTYLVVEIVSPQHGKTQLMLESYLPA

SEQ ID NO: 88017 - protein, 90 aa, Setaria italica
  Transcript Sequence Number=SeqID_22043
RVSPGAIAFEMTLLLAYHLAIIQRACAPCKRAYALFNIFFRSDEACRASAGNLDHVRTLPLSLLLKVKEFLQFYVQHVKRVKFHVEFEIC

SEQ ID NO: 88018 - protein, 88 aa, Setaria italica
  Transcript Sequence Number=SeqID_22044
  Subcellular localization annotation: CTP_CleavageSite=94; ConfidenceScore=5.24e-01
AWTGSSTSRVAWLGCVGSKEFGRGRMGGGASKGLRRVRQSRRRGGQAEPPGEDRAAAGARNRGGRSRRRGRLRRRTLTRFSLPNEVSF

SEQ ID NO: 88019 - protein, 95 aa, Setaria italica
  misc_feature (14)..(14): Xaa can be any naturally occurring amino acid
  misc_feature (22)..(22): Xaa can be any naturally occurring amino acid
  Transcript Sequence Number=SeqID_22045
  Subcellular localization annotation: CTP_CleavageSite=54; ConfidenceScore=5.85e-01
NAHEPPDPASSPSXPSRLLAPXPPPARRNPSSPPWSATATPPAASASAAASPIRGRPTPPMTTTTTTTLRHPLRPSPPPPPGRRTPPTPSRPRPP

SEQ ID NO: 88020 - protein, 222 aa, Setaria italica
  misc_feature (58)..(58): Xaa can be any naturally occurring amino acid
  misc_feature (84)..(84): Xaa can be any naturally occurring amino acid
  misc_feature (114)..(114): Xaa can be any naturally occurring amino acid
  misc_feature (125)..(125): Xaa can be any naturally occurring amino acid
  Transcript Sequence Number=SeqID_22046
  Gene Ontology: Mol. function=transposase activity; Biological process= transposition, DNA-mediated
  Homolog annotation: Hit_ID=Q01N07; Match level="QueryCoverage=72%, HitCoverage=19%, E-value=2e-24, Identity=37%"; Hit description =OSIGBa0126J24.2 protein
IKCDKAQWSEQNTYLLCDLCVEQIRVGNYHKCTMSGRGYKVIAEKYFIKTRLKHDRRXLRNRIHQLKTLYTFWGVLQKQSGLGXHLNVTVYAPNWWWEQNTMVHILCFASSHFXCQLSCLISTFXSLQGKLECKKLKDGPPEYLDQLEEMFHDVVVDGSTSYMAGQEEEEEGAEEGDKEDAEQDGNPDDLDHNPMSTSSRKRSSSTSTRSTATSPGVGRRWG

SEQ ID NO: 88021 - protein, 72 aa, Setaria italica
  Transcript Sequence Number=SeqID_22047
  Gene Ontology: Mol. function=zinc ion binding; Cellular component =intracellular
  Homolog annotation: Hit_ID=B6SXM0; Match level="QueryCoverage=100%, HitCoverage=11%, E-value=9e-31, Identity=87%"; Hit description =ATBRCA1
PELARASKIKCSVCGLKGAALGCLVKSCRKSFHVPCAHKIKGCRWDEENFVMLCPTHSYKKLPCERSKYKKR

SEQ ID NO: 88022 - protein, 139 aa, Setaria italica
  misc_feature (20)..(20): Xaa can be any naturally occurring amino acid
  Transcript Sequence Number=SeqID_22048
  Gene Ontology: Mol. function=nucleotide binding; Biological process =catabolic process
  Homolog annotation: Hit_ID=B9WZD1; Match level="QueryCoverage=63%, HitCoverage=9%, E-value=8e-26, Identity=63%"; Hit description =Dynamin-related protein 5B-2
TPPLPPDSKAGAEEEEEEEXRELLYEAYNELQALAAELGGAAGAPAVVVVGHQTDGKSALVEALMGFQFNHVGGGTKTRRPVALHLRFNPRCDAPRCRLLAGPGDEVEDAGVAGRPMPLADIQAYIEAENMRLENDPCQ

SEQ ID NO: 88023 - protein, 297 aa, Setaria italica
  Transcript Sequence Number=SeqID_22049
  Gene Ontology: Mol. function=nucleoside-triphosphatase activity; Cellular component=plasma membrane
  Homolog annotation: Hit_ID=B8ACD0; Match level="QueryCoverage=95%, HitCoverage=42%, E-value=1e-134, Identity=83%"; Hit description =Carbonic anhydrase
  Pfam annotation: Domain name=AAA; Domain location=107-297; Score =57.7; E_value=4.3e-14; Accession=PF00004.21; Description=ATPase family associated with various cellular activities (AAA)
TGRRRADGGGAGEAFRLSFDGRHKDLVLGAYLPFVMARVEAMAREQRQAKLYSNEWGKWRPVRLRNASTFATLAMDAALRQDVVGDLDMFLGRREYYGRTGRAWKRGYLIHGPPGTGKSSLVAAISNHLHFDVYDLDLGAVRSNTELRKLLIRMKNRSILLVEDVDCALAAAPRRREADGGFDGNIPSSKHHKVTLSGLLNMVDGLWSCSGHERILIFTTNHMDRLDPALLRPGRMDKHIHMGYCGFGAFKELAATYHGVVDDGHPLFPEVEALLREVDAAPAEIAERMLATDDADA

SEQ ID NO: 88024 - protein, 202 aa, Setaria italica
  misc_feature (177)..(177): Xaa can be any naturally occurring amino acid
  misc_feature (197)..(197): Xaa can be any naturally occurring amino acid
  Transcript Sequence Number=SeqID_22050
  Gene Ontology: Mol. function=phospholipase D activity; Cellular component=membrane; Biological process=phosphatidylcholine metabolic process
  Homolog annotation: Hit_ID=Q75KP6; Match level="QueryCoverage=100%, HitCoverage=23%, E-value=2e-65, Identity=64%"; Hit description =Phospholipase D alpha 1, putative, expressed
YCAHDANNIIFTVKADNAIGATLIGRAYLPTRDVVAGQKVERWLDICDEKRQPLEGGDKIHVQLQFTDVAADPEGGWGAGVGGAGPYGGVPRTFFEQRRGCRVRLYEDAHVFDGFAPHVQLDGGRPYEPRRCWEDVFEAINNARRMVYIAGWSVNTGVQLVRDPRRPSSETLGQLAXRKADEGVTVLMLVWDDRTSXGLGPI

SEQ ID NO: 88025 - protein, 238 aa, Setaria italica
  Transcript Sequence Number=SeqID_22051
  Gene Ontology: Mol. function=acyl-[acyl-carrier-protein] desaturase activity; Cellular component=chloroplast; Biological process=fatty acid metabolic process
  Homolog annotation: Hit_ID=B6UI69; Match level="QueryCoverage=100%, HitCoverage=62%, E-value=1e-134, Identity=95%"; Hit description=Acyl- desaturase
  Pfam annotation: Domain name=FA_desaturase_2; Domain location=1-238; Score=440.9; E_value=1.9e-129; Accession=PF03405.6; Description =Fatty acid desaturase
AARSLLPLLKPVEECWQPTDFLPDSSSEMFEHEVRELRARAAGLPDEYFVVLVGDMITEEALPTYQTMINTLDGVRDETGASACPWAVWTRTWTAEENRHGDILGKYMYLSGRVDMRMVEKTVQYLIGSGMDPGTENNPYLGFVYTSFQERATAVSHGNTARLAKAHGDDVLARTCGTIAADEKRHETAYGRIVEQLLQLDPDGAVLAIADMMRKRITMPAHLMHDGRDMGLFEHFAA

SEQ ID NO: 88026 - protein, 254 aa, Setaria italica
  Transcript Sequence Number=SeqID_22052
  Gene Ontology: Mol. function=structural constituent of ribosome; Cellular component=ribonucleoprotein complex; Biological process =translation
  Homolog annotation: Hit_ID=B4FQM1; Match level="QueryCoverage=94%, HitCoverage=94%, E-value=6e-81, Identity=71%"; Hit description=50S ribosomal protein L21
  Pfam annotation: Domain name=Ribosomal_L21p; Domain location=140-236; Score=167.8; E_value=3.2e-47; Accession=PF00829.13; Description =Ribosomal prokaryotic L21 protein
  Subcellular localization annotation: CTP_CleavageSite=64; ConfidenceScore=5.06e-01
MASRRYLLRLLSTRLVPQRSQTLTPVSIATRTLASLSEPLGNPAPRALASPRLYYPSRCHFATRSSGDEDDDEDEDEDEEGHYDDDGSEGEWGEEDEAVAAKKPSGKTEEEMVAEAAEIGYKVVGPLGPDEKPFKPYEPVFAVVQIGSHQFKVSNGDSIFTERLKFCDVNDKLVLNRVLMLGSQTQTVIGRPILSEATVHAVVEEHALDAKVIVFKKKRRKNYRRTKGHRQELTKLRITNIEGIDKPETVAVAA

SEQ ID NO: 88027 - protein, 95 aa, Setaria italica
  Transcript Sequence Number=SeqID_22053
  Homolog annotation: Hit_ID=B9SFK0; Match level="QueryCoverage=100%, HitCoverage=18%, E-value=1e-17, Identity=50%"; Hit description =Pentatricopeptide repeat-containing protein, putative
  Pfam annotation: Domain name=PPR; Domain location=22-56; Score=13.0; E_value=0.26; Accession=PF01535.12; Description=PPR repeat
  Pfam annotation: Domain name=PPR; Domain location=57-91; Score=30.1; E_value=8.9e-06; Accession=PF01535.12; Description=PPR repeat
  Pfam module annotation: Pfam domain module=PPR::PPR; Domain location =22-56::57-91
DNCLMTFRALESDRRCGPPNVDSYNILISLFGRSLLVDHMEATLGSLDASGHPRTIGTYNAIIAGYVTAWMSDKMEAVFQEMLSGHVAPDATTHL

SEQ ID NO: 88028 - protein, 245 aa, Setaria italica
  Transcript Sequence Number=SeqID_22054
  Gene Ontology: Mol. function=electron carrier activity; Cellular component=nucleus; Biological process=oxidation reduction
  Homolog annotation: Hit_ID=Q8L4I4; Match level="QueryCoverage=83%, HitCoverage=31%, E-value=9e-84, Identity=73%"; Hit description =Putative cytochrome P450
  Pfam annotation: Domain name=p450; Domain location=1-239; Score= -38.5; E_value=8.6e-10; Accession=PF00067.14; Description=Cytochrome P450
NRRLRERDACEPRKNDFLDLLLDATGGGLTTAGLDRDTLRSFFTDLFAAGSDTSSSTVEWAMVELLRNPVSMAKLSNELVEVIGSRRKIEESDIGQLPYLQAVIKETFRLHPPVPLLLPRQAEAATEIMGYMIPKGARVLINVWAMGRDNDIWPEPEKFMPERFLESMIDFRGGDFELIPFGAGRRICPGMALATRMVHLVLASLLNQFKWRLPAEVERNGVEMAEKFGVTLKKASPLCAIATPI

SEQ ID NO: 88029 - protein, 347 aa, Setaria italica
  Transcript Sequence Number=SeqID_22055
  Gene Ontology: Mol. function=transferase activity, transferring glycosyl groups; Biological process=metabolic process
  Homolog annotation: Hit_ID=Q852C2; Match level="QueryCoverage=100%, HitCoverage=74%, E-value=3e-96, Identity=49%"; Hit description =Putative UDP-glucosyltransferase
  Pfam annotation: Domain name=UDPGT; Domain location=1-345; Score= -112.9; E_value=2.4e-05; Accession=PF00201.10; Description=UDP -glucoronosyl and UDP-glucosyl transferase
VNCLVVDSNLRGIQLVAEELGVPTLVLRTGGAACLVAYMAFPALCDKGLLPPASQDKVQLDMPLDELTPLRLRDMVFSRTTTHANMRRCLQDLLDAGSSSSGIILNTFQDLENSDVQKISNGLGVPLYTIGPLHKISSGTEGSLLAQDQTCLKWLDKQEADSVLYVSFGSLASMDEKEMLETAWGLANSQMPFLWVIRHNMVKSSHQMSIPEGFEEATRGRGMVVTWAPQQEVLGHHAIGGFWTHNGWNSTLESICEGVPMICRPQFADQMINMRYVQEVWKIGFEIEGELERGEIEMAIKKLLCTEEGRQMRLRAKDLQDKAVKCIEEEGSSKSAMESLLKRIMSF

SEQ ID NO: 88030 - protein, 134 aa, Setaria italica
  Transcript Sequence Number=SeqID_22056
  Gene Ontology: Mol. function=nucleoside-triphosphatase activity; Cellular component=intracellular; Biological process=regulation of transcription, DNA-dependent
  Homolog annotation: Hit_ID=B9S5U3; Match level="QueryCoverage=67%, HitCoverage=1%, E-value=9e-09, Identity=38%"; Hit description=ATP binding protein, putative
YLWFNGWLASLSLLNLKSINLDTLLLKRLSKCAQKDPSEAHEIIVNSGYLLTYAKNYSLGSSSRSPLEYTQHQIIWWICDAWATVDNVHVELANSILEMWYNYHSSLWTYCSGSPKSLSVTHDETCDLAQLPCT

SEQ ID NO: 88031 - protein, 160 aa, Setaria italica
  Transcript Sequence Number=SeqID_22057
  Homolog annotation: Hit_ID=Q7XGZ6; Match level="QueryCoverage=71%, HitCoverage=28%, E-value=3e-16, Identity=42%"; Hit description=F-box domain containing protein, expressed
CCSGPFQVVLLGRTARRIFACVYSSETGAWGNCTSILRGHFRAVSANHSSTRVGNSICWLLTGQSLAILEFDMHLQRLAVIEVPSDALDPDNFIQVSIMPADGGGLGFLVLSYSIIQLWRRKDTCDGVAEWVLRNTIEMSSTLSLRPQSLVENPPLILGF

SEQ ID NO: 88032 - protein, 102 aa, Setaria italica
  misc_feature (84)..(102): Xaa can be any naturally occurring amino acid
  Transcript Sequence Number=SeqID_22058
TELGRCGGLLVKIGGSWRVETNWRILSCGLCSVVSTHPSKALACSLNRSSGFLVCALLFGVHVYVHDILPKIPYAIIKIQFPSXXXXXXXXXXXXXXXXXXX

SEQ ID NO: 88033 - protein, 58 aa, Setaria italica
  Transcript Sequence Number=SeqID_22059
YKYPEFLIQRWNPTMKPWHIMRHKNIQSTSLILTYTNSYIVFPNTQDHISYQKNPNPL

SEQ ID NO: 88034 - protein, 49 aa, Setaria italica
  Transcript Sequence Number=SeqID_22060
  Gene Ontology: Mol. function=nucleic acid binding
  Homolog annotation: Hit_ID=Q8W121; Match level="QueryCoverage=79%, HitCoverage=5%, E-value=3e-11, Identity=76%"; Hit description =Chromatin complex subunit A101
YYRTTSVEVSLCGPPGAADAAPLIPLKGPGWEVVVPTKSGGGMLSSLTS

SEQ ID NO: 88035 - protein, 246 aa, Setaria italica
  Transcript Sequence Number=SeqID_22061
  Gene Ontology: Mol. function=DNA topoisomerase (ATP-hydrolyzing) activity; Cellular component=mitochondrion; Biological process=DNA topological change
  Homolog annotation: Hit_ID=Q7XZF7; Match level="QueryCoverage=93%, HitCoverage=24%, E-value=1e-104, Identity=80%"; Hit description =Probable DNA gyrase subunit A, chloroplastic/mitochondrial
  Pfam annotation: Domain name=DNA_gyraseA_C; Domain location=131-180; Score=22.8; E_value=0.0014; Accession=PF03989.5; Description=DNA gyrase C-terminal domain, beta-propeller
  Pfam annotation: Domain name=DNA_gyraseA_C; Domain location=16-63; Score=39.5; E_value=1.3e-08; Accession=PF03989.5; Description=DNA gyrase C-terminal domain, beta-propeller
  Pfam annotation: Domain name=DNA_gyraseA_C; Domain location=189-238; Score=41.1; E_value=4.4e-09; Accession=PF03989.5; Description=DNA gyrase C-terminal domain, beta-propeller
  Pfam annotation: Domain name=DNA_gyraseA_C; Domain location=64-113; Score=46.6; E_value=9.9e-11; Accession=PF03989.5; Description=DNA gyrase C-terminal domain, beta-propeller
  Pfam module annotation: Pfam domain module=DNA_gyraseA_C::DNA_gyraseA_ C::DNA_gyraseA_C::DNA_gyraseA_C; Domain location=131-180::16-63::189 -238::64-113
GERITSIIPVSEFGEDQYLVMLTVNGYIKTVPLNAFSSIRSSGIISIQLVPGDELKWVRRCGNDDLVALASQKGKVIVNSCDKIRPLGRNTRGACAMKLKDGDKMAAMDIIPATVHKMPETYNSRSRDLSPPWLLFIAENGLGKRVPLNAFRQSRFNLVGLAGYKLPEDCRLAAVFVAGLSLGDDGESDEQVVLVSQSGTVNRIKVKDISIQSRYARGVILMRLEHAGKIQSASLISAAAAEVAED

SEQ ID NO: 88036 - protein, 133 aa, Setaria italica
  misc_feature (24)..(24): Xaa can be any naturally occurring amino acid
  misc_feature (67)..(67): Xaa can be any naturally occurring amino acid
  misc_feature (98)..(98): Xaa can be any naturally occurring amino acid
  Transcript Sequence Number=SeqID_22062
  Subcellular localization annotation: CTP_CleavageSite=28; ConfidenceScore=5.66e-01
PSPTPAPTPPPRTAPTPAPRSAPXPAPRAPQAPSPTPAPTPAPRTAPTPAPTPAPRSAPTPAPRAPXVPSPTPAPTPAPRTAPTPAPTPAPRSAPTPXPRAPQAPSPTPAPTPAPRTAPTPAPTPTPRSAPYP

SEQ ID NO: 88037 - protein, 124 aa, Setaria italica
  Transcript Sequence Number=SeqID_22063
  Subcellular localization annotation: CTP_CleavageSite=4; ConfidenceScore=5.65e-01
PAPRAAPRTAPTPAPRSAPTPAPRAPQAPSPTPAPTPVPMLAPTPVPAPTPTPARTPAPTPAPTPTPTSAPTPAPTPVPTPSPTPAPTSTPTPVPTPAPTPIPKPAPMPTLTPPPATPPPPPPP

SEQ ID NO: 88038 - protein, 88 aa, Setaria italica
  Transcript Sequence Number=SeqID_22064
  Gene Ontology: Cellular component=integral to membrane; Biological process=transport
  Homolog annotation: Hit_ID=B6U001; Match level="QueryCoverage=100%, HitCoverage=25%, E-value=3e-39, Identity=87%"; Hit description =Solute carrier family 35, member F1
  Pfam annotation: Domain name=DUF914; Domain location=2-88; Score= -194.7; E_value=0.0073; Accession=PF06027.4; Description=Eukaryotic protein of unknown function (DUF914)
MAPPPRWLRREVFVGLALGQFVSLLITSTGFSSSELARRGVNAPTSQSLLNYILLALVYGGTLIYRRQHLMIKWYYYLLFGIIDVEAN

SEQ ID NO: 88039 - protein, 80 aa, Setaria italica
  Transcript Sequence Number=SeqID_22065
TMAMQFHSYGFQQCRNLYRCSCPSVSLSLKAHVASFVIHIVSPGITGMSLVSVGDHIHYVDVVFVLTNQCLGSKISFLQS

SEQ ID NO: 88040 - protein, 154 aa, Setaria italica
  Transcript Sequence Number=SeqID_22066
  Homolog annotation: Hit_ID=Q8H3E3; Match level="QueryCoverage=98%, HitCoverage=9%, E-value=2e-28, Identity=52%"; Hit description =Transcription factor (PWWP domain protein)-like protein
NLEAFTEEKKNSLLVKRHGKGADFVRAVKEIVEIYDSLKYEINNENNKSVLTENNLRMHVENHVNNNSSLDTGDPEDGTDLANDNKMEDCPTSSMDHNMDNTPRSNINTMVGEHCVVNSAHGNPIEKSPILHDSRHSPLHASSCSKKRQEDFTA

SEQ ID NO: 88041 - protein, 58 aa, Setaria italica
  Transcript Sequence Number=SeqID_22067
  Homolog annotation: Hit_ID=Q7XUW4; Match level="QueryCoverage=82%, HitCoverage=6%, E-value=3e-12, Identity=81%"; Hit description =OSJNBa0027P08.8 protein
MEREMSEEYELNEIDAGTLHGSVGSRLSLFARELKSRRSSRHSGSALRLPQSCCYGSF

SEQ ID NO: 88042 - protein, 53 aa, Setaria italica
  Transcript Sequence Number=SeqID_22068
  Gene Ontology: Mol. function=protein dimerization activity
  Homolog annotation: Hit_ID=Q8VWG4; Match level="QueryCoverage=98%, HitCoverage=14%, E-value=6e-16, Identity=75%"; Hit description =Putative o-methyltransferase ZRP4
AKEAQVLWDMFMMRHVGVEREEHEWKRIFLEAGFSDYKITPTLGFQSIIEVFP

SEQ ID NO: 88043 - protein, 89 aa, Setaria italica
  Transcript Sequence Number=SeqID_22069
FAVRSDYLGTAAQVEKLPETRFIEPARLSAPSSVIGLEIRTSISTLSNGDHWRVNHHVEKSRKGIIGYYTHEKHVNPASLQSWCAAWHG

SEQ ID NO: 88044 - protein, 97 aa, Setaria italica
  Transcript Sequence Number=SeqID_22070
  Gene Ontology: Mol. function=protein serine/threonine kinase activity; Cellular component=plasma membrane; Biological process =protein amino acid phosphorylation
  Homolog annotation: Hit_ID=B9S062; Match level="QueryCoverage=100%, HitCoverage=10%, E-value=3e-19, Identity=52%"; Hit description =Serine/threonine-protein kinase PBS1, putative
ELVDPVLGAAPSALAGLEQFVDLALRCVEEAGADRPSMGEVVGEIERMVKMAGGGPGHESASESMSYASRTPRHPYGGDSPFDYSGGGMPSTRVEPK

SEQ ID NO: 88045 - protein, 54 aa, Setaria italica
  Transcript Sequence Number=SeqID_22071
  Homolog annotation: Hit_ID=B6TJI3; Match level="QueryCoverage=92%, HitCoverage=11%, E-value=4e-16, Identity=80%"; Hit description =Protein Z
MIKVIDEASFSTGIGKPSPAEHFVADHPFFFVIREEVSGSVIFMGHMLDPSSPS

SEQ ID NO: 88046 - protein, 79 aa, Setaria italica
  Transcript Sequence Number=SeqID_22072
  Gene Ontology: Mol. function=serine-type endopeptidase inhibitor activity
  Homolog annotation: Hit_ID=B6TJI3; Match level="QueryCoverage=100%, HitCoverage=17%, E-value=1e-28, Identity=77%"; Hit description =Protein Z
DMVKEDEPSGPLFLSDVLHKAVLEVNDKVIDEASFSTGIGKPSPAEHFVADHPFFFVIREEVSGSVIFMGHMLDPSSPS

SEQ ID NO: 88047 - protein, 501 aa, Setaria italica
  misc_feature (99)..(99): Xaa can be any naturally occurring amino acid
  misc_feature (370)..(370): Xaa can be any naturally occurring amino acid
  Transcript Sequence Number=SeqID_22073
  Gene Ontology: Mol. function=magnesium ion binding; Biological process=metabolic process
  Homolog annotation: Hit_ID=A5YZT3; Match level="QueryCoverage=87%, HitCoverage=69%, E-value=1e-151, Identity=59%"; Hit description =Monoterpene synthase
  Pfam annotation: Domain name=Terpene_synth; Domain location=80-271; Score=200.2; E_value=5.7e-57; Accession=PF01397.13; Description =Terpene synthase, N-terminal domain
  Pfam annotation: Domain name=Terpene_synth_C; Domain location=284 -501; Score=234.2; E_value=3.2e-67; Accession=PF03936.8; Description =Terpene synthase family, metal binding domain
  Pfam module annotation: Pfam domain module=Terpene_synth::Terpene _synth_C; Domain location=80-271::284-501
MATFALKPGQCNGSCHLAIVLSQPIGKRPYRSWMCRRRQQYDVLRCRVTHQHPAGGLHDDPDEIDDRPRKNPPRFHPSIWGDFFLHYSNTVACSPTNRXRMAERADKLKEEVADMIERRSSGYSLLQRLHLIHVLQRLCLDHLFEDEINGSFTQIKSADLSGCDLQTVALWFYLLRNHGCRVSQDVFIKFKDEEGNFESNSSEDLLSLYNAAYLGTHGETILDDAVSFSKKCLETTMPHLDPEGLLAREITSALEIPLPRRVKIYELKHYISMYETEATVHETILELAKLNSNLMQLHHQRELKIITRWWKNIQLQSNLSFARDRIVECFRWMAGAYFEPCYSRARIILTQVMAIISIVDDIYDVYGTSXECELFTRCIESWDTKVGQDLPANLKIILECIFDTYKDIEHELETEQKYRLSYLKFVTIDWVRAYTTEVKWRDQRYVPATVEEHLQLSVRSGACHLLSCASFVGMGDIATRESFEWVSSMPEIVHSLCIILR

SEQ ID NO: 88048 - protein, 61 aa, Setaria italica
  Transcript Sequence Number=SeqID_22074
GMPMEVRELVKNYPSRERGDKHGIPRDHRHDHLSTSIYSSVCHRLTSNVRLPSASHVQICA

SEQ ID NO: 88049 - protein, 143 aa, Setaria italica
  misc_feature (26)..(26): Xaa can be any naturally occurring amino acid
  Transcript Sequence Number=SeqID_22075
  Gene Ontology: Mol. function=phosphotransferase activity, alcohol group as acceptor; Cellular component=phosphoinositide 3-kinase complex; Biological process=phosphoinositide-mediated signaling
  Homolog annotation: Hit_ID=Q6B9P2; Match level="QueryCoverage=98%, HitCoverage=74%, E-value=2e-56, Identity=73%"; Hit description =Phosphatydilinositol 3-kinase (Fragment)
  Pfam annotation: Domain name=PI3Ka; Domain location=1-122; Score =91.2; E_value=3.7e-24; Accession=PF00613.12; Description =Phosphoinositide 3-kinase family, accessory domain (PIK domain)
QAIELIGKWEMIDVADALELLSPDFXSDEVRGYAVSVLERADDEELQCYLLQLVQALRFERSDKSRLALFLVNRALSNIEIASFLRWYILVELHSPAYARRYYGTYDMLENSMMKLVGREDGDEDGFRLWHLLARQTDLTALI

SEQ ID NO: 88050 - protein, 80 aa, Setaria italica
  Transcript Sequence Number=SeqID_22076
  Gene Ontology: Mol. function=phosphotransferase activity, alcohol group as acceptor; Cellular component=phosphoinositide 3-kinase complex; Biological process=phosphoinositide-mediated signaling
  Homolog annotation: Hit_ID=Q4QXM0; Match level="QueryCoverage=100%, HitCoverage=9%, E-value=1e-32, Identity=86%"; Hit description =Phosphoinositide 3-kinase
YNILRKSSSLILNLFKLMERSGIPDISADESGGLKLQEKFRLDLDDEEAIHFFQDLINESVSALFPQMVETIHRWAQYWR

SEQ ID NO: 88051 - protein, 596 aa, Setaria italica
  misc_feature (364)..(364): Xaa can be any naturally occurring amino acid
  misc_feature (432)..(432): Xaa can be any naturally occurring amino acid
  Transcript Sequence Number=SeqID_22077
  Gene Ontology: Mol. function=phosphotransferase activity, alcohol group as acceptor; Cellular component=phosphoinositide 3-kinase complex; Biological process=phosphoinositide-mediated signaling
  Homolog annotation: Hit_ID=P42347; Match level="QueryCoverage=99%, HitCoverage=73%, E-value=0.0, Identity=72%"; Hit description =Phosphatidylinositol 3-kinase, root isoform
  Pfam annotation: Domain name=PI3Ka; Domain location=65-249; Score =277.0; E_value=4.2e-80; Accession=PF00613.12; Description =Phosphoinositide 3-kinase family, accessory domain (PIK domain)
  Pfam annotation: Domain name=PI3_PI4_kinase; Domain location=345-540; Score=252.0; E_value=1.4e-72; Accession=PF00454.19; Description =Phosphatidylinositol 3- and 4-kinase
  Pfam module annotation: Pfam domain module=PI3Ka::PI3_PI4_kinase; Domain location=65-249::345-540
PGVEVSSFEHRVVFQESGANFYIPAPVSLSNELVTVWDPELGRTNPSEHKQLKLARSLTRGIVDRDLKPSSNERKLLQTIIKFPPTRTLEVYEKQLVWKFRFSLMSEKKALTKFVRSVDWSDNQEAKQAIELIGKWEMIDVADALELLSPDFESDEVRGYAVSVLERADDEELQCYLLQLVQALRFERSDKSRLALFLVNRALSNIEIASFLRWYILVERHDPTFGKQYNNIYKMLENSMTKFVGREDGGDNGAQLWHSLSLQDKLVVELCSVMKNVRDVHGSAQNKIEKLRKLLPGIFSEVTKPTRSPLALAVIITGVVPQESSIFKSALHPLCITFKTEVGGTSKIIFKKGDDLWQDQLVIXNVSLMDRLLENLDLRLTPYRVLATGQDEGMIEFIPSSSLSQVLSEHRSITSYLQRFHPDEDGPFGITXFIKSCAGYSVITYIMGIGDRHLDNILLTDDGRLFHIDFAFILGRDPKPFPPPMKLCKEMVEAMGGAESQYYLRFKSCCEAYNILRKSSSLILNLFKLMGRSNIPDLSADQNGDVKGVYLLQEKFRLDLDDEEAIHFFQDLIIERVSALFLQMFETIHRWAQYWR

SEQ ID NO: 88052 - protein, 317 aa, Setaria italica
  Transcript Sequence Number=SeqID_22078
  Gene Ontology: Mol. function=electron carrier activity; Cellular component=extracellular region; Biological process=response to oxidative stress
  Homolog annotation: Hit_ID=A5H452; Match level="QueryCoverage=92%, HitCoverage=91%, E-value=1e-145, Identity=87%"; Hit description =Peroxidase 70
  Pfam annotation: Domain name=peroxidase; Domain location=39-281; Score=457.2; E_value=2.4e-134; Accession=PF00141.15; Description =Peroxidase
  Subcellular localization annotation: CTP_CleavageSite=44; ConfidenceScore=5.45e-01
MASSLSVVVLILCLAASATAQRLSPTFYSRSCPRALATIKAAVTAAVAQEPRMGASLLRLHFHDCFVQGCDASVLLNDTATFTGEQTAFPNVGSIRGFTVVDNIKAQVEAVCPRTVSCADILAVAARDSVVALGGPSWRVLLGRRDSTTASLSLANSDLPAPSLDLANLTAAFARKGLSRTDLVALSGAHTIGLAQCTNFRARIYNETNINAAFATLRRAGCPAAAGNGDGNLAPLDTATATAFDNAYYTNLRAQSGLLHSDQQLFNGGATDGLVRTYASTPTRFNRDFAASMVRMGNISPLTGSQGQIRLACSRVN

SEQ ID NO: 88053 - protein, 47 aa, Setaria italica
  Transcript Sequence Number=SeqID_22079
YQLHHIDHNVMWKENKKATEYIENSHHLNVVMNNPLACFAYPSTTTH

SEQ ID NO: 88054 - protein, 204 aa, Setaria italica
  Transcript Sequence Number=SeqID_22080
QEEAEPKEDKGLKIAKIIYGVLLFGPLSFIGPINTVLEAKEIKTPSCGELSECVGGLLSIGFHMSFHGGWDRRQRAYVRNIAHFSLTIFCSFVIYYLYLLQPSSLANLQWLISMEAILAMGHIVAWVWVVLATTRVASKEENRDSRVLPKNLSMWSKTRQGCTRLRQGWGSMWSKSPARMHKAKARMGVKDEPRVDKVKARVVV

SEQ ID NO: 88055 - protein, 580 aa, Setaria italica
  misc_feature (253)..(253): Xaa can be any naturally occurring amino acid
  Transcript Sequence Number=SeqID_22081
  Gene Ontology: Mol. function=protein serine/threonine kinase activity; Cellular component=plasma membrane; Biological process =protein amino acid phosphorylation
  Homolog annotation: Hit_ID=B6SYS4; Match level="QueryCoverage=97%, HitCoverage=77%, E-value=0.0, Identity=87%"; Hit description=ATP binding protein
  Pfam annotation: Domain name=Pkinase; Domain location=274-576; Score =198.4; E_value=2e-56; Accession=PF00069.17; Description=Protein kinase domain
  Pfam annotation: Domain name=Pkinase_Tyr; Domain location=264-574; Score=-82.7; E_value=3.1e-08; Accession=PF07714.9; Description =Protein tyrosine kinase
  Pfam module annotation: Pfam domain module=Pkinase::Pkinase_Tyr; Domain location=274-576::264-574
MLDDEDDEGKEEDKFVLGAHEGSERVEIGKLGAGHNHRHEHIGGDRCEGCAEVYTCSSPLCGCCGGGLKIDGLEVARSSSSTVYGRYQIMDDQTEILDDCAQGGFQLKQSRDVVFECDMLRDPGRGDDDSELSVVEKELQMLSSFDTDAVANHGVHDFTDNVELDDSSNKNLKSSSDKEYLKEGHRMQPFPESGDPDDAYEFQNVGSLNADVQHSTALKAEEDPETNIDLALSNFHREYEVFELRIIHRKNRXTGFEENKDFPIVLSSVIAGRYYVTEYLGSAAFSKVVQAHDLQTGMDVCLKIIKNDKDFFDQSLDEIKLLKFVNKYDPLDEHHLLRLYDYFYHQEHLFIVTELLRANLYEFQKYNQESGGEVYFTLPRIQAIARQCLEALVYLHHLRIIHCDLKPENILIKSYSRCEIKVIDLGSSCFLTDNLCLYVQSRSYRAPEVILGLPYDQRIDIWSLGCILAELYTGEVLFPNEPVSMMLAQMIGIIGPIDMEMLELGQETQKYFTDDYDLFTKNEETDQLEYLILEKSSLRRHLQCPDSEFLDFLSYLLQINPRKRPTADEALQHPWLSFAY

SEQ ID NO: 88056 - protein, 260 aa, Setaria italica
  misc_feature (125)..(125): Xaa can be any naturally occurring amino acid
  Transcript Sequence Number=SeqID_22082
  Gene Ontology: Mol. function=nucleotide binding; Biological process =defense response
  Homolog annotation: Hit_ID=Q5Z5Z4; Match level="QueryCoverage=91%, HitCoverage=17%, E-value=3e-28, Identity=38%"; Hit description =Putative Pib
SNVGAAGGKVILKELRNLTQLRKLGVSGVSKKNGKEFCSAILCHSRLESLSVWLNKDNQDCLDGMVHGNTNETSGPVNKLQSLKLYGPVEKLATWTEQLNNLRKLNLEISTLSEADIKVLGALKXLRILRLCINPQQNGNLKFYVEIAGVEDRCYEMIKVLEIGSRSNLHLTFGSLAMKNLELLTAGSCSNGSQLRFDGLKHLSKLKDVRVIGSKDETLKKNLKDQFADHTSKPALKLEEVIPPTQASTGRNDQHYYSFP

SEQ ID NO: 88057 - protein, 68 aa, Setaria italica
  Transcript Sequence Number=SeqID_22083
  Gene Ontology: Mol. function=histone-lysine N-methyltransferase activity; Cellular component=nucleus; Biological process=chromatin modification
  Homolog annotation: Hit_ID=B6TYP5; Match level="QueryCoverage=85%, HitCoverage=17%, E-value=3e-24, Identity=91%"; Hit description =Histone-lysine N-methyltransferase SUVR3
AVGEFLTTEEARRRHRLYDELASAGKLSPALIVIREHLPSGKACLRVNIDATKVGNVARFYQPISIVV

SEQ ID NO: 88058 - protein, 151 aa, Setaria italica
  Transcript Sequence Number=SeqID_22084
  Gene Ontology: Mol. function=histone-lysine N-methyltransferase activity; Cellular component=nucleus; Biological process=chromatin modification
  Homolog annotation: Hit_ID=B6TYP5; Match level="QueryCoverage=100%, HitCoverage=43%, E-value=5e-70, Identity=88%"; Hit description =Histone-lysine N-methyltransferase SUVR3
  Pfam annotation: Domain name=SET; Domain location=1-131; Score=71.8; E_value=2.5e-18; Accession=PF00856.20; Description=SET domain
WGLHAAEALGRRQFVCEYAGEFLTTEEARRRHRLYRIEDLDLLAGKLSPALIVIREHLPSGKACLRVNIDATKVGNVARFINHSCDGGNLHPVLVRSSGSLLPRLCFFAARDIVEGEELTFSYGDARVRPKGLPCFCGSSGCCGVLPSEET

SEQ ID NO: 88059 - protein, 51 aa, Setaria italica
  Transcript Sequence Number=SeqID_22085
HNSPVFKRKLLIVRPISVYGFIALLPRLSCHETVTLIARFHRQPITFNFCI

SEQ ID NO: 88060 - protein, 111 aa, Setaria italica
  Transcript Sequence Number=SeqID_22086
  Gene Ontology: Mol. function=electron carrier activity; Cellular component=extracellular region; Biological process=response to oxidative stress
  Homolog annotation: Hit_ID=B4FG25; Match level="QueryCoverage=65%, HitCoverage=19%, E-value=4e-18, Identity=68%"; Hit description =Peroxidase 12
MTTTRRGSGVVLLAMLVAASSALPLPLETMTNDTSAPILSVDFHALSCPNLHGMVSSAVWAARSNPHGGAQITAGLLRIFFHDCFPQGCDASILLDGWNSEKHKIQNQGLQ

SEQ ID NO: 88061 - protein, 263 aa, Setaria italica
  Transcript Sequence Number=SeqID_22087
  Gene Ontology: Mol. function=pyridoxal phosphate binding; Biological process=amino acid metabolic process
  Homolog annotation: Hit_ID=A5HUN0; Match level="QueryCoverage=97%, HitCoverage=76%, E-value=1e-128, Identity=86%"; Hit description =Serine racemase
  Pfam annotation: Domain name=PALP; Domain location=30-263; Score =113.1; E_value=9.2e-31; Accession=PF00291.17; Description=Pyridoxal -phosphate dependent enzyme
MGSRDDSSDITRGQGYAADIDSIREAQARIAPYVHRTPVLSSTSIDAIAGKQLFFKCECFQKAGAFKIRGASNSIFALDDEQASKGVVTHSSGNHAAAVALAAKLRGIPAHIVIPKNAPACKVDNVKRYGGHIIWSDVSIESRESVCKRVQEETGAVLIHPFNNKYTISGQGTVSLELLEQVPEIDTIIVPISGGGLISGVTLAAKAINPSIRILAAEPKGADDSAQSKAAGRIITLPSTNTIADGLRAFLGDLTWPVVRDLV

SEQ ID NO: 88062 - protein, 157 aa, Setaria italica
  misc_feature (43)..(43): Xaa can be any naturally occurring amino acid
  Transcript Sequence Number=SeqID_22088
  Gene Ontology: Mol. function=pyridoxal phosphate binding; Biological process=amino acid metabolic process
  Homolog annotation: Hit_ID=A5HUN0; Match level="QueryCoverage=98%, HitCoverage=45%, E-value=2e-62, Identity=81%"; Hit description =Serine racemase
FSSGQGTVSLELLEQVPEIDTIIVPISGGGLISGVTLAAKAIXNPSIRILAAEPKGADDSAQSKAAGRIITLPSTNTIADGLRAFLGDLTWPVVRDLVDDVIVVDDNAIVDAMKMCYEILKVAVEPSGAIGLAAVMSDEFKQSSAWHGSSKIGIIVS

SEQ ID NO: 88063 - protein, 75 aa, Setaria italica
  misc_feature (43)..(43): Xaa can be any naturally occurring amino acid
  Transcript Sequence Number=SeqID_22089
  Gene Ontology: Mol. function=phosphoenolpyruvate carboxykinase (ATP) activity; Biological process=gluconeogenesis
  Homolog annotation: Hit_ID=Q5VSV8; Match level="QueryCoverage=61%, HitCoverage=9%, E-value=1e-10, Identity=67%"; Hit description =OSJNBa0009P12.18 protein
ILTLKEDDAPAYLINAKHSGKYIDGKGLMKLLELALSHNLPDXKTEDFRVGELKGKYRSFLSSKFGNRLPEDFSF

SEQ ID NO: 88064 - protein, 153 aa, Setaria italica
  Transcript Sequence Number=SeqID_22090
MHESIDKQFTCKEVSNSALFRSFQQLLLLQEAPKAKISPKRGYYFQKQKLEKLVLHYQPKSSSPVISRAFPPNCFSLSLLKSQPVTALILIRRPRTCRLPHLSANVPSRAAVALILLVPRRRPLPSTAAAPSRDAAPTHLRRHRPLLPPPPKS

SEQ ID NO: 88065 - protein, 324 aa, Setaria italica
  Transcript Sequence Number=SeqID_22091
  Gene Ontology: Mol. function=nucleoside-triphosphatase activity; Cellular component=membrane; Biological process=transport
  Homolog annotation: Hit_ID=Q8GU83; Match level="QueryCoverage=100%, HitCoverage=22%, E-value=1e-159, Identity=82%"; Hit description=PDR -like ABC transporter
  Pfam annotation: Domain name=ABC_tran; Domain location=171-324; Score= 23.2; E_value=7e-08; Accession=PF00005.19; Description=ABC transporter
  Pfam annotation: Domain name=PDR_assoc; Domain location=22-85; Score =107.6; E_value=4.3e-29; Accession=PF08370.3; Description=Plant PDR ABC transporter associated
  Pfam module annotation: Pfam domain module=ABC_tran::PDR_assoc; Domain location=171-324::22-85
WLSPLSYAEIGLTGNEFLAARWLKYTVSGVTLGRRILMDRGLNFSSYFFWISIGALIGFILLFNIGFAIGLTVKRPPGTSRAIISRDNLTTFNGKDQRISKNTEDRMHKKQAENSSTPNRTGRMVLPFTPLAISFQDVNYYVDTPAEMREQGYMERKLQLLHNITGAFQPGVLSALMGVTGAGKTTLLDVLAGRKTGGVIEGDIKIGGYPKVQQTFARISGYCEQTDVHSPQITVGESVAYSAWLRLPTEIDSKTRNEFVNQVLETIELDEIRDALVGIPGINGLSTEQRKRLTIAVELVSNPSIIFMDEPTSGLDARAAAIVM

SEQ ID NO: 88066 - protein, 173 aa, Setaria italica
  Transcript Sequence Number=SeqID_22092
  Gene Ontology: Mol. function=microtubule motor activity; Cellular component=microtubule associated complex; Biological process =microtubule-based movement
  Homolog annotation: Hit_ID=B9T432; Match level="QueryCoverage=97%, HitCoverage=16%, E-value=1e-23, Identity=39%"; Hit description =Bipolar kinesin KRP-130, putative
MMVSEAEQVLDDVLKSTSELKELIALFAELQRAGLKRSLTSAQAMSKTSIDFFKDIRIHVSRLIKLMEQNKIERSTKLLEFENEFKEICVKDEQAALNKIATILSGLTAKKTAMVSAYAGQLNDRYNEEQKHLNLEMSNLQQVSDNGKNETAAYVRVVENQFQEDMSSHAKLN

SEQ ID NO: 88067 - protein, 50 aa, Setaria italica
  Transcript Sequence Number=SeqID_22093
RSPTRAQASRGAKPQTHSESEVLDLRKEDKAGGETRGLLWASWAPHCRPT

SEQ ID NO: 88068 - protein, 269 aa, Setaria italica
  Transcript Sequence Number=SeqID_22094
  Gene Ontology: Mol. function=oxidoreductase activity; Cellular component=cytoplasm; Biological process=metabolic process
  Homolog annotation: Hit_ID=Q49HE1; Match level="QueryCoverage=97%, HitCoverage=68%, E-value=1e-114, Identity=77%"; Hit description=12 -oxo-phytodienoic acid reductase
  Pfam annotation: Domain name=Oxidored_FMN; Domain location=4-240; Score=46.4; E_value=1.2e-14; Accession=PF00724.12; Description =NADH:flavin oxidoreductase  NADH oxidas
LWHVGRVSTTAFQPGGAAPISSTDRAVPPQMSFDGHMEEFSPPRRLETHEIPAVVDDFRRAARNAIDAGFDGVEIHGANGYIIEQFLKDAANDRDDEYGGSLENRCRFALEVVRAVAGEVGAGRVGVRLSPFTDYMGCHDSDPEALAAHLVRELSAAGVLYCHMIEPRMALVDGRRRIPHRLRPYREAFRGTFIAAGGYDREEGNKVVGEGYTDLVSFGRLFLANPDLPRRFELPDAPLNKYDRTTFYTSDPVVGYTDYPFLAGDVQAA

SEQ ID NO: 88069 - protein, 82 aa, Setaria italica
  Transcript Sequence Number=SeqID_22095
MTSKIVCRASVLVFLLIVVSALSVCTEAGGRELAKENVHKVHPAAASEKGATASGDMVKTNDYGRYDPTPAFAKPRFKLIPN

SEQ ID NO: 88070 - protein, 52 aa, Setaria italica
  Transcript Sequence Number=SeqID_22096
PMSVLNLPHHCCASIWQEYFPLVLFILYMADARAHEVFYATKILFGLWICLL

SEQ ID NO: 88071 - protein, 96 aa, Setaria italica
  misc_feature (58)..(58): Xaa can be any naturally occurring amino acid
  Transcript Sequence Number=SeqID_22097
  Gene Ontology: Mol. function=calcium ion binding
  Homolog annotation: Hit_ID=B4G1S0; Match level="QueryCoverage=100%, HitCoverage=100%, E-value=6e-34, Identity=77%"; Hit description=EF hand family protein
  Pfam annotation: Domain name=efhand; Domain location=21-49; Score =39.5; E_value=1.3e-08; Accession=PF00036.24; Description=EF hand
  Pfam annotation: Domain name=efhand; Domain location=57-85; Score =9.5; E_value=2; Accession=PF00036.24; Description=EF hand
  Pfam module annotation: Pfam domain module=efhand::efhand; Domain location=21-49::57-85
MAIRNMTVATRSLDADMTVDEFKEWLRRFDTDRDGRISREELRRAMRAIRARFTGWRXRQGISYADADGDGYIDDSEVDGLIEFAQKNLGLKIVAY

SEQ ID NO: 88072 - protein, 584 aa, Setaria italica
  misc_feature (527)..(527): Xaa can be any naturally occurring amino acid
  misc_feature (571)..(571): Xaa can be any naturally occurring amino acid
  Transcript Sequence Number=SeqID_22098
  Gene Ontology: Mol. function=oxidoreductase activity, acting on other nitrogenous compounds as donors, with NAD or NADP as acceptor; Biological process=nitrate assimilation
  Homolog annotation: Hit_ID=P16081; Match level="QueryCoverage=100%, HitCoverage=63%, E-value=0.0, Identity=81%"; Hit description=Nitrate reductase [NADH] 1
  Pfam annotation: Domain name=Mo-co_dimer; Domain location=349-482; Score=295.4; E_value=1.2e-85; Accession=PF03404.8; Description=Mo-co oxidoreductase dimerisation domain
  Pfam annotation: Domain name=Oxidored_molyb; Domain location=139-324; Score=286.4; E_value=6.2e-83; Accession=PF00174.11; Description =Oxidoreductase molybdopterin binding d
  Pfam module annotation: Pfam domain module=Mo-co_dimer::Oxidored _molyb; Domain location=349-482::139-324
MAASVEPRQQFGRLEAVRGAAANGAKAYPPPASHIPRRADSPVRGCGFPPLVSPPRTKPDEASDDEDDEQEDWRELYGSHLQLEVEPAVHDSRDEGTADAWIERNPSLIRLTGKHPLNCEPPLTRLMHHGFITPAPLHYVRNHGAVPRGDWATWTVEVTGLVKRPARLTMEELARDFPAVEVPVTLACAGNRRKEQNMVQQTVGFNWGPAGVSTSVWRGARLRDVLRRCGVMPRKGGALNVCFEGAEDLPGGGGSKYGTSITREWALDPSRDIMLAYMQNGEPLLPDHGFPVRVIIPGCIGGRMVKWLKRIIVTPVESDNYYHYKDNRVLPSHVDAELANAEAWWYKPEYMINELNINSVITTPGHDEVLPINALTTQRPYTIKGYAYSGGGRKVTRVEVTLDGGETWQVCSLDHPERPTKYGKYWCWCFWSVDVEVLDVLGAKEIAVRAWDEAMNAQPEKLIWNLMGMMNNCWFRVKVNACRPHKGEIGLVFEHPTQPGNQTGGWMARQKHLETAEAAAPGLKRSXTSTPFLNTTDGKQITMSEVRKHASQESAWIVVHGLRSYVLVYLXVSFKDHPGGADSI

SEQ ID NO: 88073 - protein, 237 aa, Setaria italica
  Transcript Sequence Number=SeqID_22099
  Gene Ontology: Mol. function=serine-type endopeptidase activity; Cellular component=chloroplast envelope; Biological process =proteolysis
  Homolog annotation: Hit_ID=B4FNF5; Match level="QueryCoverage=98%, HitCoverage=80%, E-value=1e-114, Identity=87%"; Hit description=ATP -dependent Clp protease proteolytic subunit
  Pfam annotation: Domain name=CLP_protease; Domain location=32-219; Score=197.9; E_value=2.8e-56; Accession=PF00574.15; Description=Clp protease
TPNRRTPTVDGGRGARDVVAMVVPFLRGTAWEQPPPDLASFLYKNRIVYLGMCLVPSVTELMLAEFLYLQYDDAEKPIYLYINSTGTTKNGEKLGYETEALAVYDAMRYVKVPIFTLCVGNAWGEAALLLAAGAKGNRAALPSSSIMIKQPIGRFQGQATDVDIARKEIRNVKIEMVKLLARHIGKPIEEIARDIRRPKYFSPSEAVDYGIIDKVIYNEKIQEDSGVVSELKRSNLI

SEQ ID NO: 88074 - protein, 309 aa, Setaria italica
  misc_feature (194)..(194): Xaa can be any naturally occurring amino acid
  Transcript Sequence Number=SeqID_22100
  Gene Ontology: Mol. function=DNA binding; Cellular component=nucleus; Biological process=regulation of transcription
  Homolog annotation: Hit_ID=A4HRC2; Match level="QueryCoverage=100%, HitCoverage=100%, E-value=1e-110, Identity=68%"; Hit description=NAC transcription factor
  Pfam annotation: Domain name=NAM; Domain location=13-142; Score =246.5; E_value=6.7e-71; Accession=PF02365.7; Description=No apical meristem (NAM) protein
MSISFLSMVEAELPPGFRFHPRDDELICDYLGPKLGGKVGFSGRRPPMVDVDLNKVEPWDLPVAAAVGPREWYFFSLKDRKYATGQRTNRATVSGYWKATGKDRAVARRGALVGMRKTLVFYQGRAPKGRKTEWVMHEYRMEGTLEQSSKDEDWVLCRVICKKKLPGGASSKASRSLATNGGHDTAPTSSPPLXPPLMDTTLAQLQAAMNTTAGAIEQVPCFSSFNNIASNSNSAAAAQPCYLPMVTGSHGMSFLDHGLPELGGCFDPLNCDKKLLKAVLSQFGGEVVPSLPHEMAAGTAATSTWMNHF

SEQ ID NO: 88075 - protein, 109 aa, Setaria italica
  Transcript Sequence Number=SeqID_22101
  Gene Ontology: Mol. function=protein binding; Cellular component =plasma membrane
  Homolog annotation: Hit_ID=Q10R94; Match level="QueryCoverage=99%, HitCoverage=24%, E-value=3e-50, Identity=88%"; Hit description =Lipase, putative, expressed
  Pfam annotation: Domain name=DUF620; Domain location=1-109; Score =100.2; E_value=7e-27; Accession=PF04788.4; Description=Protein of unknown function (DUF620)
MQGLDPVTIASIFSTAEHAGEKQVDGEDCFVMRLDVGPSVLSSWSDGTAEVIRHGLTGFFSQRSGLLARLEDSQLTRIQSPGAPAMYWETTIASAVSDYRAVDGGVAVA

SEQ ID NO: 88076 - protein, 81 aa, Setaria italica
  misc_feature (47)..(47): Xaa can be any naturally occurring amino acid
  misc_feature (67)..(67): Xaa can be any naturally occurring amino acid
  Transcript Sequence Number=SeqID_22102
  Gene Ontology: Mol. function=DNA binding; Cellular component=nucleus; Biological process=regulation of transcription
  Homolog annotation: Hit_ID=B9RS48; Match level="QueryCoverage=95%, HitCoverage=7%, E-value=7e-29, Identity=77%"; Hit description=Myb, putative
  Pfam annotation: Domain name=Myb_DNA-binding; Domain location=21-68; Score=52.0; E_value=2.3e-12; Accession=PF00249.23; Description=Myb -like DNA-binding domain
QCQKGRLPNGRTTGPARRSSKGNWTAEEDDILRKAVETYKGKNWKKXIAECFPGRTDVQCLHRWQKXLNPELVKGPWPKFV

SEQ ID NO: 88077 - protein, 131 aa, Setaria italica
  Transcript Sequence Number=SeqID_22103
  Gene Ontology: Mol. function=DNA binding; Cellular component=nucleus; Biological process=regulation of transcription
  Homolog annotation: Hit_ID=Q84U75; Match level="QueryCoverage=100%, HitCoverage=40%, E-value=3e-61, Identity=86%"; Hit description=R2R3 Myb transcription factor MYB-IF25
  Pfam annotation: Domain name=Myb_DNA-binding; Domain location=14-61; Score=45.9; E_value=1.6e-10; Accession=PF00249.23; Description=Myb -like DNA-binding domain
  Pfam annotation: Domain name=Myb_DNA-binding; Domain location=67-112; Score=50.6; E_value=6.2e-12; Accession=PF00249.23; Description=Myb -like DNA-binding domain
  Pfam module annotation: Pfam domain module=Myb_DNA-binding::Myb_DNA -binding; Domain location=14-61::67-112
MGRAPCCEKVGLKKGRWTKEEDEILGRYIKEHGEGSWRSLPKNAGLLRCGKSCRLRWINYLRADLKRGNISEEEEEMIIKLHATLGNRWSLIAGHLPGRTDNEIKNYWNSHLSRRAADFRDGVVVNVDLSK

SEQ ID NO: 88078 - protein, 67 aa, Setaria italica
  Transcript Sequence Number=SeqID_22104
  Gene Ontology: Mol. function=beta-N-acetylhexosaminidase activity; Biological process=carbohydrate metabolic process
  Homolog annotation: Hit_ID=B6SKN9; Match level="QueryCoverage=100%, HitCoverage=11%, E-value=4e-31, Identity=95%"; Hit description=Beta -hexosaminidase
GRVWPRTSAMAEALWSGNRDASGRKRYAEATDRLTDWRNRMVGRGVRAEPIQPLWCRTRPGMCNAVQ

SEQ ID NO: 88079 - protein, 394 aa, Setaria italica
  Transcript Sequence Number=SeqID_22105
  Gene Ontology: Mol. function=pseudouridine synthase activity; Cellular component=transcription factor complex; Biological process =pseudouridine synthesis
  Homolog annotation: Hit_ID=B6TLN6; Match level="QueryCoverage=100%, HitCoverage=73%, E-value=1e-178, Identity=75%"; Hit description=tRNA pseudouridine synthase family protein
  Pfam annotation: Domain name=PseudoU_synth_1; Domain location=185 -292; Score=18.1; E_value=0.00019; Accession=PF01416.12; Description =tRNA pseudouridine synthase
VRVTNSFSAKKFCDRRRYLYLLPVFALDPSAHPDREAVMASMGSGSELTKCLECSERGRKVPGVMGREGKLPSPGVNGTDAPVEGTVNTHDESGSIGAAKGDPTVSEETQAGNAELGSNGASDVVPSGSADADASIGNEENKLEATATEEKVQGMDFENSNGEEKPPTKSDFSYNDEMKERFNRILKYYVGTHNFHNFTTRTKAEDPAAKRFIISFAADRVVSLDGIDFVRCEVVGQSFMLHQIRKMIGLAVAVMRNCAPESIYDVAFRKDVKLNVPTAPEVGLYLDECMFTSYNKKWKDSHEAVSMEPYCEEAEEFKVKYIFPHIAAMEHKEGAVALWLHSLNHRNYPDFRYMETAGAEAKVGAEVAAGAEVNVGAENDGIEEVQMPSDNVSE

SEQ ID NO: 88080 - protein, 81 aa, Setaria italica
  misc_feature (73)..(73): Xaa can be any naturally occurring amino acid
  Transcript Sequence Number=SeqID_22106
  Gene Ontology: Mol. function=electron carrier activity; Biological process=oxidation reduction
  Homolog annotation: Hit_ID=Q6ZIG7; Match level="QueryCoverage=100%, HitCoverage=15%, E-value=7e-19, Identity=56%"; Hit description =Putative cytochrome P450
MFELMDCAIRQHEERRAAVASAPDGTVKEEDEGILGVLLRIHKEGGLEVPLTMDIVKSLILDLFSGGSDTSGXTLEWAMSE

SEQ ID NO: 88081 - protein, 130 aa, Setaria italica
  Transcript Sequence Number=SeqID_22107
  Gene Ontology: Mol. function=transcription factor activity; Cellular component=nucleus; Biological process=regulation of transcription, DNA-dependent
  Homolog annotation: Hit_ID=B6SSL7; Match level="QueryCoverage=100%, HitCoverage=19%, E-value=3e-59, Identity=87%"; Hit description =Protein BABY BOOM 1
MASANNWLGFSLSGQDNPQANQDSSPAAAGIDISGATDFYGLPTQQGSDGHLGVPGLRDDHASYGIMEAFNRSQQETQDWNMRGLDYNGGASELSMLVGSSGGKRAVEDGEPKLEDFLGGNSFVSEQDQS

SEQ ID NO: 88082 - protein, 119 aa, Setaria italica
  Transcript Sequence Number=SeqID_22108
  Gene Ontology: Mol. function=hydrolase activity, acting on acid anhydrides, catalyzing transmembrane movement of substances; Cellular component=integral to membrane; Biological process =metabolic process
  Homolog annotation: Hit_ID=Q7EZ84; Match level="QueryCoverage=93%, HitCoverage=10%, E-value=9e-45, Identity=81%"; Hit description =Putative calcium-transporting ATPase 8, plasma membrane-type
IEGKVFREMSESARADAADKIIVMGRSSPNDKLLLVQALKKKGHVVAVTGDGTNDAPALHEADIGLSMGISGTEVAKESSDIIILDDDFTSVVKVCLVDRIVEENLTALLHSTVIFSCK

SEQ ID NO: 88083 - protein, 380 aa, Setaria italica
  Transcript Sequence Number=SeqID_22109
  Gene Ontology: Mol. function=hydrolase activity, acting on acid anhydrides, catalyzing transmembrane movement of substances; Cellular component=integral to membrane; Biological process=calcium ion transport
  Homolog annotation: Hit_ID=Q7EZ84; Match level="QueryCoverage=95%, HitCoverage=33%, E-value=0.0, Identity=85%"; Hit description =Putative calcium-transporting ATPase 8, plasma membrane-type
  Pfam annotation: Domain name=Cation_ATPase_C; Domain location=173 -351; Score=197.1; E_value=4.8e-56; Accession=PF00689.13; Description= Cation transporting ATPase, C-terminus
CTTAGVKVRMVTGDNIETAKPIALECGILDANSLISEPVVIEGKVFREMSESARADAADKIIVMGRSSPNDKLLLVQALKKKGHVVAVTGDGTNDAPALHEADIGLSMGISGTEVAKESSDIIILDDDFTSVVKVVRWGRSVYANIQKFIQFQLTVNVAALVINVVAAVSSGDVPLNAVELLWVNLIMDTLGALALATEPPTDNLMKRNPVGRREPLVTNIMWRNLFVQALYQIAILLIFDFAGVRILRLQNESRYNAEKITNTFIFNTFVFCQIFNEFNARKPEERNVFKGVTKNHLFMGIIGITTVLQILIIQFLGKFFKTVRLDWRLWLVSVAIGVISWPLAYLGKFIPVPVRPLQDYFKPRCCRRARRDEEEGRQT

SEQ ID NO: 88084 - protein, 65 aa, Setaria italica
  Transcript Sequence Number=SeqID_22110
DTRSTCLNKHVSGRSLRNDLREKISSKRMNVQTEKSLKTNCFPQYATDASIIQIIKNMHCWIEHI

SEQ ID NO: 88085 - protein, 282 aa, Setaria italica
  Transcript Sequence Number=SeqID_22111
  Gene Ontology: Mol. function=protein serine/threonine kinase activity; Cellular component=chloroplast; Biological process=protein amino acid phosphorylation
  Homolog annotation: Hit_ID=B9RLL2; Match level="QueryCoverage=99%, HitCoverage=49%, E-value=3e-86, Identity=56%"; Hit description =Pentatricopeptide repeat-containing protein, putative
  Pfam annotation: Domain name=PPR; Domain location=12-46; Score=21.7; E_value=0.0031; Accession=PF01535.12; Description=PPR repeat
  Pfam annotation: Domain name=PPR; Domain location=161-195; Score =15.3; E_value=0.14; Accession=PF01535.12; Description=PPR repeat
  Pfam annotation: Domain name=PPR; Domain location=196-230; Score =12.3; E_value=0.31; Accession=PF01535.12; Description=PPR repeat
  Pfam annotation: Domain name=PPR; Domain location=89-123; Score=30.2; E_value=8.4e-06; Accession=PF01535.12; Description=PPR repeat
  Pfam module annotation: Pfam domain module=PPR::PPR::PPR::PPR; Domain location=12-46::161-195::196-230::89-123
KKVANEIFPDDNICTLLVSGYANAGKLDHALRLIGETRRGGFQPGLDAYNAVLDCVCRLCRKKDPLRMPVEAEKFLLDMEANGIPRDAGTFRVLITNLCKIRKTEDAMNLFRRMGEWGCSPDADTYLVLIRSLYQAARISEGDEMMTWMRSAGFGDKLDRKVYYGFIKILCGIERVEHAVKVFRMMKGYGHAPGVKSYSLLIEKLTKHNLGDRANALFREAVARGVTVAPGEYKIDKKYVKAKKEKKVKKRLTLPEKKRLKSKRLYKLRMSFVKKPRRRMRA

SEQ ID NO: 88086 - protein, 104 aa, Setaria italica
  Transcript Sequence Number=SeqID_22112
  Gene Ontology: Mol. function=carbohydrate binding; Cellular component= cytoplasm; Biological process=carbohydrate metabolic process
  Homolog annotation: Hit_ID=B3TLS6; Match level="QueryCoverage=98%, HitCoverage=30%, E-value=6e-32, Identity=61%"; Hit description =Aldose 1-epimerase-like protein
VNDHNYVLEAGKLRLGLRHVAKVVDPSSLRVLDIWADAPGVQFYTGNFLHGIVGKGGVVYGKHAGFCLETQGFPNAVNQPNFPSIVIRPGEKYQHTMLFEFSTE

SEQ ID NO: 88087 - protein, 231 aa, Setaria italica
  Transcript Sequence Number=SeqID_22113
  Gene Ontology: Mol. function=carbohydrate binding; Biological process= carbohydrate metabolic process
  Homolog annotation: Hit_ID=B3TLS6; Match level="QueryCoverage=97%, HitCoverage=66%, E-value=3e-90, Identity=69%"; Hit description =Aldose 1-epimerase-like protein
  Pfam annotation: Domain name=Aldose_epim; Domain location=1-231; Score=113.3; E_value=8.3e-31; Accession=PF01263.12; Description =Aldose 1-epimerase
KSIWEVAEYNKGDNPSITFKYHSKDGEEGYPGDVSVTARYSILPSATLKLEMEATPLNKATPISLAQHTYWNLAGHNSGDVLPHSVQIWGSKITPVDQTSIPTGEFMPVSGTPFDFLTGNRIGSRIDQVPGGYDHNYVLDSGELRLGLRHVAKVVDPSSLRVLDIWADAPGVQFYTGNFLHGIVGKGGVVYGKHRSGFCLETQGFPNAVNQPNFPSIVIRPGEKYQGLDEQ

SEQ ID NO: 88088 - protein, 49 aa, Setaria italica
  Transcript Sequence Number=SeqID_22114
  Gene Ontology: Mol. function=2 iron, 2 sulfur cluster binding; Cellular component=chloroplast; Biological process=electron transport chain
  Homolog annotation: Hit_ID=B6SP22; Match level="QueryCoverage=95%, HitCoverage=29%, E-value=8e-18, Identity=89%"; Hit description =Ferredoxin-6
AGKLASGEVDQSEGSFLDDAQMAEGYVLTCVAYPKADCVIYTHKEEEVH

SEQ ID NO: 88089 - protein, 84 aa, Setaria italica
  Transcript Sequence Number=SeqID_22115
RGISRRPLADGACLSPLLLWQLSWISEKAIVAINVAKLKRAPACIIWASPLFQRRSLHRNRRILSFQLVRCSQISLARRGELQG

SEQ ID NO: 88090 - protein, 84 aa, Setaria italica
  Transcript Sequence Number=SeqID_22116
LHGRRERTLSMTREGMRMSQLAPARTCILFLLIISFRLGRVLRRCNHNFSEVGHHLTYLPTCLPLQDTGQDRTTKLHASPRPSL

SEQ ID NO: 88091 - protein, 242 aa, Setaria italica
  Transcript Sequence Number=SeqID_22117
VFTFAATLPFALTFLLLAKACVAAMLRDRDDGGVAPPRRQQRRLASALPPCGAVVRAYPAVAATHLLNAFLMLSANAAVFSLLLLAFGAADLLGLTSHFWTLALSAAGAIVYSLAIGVATVVCNLAVIVAATEPGCAGHAAVLRACVAIRGRVSTALALALPTNLGMAAAEALFGLRVVAQRRSAGRLAPGVAGEAFSIAYIHAICVVLEIIVSCMFYRSCKRSEADELRELEPEEKGDLQA

SEQ ID NO: 88092 - protein, 206 aa, Setaria italica
  Transcript Sequence Number=SeqID_22118
  Gene Ontology: Mol. function=hydrolase activity
IWFFKLVRATRSKPFWLCLVIYVLWLIEMPWFWGCATSEDGEIAQMYLSGWSMPFHDGGFTGNKLSNPDVLVITLPFLYLVLVPVIVLIYGLFAEKAIAYLRRSRRIEYSADSANMHTESACLLPVAPRALLMSDNMVSMMIQFCGSWTRRALLLACLITAAIHLKLCSKLMSAYGMVPVALSPPLTWMPLLLLGVAAYCTKLHAD

SEQ ID NO: 88093 - protein, 469 aa, Setaria italica
  Transcript Sequence Number=SeqID_22119
  Gene Ontology: Mol. function=transcription regulator activity; Cellular component=nucleus; Biological process=regulation of transcription
  Homolog annotation: Hit_ID=A7LN87; Match level="QueryCoverage=96%, HitCoverage=88%, E-value=0.0, Identity=86%"; Hit description =Pentatricopeptide repeat protein 5
  Pfam annotation: Domain name=PPR; Domain location=159-193; Score =29.2; E_value=1.7e-05; Accession=PF01535.12; Description=PPR repeat
  Pfam annotation: Domain name=PPR; Domain location=194-228; Score =45.7; E_value=1.8e-10; Accession=PF01535.12; Description=PPR repeat
  Pfam annotation: Domain name=PPR; Domain location=229-263; Score =24.5; E_value=0.00045; Accession=PF01535.12; Description=PPR repeat
  Pfam annotation: Domain name=PPR; Domain location=264-298; Score =36.2; E_value=1.3e-07; Accession=PF01535.12; Description=PPR repeat
  Pfam annotation: Domain name=PPR; Domain location=299-333; Score=4.8; E_value=2.4; Accession=PF01535.12; Description=PPR repeat
  Pfam annotation: Domain name=PPR; Domain location=334-368; Score =31.3; E_value=3.9e-06; Accession=PF01535.12; Description=PPR repeat
  Pfam annotation: Domain name=PPR; Domain location=369-403; Score =19.0; E_value=0.02; Accession=PF01535.12; Description=PPR repeat
  Pfam annotation: Domain name=PPR; Domain location=84-118; Score=35.2; E_value=2.6e-07; Accession=PF01535.12; Description=PPR repeat
  Pfam module annotation: Pfam domain module=PPR::PPR::PPR::PPR::PPR::PP R::PPR::PPR; Domain location=159-193::194-228::229-263::264-298::299 -333::334-368::369-403::84-118
GAGAAAAEGVDEAAEAAELVRSLLRRTGGGKERLVPVLDRHVRVVRTEHCFLLFEELGRRDGWLQCLEVFRWMQKQRWYVADNGIYSKLISVMGRKGQIRMAMWLFSQMRNSGCKPDTSVYNSLIGAHLHSRDKSKALAKALGYFEKMKSIERCQPTIVTYNILLRAFAQAGDTKQVDILFKDLDESIVSPDIYTYNGVIDAYGKNGMIKDMESVLQRMKSKQCRPDVITFNILIDSYGRKQTFDKMEQVFKSLLRSKERPTHPTFNSMITNYGKARLREKAESVLEKMEEMGFKPNYVTQECLIMMYAHCDCVSRARQIFDELVTSQNKVHLSSLNAMLDAYCMNGLHSEADRLLDTALQKGIVPSGSTYKLLYKAYTKANDTVLVQKLLKRMNKQGIVPNKKFFLDALEAFGTSERKPRTSSATNSASKPSSDSAGDSQTVDSNKPGDSETVNSNKPKVSVLQVAAT

SEQ ID NO: 88094 - protein, 179 aa, Setaria italica
  Transcript Sequence Number=SeqID_22120
YSFILQYVNADKQKQHEFEAMKTNRRKENFSCPTEAGTGVSAVNDPPKKGLLQCTTATRNTRSSEHTEENKSHQELQCSSRCETTEDVAQDMLNLFLGPLWSKPAGFSKNSEPVESITRNTNNHMPEETDWHSEVQTQGEPVKKSMLTATINHVPKKKGCCSEVPPQGGTNEEINADCD

SEQ ID NO: 88095 - protein, 263 aa, Setaria italica
  misc_feature (35)..(35): Xaa can be any naturally occurring amino acid
  misc_feature (40)..(40): Xaa can be any naturally occurring amino acid
  misc_feature (263)..(263): Xaa can be any naturally occurring amino acid
  Transcript Sequence Number=SeqID_22121
  Gene Ontology: Mol. function=nucleotide binding; Cellular component =intracellular; Biological process=cellular process
  Homolog annotation: Hit_ID=Q6ZJ99; Match level="QueryCoverage=83%, HitCoverage=50%, E-value=1e-117, Identity=91%"; Hit description =Putative GTP-binding protein ERG
  Pfam annotation: Domain name=GTP_EFTU; Domain location=43-222; Score=- 36.2; E_value=1.1e-06; Accession=PF00009.19; Description=Elongation factor Tu GTP binding domain
  Pfam annotation: Domain name=MMR_HSR1; Domain location=46-174; Score =98.1; E_value=3.2e-26; Accession=PF01926.15; Description=GTPase of unknown function
  Pfam annotation: Domain name=Miro; Domain location=47-174; Score =12.6; E_value=0.00072; Accession=PF08477.5; Description=Miro-like protein
  Pfam module annotation: Pfam domain module=GTP_EFTU::MMR_HSR1::Miro; Domain location=43-222::46-174::47-174
WAGRVVDEEDEERSRDVALALLDAAMEPPDEDEDXGEVRXEDQMSLSVGIVGAPNAGKSSLTNTVVGTKVAAVSRKTNTTTHEILGVLTKGNTQICFFDTPGLMLGHHGFPYRDVTVRVESAWSSINLYDVLIVMFDVSRHLNMPDSRVIKLIKRLGTEVNPNQRRILCMNKVDLVEDKKDLLKVAKEFEDLPGYERYFMVSGLKGKGVKDLVQYLMEQAVRRPWDEEPTVMTEEVMKTISLEVVREKMLHHIHQEIPYVIEX

SEQ ID NO: 88096 - protein, 157 aa, Setaria italica
  Transcript Sequence Number=SeqID_22122
  Gene Ontology: Mol. function=transferase activity, transferring glycosyl groups; Biological process=metabolic process
  Homolog annotation: Hit_ID=Q8LEW0; Match level="QueryCoverage=99%, HitCoverage=32%, E-value=2e-52, Identity=57%"; Hit description =Putative glucosyltransferase
STIAALRAEKPFYAVGPVLPAGFARSAVATSMWAESDCSRWLDAQPPGSVLYISFGSYAHVTRRELHEIAAGVLASGARFLWVLRPDVVSSDDPDPLPEGFAAAAAGRGVVVPWCCQVEVLSHAAVGGFLTHCGWNSILESVWAGVPMLCFPLLTDQ

SEQ ID NO: 88097 - protein, 41 aa, Setaria italica
  Transcript Sequence Number=SeqID_22123
NTELIKNGIVLTSVLIWPEKTELDKCVSMHLQILHSTVFIY

SEQ ID NO: 88098 - protein, 136 aa, Setaria italica
  Transcript Sequence Number=SeqID_22124
  Gene Ontology: Mol. function=metal ion binding; Cellular component =nucleus; Biological process=regulation of transcription, DNA -dependent
  Homolog annotation: Hit_ID=Q653Z5; Match level="QueryCoverage=90%, HitCoverage=34%, E-value=1e-18, Identity=47%"; Hit description =Squamosa promoter-binding-like protein 11
VRPFTSPWDSSSDFKLPHAKEIRELSTKVGAITGQVHFDKSHLSNAIPTLSHGKDELLPMKGPDTSVTASKFDGAPDLQRALSLLSAGPCGLPDPVPQASCLIQFTGASENNGDLHLSHGGNSGPASCTDEQHIAP

SEQ ID NO: 88099 - protein, 104 aa, Setaria italica
  Transcript Sequence Number=SeqID_22125
  Gene Ontology: Mol. function=metal ion binding; Cellular component =nucleus; Biological process=regulation of transcription, DNA -dependent
  Homolog annotation: Hit_ID=Q653Z5; Match level="QueryCoverage=100%, HitCoverage=33%, E-value=4e-17, Identity=47%"; Hit description =Squamosa promoter-binding-like protein 11
MEGPDTSVTASKFDGAPDLQRALSLLSAGPCGLPDPVPQASCLIQFTGASENNGDLHLSHGGNSGPASCTDEQHIAPQPQLVRFTMDTSSNVYEPTFFGLNQIN

SEQ ID NO: 88100 - protein, 227 aa, Setaria italica
  Transcript Sequence Number=SeqID_22126
  Gene Ontology: Mol. function=metal ion binding; Cellular component =nucleus; Biological process=regulation of transcription, DNA -dependent
  Homolog annotation: Hit_ID=Q6H509; Match level="QueryCoverage=79%, HitCoverage=66%, E-value=2e-63, Identity=67%"; Hit description =Squamosa promoter-binding-like protein 4
  Pfam annotation: Domain name=SBP; Domain location=26-104; Score =173.4; E_value=6.6e-49; Accession=PF03110.6; Description=SBP domain
APARRGGREREAKRAKGEEGGGAEVRCQVEGCGLELGTAKEYHRKHRVCEAHTKCPRVVVAGQERRFCQQCSRFHALSEFDQKKRSCRRRLSDHNARRRKPQPDAYAFASARLPSSLFDDRRQISFVWNKAPLSHVRPFTSPWDSSSDFKLPHAKEIRELSTKVGAITGQVHFDKSHLSNAIPTLSHGKDELLPMKGLIFQTLFLPKAEMCSSMKKLLLALLSGSPH

SEQ ID NO: 88101 - protein, 135 aa, Setaria italica
  Transcript Sequence Number=SeqID_22127
  Gene Ontology: Mol. function=protein serine/threonine kinase activity; Cellular component=plasma membrane; Biological process =protein amino acid phosphorylation
  Homolog annotation: Hit_ID=Q2RBQ5; Match level="QueryCoverage=47%, HitCoverage=6%, E-value=1e-17, Identity=65%"; Hit description =Leucine-rich repeat family protein, putative, expressed
  Pfam annotation: Domain name=LRR_1; Domain location=12-34; Score =13.3; E_value=0.87; Accession=PF00560.25; Description=Leucine Rich Repeat
  Pfam annotation: Domain name=LRR_1; Domain location=36-59; Score =13.9; E_value=0.65; Accession=PF00560.25; Description=Leucine Rich Repeat
  Pfam module annotation: Pfam domain module=LRR_1::LRR_1; Domain location=12-34::36-59
RAPIPDLSGSSNLSIIHLENNQLTGNVPSYLGSLPKLSELYLQNNKLSGSVPRALLSRSIIFNYSGNMYLGIAKQEKKHVIIIISALLGASLLLAAALCCYMLTRKTIKKTPRRKDQMTTILQGKQGPACTEEFA

SEQ ID NO: 88102 - protein, 145 aa, Setaria italica
  Transcript Sequence Number=SeqID_22128
  Gene Ontology: Mol. function=structural constituent of cell wall
  Homolog annotation: Hit_ID=Q9ZQT1; Match level="QueryCoverage=57%, HitCoverage=23%, E-value=9e-34, Identity=83%"; Hit description=Root cap protein 2
MARLGALLPLALAAVVLLLAVAVDAATPAARPPKAQGPKDPQPPRNEKPKPKPMKVKCKDRKLYPYCYGKPMECPAECSQSCYADCNSCKSVCVCSVPGACGDPRFIGGDGNAFYFHGRRDADFCVVSDRDLHINAHFIGKRGAD

SEQ ID NO: 88103 - protein, 251 aa, Setaria italica
  misc_feature (58)..(58): Xaa can be any naturally occurring amino acid
  Transcript Sequence Number=SeqID_22129
ELEQHPEIRGFEQKLLPNDSVPAPYFGLQSGMVPFGSSIPRGYTSYQLPRESCTRPIXQGKDGLFVSSSTDIRNNQASVVPERCPKDSNGRSLPLEASKLPLSGCTEVTDKTLGGDRRRKRTKKSVEPAACLPYKHGLLHSELKAHAATSNDDPSNNNMLSVTEGDMESHRRKYLAVSDKAPSFSFPSKVPSPGAGNDCAGSKFASLLSFEEMIKENCLKLLNFDDDADEEKYRKAKERTLSPNLPIIRPR

SEQ ID NO: 88104 - protein, 53 aa, Setaria italica
  Transcript Sequence Number=SeqID_22130
MWVTSMPQVWDEEGAAKGAADAVTPAPAAAMLGSLAAWLSRTIQPQPPAPRVC

SEQ ID NO: 88105 - protein, 88 aa, Setaria italica
  Transcript Sequence Number=SeqID_22131
  Gene Ontology: Mol. function=electron carrier activity
  Homolog annotation: Hit_ID=Q7XP33; Match level="QueryCoverage=80%, HitCoverage=15%, E-value=3e-15, Identity=56%"; Hit description =B1340F09.15 protein
VGILLRSTRHAPYTLLQPTVEIRDPDVARRMLFDHAEAFSNRPTKPFPLDFDAAGRHHSISTVPYGPAWGVLRRNLTAGILHPTRLGL

SEQ ID NO: 88106 - protein, 87 aa, Setaria italica
  Transcript Sequence Number=SeqID_22132
  Gene Ontology: Mol. function=protein serine/threonine kinase activity; Cellular component=integral to membrane; Biological process=protein amino acid phosphorylation
  Homolog annotation: Hit_ID=B9RWM9; Match level="QueryCoverage=100%, HitCoverage=7%, E-value=9e-23, Identity=60%"; Hit description =Leucine-rich repeat receptor protein kinase EXS, putative
  Pfam annotation: Domain name=LRR_1; Domain location=16-38; Score=8.9; E_value=6.1; Accession=PF00560.25; Description=Leucine Rich Repeat
  Pfam annotation: Domain name=LRR_1; Domain location=40-62; Score=6.0; E_value=21; Accession=PF00560.25; Description=Leucine Rich Repeat
  Pfam annotation: Domain name=LRR_1; Domain location=64-86; Score =19.7; E_value=0.012; Accession=PF00560.25; Description=Leucine Rich Repeat
  Pfam module annotation: Pfam domain module=LRR_1::LRR_1::LRR_1; Domain location=16-38::40-62::64-86
NNITGTLPPSLANATSLIQLQVDTNEISGLIPPELGRLAGLQVFFAWQNQLEGSIPAALASLSNLQALDLSHNHLTGIIPPGLFLLR

SEQ ID NO: 88107 - protein, 90 aa, Setaria italica
  misc_feature (42)..(42): Xaa can be any naturally occurring amino acid
  Transcript Sequence Number=SeqID_22133
YLTKISRRLRGVRLRAGAAAEARGLRRLRKSRSASAAQACVXAAARRDDSLAEKQDGIASAIAHCKESLHRASVSELDTSLLRSRSDPGT

SEQ ID NO: 88108 - protein, 91 aa, Setaria italica
  Transcript Sequence Number=SeqID_22134
  Subcellular localization annotation: CTP_CleavageSite=72; ConfidenceScore=5.94e-01
RTPPPRCSPPASISPTRTPSPRSSSTRGSLETTPRPRASSLGPPLTPPPRPRSTRGPSTPCSSSPPRTATPSASGPSSPPCGPGATGSPSP

SEQ ID NO: 88109 - protein, 87 aa, Setaria italica
  misc_feature (63)..(63): Xaa can be any naturally occurring amino acid
  Transcript Sequence Number=SeqID_22135
  Gene Ontology: Mol. function=sugar binding; Biological process =protein amino acid phosphorylation
  Homolog annotation: Hit_ID=Q8LJZ0; Match level="QueryCoverage=81%, HitCoverage=8%, E-value=1e-16, Identity=63%"; Hit description =Receptor-like kinase
MASHVLVFLSLSLFLLGTPAACISDMFDHGRNITDGETLVSPGGFFTLGFFSPGVTTRRYLGXWFSVSETAVCWVANRERPLNDTSG

SEQ ID NO: 88110 - protein, 79 aa, Setaria italica
  Transcript Sequence Number=SeqID_22136
VVVVVATEVQEGVPLLLLLLLQLLKAIMFGGGGGGGAARWLPPPAVCCSSCSSGGGMAIDVSFRSVSLFYDHFTQSHLV

SEQ ID NO: 88111 - protein, 111 aa, Setaria italica
  Transcript Sequence Number=SeqID_22137
  Pfam annotation: Domain name=RALF; Domain location=57-111; Score =15.1; E_value=0.00062; Accession=PF05498.3; Description=Rapid ALkalinization Factor (RALF)
MDRRRAYASLLVLVGVLLALASPVVAGGMSATFAAGVGVGDAAALRRLMSTRLEDGVAPELTVDLELHRRVLAGVIKPGALNPNRPACIRSCPAPGQPYNRGCKAIYHCPH

SEQ ID NO: 88112 - protein, 218 aa, Setaria italica
  Transcript Sequence Number=SeqID_22138
  Gene Ontology: Mol. function=nucleic acid binding; Cellular component= nucleus; Biological process=response to DNA damage stimulus
  Homolog annotation: Hit_ID=Q94BR5; Match level="QueryCoverage=99%, HitCoverage=23%, E-value=1e-62, Identity=55%"; Hit description =Putative DNA-binding protein
  Pfam annotation: Domain name=SNF2_N; Domain location=1-217; Score= -62.0; E_value=3.6e-05; Accession=PF00176.15; Description=SNF2 family N-terminal domain
AGTLVVCPASVLRQWANELSVKVTEGAKLSVLVYHGGSRTRDPNELAKYDVVVTTYMTVANEVPKENSDDEKYDIEMSGIYPEFCAGSKRKRLPKKQSKAKKKNKPSNSDGGPLARVKWFRVVLDEAQTIKNYRTQVSRACCGLMAERRWCLSGTPIQNKIDDLYSYFCFLKYEPYSKLSSFKDKIKYEITKDPVRGYKKLQAILRIILLRRTKGEIK

SEQ ID NO: 88113 - protein, 289 aa, Setaria italica
  misc_feature (223)..(223): Xaa can be any naturally occurring amino acid
  Transcript Sequence Number=SeqID_22139
  Gene Ontology: Mol. function=nucleic acid binding; Cellular component= nucleosome; Biological process=methylation-dependent chromatin silencing
  Homolog annotation: Hit_ID=Q8W121; Match level="QueryCoverage=89%, HitCoverage=32%, E-value=1e-102, Identity=74%"; Hit description =Chromatin complex subunit A101
PVAKAVKEEEQLQEPVKEEEVDDFVDESLSVPIDLEAKNGDASLITEAMKKEEEQLEGARVKSEEEEEARKREEAAKQAFDPEARYSKLDELLTKTQLFSEFLLEKMDQIADEVVEPQAEEPPAEEKKKGRGRKRKANAAPQYNDKKAKTAVAAMLTRSREERLADDCNLSEEERWKKEQANLVPLMTGGKLKSYQIKGVKWLISLWQNGLNGILADQMGLGXTIQTIGFLAHLKGKGMHGPYMIIAPLSTLSNWVNEISRFVPSVTSIIYHGDKAARAEIRRKFMPKI

SEQ ID NO: 88114 - protein, 59 aa, Setaria italica
  Transcript Sequence Number=SeqID_22140
DIYYLSIGPRRQADHNVHLGCLQDDHDHRRVLGPREGLAVEHHLYLEPPSAEPRRSLKR

SEQ ID NO: 88115 - protein, 55 aa, Setaria italica
  Transcript Sequence Number=SeqID_22141
LLQLQTCIYYTNKNRSDCCSYKAGHFIDKRHLNVDVAVSELHITQTKKELTAAAI

SEQ ID NO: 88116 - protein, 80 aa, Setaria italica
  misc_feature (65)..(65): Xaa can be any naturally occurring amino acid
  Transcript Sequence Number=SeqID_22142
MAEEAEGMDRFDMEGDFEGGRFGRDGEFYYRSRRERAPQTRDDAIYGVFAEGDSDYDSEDDEGSXRRGRRKRRRDGGGSP

SEQ ID NO: 88117 - protein, 114 aa, Setaria italica
  Transcript Sequence Number=SeqID_22143
VQQLRVAATNGDEVEVSRCAHSVDIRSSNSSSSLCSSTKIYQRGNLWRRTDSLPIGQRLSSTTPPYPSLGWLSQSRRECCDSVRRARSGIGAVDQAAAMTPHPTEPEAGTRARR

SEQ ID NO: 88118 - protein, 98 aa, Setaria italica
  Transcript Sequence Number=SeqID_22144
ATHRTGRTSAPQHFAPVLLPLASSSPFHGRKGWGDDAHKPSNLTHAILDLYTYCPSAHTRNLYFSTTAVLAPLSPLLSLPAFASACCKLLLWFRCFFS

SEQ ID NO: 88119 - protein, 558 aa, Setaria italica
  Transcript Sequence Number=SeqID_22145
  Gene Ontology: Mol. function=ATPase activity, coupled to transmembrane movement of ions, phosphorylative mechanism; Cellular component=membrane; Biological process=calcium ion transport
  Homolog annotation: Hit_ID=Q94IN0; Match level="QueryCoverage=100%, HitCoverage=96%, E-value=0.0, Identity=86%"; Hit description=P-type ATPase (Fragment)
  Pfam annotation: Domain name=Cation_ATPase_C; Domain location=359 -534; Score=184.1; E_value=4e-52; Accession=PF00689.13; Description =Cation transporting ATPase, C-terminus
  Pfam annotation: Domain name=Hydrolase; Domain location=48-298; Score= 24.5; E_value=0.00036; Accession=PF00702.18; Description=haloacid dehalogenase-like hydrolase
  Pfam module annotation: Pfam domain module=Cation_ATPase _C::Hydrolase; Domain location=359-534::48-298
NGATNINKLKAAISESVMEILIQGLFVNTGSEVVKGDDGKRNILGTPTEAALLEFGLSLQGDLYDEYNKLARVRVEPFNSVKKKMSVLIQLPNGGLRSFCKGASEIILEQCDTVFNSEGNIIPLSEIQKQNVLDIINSFASEALRTLCIAFKDLNEISDDQTIPEEGYTLIALFGIKDPVRPGVRDAVMTCMAAGIKVRMVTGDNVNTAKAIAKECGILTEDGIAIEGRELHDKSTDELKELLPKIQVMARSLPMDKYKLVTSLKSMYQEVVAVTGDGTNDAPALCESDIGLAMGIAGTEVAKENADVIIMDDNFSTIVNVARWGRAVYLNIQKFVQFQLTVNVVALIVNFVSACIIGTAPLTAVQLLWVNMIMDTLGALALATEPPNDEMMKRPPVRRGHSFITRVMWRNILGQALYQLLVLGTLMFAGKRLLNIEGPHADRTTNTLVFNSFVFCQVFNEINSREMEKINVFRGIFKNWIFIGVLSATVLFQVIIVEFLGTFANTVPLSWELWLLSAILGSVSMIVAVILKCIPVESRETGNKPHGYELIPEEPETV

SEQ ID NO: 88120 - protein, 215 aa, Setaria italica
  misc_feature (61)..(61): Xaa can be any naturally occurring amino acid
  Transcript Sequence Number=SeqID_22146
  Gene Ontology: Mol. function=transferase activity, transferring groups other than amino-acyl groups
  Homolog annotation: Hit_ID=Q5VP59; Match level="QueryCoverage=80%, HitCoverage=38%, E-value=2e-21, Identity=34%"; Hit description =Putative anthocyanin 5-aromatic acyltransferase
  Subcellular localization annotation: CTP_CleavageSite=19; ConfidenceScore=5.18e-01
VADGHSVWQFMRAWSAVARSASSQSLVPPPTFDRAAIQHPEAEELTRRFLRTIAPALPTAXPASRPTLELAQRRRSFLIRRDQIHSLKQRVMEQSVAISEPLEKLPSTYVAVSSLVWTSIVRAKALDHGGGGGGDDDDTCYFLVPVDCRRRLLPGVGEGYFGNCLSLSFAKAAARDLTKPDAGMAHAAAAIRDAAREKLANPLRGAERWAEVYAG

SEQ ID NO: 88121 - protein, 334 aa, Setaria italica
  Transcript Sequence Number=SeqID_22147
  Gene Ontology: Mol. function=zinc ion binding; Cellular component =nucleus; Biological process=transcription initiation
  Homolog annotation: Hit_ID=Q7XCX5; Match level="QueryCoverage=100%, HitCoverage=21%, E-value=1e-108, Identity=56%"; Hit description=Plus- 3 domain containing protein, expressed
  Pfam annotation: Domain name=Plus-3; Domain location=22-128; Score =165.7; E_value=1.4e-46; Accession=PF03126.10; Description=Plus-3 domain
MHRKVDREAQVNLEAYAAIDMHNINLIYMRRSLMEDLIDDATFSDKICGAFVRIKISGVGQKQDIYRLVKVVGTHKVPEKYCIGKKMTNFALEILNLDKKEIIKMDTISNQDFTEEECKRLRQSMKCGLISRLKVGDIQEKAKILQSVRVNDWFENEKERLGHLRDRASETGRRKELRECVEKLQLLNNSEERTRRINEVLEVHVESHMDPDYESAEEMDDKKAVGRSVNRTRSDTSISRRKSKYPNTMQNHPQKVSDSSHHPKKLYSQSTIHGSGAGRKFENNTIANSSMYEAGSLSSSGVTMSSDTEPEKVWHYKDPAGIVQGVFYLLQLSK

SEQ ID NO: 88122 - protein, 53 aa, Setaria italica
  Transcript Sequence Number=SeqID_22148
MGGKCPHRKVKKRRLSHKTARRGKFLLKADDAVYEELVKLADHGKDAEAKELP

SEQ ID NO: 88123 - protein, 124 aa, Setaria italica
  Transcript Sequence Number=SeqID_22149
  Gene Ontology: Mol. function=nucleic acid binding; Cellular component= intracellular; Biological process=embryonic development ending in birth or egg hatching
  Homolog annotation: Hit_ID=B9S0H0; Match level="QueryCoverage=74%, HitCoverage=96%, E-value=1e-33, Identity=73%"; Hit description=Bud site selection protein, putative
MGGKCPHRKVKKRRLSHKTARRGKFLLKADDAVYEELVKLADHGKDAEAKELPVDEDLPGMGQFYCLHCDRYFASESVKDEHYRSKRHKKRVKVMSGPAPHTQLDADLAAGMGMPDNGLKLMSM

SEQ ID NO: 88124 - protein, 128 aa, Setaria italica
  Transcript Sequence Number=SeqID_22150
  Gene Ontology: Mol. function=electron carrier activity; Cellular component=membrane; Biological process=response to oxidative stress
  Homolog annotation: Hit_ID=Q9LGU0; Match level="QueryCoverage=100%, HitCoverage=39%, E-value=3e-51, Identity=75%"; Hit description=Class III peroxidase 6
  Pfam annotation: Domain name=peroxidase; Domain location=1-118; Score= -28.1; E_value=9.9e-08; Accession=PF00141.15; Description=Peroxidase
  Subcellular localization annotation: CTP_CleavageSite=61; ConfidenceScore=5.06e-01
NVTNLVGSFAAKNLTADDMVALSGAHSFGRSHCSAFSFRLYPRIAEDMNATYGARLRKRCPAATGRRDRVVDLDPRTELLLDNQYYRNVQTREVLFTSDVTLLSQNDTAALVDLYARNRTLWAARFAA

SEQ ID NO: 88125 - protein, 108 aa, Setaria italica
  Transcript Sequence Number=SeqID_22151
  Gene Ontology: Mol. function=calcium ion binding; Cellular component =flagellin-based flagellum; Biological process=ciliary or flagellar motility
  Homolog annotation: Hit_ID=Q9AYE7; Match level="QueryCoverage=87%, HitCoverage=12%, E-value=3e-15, Identity=47%"; Hit description =Centrin
WNQTTKATDITESSKPESIGTKLSIIVATDACLPLAAMAEAPLMARVLMNYELPTKKEAYLRRMSTCLAADGIVINMVVGGEVATLKALEETSGLLIAEMPIHVSEIL

SEQ ID NO: 88126 - protein, 269 aa, Setaria italica
  Transcript Sequence Number=SeqID_22152
  Gene Ontology: Cellular component=extracellular region; Biological process=cell wall organization and biogenesis
  Homolog annotation: Hit_ID=O24230; Match level="QueryCoverage=84%, HitCoverage=88%, E-value=1e-105, Identity=76%"; Hit description =Expansin-B2
  Pfam annotation: Domain name=DPBB_1; Domain location=80-161; Score =123.6; E_value=6.5e-34; Accession=PF03330.10; Description=Rare lipoprotein A (RlpA)-like double
  Pfam annotation: Domain name=Pollen_allerg_1; Domain location=173 -254; Score=124.1; E_value=4.5e-34; Accession=PF01357.13; Description= Pollen allergen
  Pfam module annotation: Pfam domain module=DPBB_1::Pollen_allerg_1; Domain location=80-161::173-254
MAARAAALVVALLAVLVAHGVRAHPELNHTSSAARQLRGSGGWLPAKATWYGAPNGAGPDDNGGACGFKHTNQYPFMSMTSCGNQPLFKDGQGCGACYQIKCTNKNNPACSGQPKTVMITDMNYYPVAKYHFDLSGTAFGALARPGLNDLLRHAGIIDIEFRRVSCDNRGLTINFHVEQGSNPVYLAVLVQYANKEGTVSQMDLLESGSRYWTPMRRSWGSVWRLDSNHPLRAPFSLRIRGESRRTLVAYNVIPANWRPNTDYRSYVQY

SEQ ID NO: 88127 - protein, 135 aa, Setaria italica
  Transcript Sequence Number=SeqID_22153
  Gene Ontology: Mol. function=protein serine/threonine kinase activity; Cellular component=integral to membrane; Biological process=protein amino acid phosphorylation
  Homolog annotation: Hit_ID=B9TAC6; Match level="QueryCoverage=100%, HitCoverage=12%, E-value=1e-33, Identity=51%"; Hit description =Receptor protein kinase CLAVATA1, putative
  Pfam annotation: Domain name=Pkinase_Tyr; Domain location=4-135; Score=-162.6; E_value=0.0064; Accession=PF07714.9; Description =Protein tyrosine kinase
DMPRHHAVVAVKKLWRAAGCPEEASTAEGRQDVEAGGEFAAEVKLLGRLRHRNVVRMLGYVSNNLDTMVLYEYMVNGSLWEALHGRGKGKMLVDWVSRYNVAAGVAAGLAYLHHDCRPPVIHRDVKSSNVLLDTN

SEQ ID NO: 88128 - protein, 262 aa, Setaria italica
  Transcript Sequence Number=SeqID_22154
  Gene Ontology: Mol. function=protein serine/threonine kinase activity; Cellular component=plasma membrane; Biological process =protein amino acid phosphorylation
  Homolog annotation: Hit_ID=B9TAC6; Match level="QueryCoverage=85%, HitCoverage=21%, E-value=6e-98, Identity=71%"; Hit description =Receptor protein kinase CLAVATA1, putative
  Pfam annotation: Domain name=Pkinase; Domain location=7-262; Score =75.5; E_value=2e-19; Accession=PF00069.17; Description=Protein kinase domain
  Pfam annotation: Domain name=Pkinase_Tyr; Domain location=2-262; Score=-2.4; E_value=1.4e-13; Accession=PF07714.9; Description =Protein tyrosine kinase
  Pfam module annotation: Pfam domain module=Pkinase::Pkinase_Tyr; Domain location=7-262::2-262
RQGGERGRREDALAPGSDGRRRGGELADSPSAEGGGAPGRLRHRNVVRLLGYLHNDSDAMMLYEFMPNGSLWEALHGPPEKRALADWVSRYDVAAGVAQGLAYLHHDCHPPVIHRDVKSSNVLLDTNMDAKIADFGLARVMARAHETVSVVAGSYGYIAPEYGYTLKVDQKSDIYSFGVVLMELLTGRRPIEPEYGDSTDIVGWIRERLRSNSGVEDLLDAGVGGRVDHVREEMLLVLRIAVLCTAKSPKDRPTMRDVVTML

SEQ ID NO: 88129 - protein, 72 aa, Setaria italica
  Transcript Sequence Number=SeqID_22155
  Gene Ontology: Mol. function=ligase activity; Biological process =response to auxin stimulus
  Homolog annotation: Hit_ID=Q8LQM5; Match level="QueryCoverage=97%, HitCoverage=11%, E-value=3e-30, Identity=85%"; Hit description =Probable indole-3-acetic acid-amido synthetase GH3.1
GTFDKLMDYAISRGASINQYKAPRCVRPGPVVELLDARVQGRYFSPKCPKWSPGNKQWNNARAEVISNGDEA

SEQ ID NO: 88130 - protein, 236 aa, Setaria italica
  Transcript Sequence Number=SeqID_22156
  Gene Ontology: Mol. function=ligase activity; Cellular component =chloroplast envelope; Biological process=response to auxin stimulus
  Homolog annotation: Hit_ID=Q8LQM5; Match level="QueryCoverage=90%, HitCoverage=34%, E-value=1e-110, Identity=89%"; Hit description =Probable indole-3-acetic acid-amido synthetase GH3.1
  Pfam annotation: Domain name=GH3; Domain location=1-188; Score= -127.6; E_value=5.7e-11; Accession=PF03321.5; Description=GH3 auxin -responsive promoter
DLVDLVDVKLGHEYELVINTNSGLCRYRVGDVLRVAGFKNEAPMFSFVRRQNVALSIDSDKTDETELHAAVSGAVQHLAPFGASLVEYTSYADAAAIPGHYVLFWELRAGTTAVPASVFEDCCLSVEEALNSVYRQCRACDRSIGPLEIRVVSEGTFDKLMDYALAHGASINQYKAPRCVRPGPLVELLDGRVQARYLSPKCPKWSPGGGQQWSGNAAALAAGATKADGNGGVAVA

SEQ ID NO: 88131 - protein, 38 aa, Setaria italica
  misc_feature (17)..(17): Xaa can be any naturally occurring amino acid
  Transcript Sequence Number=SeqID_22157
AYGLAMTPPGHPIRVMXNLRSCLDCHTVFKVISKIVQR

SEQ ID NO: 88132 - protein, 191 aa, Setaria italica
  Transcript Sequence Number=SeqID_22158
LATTFGPIPTWAPAMCLPFICGGGGDREHGSPVHPGIQHPPPPPPRSPSPPPRYDTTSPFQETYDHRSPGMAAGGEANSPRYVAGVNKNAERITAFDNSRQAPRQREDVSASPRFHGSVAASHPKESGDKMWAPPVAQMGRRGGEDDYPTAAGTTPTPAANNFYGDRDHAFGNNRMPQGKSLWYGEAGRRP

SEQ ID NO: 88133 - protein, 43 aa, Setaria italica
  Transcript Sequence Number=SeqID_22159
QAVSLKGLKSAGAKLGQDVLTCATKELVAVDNITGLPTNCTAF

SEQ ID NO: 88134 - protein, 109 aa, Setaria italica
  Transcript Sequence Number=SeqID_22160
  Subcellular localization annotation: CTP_CleavageSite=31; ConfidenceScore=5.75e-01
AAPASCPLHRTTSSNQLQTTAPPAYLSRSPSCGPASSTNTAPPAIPSVLFSTAKGSKQQHRHHLPAPSLHDSCNHATHKSPRLCLALNWFQYQISHGIALVHNSNCIVG

SEQ ID NO: 88135 - protein, 75 aa, Setaria italica
  Transcript Sequence Number=SeqID_22161
RKQHQHLQVNRKSDGSLKQACGSKPLKERFPSLYNITYYPRTTVANVMNQMSLNISFQRVLIGDKLVAWNNMVAK

SEQ ID NO: 88136 - protein, 42 aa, Setaria italica
  Transcript Sequence Number=SeqID_22162
TAALPGMETLSSAKQEDMVDVNLRSGNANSSQSQAQAGGCSC

SEQ ID NO: 88137 - protein, 125 aa, Setaria italica
  Transcript Sequence Number=SeqID_22163
  Gene Ontology: Mol. function=nucleotide binding; Cellular component =endosome membrane; Biological process=small GTPase mediated signal transduction
  Homolog annotation: Hit_ID=O80501; Match level="QueryCoverage=64%, HitCoverage=38%, E-value=4e-40, Identity=98%"; Hit description=Ras -related protein RABH1B
  Pfam annotation: Domain name=Miro; Domain location=28-125; Score =34.8; E_value=3.5e-07; Accession=PF08477.5; Description=Miro-like protein
  Pfam annotation: Domain name=Ras; Domain location=28-124; Score=44.0; E_value=1.2e-12; Accession=PF00071.14; Description=Ras family
  Pfam module annotation: Pfam domain module=Miro::Ras; Domain location= 28-125::28-124
KEKENERKGTERNKELPVVRTTTTKVTRLVFLGDQSVGKTSIITRFMYDKFDNTYQATIGIDFLSKTMYLEDRTVRLQLWDTAGQERFRSLIPSYIRDSSVAVIVFDVASSFSLSFYPLIINPQR

SEQ ID NO: 88138 - protein, 208 aa, Setaria italica
  Transcript Sequence Number=SeqID_22164
  Gene Ontology: Mol. function=nucleotide binding; Cellular component =Golgi apparatus; Biological process=small GTPase mediated signal transduction
  Homolog annotation: Hit_ID=O80501; Match level="QueryCoverage=91%, HitCoverage=91%, E-value=1e-101, Identity=94%"; Hit description=Ras -related protein RABH1B
  Pfam annotation: Domain name=Arf; Domain location=7-170; Score=-51.7; E_value=1.6e-05; Accession=PF00025.13; Description=ADP-ribosylation factor family
  Pfam annotation: Domain name=GTP_EFTU; Domain location=11-172; Score=- 77.8; E_value=0.0027; Accession=PF00009.19; Description=Elongation factor Tu GTP binding domain
  Pfam annotation: Domain name=MMR_HSR1; Domain location=10-125; Score=- 4.7; E_value=0.0027; Accession=PF01926.15; Description=GTPase of unknown function
  Pfam annotation: Domain name=Miro; Domain location=11-125; Score =76.1; E_value=1.3e-19; Accession=PF08477.5; Description=Miro-like protein
  Pfam annotation: Domain name=Ras; Domain location=11-172; Score =285.0; E_value=1.6e-82; Accession=PF00071.14; Description=Ras family
  Pfam module annotation: Pfam domain module=Arf::GTP_EFTU::MMR _HSR1::Miro::Ras; Domain location=7-170::11-172::10-125::11-125::11 -172
MAPVSALAKYKLVFLGDQSVGKTSIITRFMYDKFDNTYQATIGIDFLSKTMYLEDRTVRLQLWDTAGQERFRSLIPSYIRDSSVAVIVFDVASRQSFLNTSKWIEEVRTERGSDVIIVLVGNKTDLVDKRQVSIEEGEGKAKDLGVMFIETSAKAGFNIKALFRKIAAALPGMETLSSAKQEDMVDVNLRSGNANSSQSQAQAGGCSC

SEQ ID NO: 88139 - protein, 70 aa, Setaria italica
  Transcript Sequence Number=SeqID_22165
VVSTIDMAKRHGVVIFNEDYSVEGLAALQWASSAFLKLSKNSKVLILHVTQNAGPTSIGNIFLSSPHHLL

SEQ ID NO: 88140 - protein, 248 aa, Setaria italica
  Transcript Sequence Number=SeqID_22166
PFRLGVVVSTIDMAKRHGVVIFNEDYSVEGLAALQWASSAFLKLSKNSKVLILHVTQNAGPTSIGQKDLSKADLLDLSEHTNEHDGNRADTFDGYLNQFNDEVVVGRTCEGSNIQDILESAIEELHLDTLVLGGAWSTHIDLLRLISECCVVLTKVDPAAAVAPPPDQDAPVGGSGGSTADPAAADAPPPEDAPVGGSGRSRPPGGTHLPTVPRTMEPSSSTSVADSSTKGKKRMERSCCRQAVESSK

SEQ ID NO: 88141 - protein, 89 aa, Setaria italica
  misc_feature (49)..(49): Xaa can be any naturally occurring amino acid
  Transcript Sequence Number=SeqID_22167
MRLAAALVALAAVLPALAAATVVDRRLVLTPGHMCGTQGRYAPGSAYEXHNLRRLAATVAAEVNANSCNCSIGSVAGRRHDQVTASAYC

SEQ ID NO: 88142 - protein, 38 aa, Setaria italica
  Transcript Sequence Number=SeqID_22168
MASSGDDGRVVVDLRSAAESAAGAGGEEAHATPLHEIE

SEQ ID NO: 88143 - protein, 39 aa, Setaria italica
  Transcript Sequence Number=SeqID_22169
HWCTNSSHTYIIAIEVPQEFDPIIYKTNLKDDTTLEGAY

SEQ ID NO: 88144 - protein, 104 aa, Setaria italica
  Transcript Sequence Number=SeqID_22170
  Gene Ontology: Mol. function=hydrolase activity, hydrolyzing O -glycosyl compounds; Cellular component=cell wall; Biological process= carbohydrate metabolic process
  Homolog annotation: Hit_ID=B9SJQ9; Match level="QueryCoverage=94%, HitCoverage=34%, E-value=2e-30, Identity=60%"; Hit description =Xyloglucan endotransglucosylase/hydrolase protein 22, putative
WFDPTADYHTYTIEWNPKYIIIRVDGKAIRAFKNYQDQGVPYPTWQQQRVYGSLWDADEWATQGGAIKTDWSNAPFVAYYRNYTATSCRPSPGVSWCGAEPKDS

SEQ ID NO: 88145 - protein, 151 aa, Setaria italica
  misc_feature (15)..(15): Xaa can be any naturally occurring amino acid
  Transcript Sequence Number=SeqID_22171
  Gene Ontology: Mol. function=hydrolase activity, hydrolyzing O -glycosyl compounds; Cellular component=cell wall; Biological process= carbohydrate metabolic process
  Homolog annotation: Hit_ID=B6TH17; Match level="QueryCoverage=88%, HitCoverage=46%, E-value=2e-38, Identity=55%"; Hit description =Xyloglucan endotransglucosylase/hydrolase protein 15
  Pfam annotation: Domain name=Glyco_hydro_16; Domain location=5-149; Score=109.6; E_value=1.1e-29; Accession=PF00722.13; Description =Glycosyl hydrolases family 16
CAATLDEDIELIWGXASHTYFFMDGPDTESLALSLDEQQGSCFRSRNTYLYGTISMDIKLVEGNSAGVVGTIYTISEGPWSYHDEIDLEFLGNLTGEPITLHTNIFADGVGGREQQFYLWFDPTADYHTYTIEWNPYEVLGVPLDGVGVVV

SEQ ID NO: 88146 - protein, 50 aa, Setaria italica
  misc_feature (47)..(47): Xaa can be any naturally occurring amino acid
  Transcript Sequence Number=SeqID_22172
KPRIMKISYVNNSMVVIIIKAYCTQTSTNLSSTLKFKSYYRNSKTFXISG

SEQ ID NO: 88147 - protein, 63 aa, Setaria italica
  Transcript Sequence Number=SeqID_22173
  Subcellular localization annotation: CTP_CleavageSite=39; ConfidenceScore=5.01e-01
GKTVKFCQRNPAIFSFLIKERYNVSTTVLNRQLHVHTTSTSTATRHAYNIRRIYTTRGRRACR

SEQ ID NO: 88148 - protein, 85 aa, Setaria italica
  Transcript Sequence Number=SeqID_22174
  Gene Ontology: Cellular component=integral to membrane; Biological process=photosynthesis, light harvesting
  Homolog annotation: Hit_ID=B6SH18; Match level="QueryCoverage=51%, HitCoverage=23%, E-value=2e-14, Identity=86%"; Hit description=Early light-induced protein
PAASLAPRRRAPLVVRASQNEDAETSSAAATPKPAEAKPASIWDTLAFSGPAPERINGRLAMVGFVSALAVEAARGDGLLAQVGN

SEQ ID NO: 88149 - protein, 143 aa, Setaria italica
  Transcript Sequence Number=SeqID_22175
  Gene Ontology: Cellular component=integral to membrane; Biological process=photosynthesis, light harvesting
  Homolog annotation: Hit_ID=B6SH18; Match level="QueryCoverage=81%, HitCoverage=62%, E-value=1e-50, Identity=88%"; Hit description=Early light-induced protein
  Pfam annotation: Domain name=Chloroa_b-bind; Domain location=19-134; Score=-17.2; E_value=0.00044; Accession=PF00504.13; Description =Chlorophyll A-B binding protein
RAPLIVRAAQNDAETSSAAAKPKPAARSPGLWDALAFSGPAPERINGRLAMVGFVSALAVEAARGDGLLAQAGNSAGLTWFAYTAIVLSAASLAPLLQGESVEGRSGGFMTADAELWNGRLAMLGLVALAATEYLTGTPFVHV

SEQ ID NO: 88150 - protein, 205 aa, Setaria italica
  misc_feature (194)..(194): Xaa can be any naturally occurring amino acid
  Transcript Sequence Number=SeqID_22176
  Gene Ontology: Mol. function=transferase activity, transferring glycosyl groups; Cellular component=cell wall
  Homolog annotation: Hit_ID=Q7XZZ4; Match level="QueryCoverage=95%, HitCoverage=18%, E-value=7e-98, Identity=89%"; Hit description=C2 domain-containing protein, putative, expressed
  Pfam annotation: Domain name=PRT_C; Domain location=96-204; Score =189.9; E_value=7.1e-54; Accession=PF08372.2; Description=Plant phosphoribosyltransferase C-ter
QQDVLRHTAMRIVSGRLARSEPPLGPEVVQYLLDTDTHSWSMRRSKANWFRVVGCLSHVATAVKWAHRVRTWAHPPTTVLVHALLVAVVLCPEMILPTVCLYLFLVLLWRYRARPRQPTGMDPRLSHVDSVSPDELDEEFDGLPSSRPADVVRMRYDRLRAVAGRAQTLLGDVAAQGERVEALLSWRDPRATGXFAVVTLLAALV

SEQ ID NO: 88151 - protein, 82 aa, Setaria italica
  Transcript Sequence Number=SeqID_22177
PMDIDDAVLAAEEPRCRVTARKTVRSYVRGTVGRVLWCLRCRSCSGADRCHNSSGMAFEDIAGVDENGGRKLAGSEGSPRIF

SEQ ID NO: 88152 - protein, 307 aa, Setaria italica
  Transcript Sequence Number=SeqID_22178
  Gene Ontology: Mol. function=DNA binding; Cellular component=nucleus; Biological process=regulation of transcription
  Homolog annotation: Hit_ID=B4G152; Match level="QueryCoverage=98%, HitCoverage=53%, E-value=1e-128, Identity=74%"; Hit description=Myb -like DNA-binding domain containing protein
  Pfam annotation: Domain name=Myb_DNA-binding; Domain location=15-61; Score=56.1; E_value=1.3e-13; Accession=PF00249.23; Description=Myb -like DNA-binding domain
  Pfam annotation: Domain name=Myb_DNA-binding; Domain location=67-112; Score=53.7; E_value=7e-13; Accession=PF00249.23; Description=Myb-like DNA-binding domain
  Pfam module annotation: Pfam domain module=Myb_DNA-binding::Myb_DNA -binding; Domain location=15-61::67-112
FRHRWQKVLNPELIKGPWTQEEDDKIIDLVRKYGPTKWSIIAKSLPGRIGKQCRERWHNHLNPEIRKDAWTPEEERALINAHRVHGNKWAEIAKALPGRTDNSIKNHWNSSLRKRLDAYGANSFLAAQNLLAHDDFKDQMRPIAMGNRLDLNKVPIIGSKDVPGRAHRSIIGSLSQAYNLKDSSAFLSLSIPTAQTSYEMSSLVDGSAVTLAAQGLESDSVRGKGLEIDSLHEKGFEVSSTPDPVGKGCAIQLKSAPAKSGTKSSLKNELYSTLGPLCYQIPNMEEVAPISSSLHSENHGSHQNNTS

SEQ ID NO: 88153 - protein, 287 aa, Setaria italica
  Transcript Sequence Number=SeqID_22179
MAARQTLLALLFVAAAGAGGHAAAAVAGKVPTGSTLCCTNTTGYHECVEACFHYYPREQAEKFCDPGCQEAYQCHAVPGEKCPSSSLHHSSDLLTNSVVGEVVQPVTTTLCCSNMTGFHECVEDCFAYFPREQADKICDPGCKEAYQCRTVSGDKCPSEHPSSGSVVGEVVQAATKTLCCSNMTGFHECVEDCFGYFPREQAEKICDPGCQEAYQCRTVSGDKCPTNSAAKGAAVEKCVSGCKSSVCSKMVTGVGSKLFAVKHALDRCNNACYKFCTKGLRAGTATA

SEQ ID NO: 88154 - protein, 59 aa, Setaria italica
  Transcript Sequence Number=SeqID_22180
  Homolog annotation: Hit_ID=B6SRR0; Match level="QueryCoverage=100%, HitCoverage=11%, E-value=6e-09, Identity=59%"; Hit description =Glycerol-3-phosphate acyltransferase 8
YLPPGLLLALFRVFFNLLFPVCLVRHTYRLTGINLTVRGTPPPAPRPGSPGSLLVCNHR

SEQ ID NO: 88155 - protein, 46 aa, Setaria italica
  Transcript Sequence Number=SeqID_22181
LIHVLPILVSLDNKLLQPYIHQSSITLKGMSKIDLVLVITTGATYS

SEQ ID NO: 88156 - protein, 180 aa, Setaria italica
  Transcript Sequence Number=SeqID_22182
  Gene Ontology: Cellular component=cell wall
  Homolog annotation: Hit_ID=Q2R0H3; Match level="QueryCoverage=85%, HitCoverage=84%, E-value=1e-33, Identity=55%"; Hit description =Dirigent-like protein, expressed
  Pfam annotation: Domain name=Dirigent; Domain location=10-180; Score =127.9; E_value=3.3e-35; Accession=PF03018.6; Description=Dirigent -like protein
MASHHLITLAAIVLQLQLAVVCPAAAGDGTMHHLHFFMHDNRYTGPRPTAVLIVNGTGAPLVSGGVRFGDTVVMDDVLTEGPSRASRAVGRSQGTYVMASMEEDRPAVLLSMNVVLTDYPGYTGSTVTVMGRNDVTLAVRELAVVGGTGRFRMATGYVLWKTASWKGKDAVLELDVYLRA

SEQ ID NO: 88157 - protein, 146 aa, Setaria italica
  Transcript Sequence Number=SeqID_22183
  Homolog annotation: Hit_ID=Q9M897; Match level="QueryCoverage=49%, HitCoverage=32%, E-value=2e-11, Identity=43%"; Hit description =F16B3.6 protein
  Pfam annotation: Domain name=DUF679; Domain location=59-146; Score =65.3; E_value=2.2e-16; Accession=PF05078.4; Description=Protein of unknown function (DUF679)
ASSSSSSVRQRPATAVSAAAQQPQLLQDDQQDLLLPKQEPEAAPSPPPPPPRSPLSQALTSTANLANLLPTGTLLAFNLLSPTFTNHGACDATTALLTRGLLAVLALSCVLASFTDSLKGPDGRVYYGVATPRGLWLIDYPPGAPP

SEQ ID NO: 88158 - protein, 70 aa, Setaria italica
  Transcript Sequence Number=SeqID_22184
  Gene Ontology: Mol. function=oxidoreductase activity; Biological process=oxidation reduction
  Homolog annotation: Hit_ID=B6TK78; Match level="QueryCoverage=97%, HitCoverage=20%, E-value=1e-33, Identity=91%"; Hit description =Flavonol synthase-like protein
  Pfam annotation: Domain name=2OG-FeII_Oxy; Domain location=1-70; Score=5.3; E_value=0.049; Accession=PF03171.12; Description=2OG -Fe(II) oxygenase superfamily
FRGSHTDYGLLTLVNQDDDMCALEVQNRSGVWIHANPIPGTFVCNIGDMLEVWSNGIYQPTVHRVINSSH

SEQ ID NO: 88159 - protein, 34 aa, Setaria italica
  Transcript Sequence Number=SeqID_22185
MMQFQVQNRSGVWIHANPIPGTFVCNIGDMLEVW

SEQ ID NO: 88160 - protein, 57 aa, Setaria italica
  Transcript Sequence Number=SeqID_22186
  Gene Ontology: Mol. function=oxidoreductase activity; Biological process=oxidation reduction
  Homolog annotation: Hit_ID=B6TK78; Match level="QueryCoverage=100%, HitCoverage=17%, E-value=9e-19, Identity=83%"; Hit description =Flavonol synthase-like protein
KIMRGIALALGGPVDAFEGGIAGDPYWALRLISYPVSSDVPEEKRTETGMGSHTDYG

SEQ ID NO: 88161 - protein, 329 aa, Setaria italica
  Transcript Sequence Number=SeqID_22187
  Gene Ontology: Mol. function=oxidoreductase activity; Biological process=oxidation reduction
  Homolog annotation: Hit_ID=B6TK78; Match level="QueryCoverage=100%, HitCoverage=100%, E-value=1e-171, Identity=88%"; Hit description =Flavonol synthase-like protein
  Pfam annotation: Domain name=2OG-FeII_Oxy; Domain location=182-287; Score=76.1; E_value=1.3e-19; Accession=PF03171.12; Description=2OG -Fe(II) oxygenase superfamily
MGSNVTAIPLIDIAPLVEKIDDPDMANHKDLLRVVQTLDYACKEVGFFYVKGHGICEMLMREVRDVLHKFFQLPYEEKMKIKMTRQSGYRGYQKLGENITKEKRDMHEAINCLTPIAPGKYGDLGKTLEGYNLWPEYPSNFKVVLENYISLLKDLSRKIMRGIALALGGPVDAFEGGIAGDPYWALRLISYPVSSDVPEEKRTETGMGSHTDYGLLTLVNQDDDMCALEVQNRSGVWIHANPIPGTFVCNIGDMLEVWSNGIYQPTVHRVINSSHQRRVSAVFFYETDFDAAVEPVAFCVEKTGSVAKYEKVVYGERLVQKACCCFGDL

SEQ ID NO: 88162 - protein, 106 aa, Setaria italica
  Transcript Sequence Number=SeqID_22188
  Gene Ontology: Mol. function=oxidoreductase activity; Cellular component=cytoplasm; Biological process=oxidation reduction
  Homolog annotation: Hit_ID=B6TD57; Match level="QueryCoverage=73%, HitCoverage=20%, E-value=4e-23, Identity=61%"; Hit description =Alcohol dehydrogenase 1
VKGGYGLRLRYGFPYLRSGIAAPISIPSFDIMRGRSVVGSYLGGIKPKDDIPVLAHKCLDKELELDEFITHQMGFDDINSAFDLLARGKCLRCIIWMDGAKQGNGA

SEQ ID NO: 88163 - protein, 102 aa, Setaria italica
  Transcript Sequence Number=SeqID_22189
  Gene Ontology: Mol. function=oxidoreductase activity; Cellular component=cytoplasm; Biological process=oxidation reduction
  Homolog annotation: Hit_ID=B6TD57; Match level="QueryCoverage=86%, HitCoverage=22%, E-value=9e-25, Identity=67%"; Hit description =Alcohol dehydrogenase 1
AHRTGLMPRDGTTRFSLAATGEPIHHFLSVSSFAEYTVVDVAHVVRVGGALPPEKACLLSCGVATGVGAAWKVAAVEPGSTVAIFGLGAVGLAVRTTDNQIF

SEQ ID NO: 88164 - protein, 312 aa, Setaria italica
  misc_feature (26)..(26): Xaa can be any naturally occurring amino acid
  Transcript Sequence Number=SeqID_22190
  Gene Ontology: Mol. function=oxidoreductase activity; Cellular component=cytoplasm; Biological process=oxidation reduction
  Homolog annotation: Hit_ID=B6TD57; Match level="QueryCoverage=96%, HitCoverage=79%, E-value=6e-98, Identity=59%"; Hit description =Alcohol dehydrogenase 1
  Pfam annotation: Domain name=ADH_N; Domain location=1-89; Score= -13.3; E_value=0.021; Accession=PF08240.4; Description=Alcohol dehydrogenase GroES-like doma
  Pfam annotation: Domain name=ADH_zinc_N; Domain location=120-263; Score=121.7; E_value=2.4e-33; Accession=PF00107.18; Description=Zinc- binding dehydrogenase
  Pfam module annotation: Pfam domain module=ADH_N::ADH_zinc_N; Domain location=1-89::120-263
GGAWGEHVEEVAVGDTVVPVFLPQCXRCADCLSARSNLCSALPHRTGLMPRDGTTRFSLAATGEPIHHFLSVSSFAEYTVVDVAHVVRVGGALPPEKACLLSCGVATGVGAAWKVAAVEPGSTVAIFGLGTVGLAVAQGSKMHGATRIIGVDLNPDKFEIGQRLGVTDFVNPNDTGEKTVSEVIKEMTGGGADHCFECIGIPSVMAEAFQSSRTGWGKTIILGSDAAAAPVSISSSGIKRGRSVTGALLGGIKPKDDIPVLAQKYMDKELELDEFVTHRMGFDDINIAFDLLARGKCLRCIIWMDGANKTTA

SEQ ID NO: 88165 - protein, 96 aa, Setaria italica
  Transcript Sequence Number=SeqID_22191
PVLDRLRNPAPPPVLHLLGVARHVAPEGGIPPLRRTECLSTWRARGAATAGSGATTRGRGRNSVFPLGFPVAAAVAARRFRHWRGESSVARRRSSE

SEQ ID NO: 88166 - protein, 78 aa, Setaria italica
  Transcript Sequence Number=SeqID_22192
  Subcellular localization annotation: CTP_CleavageSite=60; ConfidenceScore=5.32e-01
ITEVFDLEPTNISISSSMDEDPNSKVSRLSWSSSFVSSSMQSMVYPSDVVAADTPGRMLRARSSKSTSGDARRFSCPG

SEQ ID NO: 88167 - protein, 150 aa, Setaria italica
  Transcript Sequence Number=SeqID_22193
  Gene Ontology: Mol. function=zinc ion binding; Cellular component =intracellular
  Homolog annotation: Hit_ID=B6TXF7; Match level="QueryCoverage=97%, HitCoverage=55%, E-value=1e-59, Identity=85%"; Hit description=Salt tolerance-like protein
CSAGGCDAHDSDHHAPPKATVEPPPQPAVSAEAQQVPSPPQFLPQGWAVDELLQFSDYESGDKLQKESPLGFKELEWFADIDLFHDQAAPKAGRTLAEVPELFGSQAASDAAYYRPSKAAGAGAGVRQNKKARIEVTDDEEDYLIVPDLG

SEQ ID NO: 88168 - protein, 84 aa, Setaria italica
  Transcript Sequence Number=SeqID_22194
MEPLLSFVLCFLALILLIISLLEQPHLFMATAAETNQLTIGSTMTSTQYLTSSSGIFVFGFCNIDPSNNSNQLLLAIWFNFGAT

SEQ ID NO: 88169 - protein, 150 aa, Setaria italica
  Transcript Sequence Number=SeqID_22195
SLIILIKRTQTHMKRGVDEGEDRIETALSPSTLQAASRLLLQLHAASPSGHPHPHRLPACSCRPPPPPPPLPLLRVCDHPGINCPHWWFPGVVGLGCGPAQKQGCRPELFWFWREGELVGRQRQGGSLELERGHGLSSLAVVARASSPPL

SEQ ID NO: 88170 - protein, 44 aa, Setaria italica
  Transcript Sequence Number=SeqID_22196
QDQYVQLSLQFNGKMVLSTRKLCSPKFVLISFTYPNLLSCMFLK

SEQ ID NO: 88171 - protein, 80 aa, Setaria italica
  Transcript Sequence Number=SeqID_22197
SYEASSYYGGGGGYGGYGCGCGGGNGYCRCGKPAAPGGYYGVPVYDSQGWYYGGAGARQPYYGQQQQPCYEDPNAGCSVM

SEQ ID NO: 88172 - protein, 87 aa, Setaria italica
  Transcript Sequence Number=SeqID_22198
  Gene Ontology: Mol. function=triacylglycerol lipase activity; Biological process=lipid metabolic process
  Homolog annotation: Hit_ID=B6SYD9; Match level="QueryCoverage=97%, HitCoverage=14%, E-value=2e-41, Identity=90%"; Hit description =Triacylglycerol lipase
RAFDLAETLGKWALGEVAFGIKYYMRQQGNLQHEYAGSDSVLLDGPEVRQELISLLRYLNQCMYFSKKPYKVFLEFGGYDQNDVLIK

SEQ ID NO: 88173 - protein, 139 aa, Setaria italica
  Transcript Sequence Number=SeqID_22199
  Gene Ontology: Mol. function=transferase activity, transferring nitrogenous groups; Cellular component=chloroplast; Biological process=biosynthetic process
  Homolog annotation: Hit_ID=B9S7T6; Match level="QueryCoverage=100%, HitCoverage=30%, E-value=4e-45, Identity=61%"; Hit description =Transaminase mtnE, putative
SIYEVPGAREVAIEISSFSKFAGFTGVRLGWAVVPAELRYADGSPVARDFDRIVCTCFNGASSVAQAGGVACLSTEEGRGAVRRVVGVYKENARVLVDTFASLGKEVYGGADSPYVWVRFPGRRSWDVFTEILEKTHVI

SEQ ID NO: 88174 - protein, 96 aa, Setaria italica
  Transcript Sequence Number=SeqID_22200
GLIIGIGDIAPGRGEAFVRGRQRLHGGGPDGGRIKLLPIARGGGGGGGGREDEIAFSSDFYRVYPLFRCAVKSAAEDSSEIEHTRCQKRPLPLGVS

SEQ ID NO: 88175 - protein, 120 aa, Setaria italica
  misc_feature (98)..(98): Xaa can be any naturally occurring amino acid
  Transcript Sequence Number=SeqID_22201
  Subcellular localization annotation: CTP_CleavageSite=49; ConfidenceScore=5.36e-01
MGSIGNGRSVSAVGIQMPPEGSKTVLEPVSLPVTTSPVPRWPRLGVIMVATRVAALVMALLSVSLMVSSKQRGILTIFGIEIPLHANWSFSYSLQFLXMSAASAAYSLAHLLLIAHKAVK

SEQ ID NO: 88176 - protein, 243 aa, Setaria italica
  Transcript Sequence Number=SeqID_22202
  Gene Ontology: Mol. function=nutrient reservoir activity; Cellular component=extracellular region
  Homolog annotation: Hit_ID=B6TTY1; Match level="QueryCoverage=89%, HitCoverage=82%, E-value=1e-91, Identity=78%"; Hit description =Germin-like protein subfamily 1 member 11
  Pfam annotation: Domain name=Cupin_1; Domain location=64-214; Score =135.6; E_value=1.5e-37; Accession=PF00190.14; Description=Cupin
  Pfam annotation: Domain name=Cupin_2; Domain location=97-176; Score =35.4; E_value=2.3e-07; Accession=PF07883.3; Description=Cupin domain
  Pfam module annotation: Pfam domain module=Cupin_1::Cupin_2; Domain location=64-214::97-176
MASRAFAALLTVVAFVGFASVPRALATDPTQLQDFCVADNNNQVLVNGVVCKNAKVVTANDFFFHIMPQTPNAQGSGVAAVAVDKLPGLNTLGISLARIDFVPGGQNPPHTHPRGSEILTVIQGTLLVGFVTSNQLLNNTLFTKQLVEGDVFVFPQGLIHFQLNNGKSPAVAIAALSSQNPGTITIANAVFGSKPPISDLILAKAFMLEKDTVDWVQQAFGAAAVGGGGGGGMPGGGGYPGGG

SEQ ID NO: 88177 - protein, 160 aa, Setaria italica
  misc_feature (79)..(79): Xaa can be any naturally occurring amino acid
  Transcript Sequence Number=SeqID_22203
  Homolog annotation: Hit_ID=B6TDF9; Match level="QueryCoverage=89%, HitCoverage=81%, E-value=3e-53, Identity=75%"; Hit description =Membrane protein
WQCFEANLFLCFLLMQNYFSCFFPLPIVISSLRWGLEAGRKTVVATVLLLFTLSGPVKASSYLLMHGVVGLIMGTVWRXRALGACGYVLVSSFLIRENILALITVNIHASLTYILAAAGVNSIPSMDAIYVLFGTLLLLNCAFFVFLLHVLYTVFSLSLS

SEQ ID NO: 88178 - protein, 214 aa, Setaria italica
  Transcript Sequence Number=SeqID_22204
  Homolog annotation: Hit_ID=B6TDF9; Match level="QueryCoverage=89%, HitCoverage=100%, E-value=8e-85, Identity=86%"; Hit description =Membrane protein
  Pfam annotation: Domain name=Thia_YuaJ; Domain location=18-141; Score= -92.4; E_value=0.02; Accession=PF09515.2; Description=Thiamine transporter protein (Thia_Yu
GDEDGEDLGEALDRTRQLVECAMFAAVAGLAYFLSNSLAIENYFSCFFPLPIVISSLRWGLEAGRKTVVATVLLLFTLSGPVKASSYLLMHGVVGLIMGTVWRLETNWIVSIILCSIVRALGACGYVLVSSFLIRENILALITVNIHASLTYILAAAGVNSIPSMDAIYVLFGTLLLLNCAFFVFLLHVLYTVFLTKLGIKPSLRPPRWLDNVL

SEQ ID NO: 88179 - protein, 166 aa, Setaria italica
  misc_feature (143)..(143): Xaa can be any naturally occurring amino acid
  misc_feature (158)..(158): Xaa can be any naturally occurring amino acid
  Transcript Sequence Number=SeqID_22205
  Homolog annotation: Hit_ID=A2Q224; Match level="QueryCoverage=74%, HitCoverage=38%, E-value=2e-32, Identity=55%"; Hit description =Proteinase inhibitor I4, serpin
  Pfam annotation: Domain name=DUF716; Domain location=7-128; Score =191.7; E_value=2.1e-54; Accession=PF04819.4; Description=Family of unknown function (DUF716)
SSRSKYLPTSNSADHMGVEGQFHWLLQTAIAVTLATTLLGIPYPRSFTVSLVRSASLVFQGVWFIVMGVMLWTPALIPKGCFLNREEGHDVVRCRTDEALDRAKSLVNLQFSWYLTGTVVFVVFFYLQLTKRYPEEPQYLPLXKGGGGGGDSDGRFSXGDDHDDED

SEQ ID NO: 88180 - protein, 75 aa, Setaria italica
  Transcript Sequence Number=SeqID_22206
LLRELSVDLSLFYFATTICNLGHFLVERCIDFLRILQFRGLCTPLEATLLFVLSKTISSSQKPCPRSGAAALARR

SEQ ID NO: 88181 - protein, 137 aa, Setaria italica
  Transcript Sequence Number=SeqID_22207
  Gene Ontology: Mol. function=electron carrier activity; Cellular component=anchored to membrane; Biological process=electron transport chain
  Homolog annotation: Hit_ID=B9RTZ6; Match level="QueryCoverage=83%, HitCoverage=56%, E-value=3e-28, Identity=50%"; Hit description =Mavicyanin, putative
  Pfam annotation: Domain name=Cu_bind_like; Domain location=43-126; Score=141.2; E_value=3.1e-39; Accession=PF02298.9; Description =Plastocyanin-like domain
LRHRGAGAAMAMGMKGFLVLTLGLAMAATSSAVTYKVGDSSGWTILGNINYTDWTTKKNFHVGDIIEFVYPQGIHNVLEVTKDAYDSCSNSTPIATHTSGDDKIAIKRPGHRFFICGVPGHCAAGQKVNIRVLKPRS

SEQ ID NO: 88182 - protein, 125 aa, Setaria italica
  Transcript Sequence Number=SeqID_22208
  Gene Ontology: Mol. function=electron carrier activity; Cellular component=anchored to membrane; Biological process=electron transport chain
  Homolog annotation: Hit_ID=B6U7P6; Match level="QueryCoverage=52%, HitCoverage=37%, E-value=1e-15, Identity=56%"; Hit description=Blue copper protein
  Pfam annotation: Domain name=Cu_bind_like; Domain location=21-97; Score=77.9; E_value=3.6e-20; Accession=PF02298.9; Description =Plastocyanin-like domain
SSWHRKRSYLPKRARFSALLSFVLNCNDDADDDRVRAEFVYPQGIHNVLEVTKDAYDSCSNSTPIATHTSGDDKIAIKRPGHRFFICGVPGHCAAGQKVNIRVLKPRSSDAPSKAPAPAPARSSS

SEQ ID NO: 88183 - protein, 76 aa, Setaria italica
  Transcript Sequence Number=SeqID_22209
  Gene Ontology: Mol. function=protein transporter activity; Cellular component=nuclear pore; Biological process=protein import into nucleus, docking
  Homolog annotation: Hit_ID=Q8H0P3; Match level="QueryCoverage=78%, HitCoverage=15%, E-value=9e-24, Identity=90%"; Hit description =Transportin (Fragment)
RRGCKCIGQTLERSPRRVCPIHLQPRLQEFLTVAAKQLNPQSVKDAVSVANNACWAIGELAIKIGKEIEPVVISVV

SEQ ID NO: 88184 - protein, 892 aa, Setaria italica
  misc_feature (789)..(789): Xaa can be any naturally occurring amino acid
  misc_feature (809)..(809): Xaa can be any naturally occurring amino acid
  misc_feature (847)..(847): Xaa can be any naturally occurring amino acid
  Transcript Sequence Number=SeqID_22210
  Gene Ontology: Mol. function=protein transporter activity; Cellular component=nuclear pore; Biological process=protein import into nucleus, docking
  Homolog annotation: Hit_ID=Q8H2D6; Match level="QueryCoverage=98%, HitCoverage=98%, E-value=0.0, Identity=65%"; Hit description =Transportin
  Pfam annotation: Domain name=HEAT; Domain location=125-160; Score =2.5; E_value=24; Accession=PF02985.14; Description=HEAT repeat
  Pfam annotation: Domain name=HEAT; Domain location=173-209; Score =13.2; E_value=1.1; Accession=PF02985.14; Description=HEAT repeat
  Pfam annotation: Domain name=HEAT; Domain location=214-250; Score =17.5; E_value=0.056; Accession=PF02985.14; Description=HEAT repeat
  Pfam annotation: Domain name=HEAT; Domain location=255-291; Score =7.7; E_value=5.7; Accession=PF02985.14; Description=HEAT repeat
  Pfam annotation: Domain name=HEAT; Domain location=383-422; Score =21.5; E_value=0.0036; Accession=PF02985.14; Description=HEAT repeat
  Pfam annotation: Domain name=HEAT; Domain location=427-463; Score =23.4; E_value=0.00091; Accession=PF02985.14; Description=HEAT repeat
  Pfam annotation: Domain name=HEAT; Domain location=474-509; Score =17.2; E_value=0.068; Accession=PF02985.14; Description=HEAT repeat
  Pfam annotation: Domain name=HEAT; Domain location=657-693; Score =25.8; E_value=0.00017; Accession=PF02985.14; Description=HEAT repeat
  Pfam annotation: Domain name=HEAT; Domain location=86-122; Score=0.2; E_value=47; Accession=PF02985.14; Description=HEAT repeat
  Pfam annotation: Domain name=IBN_N; Domain location=34-102; Score =58.7; E_value=2.3e-14; Accession=PF03810.11; Description=Importin -beta N-terminal domain
  Pfam module annotation: Pfam domain module=HEAT::HEAT::HEAT::HEAT::HEA T::HEAT::HEAT::HEAT::HEAT::IBN_N; Domain location=125-160::173 -209::214-250::255-291::383-422::427-463::474-509::657-693::86 -122::34-102
MAAPALWQPQEQGLREICTLLEAHISPNSDQARIWQQLQHYSQFPDFNNYLVFLLARGEGKSVEVRQAAGLLLKNNLRTTFSSMPPPSQQYIKAELLPCIGATNRAIRSTVGTVISVLFQIVRVAGWIELFQALHKCLDSNDLDHMEGAMDAIYKICEDVPEELDVDVPGLPERPINVFMPRILQFFQSPHASLRKLALGCINQYIVVMPSALYMSMDQYLQGLFNLAKDPSADVRKLVCSAWVQLIEVRPSILEPHLKNVTELILQANKDSDDEVALEACEFWSAYCDVSMPPEGLREFLPQLIPTLLSNMVYADDDESLADAEEDESFPDRDQDLKPRFHASRLHGSETGEDDDDDDAVNVWNLRKCSAAGLDVLSNVFGDSILPTLMPLIEQNLARTDDDSWKERETAVLSLGAIAEGCIDGLYPHLPQIVAFLIPLLDDKFPLIRSITCWTLSRYSKFIVQSLDHPNGREQFDKILLGLLRRILDTNKRVQEAACSAFATLEEEAAEELVPHLEVILQHLMCAYGKYQRRNLRILYDALGTLADAVGAELNQAKYLDIFMPPLIMKWQQLQNSDKDLFPLLECFTSIAQALGSGFAQFAEPVFQRCINLIQSQQLAKIDPTAAGALYDREFIVCSLDLLSGLAEGLGAGIESLVAQSNLRDLLLQCCMDEAADVRQSALALLGDLSRVCPIHLQPRLQEFLTVAAKQLNPQSVKDAVSVANNACWAIGELAIKIGKEIEPVVISVVTCLIPILKSPEGLNKSLIENSAITLGRLSWVCPDIMAPXMDHFMQAWCRALCMIRDDFXKEDAFHGLCAMVAANPSGAVGSLAYICQACASWTEIKXSEGLHNEVCQILYGYKQLLGNGGWEQCMANPKKPRQVSRQEELRT

SEQ ID NO: 88185 - protein, 137 aa, Setaria italica
  Transcript Sequence Number=SeqID_22211
  Gene Ontology: Mol. function=binding; Cellular component=nuclear pore; Biological process=protein import into nucleus, docking
  Homolog annotation: Hit_ID=Q8H0P3; Match level="QueryCoverage=99%, HitCoverage=35%, E-value=2e-70, Identity=89%"; Hit description =Transportin (Fragment)
QPILKSPQGLNKSLIENSAITLGRLSWVCPDIMAPHMDHFMQAWCRALCMIRDDFEKEDAFHGLCAMVAANPSGAVGSLAYICQACASWTEIKSEGLHNEVCQILYGYKQLLGNGGWEQCMATLEPAVVQRLARYGV

SEQ ID NO: 88186 - protein, 79 aa, Setaria italica
  Transcript Sequence Number=SeqID_22212
IAYNNTFLCQICSSNPPINMALQQVSHLLYRIYHMIIWETAGHSCSYARTSSLSQLPTDTDFTKPVSISTETTSKVPVF

SEQ ID NO: 88187 - protein, 92 aa, Setaria italica
  Transcript Sequence Number=SeqID_22213
RGCGGAPAPSSQFRGVARCREEDVCEAWTLARRQGPWPAQPAPLPRTRLPPCNEPPPRNWDDGAGAPPQPRPPHHRGRRGAVRRRCGSPPRR

SEQ ID NO: 88188 - protein, 62 aa, Setaria italica
  Transcript Sequence Number=SeqID_22214
EAARRDAELAARRTPKRDHRGGAAAWAWRRQLWMVILVDLVLLAVLFAAWLAVCRGFSCIGR

SEQ ID NO: 88189 - protein, 200 aa, Setaria italica
  Transcript Sequence Number=SeqID_22215
  Gene Ontology: Cellular component=integral to membrane
  Homolog annotation: Hit_ID=B6SGJ3; Match level="QueryCoverage=97%, HitCoverage=68%, E-value=1e-102, Identity=95%"; Hit description =Membrane protein
  Pfam annotation: Domain name=UPF0014; Domain location=3-189; Score =59.1; E_value=1.6e-14; Accession=PF03649.5; Description =Uncharacterised protein family (UPF0014)
PRVQRGWILLAYLFMVTVAGYTAGQRAKQVPRGKYIACVSILVGTAITMFLLVVLNVFPFTPRYIIPVAGMMVGNAMTVTGVTMKKLREDVKIQRNLVETALALGATPRQATLQQVKRSLVIALSPVIDNAKTVGLIALPGAMTGLIMGGASPLEAIQLQIVVMNMLMGASTVSSILSTYLCWPAFFTKAFQLEDKVFAD

SEQ ID NO: 88190 - protein, 130 aa, Setaria italica
  misc_feature (12)..(12): Xaa can be any naturally occurring amino acid
  misc_feature (15)..(15): Xaa can be any naturally occurring amino acid
  Transcript Sequence Number=SeqID_22216
CVLGLVLFFSFXFFXFFVQNCIRVCFEHRYESNDTTNQTHPKRLYWIPPFLCVSSTVTKRTQGKHVQHTRACRIWLWPLYTCAQMPSNCFISPIHIHTLSKYTPSPPARVCYSAPTTVSEQQIFCLFLDL

SEQ ID NO: 88191 - protein, 134 aa, Setaria italica
  Transcript Sequence Number=SeqID_22217
  Gene Ontology: Cellular component=nucleus; Biological process=cell division
  Homolog annotation: Hit_ID=Q69QB8; Match level="QueryCoverage=94%, HitCoverage=36%, E-value=4e-33, Identity=59%"; Hit description =Cyclin-D3-1
CRSEITLARSIELILSASKAAELMVFRPSEIAASVRLVALGKHDSSVLESVATSWRQLIKERVLGCCEVIQEKIVMGNIILKSIGSSVFTEQHRPIGVLDVAACESQQSEGISSGVPIINNEGPSASKRRRICT

SEQ ID NO: 88192 - protein, 44 aa, Setaria italica
  Transcript Sequence Number=SeqID_22218
  Gene Ontology: Mol. function=hydrolase activity, hydrolyzing O -glycosyl compounds; Biological process=carbohydrate metabolic process
VPFGCRYSTLELGIGITPYANLYQYDLPEALEVQYGGLLNRKVV

SEQ ID NO: 88193 - protein, 108 aa, Setaria italica
  Transcript Sequence Number=SeqID_22219
  Homolog annotation: Hit_ID=B6U460; Match level="QueryCoverage=98%, HitCoverage=99%, E-value=4e-34, Identity=66%"; Hit description=FPF1
MSGVWEFRNGARLLEKTAKQAGAAPCEGKKALVHTPSGQTVASHEALQRCLQQLGWERYYEDPALVQFHRRSSVDLISLPADFARVGAVHMYDIVVKNRDYFTVVDAA

SEQ ID NO: 88194 - protein, 50 aa, Setaria italica
  Transcript Sequence Number=SeqID_22220
  Gene Ontology: Mol. function=acid-amino acid ligase activity; Cellular component=cytoplasm; Biological process=peptidoglycan-based cell wall biogenesis
  Homolog annotation: Hit_ID=C4WRH2; Match level="QueryCoverage=100%, HitCoverage=5%, E-value=8e-19, Identity=84%"; Hit description =Putative UDP-N-acetylmuranoylanalyl-D-2-6-diaminoligase
KGIDTYQIEGDKSEFFDDREECREALQYVDQLHRAGIDTSEFPWRLPESH

SEQ ID NO: 88195 - protein, 72 aa, Setaria italica
  Transcript Sequence Number=SeqID_22221
  Gene Ontology: Mol. function=acid-amino acid ligase activity; Cellular component=cytoplasm; Biological process=peptidoglycan-based cell wall biogenesis
  Homolog annotation: Hit_ID=B9RCC8; Match level="QueryCoverage=100%, HitCoverage=9%, E-value=2e-25, Identity=75%"; Hit description=UDP-n -acetylmuramoylalanyl-d-glutamate--2, 6-diaminopimelate ligase, putative
FLHDIRRVAVRAAVAMGEQGDVVVITGKGNDTYQIEGDKSEFFDDREECREALQYVDQLHRAGIDTSEFPWR

SEQ ID NO: 88196 - protein, 140 aa, Setaria italica
  Transcript Sequence Number=SeqID_22222
  Homolog annotation: Hit_ID=Q7XUV9; Match level="QueryCoverage=88%, HitCoverage=31%, E-value=6e-40, Identity=70%"; Hit description =OSJNBa0072F16.6 protein
RRARLSGRAGRLLVAAFMYAELYLVAIGYLIVDGDNLDKLFPGAAVSLGPASLSGRQLFVVLVALAVAPTTWLRSLGVLAYVSATGVFASVLIVLSVLWAAAVDGVGFSAPGATALRPARLPTALGLYTFCFCGHAVFPT

SEQ ID NO: 88197 - protein, 112 aa, Setaria italica
  Transcript Sequence Number=SeqID_22223
  Gene Ontology: Mol. function=calcium ion binding; Cellular component =flagellin-based flagellum
  Homolog annotation: Hit_ID=Q84MN0; Match level="QueryCoverage=100%, HitCoverage=72%, E-value=2e-54, Identity=94%"; Hit description =Calmodulin-like protein 4
  Pfam annotation: Domain name=efhand; Domain location=42-70; Score =40.3; E_value=7.8e-09; Accession=PF00036.24; Description=EF hand
  Pfam annotation: Domain name=efhand; Domain location=5-33; Score =36.7; E_value=9.4e-08; Accession=PF00036.24; Description=EF hand
  Pfam annotation: Domain name=efhand; Domain location=78-106; Score =41.9; E_value=2.4e-09; Accession=PF00036.24; Description=EF hand
  Pfam module annotation: Pfam domain module=efhand::efhand::efhand; Domain location=42-70::5-33::78-106
PSDQELNDMMSEVDTDGNGIIDFQEFQSLIARKMKDGDGDEELKEAFEVLDKDQNGFISPNELRTVMTNLGERMTDEEVEQMIREADTDGDGQVNYDEFVLMMKNAERKISG

SEQ ID NO: 88198 - protein, 75 aa, Setaria italica
  Transcript Sequence Number=SeqID_22224
  Pfam annotation: Domain name=Metallothio_2; Domain location=1-75; Score=53.4; E_value=8.6e-13; Accession=PF01439.10; Description =Metallothionein
MSCCGGSCSCGSCGCGVMYLGFDENTSNTPGTMVLGVSAEKGAGEVPEKATESGEAGYGYGCSCGSGCSCSPCSC

SEQ ID NO: 88199 - protein, 324 aa, Setaria italica
  Transcript Sequence Number=SeqID_22225
  Gene Ontology: Mol. function=endodeoxyribonuclease activity, producing 5'-phosphomonoesters; Cellular component=nucleus
  Homolog annotation: Hit_ID=B6TDE6; Match level="QueryCoverage=99%, HitCoverage=99%, E-value=0.0, Identity=94%"; Hit description =Deoxyribonuclease tatD
  Pfam annotation: Domain name=TatD_DNase; Domain location=9-303; Score= 194.5; E_value=2.9e-55; Accession=PF01026.13; Description=TatD related DNase
MASAAVKLIDIAVNFTDGMFKGIYHGKQCHAADIPAVLARAWSTGVDRIIVTGGSLKESREALEIAETDGRLFCTVGVHPTRCGEFEESGDPEGHFQALLALAKEGIEKGKVVAVGECGLDYDRLHFCPADVQKKYFEKQFELAEAVKLPMFLHMRAAGEDFCEIMSRNLYRFPGGVTHSFTDSAADRDRLLSFEKMFIGVNGCSLKTNENLEVLRGIPVERLMIETDSPYCDIRNTHAGSQYVKSVWPSKKKEKYEPDSMVKGRNEPCLVRQVLEVVAGCKGIADIEGLSKTLYQNTCRLFFPQDLDASADAQLESGTTVQDN

SEQ ID NO: 88200 - protein, 80 aa, Setaria italica
  Transcript Sequence Number=SeqID_22226
  Gene Ontology: Cellular component=exocyst; Biological process =exocytosis
  Homolog annotation: Hit_ID=B6SVR8; Match level="QueryCoverage=53%, HitCoverage=6%, E-value=6e-14, Identity=93%"; Hit description =Protein binding protein
RRPRRPAPPPQGEQGVGDGGGLPVPVPAAVVGDDKVLAAAQHIVKSLATSKNAADDMIRILSGFDHRLSSITSDLFPSPS

SEQ ID NO: 88201 - protein, 125 aa, Setaria italica
  Transcript Sequence Number=SeqID_22227
RMDGWMWWIRAQRVSSKDLFNAIARALNYGRKHAILPYEIIIDAHGVLVDILLKEIKAHSYHKCTSIHVVGLGRKATWNVVGTYVFGKSNAHAAGIHRRRTIPTMSKGEPRSFQFLHNDAVQLPS

SEQ ID NO: 88202 - protein, 320 aa, Setaria italica
  Transcript Sequence Number=SeqID_22228
  Gene Ontology: Mol. function=sulfotransferase activity
  Homolog annotation: Hit_ID=B6TRN9; Match level="QueryCoverage=98%, HitCoverage=96%, E-value=1e-88, Identity=51%"; Hit description =Flavonol 4-sulfotransferase
  Pfam annotation: Domain name=Sulfotransfer_1; Domain location=60-317; Score=326.7; E_value=4.8e-95; Accession=PF00685.19; Description =Sulfotransferase domain
MAQAKTETSHGSPEQGESFTSRLPTREGWWKQFFLFQGFWLSPQLIRSTVLVQAQFRPRADDIFLATYPKCGTTWLKALAFTLANRSRHPVASHAHPVLTSNPQDLVPFLELHPIEELEALPSPRLLSTHLPCTSLPSGASTLGCRIVYLCREPKDVLVSTWHFTNKVHKDFHIDLGKAFELFCEGVSHGGPFWEHYLGYWKQSMEEPGRVLFLKYDEMMANPAEHVKMLAEFLGVPFTEKEESAGVVEEVVRLCSFENLKSLPVNSTGVSDRIGGLPMENASFFRSGKVGDWKNHLTEEMARKLDCIVEEKLKGSGLSF

SEQ ID NO: 88203 - protein, 51 aa, Setaria italica
  Transcript Sequence Number=SeqID_22229
HGKNAGLINSYMAQQMLGAHDVDQVIQGEHHELLKRCKYIVMGEEKLVKKV

SEQ ID NO: 88204 - protein, 131 aa, Setaria italica
  Transcript Sequence Number=SeqID_22230
  Gene Ontology: Cellular component=nucleus; Biological process =multicellular organismal development
  Homolog annotation: Hit_ID=Q8LBW3; Match level="QueryCoverage=67%, HitCoverage=46%, E-value=3e-29, Identity=69%"; Hit description=LOB domain-containing protein 12
  Pfam annotation: Domain name=DUF260; Domain location=7-86; Score =133.1; E_value=8.8e-37; Accession=PF03195.6; Description=Protein of unknown function DUF260
TTTLTYPPRRNPHKFAIVHKVFGASNVSKMLQELPAQQRADAVSSLVYEANARMRDPVYGCVGAISYLQQQVSQLQMQLALAKAEILCVQMQHDGHATVSSPPSAASQQLERKQQQLMECEAYGSLLMQMA

SEQ ID NO: 88205 - protein, 227 aa, Setaria italica
  Transcript Sequence Number=SeqID_22231
  Subcellular localization annotation: CTP_CleavageSite=42; ConfidenceScore=5.36e-01
CDRRGLERTPVTQGRPHPYSAAPPPHATAARRRRCRRRQRRRASSHSSTSLPAASSSPPIYFATRSSFQISISPKARVPPPACSHGVRGERYGHGWSRLWPCGSAPTAGFGGPSACLLPLWLPDLVAVLTTCSTVAPRWQAASMALCASACGPPLPFPDLFRGSLGAGGRAARAPHSVCGEAIRLRTNAGFGAIAVERECRARRAGRCFTFARSRRLLLCLAYCGRP

SEQ ID NO: 88206 - protein, 87 aa, Setaria italica
  Transcript Sequence Number=SeqID_22232
FSSEANGTCLLVDNSRPFRTLPYCSDSQPYLVQLVKEFHTCELVLRAAIGYLKLYSLIRFALSMTCYSNYYFCLQLSNCPVLLYKKK

SEQ ID NO: 88207 - protein, 176 aa, Setaria italica
  Transcript Sequence Number=SeqID_22233
DGAYSWPNHQWIPNLAGTLPAEVAHSDQKPTPSDKGSARAALPFSPVEPIKADSNVSAADYTNAPQMVFRQQARPSAPSTIGIPASDTQGVIGKIQEVTPDNRRTGDSGKPFVPSKEQVSHASQAIPGQEEMASLPGAIVSPTSDAQVASSEVQEVSPDDQQAAFGPGEVGAAEKK

SEQ ID NO: 88208 - protein, 129 aa, Setaria italica
  Transcript Sequence Number=SeqID_22234
INSSHPSTPADLSTLASARHRRDLLSAFPIWQFLCQIRLLGSWIWSSVVQISQSIEFFPPSLLQLHLPLLAPPFAAAVSPFVPRPPPPGSSTTSTNTTACGRSCRRHRRSLLSPATRKTPNNTLPTTST

SEQ ID NO: 88209 - protein, 130 aa, Setaria italica
  Transcript Sequence Number=SeqID_22235
RTIAVNVVVSVAAKAAVVALAVAWRPVLWAAVLADVGTCLLVVLHSMTLLREPGTRRGGKDEVCRATARSLAMRSSQLAAASNGATASVQGPDVGGTRSCRCCQKPGKSSEQEHSVVIDIPAASSSSAEH

SEQ ID NO: 88210 - protein, 137 aa, Setaria italica
  misc_feature (33)..(33): Xaa can be any naturally occurring amino acid
  misc_feature (50)..(50): Xaa can be any naturally occurring amino acid
  Transcript Sequence Number=SeqID_22236
  Gene Ontology: Mol. function=hydrolase activity, acting on glycosyl bonds; Cellular component=vacuole; Biological process=glycosaminoglyc an metabolic process
  Homolog annotation: Hit_ID=Q25AM7; Match level="QueryCoverage=99%, HitCoverage=19%, E-value=6e-60, Identity=84%"; Hit description =H0212B02.15 protein
DWSYYQNAVTSSYLCGLGTNVGRRMTWMALQGXNLPLAFTGQESIWQRVXFQRYNISKSDLDDFFGGPAFLAWSRMANMHGWGGPLPQTWLDDQLALQKKILSRMYAFGMFPVLPAFSGNIPAALKSKYPSAKVTHL

SEQ ID NO: 88211 - protein, 177 aa, Setaria italica
  misc_feature (9)..(9): Xaa can be any naturally occurring amino acid
  Transcript Sequence Number=SeqID_22237
PSAARPMPXFPGGKQDEGHMFHLPPAHHGGGKPPHMDEQHQQQAMGPGGGEAPDGDLRWPNGLSFFTALTGRADDAKLLFGGPGGGGGGADEEKAAPDAAQGGAENVEEYLSLESHSNKARRVESAAQSTKFKRSFTLPARMSSPASTSPSVSASTAPPPPQQQQQGMEYRGPHEGG

SEQ ID NO: 88212 - protein, 54 aa, Setaria italica
  Transcript Sequence Number=SeqID_22238
  Gene Ontology: Mol. function=nucleic acid binding; Cellular component= nucleus; Biological process=protein ubiquitination during ubiquitin -dependent protein catabolic process
  Homolog annotation: Hit_ID=Q9FS08; Match level="QueryCoverage=100%, HitCoverage=4%, E-value=2e-25, Identity=92%"; Hit description=UV -damaged DNA binding protein
MSVWNYVVTAHKPTSVSHSCVGNFTSPNQLNLIIAKCTRIEIHLLTPQGLQPML

SEQ ID NO: 88213 - protein, 76 aa, Setaria italica
  Transcript Sequence Number=SeqID_22239
RRVRVRLRRAPCSNSDNGVQTRELYPCLTTQASEQRPPPNSQRMGCMHLDSSLLPNSGFRGCLIPGLNFSPYHKEY

SEQ ID NO: 88214 - protein, 63 aa, Setaria italica
  Transcript Sequence Number=SeqID_22240
  Homolog annotation: Hit_ID=B6TJZ1; Match level="QueryCoverage=85%, HitCoverage=23%, E-value=1e-08, Identity=59%"; Hit description =Dehydration-responsive element-binding protein 1C
ASPPHEATPQDAEPDPDDALFDLPDLLLDLRCCGPSSWAVDDDMAVSAGGAFRLIEEPLLWEY

SEQ ID NO: 88215 - protein, 58 aa, Setaria italica
  Transcript Sequence Number=SeqID_22241
KEGPCSNLLHMEIFIADTAACIAGADRGGQTNRHGSLAGLWETGELQVGERIISRLAL

SEQ ID NO: 88216 - protein, 113 aa, Setaria italica
  Transcript Sequence Number=SeqID_22242
  Homolog annotation: Hit_ID=B9SU41; Match level="QueryCoverage=97%, HitCoverage=13%, E-value=1e-15, Identity=43%"; Hit description =Pentatricopeptide repeat-containing protein, putative
WLIGLCQARRIDDALKIFRILVEFGINVTPACCSHLTKYLCWERNLNAAVDVMLYTLSKRFIMSQPVGNRLLRNLCICHRRKDAQALAWRMHLVGYDMDAYLRESTKGLLYSQ

SEQ ID NO: 88217 - protein, 222 aa, Setaria italica
  Transcript Sequence Number=SeqID_22243
  Gene Ontology: Mol. function=protein serine/threonine kinase activity; Cellular component=extracellular region; Biological process=protein amino acid phosphorylation
  Pfam annotation: Domain name=LRR_1; Domain location=105-127; Score =5.9; E_value=23; Accession=PF00560.25; Description=Leucine Rich Repeat
  Pfam annotation: Domain name=LRR_1; Domain location=130-152; Score =13.8; E_value=0.69; Accession=PF00560.25; Description=Leucine Rich Repeat
  Pfam annotation: Domain name=LRR_1; Domain location=154-176; Score =5.2; E_value=30; Accession=PF00560.25; Description=Leucine Rich Repeat
  Pfam annotation: Domain name=LRR_1; Domain location=178-200; Score =13.5; E_value=0.78; Accession=PF00560.25; Description=Leucine Rich Repeat
  Pfam annotation: Domain name=LRR_1; Domain location=49-71; Score =11.3; E_value=2; Accession=PF00560.25; Description=Leucine Rich Repeat
  Pfam annotation: Domain name=LRR_1; Domain location=73-94; Score=6.7; E_value=16; Accession=PF00560.25; Description=Leucine Rich Repeat
  Pfam module annotation: Pfam domain module=LRR_1::LRR_1::LRR_1::LRR _1::LRR_1::LRR_1; Domain location=105-127::130-152::154-176::178 -200::49-71::73-94
GIAASWRGSVDCCTWDGVSCGGDGAVARLWLPRRGLGGTISPSVANLTALTHLNLSGNSLDGVFPSALLSLPSAAVVDVSYNRLSGSLPDLSPSPPAGAAGRSLPLQVLDVSSNILAGQFPSVFWDNTPSLVSLNASNNSLEGSIPSLCVSCPLLAVLDLSVNAFGGGIPPGFANCSQLRVLNVGRNNLTGELPDDIFDVKPLQRLLLPSNKIQGTLDPERI

SEQ ID NO: 88218 - protein, 78 aa, Setaria italica
  Transcript Sequence Number=SeqID_22244
  Gene Ontology: Mol. function=ATP binding
  Homolog annotation: Hit_ID=Q01M14; Match level="QueryCoverage=98%, HitCoverage=9%, E-value=6e-22, Identity=70%"; Hit description =OSIGBa0148D14.7 protein
ELQTERDKNKSLTERLEDMEKQLDTANKEQEAMIELFAEERNYRDQEEGNLKRKLSDASSTIQDLMKQLDAARNCRKR

SEQ ID NO: 88219 - protein, 66 aa, Setaria italica
  Transcript Sequence Number=SeqID_22245
TQSIGMLSYTFLRSTNKEDIIVPMASLTSPLLYFLKAIHHCFITCIVFMFMIVVVALAADSFGNAS

SEQ ID NO: 88220 - protein, 638 aa, Setaria italica
  misc_feature (115)..(115): Xaa can be any naturally occurring amino acid
  Transcript Sequence Number=SeqID_22246
  Gene Ontology: Mol. function=ATP binding
  Homolog annotation: Hit_ID=Q01M14; Match level="QueryCoverage=97%, HitCoverage=77%, E-value=0.0, Identity=60%"; Hit description =OSIGBa0148D14.7 protein
  Pfam annotation: Domain name=DUF827; Domain location=418-623; Score= -116.3; E_value=0.1; Accession=PF05701.3; Description=Plant protein of unknown function (DUF827)
KNKKDGTRMLLIEDDGGGMNPDKMRHCMSLGYSAKSKVKNTIGQYGNGFKTSTMRLGADVLVFSRSRGIEGTRSTQSIGMLSYTFLRSTNKEDIIVPMIDYEKEQGWKRKVRTNXNDWRMSLETIIQWSPYATEAELIQEFGSIGEQGTRIVIYNLWEDDEGELELDFDADANDIQIRGVNRDQKNIQKANQFPNSKHFFTYRHSLRSYASILYLWLPDNFRMILRGIEIEHHNIVNDLMLKKKITYKPAMANGFPKDTHMAAIVTIGFVKDAKHHIDIQGFNVYHKNRLIKPFWRVWTAAGSGGRGIIGVLEVNFVEPAHDKQDFERTNCLARLEARLNRIQKKYWSDNRHRIGYCVDSDSTSSGTGKRGLSSRRFEKGSQKSNYLQRVKNADRSCSDPANKNMNASMPSPRMTKPSSPNREFSSRTISQQRAEKSARKIRPERSVLHGSSNTSDGDTELAGTPSRSTSPVLRTPEKSFHKVNTSLPSLSLAGVKRSERIAARYKSKEANVTNGDGQSTVHPEAIIKQLKEENSSLKDRILMVQESLSRELQTERDKNKSLTERLEDMEKQLDTANKEQEAMIELFAEERNYRDQEEGNLKRKLSDASSTIQDLMKQLDAARSCLSVLKLVYFVLRF

SEQ ID NO: 88221 - protein, 161 aa, Setaria italica
  Transcript Sequence Number=SeqID_22247
  Gene Ontology: Mol. function=nucleic acid binding; Cellular component= intracellular
  Homolog annotation: Hit_ID=UPI000019713A; Match level="QueryCoverage =75%, HitCoverage=12%, E-value=4e-18, Identity=43%"; Hit description =zinc finger protein-related
  Pfam annotation: Domain name=DUF537; Domain location=50-161; Score =113.7; E_value=6.2e-31; Accession=PF04396.6; Description=Protein of unknown function, DUF537
  Subcellular localization annotation: CTP_CleavageSite=27; ConfidenceScore=5.10e-01
MSFEDKVIASRVTSPSPKSVLSDSDPSRMMIVSSNGELSQTNGQANAVLGPVAIFWDIENCPVPSDVRPEDVAGNVRMALRMHPVVKGAVTMLSAYGDFNAFPRRLREGCQRTGVKLVDVPNGRKDAADKAILVDMFLFALDNHPPSSIMLISGDVDFAPA

SEQ ID NO: 88222 - protein, 80 aa, Setaria italica
  Transcript Sequence Number=SeqID_22248
SPAWRRQPIAAEAWLVLRDRLGFGRRRAAAQPLVEQLPRRGGGGGTAGEREGWMGGLAGWSCGFGLWAWVRRWKWNRGDA

SEQ ID NO: 88223 - protein, 117 aa, Setaria italica
  misc_feature (44)..(44): Xaa can be any naturally occurring amino acid
  Transcript Sequence Number=SeqID_22249
  Gene Ontology: Mol. function=transferase activity, transferring glycosyl groups; Cellular component=integral to membrane; Biological process=cell wall organization and biogenesis
  Homolog annotation: Hit_ID=B6SWB6; Match level="QueryCoverage=100%, HitCoverage=13%, E-value=5e-47, Identity=79%"; Hit description=CSLF3- cellulose synthase-like family F; beta1,3;1,4 glucan synthase
PDTIRKRSDMYNSMRTAEGDAKATWMANGTQWPGTWIDSTETHXKGHHDPIAKVVLDHPSRGHSQPNAEGIPSIGATDERLPMLVYVSREKNPSYDHNKKAGALNAQLRASALLTNA

SEQ ID NO: 88224 - protein, 119 aa, Setaria italica
  Transcript Sequence Number=SeqID_22250
LSVSSPYIQKLIFIIYTNKTTFAEHIIAKYILTYKQRKEKKAKAKDQQDLSRSLQLIVFIITIFRHRQHLDASPSMGSLLATKLQTNRIINPHKPRRERTEDEPNRKLINQHKGDTSTD

SEQ ID NO: 88225 - protein, 185 aa, Setaria italica
  Transcript Sequence Number=SeqID_22251
  Gene Ontology: Mol. function=transporter activity; Cellular component= integral to membrane; Biological process=transport
  Homolog annotation: Hit_ID=B9RB11; Match level="QueryCoverage=100%, HitCoverage=44%, E-value=2e-63, Identity=63%"; Hit description =Triose phosphate/phosphate translocator, non-green plastid, chloroplast, putative
  Pfam annotation: Domain name=DUF6; Domain location=3-109; Score=24.8; E_value=0.00035; Accession=PF00892.12; Description=Integral membrane protein DUF6
  Subcellular localization annotation: CTP_CleavageSite=70; ConfidenceScore=5.00e-01
PFPYTITTFQFASGSFFITLMWLLNLHPKPRLSLKQYAKILPLALIHMLGNVFTNLSLGKVAVSFTHTIKAMEPFFSVLLSVLFLGETPSLLVLGSLVPIVGGVLLASMTEVSFNWIGFWSAMASNLTNQSRNVFSKKLLADKEDNLDDINLFSIMTIMAFLLSAPLMLSVEGIKFSPSYLQSAG

SEQ ID NO: 88226 - protein, 89 aa, Setaria italica
  Transcript Sequence Number=SeqID_22252
GGYRSVHDLFLLAGDRYPGDARIGGGEERSRCSTRPEEPRLPCGCSSQLSCRGGGGGGRFCFCSIPWPAQPGKSDGAERPCPGQLLLAG

SEQ ID NO: 88227 - protein, 202 aa, Setaria italica
  misc_feature (193)..(193): Xaa can be any naturally occurring amino acid
  Transcript Sequence Number=SeqID_22253
  Gene Ontology: Mol. function=unfolded protein binding; Cellular component=cell wall; Biological process=protein folding
  Homolog annotation: Hit_ID=Q43638; Match level="QueryCoverage=89%, HitCoverage=23%, E-value=2e-85, Identity=86%"; Hit description=Heat -shock protein
  Pfam annotation: Domain name=HSP90; Domain location=10-202; Score= -171.2; E_value=1.1e-08; Accession=PF00183.10; Description=Hsp90 protein
FSLSLLYFFNFVSFPLVFLLCLYTHFTTEGEVEFRSVLYVPGMAPLSNEEIMNPKTKNIRLYVKRVFISDDFDGELFPRYLSFVKGVVDSNDLPLNVSREILQESRIVRIMRKRLVRKTFDMIEEIAEKDDKEDYKKFWESFGKFMKLGCIEDTGNHKRLAPLLRFYSSKNETDLISLDQYVENMPETQKAIXYIATDSLQS

SEQ ID NO: 88228 - protein, 520 aa, Setaria italica
  Transcript Sequence Number=SeqID_22254
  Gene Ontology: Mol. function=metal ion binding; Cellular component =perinuclear region of cytoplasm; Biological process=regulation of compound eye photoreceptor development
  Homolog annotation: Hit_ID=B3SGL6; Match level="QueryCoverage=57%, HitCoverage=34%, E-value=5e-78, Identity=48%"; Hit description =Putative Glu-rich protein
  Pfam annotation: Domain name=zf-C3HC4; Domain location=468-506; Score= 13.9; E_value=0.0027; Accession=PF00097.17; Description=Zinc finger, C3HC4 type (RING finger)
RHPVPGLREEFRFRLENLVRGQAVSQADASSTHDVELSTNDHSESRPPSETTQERHEQTSENISLQQIEGTATTSGFESGSPSVAEVFCGSHSQVESQEDLEQERRDWQRFSHAVIGEESERSWRENADISSREGTAVEDDHDDRLPVANEESTSVDRLPEAHEESISDDSLPEAHEEQHDSDHLPEVLEELHDNNHLQESHGEWSRDDHPIEVYDEWQSDDHLPEVNEEWQDDDHSADHHSNWHDNTSDQPIDHGAALIRRGNTFIPGDDENVYSTELRELLSRRSVSNLLHSAFRENLDRLIRSYVERQGRGPLPWDLEGSQGTTPAPNSPDQNQEHQRDDDDQELQHPVDRPPLVIPPPPMPPRQPLWHSELHRNNWIRQNIHRSSSDIEWEAINDLRADMARLQQGMSHMQRMLEACMDMQLELQRSVRQEVSAALNRFIGEQGESKEIIDDGSKWINVRKGTCCICCETPIDSLLYRCGHMCTCSKCANELVRGGGKCPLCRAPIIEVIRAYFIM

SEQ ID NO: 88229 - protein, 141 aa, Setaria italica
  Transcript Sequence Number=SeqID_22255
  Gene Ontology: Mol. function=unfolded protein binding; Cellular component=cell wall; Biological process=protein folding
  Homolog annotation: Hit_ID=Q43638; Match level="QueryCoverage=97%, HitCoverage=17%, E-value=1e-51, Identity=73%"; Hit description=Heat -shock protein
YSDSVALVRLMKAQTLGDTSSLEFMRGRRIFEINPDHPIIRDLSAACKNEPESTEAKRAVELLYEAALISSGYTPESPAELGGKIYEMMTMALGGRWGRSDTEDAEATSSEASVEVDSSEGAVTEVVEPSEVRTESDPWKD

SEQ ID NO: 88230 - protein, 481 aa, Setaria italica
  Transcript Sequence Number=SeqID_22256
  Gene Ontology: Mol. function=unfolded protein binding; Cellular component=cell wall; Biological process=protein folding
  Homolog annotation: Hit_ID=Q43638; Match level="QueryCoverage=91%, HitCoverage=55%, E-value=0.0, Identity=79%"; Hit description=Heat -shock protein
  Pfam annotation: Domain name=HATPase_c; Domain location=60-221; Score= 56.8; E_value=8.4e-14; Accession=PF02518.18; Description=Histidine kinase-, DNA gyrase B-, and HSP90-like ATPase
  Pfam annotation: Domain name=HSP90; Domain location=225-481; Score= -32.4; E_value=3.2e-14; Accession=PF00183.10; Description=Hsp90 protein
  Pfam module annotation: Pfam domain module=HATPase_c::HSP90; Domain location=60-221::225-481
VPHEGSRWEAERSRGRLVTVRCDAAVVEKPAGEEAAEEKFEYQAEVSRLMDLIVHSLYSHKEVFLRELVSNASDALDKLRFLGVTDSALLADGGELEIRIKPDPDAGTITITDTGVGMTKDELKDCLGTIAQSGTSKFLKALKENKDLGADNGLIGQFGVGFYSAFLVAEKVVVSTKSPKSDKQYVWEAVADSSSYVIKEETDPEKMLTRGTQITLFLRPDDKYEFADPSRIQGLVKNYSQFVSFPIYTWQEKSRTVEVEEDEEPKEGEEATEGEKLKKKKTITEKYWDWELANETKPIWMRNPKEIEKTEYNEFYKKTFNEFLDPLAHTHFTTEGEVEFRSVLYVPGMAPLSNDEIMNPKTKNIRLYVKRVFISDDFDGELFPRYLSFVKGVVDSNDLPLNVSREILQESRIVRIMRKRLVRKTFDMIEELAEKEDKEDYKMNLYFTTSYFVYLMLKLFNLCCRTTRSSGKALASSSSLG

SEQ ID NO: 88231 - protein, 119 aa, Setaria italica
  misc_feature (88)..(88): Xaa can be any naturally occurring amino acid
  Transcript Sequence Number=SeqID_22257
  Gene Ontology: Mol. function=diacylglycerol kinase activity; Biological process=activation of protein kinase C activity
  Homolog annotation: Hit_ID=B6ST14; Match level="QueryCoverage=83%, HitCoverage=16%, E-value=1e-43, Identity=82%"; Hit description =Diacylglycerol kinase
MQDGGEVLLDGGEVLFLDGAGEVVVSIGRSDLSLQPLHPELFSSCWSSITMQPKLDNKIKFSDVYAIELLDKGPICGPWNTRTAIQGXKNIEMHRFVVHGITRTRKRPSPLVPCEYIFG

SEQ ID NO: 88232 - protein, 92 aa, Setaria italica
  Transcript Sequence Number=SeqID_22258
  Homolog annotation: Hit_ID=B9RXW5; Match level="QueryCoverage=100%, HitCoverage=31%, E-value=3e-11, Identity=36%"; Hit description =Pentatricopeptide repeat-containing protein, putative
  Subcellular localization annotation: CTP_CleavageSite=31; ConfidenceScore=5.01e-01
YGRASMPSHAAATFLDLPQKHKSVTAFNALLAAYVDSGNFDMLVAAFQKPGLSTALDVIPLMEKCGLTPDGMSFNSLLNGFYNNDRFDDAEK

SEQ ID NO: 88233 - protein, 108 aa, Setaria italica
  Transcript Sequence Number=SeqID_22259
RAQELFQESLEKREMAMRLAVVALALCCCLIHASSAAADTSFSPGLKVKQDTRAAPPSCGADDQAVLAVEASAAGDGGAGGRMDLELEDYPGSGANARHSPWGQERRN

SEQ ID NO: 88234 - protein, 149 aa, Setaria italica
  Transcript Sequence Number=SeqID_22260
  Gene Ontology: Mol. function=signal transducer activity; Cellular component=plasma membrane; Biological process=response to light stimulus
  Homolog annotation: Hit_ID=Q9SA69; Match level="QueryCoverage=92%, HitCoverage=21%, E-value=1e-42, Identity=59%"; Hit description =F10O3.17
LVSRSGKIRRLVAEAKDAKLARLSLHGTPGGAQAFELAAKFCYGVHVEVTVANVAMLRCAAHYLQMTEDFSDKNLELRAEAFLRDAVLPSIASSVSVLRSCEALLPAAEDVNLVARLIAAIASNVCKEQLTSGLSKLDQCAQLRPAAAF

SEQ ID NO: 88235 - protein, 318 aa, Setaria italica
  Transcript Sequence Number=SeqID_22261
  Gene Ontology: Mol. function=aspartic-type endopeptidase activity; Biological process=proteolysis
  Homolog annotation: Hit_ID=B9RRP1; Match level="QueryCoverage=100%, HitCoverage=73%, E-value=3e-86, Identity=52%"; Hit description =Pepsin A, putative
  Subcellular localization annotation: CTP_CleavageSite=70; ConfidenceScore=5.02e-01
FQVYLDTGSDLTWVPCGTSSYQCMECGDQHSSSKPTPMFLPSQSSSNTWDLCGSRFCVDVHSSDNRFDPCAAVGCAIPAFTSGLCPRPCPPFSYTYGGGALVLGSLARDSVTLHGSIHGIDPLSPVEFPGFSFGCVGSSIREPIGIAGFGKGTLSLPSQLGFLGKGFSHCFLGFRFARNPNFTSPLVMGDLALSSATDDGGFIFTPMLKSVTYPNFYYIGLEGVSFGADGGSASTMAAAPPSLSGVDSQGNGGVLVDTGTTYTHLPDPFYASLLASLAAVVPYGRSRDMEARTGFDLCFRVPCTRAPCAAEDDELPPI

SEQ ID NO: 88236 - protein, 325 aa, Setaria italica
  Transcript Sequence Number=SeqID_22262
  Gene Ontology: Mol. function=protein serine/threonine kinase activity; Cellular component=peroxisome; Biological process=protein amino acid phosphorylation
  Homolog annotation: Hit_ID=B6SKM9; Match level="QueryCoverage=100%, HitCoverage=53%, E-value=1e-141, Identity=80%"; Hit description=ATP binding protein
  Pfam annotation: Domain name=Usp; Domain location=18-150; Score=34.7; E_value=3.8e-07; Accession=PF00582.18; Description=Universal stress protein family
MDTIEECGDGSDRHLLSGSRILVGVPDNSRGCSELLSWAIGAVAKANDSVVAVHVLGGRGRKKRLQKANAFVIYMLGEFVEACEAKQINLEAKVVCSSNIGRALTQEAALTDGNILIVGRSRNAYHRSHFETANYCFMHAPKNCSVIAVGREGLPQCNARLRSRSFDAESNISSSSTWSRRFPPLQKLLRSNSMRKPAQSSTEGAEDKSSPRAVLDGPEEGDNQVTEECYSTSSHEVSRRGHNGLWRRLSDMKLWLPFLRTIGDDSVRASDAGSAYAEDQKPAWRCFSFQEISVATNDFHPDNLAGRGGYAEVYKGVLSDGQYVA

SEQ ID NO: 88237 - protein, 56 aa, Setaria italica
  misc_feature (14)..(14): Xaa can be any naturally occurring amino acid
  Transcript Sequence Number=SeqID_22263
  Gene Ontology: Mol. function=protein binding
  Homolog annotation: Hit_ID=B6U329; Match level="QueryCoverage=75%, HitCoverage=44%, E-value=5e-16, Identity=88%"; Hit description=AGG2
MQEELEELQKTDKXFLTAMESKADPLLPVTTGPVNQSWDRWFEGPQDLRRCKCWFL

SEQ ID NO: 88238 - protein, 221 aa, Setaria italica
  misc_feature (10)..(10): Xaa can be any naturally occurring amino acid
  misc_feature (38)..(38): Xaa can be any naturally occurring amino acid
  misc_feature (63)..(63): Xaa can be any naturally occurring amino acid
  Transcript Sequence Number=SeqID_22264
  Gene Ontology: Mol. function=DNA binding; Cellular component =intracellular
  Homolog annotation: Hit_ID=B6SWS7; Match level="QueryCoverage=99%, HitCoverage=45%, E-value=1e-94, Identity=80%"; Hit description=DNA -binding protein
  Pfam annotation: Domain name=HSP20; Domain location=135-221; Score= -15.4; E_value=0.053; Accession=PF00011.13; Description=Hsp20alpha crystallin family
VKALLEYEKXKVRTGQLQIPPPGLPQPSGTDREVVVNXSSSARVRRDAATRAMQGWHAHRLLXTNGTYGDNILKDKDSMPLSSRDKNLKGFGVLKRKKASSPEYALKSSRTKVNKSQEDSMVIDVGEPADWVKINVRQTKDCFEVYALVPGLLREEVHVQSDPAGRLVITGDPEQPDNPWGITPFKKVVNLPSRIDPHQTSAVVTLHGQLFVRAPFGHADM

SEQ ID NO: 88239 - protein, 85 aa, Setaria italica
  Transcript Sequence Number=SeqID_22265
MRRPKRRGAGKQTRLREEDEIALLDEWIEAGKPRPGTKPPPPSKSAGAGPAPPAAGEYPEYGACTRFDELPLSQKTKDALRKKKF

SEQ ID NO: 88240 - protein, 141 aa, Setaria italica
  Transcript Sequence Number=SeqID_22266
  Pfam annotation: Domain name=DUF602; Domain location=1-137; Score= -50.4; E_value=2.5e-07; Accession=PF04641.4; Description=Protein of unknown function, DUF602
SSRKYQFLALRGCGHVLSVKALKEVKTSACLVCHKEFEEADKMPINGTEEEVAVLRKRMEEERGKVKEKKDKKVGNGLSGTKHAAAAALTAAGAEKLENGKKGEAATAKRFKAADHAPAHANKEVYASIFTSSRKSDFKET

SEQ ID NO: 88241 - protein, 115 aa, Setaria italica
  Transcript Sequence Number=SeqID_22267
  Gene Ontology: Mol. function=electron carrier activity; Cellular component=extracellular region; Biological process=response to oxidative stress
  Homolog annotation: Hit_ID=B6SRR3; Match level="QueryCoverage=100%, HitCoverage=35%, E-value=1e-48, Identity=84%"; Hit description =Peroxidase 52
  Pfam annotation: Domain name=peroxidase; Domain location=1-110; Score= -52.8; E_value=8e-06; Accession=PF00141.15; Description=Peroxidase
FASHGLSLQDLVVLSGGHTLGFSRCTNFRDRLYNETDTLDGALAASLQAVCPRATGSGDDNLAPLDPTPARFDGGYYASLLRGRGVLHSDQQLFAAGGVADALVRFYAANGDAFR

SEQ ID NO: 88242 - protein, 288 aa, Setaria italica
  Transcript Sequence Number=SeqID_22268
  Gene Ontology: Mol. function=sequence-specific DNA binding; Cellular component=nucleus; Biological process=regulation of transcription, DNA-dependent
  Homolog annotation: Hit_ID=A2WLR5; Match level="QueryCoverage=100%, HitCoverage=33%, E-value=1e-155, Identity=92%"; Hit description =Homeobox-leucine zipper protein HOX29
  Pfam annotation: Domain name=START; Domain location=1-136; Score =22.0; E_value=7.5e-06; Accession=PF01852.11; Description=START domain
RSMEVVNVLPAGNNGTIELLYMQLYAPTTLAPARDFWLLRYTSILDDGSLVVCERSLSSKQGGPSMPLVQPFIRGEMLPSGFLIRPSDGGGSIIHIVDHMNLEPWSVPEVVRPLYESSAMVAQKISMVALCYLRQVAHEDNHSVITGWGRQPAALRALSQKLTRGFNEALNGLADDGWSVIESDGVDDVCISVNSSPSKVINCNATFNNGLPIVSSSVLCAKASMLLQDVSPPALLRFMREQRSQWADSNLDAFFASAMKPNFCNLPMSRLGGFGGQVILPLAHTFRP

SEQ ID NO: 88243 - protein, 52 aa, Setaria italica
  Transcript Sequence Number=SeqID_22269
  Gene Ontology: Mol. function=metal ion binding
  Homolog annotation: Hit_ID=Q25AL0; Match level="QueryCoverage=100%, HitCoverage=7%, E-value=3e-19, Identity=92%"; Hit description =H0102C09.6 protein
TPVGTPRSGGPGGEPLTPTSAWRAAEQLAKVAIMRKSMNRVSDLHGFENARF

SEQ ID NO: 88244 - protein, 126 aa, Setaria italica
  Transcript Sequence Number=SeqID_22270
  Gene Ontology: Mol. function=electron carrier activity; Biological process=oxidation reduction
  Homolog annotation: Hit_ID=Q7XQ53; Match level="QueryCoverage=61%, HitCoverage=14%, E-value=1e-17, Identity=58%"; Hit description =OSJNBa0017P10.2 protein
MASATTLSFLFLLLATGLLVLLHIRSLKSKQGHRRLPPSPPSLPIIGHLHLFKKPLHRSLAALAAAHGPVLLLRFGSRRVVHVAHPAAAEECLTTHDATFANRPQLPSARHLSNGYTTLGSSSYGP

SEQ ID NO: 88245 - protein, 208 aa, Setaria italica
  misc_feature (25)..(25): Xaa can be any naturally occurring amino acid
  Transcript Sequence Number=SeqID_22271
VIAILCALVGSIIGFLARHFYPVNXEISINHFFSRIQKQYQRTQRKATLISFCDIKSAVASSMAYTLLLKVVRVSCGYLAVVFPSVRLQRDVPRKPSRRPGLRKTSTSPNIGLHNKSPLAPTEQLEDLISFAGDANDKDDSSNANCQEGEEPSFERDLMGLVYTPQGSVKKIDHMIEANLAGFSGHEEHSCLTVSRCSISKRRVHGDK

SEQ ID NO: 88246 - protein, 110 aa, Setaria italica
  Transcript Sequence Number=SeqID_22272
  Gene Ontology: Mol. function=aldehyde reductase activity; Biological process=oxidation reduction
  Homolog annotation: Hit_ID=P23901; Match level="QueryCoverage=96%, HitCoverage=33%, E-value=1e-55, Identity=93%"; Hit description =Aldose reductase
  Pfam annotation: Domain name=Aldo_ket_red; Domain location=9-110; Score=-115.1; E_value=0.053; Accession=PF00248.13; Description =Aldoketo reductase family
TQIHWPFRLKDGAHMPPAAGEVLEFDLEGVWREMESLVKDGLVKDIGVCNYTVTKLNRLMRSATIPPAVCQMEMHPGWKNDKIFEACKKHGIHVTAYSPLGSSEKNLRQQ

SEQ ID NO: 88247 - protein, 99 aa, Setaria italica
  misc_feature (83)..(83): Xaa can be any naturally occurring amino acid
  Transcript Sequence Number=SeqID_22273
  Gene Ontology: Mol. function=aldehyde reductase activity; Cellular component=cytosol; Biological process=oxidation reduction
  Homolog annotation: Hit_ID=P23901; Match level="QueryCoverage=95%, HitCoverage=30%, E-value=2e-42, Identity=87%"; Hit description =Aldose reductase
MASAQAMGQGEQDHFVLKSGHTIPAVGLGTWRAASDSAHSVKTAITEAGYRHVDTAAQYGVEKEVGKGLKAAMEAGINRKDLXVTSKLWCTDLAPNYSH

SEQ ID NO: 88248 - protein, 319 aa, Setaria italica
  Transcript Sequence Number=SeqID_22274
  Gene Ontology: Mol. function=aldehyde reductase activity; Biological process=oxidation reduction
  Homolog annotation: Hit_ID=P23901; Match level="QueryCoverage=100%, HitCoverage=100%, E-value=1e-166, Identity=87%"; Hit description =Aldose reductase
  Pfam annotation: Domain name=Aldo_ket_red; Domain location=17-289; Score=434.9; E_value=1.2e-127; Accession=PF00248.13; Description =Aldoketo reductase family
MASAQAMGQGEQDHFVLKSGHTIPAVGLGTWRAASDSAHSVKTAITEAGYRHVDTAAQYGVEKEVGKGLKAAMEAGINRKDLFVTSKLWCTDLAPNKVRPALQNTLKDLQLDYLDLYLIHWPFRLKDGAHMPPAAGEVLEFDLEGVWREMESLVKDGLVKDIGVCNYTVTKLNRLMRSATIPPAVCQMEMHPGWKNDKIFEACKKHGIHVTAYSPLGSSEKNLAHDPAVEKVANKLNKTPGQVLIKWALQRGTSVIPKSTKDERIKENIQVFGWEIPEEDFKVLCSIKDEKRVLTGEELFVNKTHGPYKSASELWDHED

SEQ ID NO: 88249 - protein, 204 aa, Setaria italica
  Transcript Sequence Number=SeqID_22275
  Gene Ontology: Mol. function=electron carrier activity; Biological process=response to oxidative stress
  Homolog annotation: Hit_ID=Q9FEQ8; Match level="QueryCoverage=100%, HitCoverage=60%, E-value=1e-80, Identity=70%"; Hit description =Peroxidase 2
  Pfam annotation: Domain name=peroxidase; Domain location=1-168; Score= 130.6; E_value=5.1e-36; Accession=PF00141.15; Description=Peroxidase
SCADIVAFAARDASAFLGGRGVSFDMPAGRLDGRASVASRALDFLPPPVFTLPELVASFAAKGLGVEDMVVLSGAHTVGRSHCSSFVPDRLAAPSDINPSFAASLRGQCPASPSAGNDPTVVQDAVTPDALDNQYYKNVLAHRVLFTSDAALLTSPETAKMVSDNANIPGWWEDRFKKAMVKMASVEVKTGNHGEVRRNCRVVN

SEQ ID NO: 88250 - protein, 253 aa, Setaria italica
  Transcript Sequence Number=SeqID_22276
  Gene Ontology: Mol. function=hydrolase activity; Biological process =metabolic process
  Homolog annotation: Hit_ID=Q2RAT1; Match level="QueryCoverage=100%, HitCoverage=71%, E-value=3e-92, Identity=71%"; Hit description =HSR203J, putative, expressed
  Pfam annotation: Domain name=Abhydrolase_3; Domain location=2-224; Score=110.9; E_value=4.4e-30; Accession=PF07859.5; Description =alphabeta hydrolase fold
RPSWAIYHNFYAPLAAELDVAGIVSVYLPLAPEHRLPAAIDAGHAALLWFRDVARSRNVYGAAHSALVRHFRRTADFSRVFLIGDSSGGNLVHLVAARAGEDKPGVLHPVRLAGGVLLHPGFAREQKSRSELENPPSMFLAPEMIEKLLALGLPMGVNRDSPYTSPELATKAVAHVRMPPLLLMAAEKDLLHDPQVDYGKAMEHAGKKVTTVVSRGDVAHVFYLNFFAVKTDQLTANRTKELVHTIKCFIDQH

SEQ ID NO: 88251 - protein, 173 aa, Setaria italica
  misc_feature (161)..(161): Xaa can be any naturally occurring amino acid
  Transcript Sequence Number=SeqID_22277
  Gene Ontology: Mol. function=hydrolase activity; Biological process =metabolic process
  Homolog annotation: Hit_ID=Q2RAT1; Match level="QueryCoverage=83%, HitCoverage=40%, E-value=4e-49, Identity=67%"; Hit description =HSR203J, putative, expressed
MAEMGFERSWYSFVLLASLVLATAELATAQTSPNRTVVEEVTGWLRIYSDGTVERLTPPGAEAFTAIVPPYKNPRGGVTVHDITTDRGIDVRLYLPAAAAAKAPHRRRRPVLLHLHGGGFCVTRPSWAIYHNFYAPLAAELDVAGIVSVYLPLAPEHRLPXAIDAGHAALLWF

SEQ ID NO: 88252 - protein, 202 aa, Setaria italica
  misc_feature (7)..(7): Xaa can be any naturally occurring amino acid
  misc_feature (53)..(53): Xaa can be any naturally occurring amino acid
  Transcript Sequence Number=SeqID_22278
  Gene Ontology: Mol. function=zinc ion binding; Cellular component =nucleus; Biological process=regulation of transcription, DNA -dependent
  Homolog annotation: Hit_ID=Q7XTS2; Match level="QueryCoverage=91%, HitCoverage=19%, E-value=3e-38, Identity=40%"; Hit description =OSJNBa0008M17.13 protein
  Pfam annotation: Domain name=MULE; Domain location=80-176; Score =85.7; E_value=1.6e-22; Accession=PF10551.1; Description=MULE transposase domain
HKMRARXHELGQGTCIEGKQGKGVQLGDAGAALQYLEELQVGNPSVYYAVGVXGPDGKSAVNFFWADAKSIIDFRSFGDVVCFDTTYGLNIYGRPFALFVGVDNHKQLLVFGAALLYDESIQSLKWTFEVFADAMRARQPQTIFIDERPECAVAAAEVWPGSNRCISVWHIYHNSKRHLKQVFESSKSFSNSLSHCLFDFCT

SEQ ID NO: 88253 - protein, 113 aa, Setaria italica
  misc_feature (39)..(39): Xaa can be any naturally occurring amino acid
  misc_feature (62)..(62): Xaa can be any naturally occurring amino acid
  misc_feature (107)..(107): Xaa can be any naturally occurring amino acid
  Transcript Sequence Number=SeqID_22279
  Gene Ontology: Mol. function=beta-N-acetylhexosaminidase activity; Cellular component=cell wall; Biological process=carbohydrate metabolic process
  Homolog annotation: Hit_ID=B9RM00; Match level="QueryCoverage=99%, HitCoverage=18%, E-value=4e-34, Identity=64%"; Hit description=Beta -hexosaminidase, putative
GLIELHSAPWTIMDMPRFPYRGLLIDTSRHYLPVPVIKXSVIDSMTFSKLLSHMIRAIYHHXNVLHWHIVDEESFPLQIPSYPKLWNGAYSYSERYTFDDAIDIVQXAEKRGV

SEQ ID NO: 88254 - protein, 177 aa, Setaria italica
  misc_feature (38)..(38): Xaa can be any naturally occurring amino acid
  misc_feature (151)..(151): Xaa can be any naturally occurring amino acid
  Transcript Sequence Number=SeqID_22280
  Gene Ontology: Mol. function=beta-N-acetylhexosaminidase activity; Cellular component=cell wall; Biological process=carbohydrate metabolic process
  Homolog annotation: Hit_ID=B9RM00; Match level="QueryCoverage=99%, HitCoverage=32%, E-value=4e-63, Identity=65%"; Hit description=Beta -hexosaminidase, putative
  Pfam annotation: Domain name=Glyco_hydro_20; Domain location=2-177; Score=-81.7; E_value=2.4e-07; Accession=PF00728.14; Description =Glycosyl hydrolase family 20, catalytic domain
MGVGYPSLWPSDSCREPLDVSKNFTFEVIDGILSDFSXKVFKFKFAHLGGDEVNTSCWTTTPHIEGWLNNNHMNVSDAYRDFVLRSQKIAISHGYDIINWEETFNNFGDKLDRKTVVHNWLGEDVSPKVVAAGLRCIVSNQDKWYLDHLEXDLQWEGFYMNEPLKGIDDTKQQQLVI

SEQ ID NO: 88255 - protein, 391 aa, Setaria italica
  Transcript Sequence Number=SeqID_22281
  Gene Ontology: Mol. function=beta-N-acetylhexosaminidase activity; Cellular component=cell wall; Biological process=carbohydrate metabolic process
  Homolog annotation: Hit_ID=B9RM00; Match level="QueryCoverage=100%, HitCoverage=74%, E-value=0.0, Identity=76%"; Hit description=Beta -hexosaminidase, putative
  Pfam annotation: Domain name=Glyco_hydro_20; Domain location=38-343; Score=416.1; E_value=5.7e-122; Accession=PF00728.14; Description =Glycosyl hydrolase family 20, catalytic domain
FGALHALETFSQLCNFDFNARLIELHSAPWTIMDMPRFPYRGLLIDTSRHYLPVPVIKSVIDSMTFSKLNVLHWHIVDEESFPLQIPSYPKLWNGAYSYSERYTFDDAIDIVQYAEKRGVNVLAEIDVPGHALSWGVGYPSLWPSATCKEPLDVSNDFTFQVINGILSDFSKIFKFKFVHLGGDEVNTSCWTTTPRIKSWLIKHGMNESDAYRYFVLRAQKIAISHGYDIINWEETFNNFGDKLDRKTVVHNWLGSGVAEKVVAAGLRCIVSNQDKWYLDHLDATWEGFYMNEPLTNIYNPQQQKLVLGGEVCMWGEHIDASDIQQTIWPRAAAAAERLWTPIEKLAKDAGSVTARLARFRCLLNQRGVAAAPLAGYGRSAPSDPGSCLRQ

SEQ ID NO: 88256 - protein, 62 aa, Setaria italica
  misc_feature (45)..(45): Xaa can be any naturally occurring amino acid
  Transcript Sequence Number=SeqID_22282
MNVIAFDHRQSTLARIPKLGQCPSNVELHIDTSKSSVRSVFDYFXSKKLAGTKSDSVSIEKK

SEQ ID NO: 88257 - protein, 147 aa, Setaria italica
  Transcript Sequence Number=SeqID_22283
LRSAPDADWFRFSRWLKEMESSSSGSCVQGTVYHWIVLFAVWLCGSQHVLSQKTTLEPKDKFLLSDPPIGLFDPIEISPSVLPHNPNPVEPLSPMYPNYTSYDPVLTGKCHVNFSALSYTIDKTASDCSIPLVYLLSLSCICFIYLF

SEQ ID NO: 88258 - protein, 79 aa, Setaria italica
  misc_feature (48)..(48): Xaa can be any naturally occurring amino acid
  Transcript Sequence Number=SeqID_22284
VNWLNLVLNDVVCPLEFDEPSSVVKACAKASSSTPSCCAALHSYIGTXQKQIFVTNLQAINCATMFGSMLQKAGVVEDI

SEQ ID NO: 88259 - protein, 292 aa, Setaria italica
  Transcript Sequence Number=SeqID_22285
  Homolog annotation: Hit_ID=Q9XI85; Match level="QueryCoverage=99%, HitCoverage=57%, E-value=1e-120, Identity=66%"; Hit description =F7A19.11 protein
  Pfam annotation: Domain name=DUF246; Domain location=1-243; Score =348.0; E_value=1.8e-101; Accession=PF03138.6; Description=Plant protein family
HKVIHFEKSDARLANNGLPVQLQMLRCRVNFEALRFTPQIEALGRKLISTLQRSGKFVVLHLRYEMDMLSFSGCTHGCSSKETEELTRMRYAYPWWKEKEIDSEAKRLQGLCPLTPEEITLVLKALGFTKDTLIYIASGEIYGGERRLAALKTAYPKLVRKEKILSPDELRPFQNHSTQMAALDYMVSLASDIFIPSYDGNMARVVEGHRRHMGFRKTIVLDRKKLVELLDLFQGGALSWDEFSDAVKEAHKSRMGQPTERKIMPGQPKEEDYFYANPQECLGSNGGLRDIS

SEQ ID NO: 88260 - protein, 36 aa, Setaria italica
  Transcript Sequence Number=SeqID_22286
TSSNLKTFAFGAFLRSGSCNWLRLLGLLRPQRLVLV

SEQ ID NO: 88261 - protein, 159 aa, Setaria italica
  Transcript Sequence Number=SeqID_22287
  Gene Ontology: Mol. function=electron carrier activity; Biological process=electron transport chain
  Homolog annotation: Hit_ID=B9SKK1; Match level="QueryCoverage=52%, HitCoverage=43%, E-value=1e-13, Identity=44%"; Hit description =Uclacyanin-2, putative
  Pfam annotation: Domain name=Cu_bind_like; Domain location=33-114; Score=64.9; E_value=3e-16; Accession=PF02298.9; Description =Plastocyanin-like domain
MSALAMAKALVVALVAIAAVAELAAAKNHTIQWSVSGNYGDWSASNAVSVGDTVVFTYGPPHTVDELPSEADYKACSFDGKLSSDDGGRTAFTFDKVGTRYFACAAGSHCTQGQKVAITVTDGASSATPKGNSAATGAAGLAAKLALGLGVGGALLAAF

SEQ ID NO: 88262 - protein, 121 aa, Setaria italica
  Transcript Sequence Number=SeqID_22288
  Gene Ontology: Mol. function=hydrolase activity, acting on ester bonds; Biological process=lipid metabolic process
  Homolog annotation: Hit_ID=B6T560; Match level="QueryCoverage=98%, HitCoverage=32%, E-value=7e-14, Identity=38%"; Hit description=GSDL -motif lipase
  Subcellular localization annotation: CTP_CleavageSite=44; ConfidenceScore=5.13e-01
PLSQQVRLFELTKAEMGPRVASNLLSRSFFLLGAGSNDFFAFATAQAKRNKTATQSDVAAFYGSLLSNYSATITELYKLGARKFGIINVGPVGCVPRVRVLNATGACADGMNQLAAGFDAA

SEQ ID NO: 88263 - protein, 44 aa, Setaria italica
  Transcript Sequence Number=SeqID_22289
QKVNVFKSWLSAPDILRNNDLLCSVIFVIDGCYLRISYCWTLSF

SEQ ID NO: 88264 - protein, 303 aa, Setaria italica
  Transcript Sequence Number=SeqID_22290
  Gene Ontology: Mol. function=electron carrier activity; Biological process=oxidation reduction
  Homolog annotation: Hit_ID=Q8LQ07; Match level="QueryCoverage=97%, HitCoverage=59%, E-value=1e-103, Identity=60%"; Hit description =Putative cytochrome P450
  Pfam annotation: Domain name=p450; Domain location=2-294; Score= -15.2; E_value=6.4e-11; Accession=PF00067.14; Description=Cytochrome P450
SWTKGLELIAGFNLVDLFPGSRLARTLGAGSLRAAREVHDRVHRIVQAIIRDHESKGLNGDGEEGGGRRDDILGVLLRLQRDGGLETVLTTQVVCGVLFDVFAAGSETTATTTIWAMSELVRNPAVMQRAQSEVRQLLQGRTGVAEADIQGRLPYLQMVIKETLRLHPPVPLILPRSCSEPVEIMGYHVPKGTTIFVNVWAIGRDDKSWPNADEFKPERFEVDFRGADDFRFLPGGGGRRMCPGLTFGFANIEIALANMLYHFNWKLLNGADPSELDMTESYGITARRKTQLLLEATPFVPID

SEQ ID NO: 88265 - protein, 72 aa, Setaria italica
  Transcript Sequence Number=SeqID_22291
QLATYVWPLPLQNLMQHGSVTISIEQHKTSIKAWSNLATRVKLLNFTTEVNICHGKFLKLKNFSSYIGSLVQ

SEQ ID NO: 88266 - protein, 506 aa, Setaria italica
  Transcript Sequence Number=SeqID_22292
GFVSGAKRVISSVLLFSSPEETGSGEEEEDDEDGNGLNSDENEDVPDTHGAIVPYSESKLAIEQMVMKETFTRDECDKMVELIKSRVTDSTFPEAREYGSPEEIPSRIAGIGHDFTGAWRSLSRDRNFTKSVPFSSMRPGSFSPGSPLQASPELCTVAVTEAKKWLEERRQGLGLKPEDNGTCTLNTDMLSSGIDSDMGSPVDLAKSYMQSLPPWQSPFLGSQKFNTSSSKYSSSLSKVTTKEDYLSNFWGKLEESRRAHIGSSGGSVDAPKFWNYGSTSRLFENDTAIFSLGTDEKVGEPTKTNNGSEKVAATEPISGYSIPITPAEDRIDGIGEPVELAKDNGNASEIQPDKVAEGNNVSSTSNTKDATDHIGDVKAPTAEPNLGESHINSASEFRPKDAGPPIQARVNGSSKKTSVNGLVDQSKANSGLESSANDNPSCTNSSSAVPPTSNDLTESAAGAADVHSVENCTGINPEEPVKGASRQNVRRGGRKRVVRGPKGRGK

SEQ ID NO: 88267 - protein, 47 aa, Setaria italica
  misc_feature (13)..(13): Xaa can be any naturally occurring amino acid
  Transcript Sequence Number=SeqID_22293
NKDSSSDLKTKKXCIKQINCSSITEGTSSSRCSSSGPPDVSNSVGDG

SEQ ID NO: 88268 - protein, 68 aa, Setaria italica
  Transcript Sequence Number=SeqID_22294
CVHQCKNLSEHSANHVLCHHQKSIPITVFHLYLFPYLDARKKCWPVMVLCCICCYSFLFLNYLSSVIS

SEQ ID NO: 88269 - protein, 105 aa, Setaria italica
  misc_feature (18)..(18): Xaa can be any naturally occurring amino acid
  Transcript Sequence Number=SeqID_22295
  Gene Ontology: Cellular component=extracellular region; Biological process=plant-type cell wall organization and biogenesis
  Homolog annotation: Hit_ID=Q7G6Z2; Match level="QueryCoverage=100%, HitCoverage=42%, E-value=1e-38, Identity=69%"; Hit description =Expansin-A12
  Pfam annotation: Domain name=DPBB_1; Domain location=2-89; Score =126.1; E_value=1.1e-34; Accession=PF03330.10; Description=Rare lipoprotein A (RlpA)-like double
NTAALSSSQGRRCCSCGXCYQVMCDQQNSQWCRPGVTVTVTATNLCPPDWSKASNNGGWCNPPRQHFDMAQPAWEKIGVYRGGYVPVMYQRVSCSRSGGVRFTIN

SEQ ID NO: 88270 - protein, 102 aa, Setaria italica
  misc_feature (88)..(88): Xaa can be any naturally occurring amino acid
  Transcript Sequence Number=SeqID_22296
  Gene Ontology: Cellular component=extracellular region; Biological process=plant-type cell wall organization and biogenesis
  Homolog annotation: Hit_ID=Q4PR41; Match level="QueryCoverage=95%, HitCoverage=38%, E-value=4e-35, Identity=78%"; Hit description =Expansin-A25
  Pfam annotation: Domain name=DPBB_1; Domain location=58-102; Score= -5.3; E_value=0.024; Accession=PF03330.10; Description=Rare lipoprotein A (RlpA)-like double
MDRVLTLFIAVLTATFFAPAKGWNYGTATFYGGPDASGTMGGACGYGNLYQAGYGTNTAALSSVLFNDGAACGQCYLIMCDSNASPWXKGGAAVTVTATNFC

SEQ ID NO: 88271 - protein, 254 aa, Setaria italica
  Transcript Sequence Number=SeqID_22297
  Gene Ontology: Cellular component=extracellular region; Biological process=plant-type cell wall organization and biogenesis
  Homolog annotation: Hit_ID=Q4PR52; Match level="QueryCoverage=89%, HitCoverage=87%, E-value=1e-100, Identity=72%"; Hit description =Expansin-A13
  Pfam annotation: Domain name=DPBB_1; Domain location=62-150; Score =159.1; E_value=1.3e-44; Accession=PF03330.10; Description=Rare lipoprotein A (RlpA)-like double
  Pfam annotation: Domain name=Pollen_allerg_1; Domain location=161 -238; Score=146.4; E_value=8.8e-41; Accession=PF01357.13; Description= Pollen allergen
  Pfam module annotation: Pfam domain module=DPBB_1::Pollen_allerg_1; Domain location=62-150::161-238
MARKVSCHLLVIAVVAASLAATARAGWIRGSATFYGGADASGTMGGACGYGNLYSTGYGTNTAALSSSLFNDGAACGECYKLVCDRKTDRTWCKPGVSVTVTATNFCPPNWSIPSDRGGWCNPPRPHFDMAQPAWEKIGVYRGGIIPVIYKRVSCVKKGGVRFAVNGHDYFELVLITNVAGPGSLKSVQIRGTRTGWITMSRNWGANWQANNYLNGQSISFRVTATNGQTIEFWEVAGSGWRFGQTFTNGQNFY

SEQ ID NO: 88272 - protein, 60 aa, Setaria italica
  misc_feature (1)..(29): Xaa can be any naturally occurring amino acid
  Transcript Sequence Number=SeqID_22298
XXXXXXXXXXXXXXXXXXXXXXXXXXXXXFCQRCSVFTHFNLDARTTFLTQQNSLTLSPE

SEQ ID NO: 88273 - protein, 139 aa, Setaria italica
  misc_feature (18)..(18): Xaa can be any naturally occurring amino acid
  Transcript Sequence Number=SeqID_22299
  Gene Ontology: Mol. function=receptor activity; Cellular component =integral to membrane
  Homolog annotation: Hit_ID=B9HWP3; Match level="QueryCoverage=98%, HitCoverage=17%, E-value=2e-55, Identity=71%"; Hit description=Pho1 -like protein
HGVSKTKLRHAEKMIRGXFVELYKGLGYLATYRNLNMMAFVKILKKFEKISGKQVLSVYLKVVESSYFNSSDEALKLMDEVEEIFVRHFAGGNRRKAMRYLKPAQRKESHSVTFFTGLATGCFAALFVGYCVMAHMAGL

SEQ ID NO: 88274 - protein, 55 aa, Setaria italica
  Transcript Sequence Number=SeqID_22300
VGIFSELNGVYSQFSSGLNPGTLYDLFLIEFCLTRYLMYVSWAATYRFPPLIHAP

SEQ ID NO: 88275 - protein, 345 aa, Setaria italica
  Transcript Sequence Number=SeqID_22301
  Gene Ontology: Cellular component=membrane
  Homolog annotation: Hit_ID=B6T6G6; Match level="QueryCoverage=92%, HitCoverage=90%, E-value=1e-110, Identity=58%"; Hit description=Cell division control protein 50
  Pfam annotation: Domain name=CDC50; Domain location=63-334; Score =441.9; E_value=9.8e-130; Accession=PF03381.7; Description=LEM3 (ligand-effect modulator 3) family  CDC50 family
  Subcellular localization annotation: CTP_CleavageSite=38; ConfidenceScore=5.12e-01
MDEASTSASGGATRRAFPPARSGVYYRFTQQNLPAWKPAMTPGCLIATFLVIGIIFVPFGLFCLQTSNHVAEIIRRYDVDCVPNAYRGNKQAYIKDSSISKNCSLEVKVLDHIRAPIYVYYELENFYQNHRRYVKSRSDKQLRFGAKYTAESCSPVQLDDNGFPIVPCGLIAWSLFNDTYDFTHGSKEIKINRKNISWKSDREHKFGKNVFPSNFQNGSFIGGGKLDPTVPLREQEDLIVWMRTAALPKFRKLYGVIEEDLQVDETISILIRNNYNTYTFGGKKSIVLSTATWLGGKNDFLGYAYIVTGSLSIFMSILFALIHVKYPRPQGDLNCLSLNRKNSNS

SEQ ID NO: 88276 - protein, 165 aa, Setaria italica
  Transcript Sequence Number=SeqID_22302
  Homolog annotation: Hit_ID=Q7XGU7; Match level="QueryCoverage=100%, HitCoverage=49%, E-value=5e-59, Identity=66%"; Hit description =Thaumatin-like protein 1, putative, expressed
  Pfam annotation: Domain name=Thaumatin; Domain location=2-164; Score =141.5; E_value=2.7e-39; Accession=PF00314.9; Description=Thaumatin family
FSCVTGNCGSGQLDCAGHGAKPPATLAEFTFDGHGGLDFYDVSLVDGYNLPMLVEPRHTHGAAAGPNCVVTGCVMDLNGACPSELRVGSSDGRAVACRSACEAFGSAEHCCHGEHGNPNTCWPTVYSQFFKKSCPRAYSYAYDDATSTFTCGGGGTSYAITFCPS

SEQ ID NO: 88277 - protein, 73 aa, Setaria italica
  Transcript Sequence Number=SeqID_22303
LVSIPGVAEKRKKREKARRGGEKRVRFADDVVDNGAASASSPRAAAAAMPANREALYRGMLRGRSMLRVSCSY

SEQ ID NO: 88278 - protein, 56 aa, Setaria italica
  Transcript Sequence Number=SeqID_22304
GARLGDREVQAIGLLVSGKKKSRKNRPAGGKRVFPMVVNGEEDAVEGKEAACAGKR

SEQ ID NO: 88279 - protein, 55 aa, Setaria italica
  Transcript Sequence Number=SeqID_22305
  Subcellular localization annotation: CTP_CleavageSite=44; ConfidenceScore=5.27e-01
MASISGAAAPPSSAACRLRLRRHLLLRPSHLRLRAPHSIADLSRSSSSSDSAPTP

SEQ ID NO: 88280 - protein, 131 aa, Setaria italica
  Transcript Sequence Number=SeqID_22306
LPHGHLRGPAPATARWEGGGGRGGGARVSDGERWLRERKDVRKGGLTAAVLAPMRVSDGTLLRWQGGEHRGYRARGGVPLRSPRTLPLPLPQVLAVLISLWRECNCWCLCLVVLIFMWCECNLRRLFSGVL

SEQ ID NO: 88281 - protein, 299 aa, Setaria italica
  misc_feature (89)..(89): Xaa can be any naturally occurring amino acid
  Transcript Sequence Number=SeqID_22307
  Gene Ontology: Mol. function=phosphoenolpyruvate carboxylase activity; Cellular component=cytoplasm; Biological process=carbon utilization by fixation of carbon dioxide
  Homolog annotation: Hit_ID=P29193; Match level="QueryCoverage=100%, HitCoverage=30%, E-value=1e-169, Identity=94%"; Hit description =Phosphoenolpyruvate carboxylase, housekeeping isozyme
QDEVIEQSFGEEHLCFRTLQRFTAASLEHGMHPPISPKPEWRALMDEMAIVATKEYRSIVFEEPRFVEYFRLATPEMEYGRMNIVSRPXKKKPSGGIESLRAIPWIFAWTQTRFHLPVWLGFGAAFKHVLDKDIRNLQTLQEMYNQWPFFRVTIDLVEMVFAKGDPGIASLYDKLLVSEDLWPFGERLRANYEETKQLLLQVAGHKDLLEGDPYLKQRLRIRDSYISALNVCQAYTLKRIRDPGFEVKPRPHLSKDIMDAGKPAAELVKLNTTSEYAPGLEDTLILTMKGIAAGMQNTG

SEQ ID NO: 88282 - protein, 152 aa, Setaria italica
  Transcript Sequence Number=SeqID_22308
  Gene Ontology: Mol. function=electron carrier activity
  Homolog annotation: Hit_ID=B6TRB2; Match level="QueryCoverage=82%, HitCoverage=81%, E-value=1e-66, Identity=92%"; Hit description =Copper ion binding protein
  Pfam annotation: Domain name=Cu_bind_like; Domain location=42-137; Score=4.6; E_value=2.4e-05; Accession=PF02298.9; Description =Plastocyanin-like domain
MAEARSGAALVAAAAVVALLVLALAPEGSRAERFIVGDAARWTWGYNYTDWVIKKGPFFQNDTLVFMYDPPNATVHAHSVYMMRNAADYQSCNLKAAKLVAGVTQGAGSGFEFVLTKRKKHYFVCGERGGIHCTMGQMKFIVKPKSSACRDD

SEQ ID NO: 88283 - protein, 193 aa, Setaria italica
  Transcript Sequence Number=SeqID_22309
  Homolog annotation: Hit_ID=Q9XIG0; Match level="QueryCoverage=57%, HitCoverage=29%, E-value=1e-16, Identity=42%"; Hit description =T10P12.8 protein
  Pfam annotation: Domain name=DUF793; Domain location=66-193; Score= -223.0; E_value=0.022; Accession=PF05633.3; Description=Protein of unknown function (DUF793)
  Subcellular localization annotation: CTP_CleavageSite=38; ConfidenceScore=5.21e-01
DGRRQADRQTSAPAILLRVPHPTQTQEKPSRRPERRARGRRKPSNQSIPNPHSIPPSNPTKLPHTMPATDSSSSPATPLASIGRSIRSLRRDHNQIHSFPTPHPHSDLDAADAFQRRAAKLLSDLLAPDGDLLSLAWTTRLLDAFLLCLVEFRALLFGPGADAASRPPLDRLVADFFDRAVKALDLCNAVRDG

SEQ ID NO: 88284 - protein, 92 aa, Setaria italica
  Transcript Sequence Number=SeqID_22310
  Gene Ontology: Mol. function=electron carrier activity
  Homolog annotation: Hit_ID=B6TRB2; Match level="QueryCoverage=100%, HitCoverage=59%, E-value=6e-44, Identity=89%"; Hit description =Copper ion binding protein
  Pfam annotation: Domain name=Cu_bind_like; Domain location=1-77; Score=-23.7; E_value=0.024; Accession=PF02298.9; Description =Plastocyanin-like domain
NSPAVFMYDPPNATVHAHSVYMMRNAADYQSCNLKAAKLVAGVTQGAGSGFEFVLTKRKKHYFVCGERGGIHCTMGQMKFIVKPKSSACRDD

SEQ ID NO: 88285 - protein, 97 aa, Setaria italica
  Transcript Sequence Number=SeqID_22311
  Gene Ontology: Mol. function=mannosyltransferase activity; Cellular component=endoplasmic reticulum
  Homolog annotation: Hit_ID=B9T0W1; Match level="QueryCoverage=44%, HitCoverage=11%, E-value=5e-16, Identity=81%"; Hit description =Dolichyl-P-Man:Man(5)GlcNAc(2)-PP-dolichyl mannosyltransferase, putative
MARAEKSRAASTASVATEKPARSADRRPLYFAAFLVLADAALVALIIAFVPYTKIDWDAYMSQVDTFLEGERDYTKIEGDTGPLVYPAGFLYVLLLA

SEQ ID NO: 88286 - protein, 43 aa, Setaria italica
  Transcript Sequence Number=SeqID_22312
HSPCASSSGSFWQRVGTSRSHQAQLQDQAEMIKPFYFVLNIGF

SEQ ID NO: 88287 - protein, 79 aa, Setaria italica
  Transcript Sequence Number=SeqID_22313
  Gene Ontology: Cellular component=plasma membrane
  Homolog annotation: Hit_ID=B6SU20; Match level="QueryCoverage=100%, HitCoverage=18%, E-value=7e-35, Identity=89%"; Hit description=Tubby- like protein
MSFRSMVRDLRESFGNISRRNFEVRIHHRGKSLGSSSDLQDRPVVIQQSRWASLPPELLRDVMKRLEEDESSWPSRKDV

SEQ ID NO: 88288 - protein, 388 aa, Setaria italica
  Transcript Sequence Number=SeqID_22314
  Gene Ontology: Cellular component=plasma membrane
  Homolog annotation: Hit_ID=B6SU20; Match level="QueryCoverage=99%, HitCoverage=88%, E-value=1e-180, Identity=82%"; Hit description =Tubby-like protein
  Pfam annotation: Domain name=F-box; Domain location=2-54; Score=18.2; E_value=0.033; Accession=PF00646.25; Description=F-box domain
  Pfam annotation: Domain name=Tub; Domain location=65-382; Score =645.3; E_value=5.6e-191; Accession=PF01167.10; Description=Tub family
  Pfam module annotation: Pfam domain module=F-box::Tub; Domain location=2-54::65-382
GLSLPPELLRDVMKRLEEDESSWPSRKDVVSCASVCTTWRDMCKDIVRSPEICAKLTFPVSLKQPGPRDGVIQCFIKRDKSKLTYRLYLCLSSAVLDENGKFLLAAKRSRRTTHTDYAISMDSKNFSRSSTGYIGKLRSNFLGTKFIIYDTQPPYNAGRLCSQERPPSRRFSSRKVSPKVPIGSYPIAQVNYELNVLGTRGPRRMQCTMQSIPESAVEPGGVVPGQPKELLPRLFDESFRSTATSLSKYSIADSSMDLSSCRYSEFGGGNQQGDDNDADKERPLVLRNKAPRWHEQLQCWCLNFRGRVTVASVKNFQLIACVAQAAAARASAPPGQTQPQASSSHDTVILQFGKVARDMFTMDYRYPLSAFQAFAICLTSFDTKLACE

SEQ ID NO: 88289 - protein, 117 aa, Setaria italica
  Transcript Sequence Number=SeqID_22315
  Homolog annotation: Hit_ID=B2Z6N3; Match level="QueryCoverage=100%, HitCoverage=4%, E-value=5e-27, Identity=58%"; Hit description =Neuroblastoma-amplified gene
GINMGRYSAEEYSKFRSMALVETATALAESGKIGALNLIFKRHPYTISSDILRVLSAIPETVAVQTYSQLLPGKSPPSVVILRDGDWVECEQMVSYISNCPTQSNKIGEIKTEILVK

SEQ ID NO: 88290 - protein, 72 aa, Setaria italica
  Transcript Sequence Number=SeqID_22316
LATPPNPREAPRDLLLILFILWQHDDPGNHTSTLVITHPHRTRRTTLTIAAEHNIKTTLQWKVDRSTRPNLT

SEQ ID NO: 88291 - protein, 76 aa, Setaria italica
  Transcript Sequence Number=SeqID_22317
  Subcellular localization annotation: CTP_CleavageSite=64; ConfidenceScore=5.25e-01
MAATSTPTMPATVTPLPGYGYQGSAAGGAEPPQHSSSGSIGTFFGVFAAVLVLTLLSCVFGRVCAAQAEGPDEVYD

SEQ ID NO: 88292 - protein, 100 aa, Setaria italica
  Transcript Sequence Number=SeqID_22318
  Gene Ontology: Mol. function=zinc ion binding; Cellular component =intracellular
  Homolog annotation: Hit_ID=Q7X9N8; Match level="QueryCoverage=100%, HitCoverage=52%, E-value=2e-36, Identity=77%"; Hit description=C2H2 type zinc finger transcription factor ZFP16
ICGLEFAIGQALGGHMRRHRAMTGGMPPAATTTIVVDKKPDVAIIHDDDGVKRGLWLDLNHPPCDDGCDAEAECGHNAAAGITFHQFLDTGTMAVDCLGY

SEQ ID NO: 88293 - protein, 125 aa, Setaria italica
  misc_feature (25)..(25): Xaa can be any naturally occurring amino acid
  Transcript Sequence Number=SeqID_22319
  Subcellular localization annotation: CTP_CleavageSite=80; ConfidenceScore=5.44e-01
PPPPAPRTYTRPPPATTSDTSPPRXKPAPAASSPAAGAADAAAAPASSCPPADDAQSSKAGGGSSLLHKVAKPGRTRFKRASSSSSSKRQAQSKPPSDTEDDGHHVHLTADHAAPQPRLVRRRHA

SEQ ID NO: 88294 - protein, 653 aa, Setaria italica
  Transcript Sequence Number=SeqID_22320
  Gene Ontology: Mol. function=ubiquitin protein ligase binding; Cellular component=plasma membrane; Biological process=ubiquitin -dependent protein catabolic process
  Homolog annotation: Hit_ID=Q9SGJ0; Match level="QueryCoverage=78%, HitCoverage=55%, E-value=1e-121, Identity=45%"; Hit description =F28J7.14 protein
  Subcellular localization annotation: CTP_CleavageSite=45; ConfidenceScore=5.22e-01
SKKETKEYSPRTTKSSASRQAQNKLQHKGLNNVQNKSQKQKKTVSATKAVEVRKPDIARVPSRPPSEFSEETDDVISDAGTIDDKGNEEAKEIDVLDEAPHCDQSTGTDDDIPDIEEKIVHHDKSVVGQGNEESESRIDKLEQELREVAALEVSLYSVVPEHGSSAHKLHTPARRLSRLYIHASKFWSADKRASVAKNIASGLVLVAKSSSNDASRLTFWLSNTVVLREIIAQTFGISCVTPTTATMSMDGGAKKLDGKPMTMLWRNSSNGKQAKLAAMQMPDDWQETSTLLASLEKIESWIFSRIVDTVWWQALTPHMQTPAEGSSTPRAGRVLGPALGDQRQGTFSVNLWKAAFHDAFSRMCPLRSGGHECGCLPVLAKLVMEQCVARLDVAMFNAILRESASEIPTDPISDPIVDPKVLPIPAGDLSFGSGAQLKNSIGNWSRWLTDKFGIDDDDSDIGNDDDERRGAAESKSFQLLNELSDLLMLPKDMLLEKSIRKEVCPSIGLQLVTRILCNFTPDEFCPDPVPSTVLEELNSESLLERCTDKDVISAFPCIAAPVVYCAPSTLDAAEKVADIGGGAKLDRKASLVQRRGYTSDDDLDDLDSPLASLIDRSAPPSPSNGIAHFSAQRGASMENARYTLLREVWSERR

SEQ ID NO: 88295 - protein, 47 aa, Setaria italica
  Transcript Sequence Number=SeqID_22321
KSSTRHQPDACRVVYTMLSPVMTMTTLWPPMVPNQNLRPDISSQQGN

SEQ ID NO: 88296 - protein, 85 aa, Setaria italica
  misc_feature (53)..(53): Xaa can be any naturally occurring amino acid
  Transcript Sequence Number=SeqID_22322
  Gene Ontology: Mol. function=catalytic activity; Biological process =nucleoside metabolic process
  Homolog annotation: Hit_ID=B6T4U2; Match level="QueryCoverage=97%, HitCoverage=22%, E-value=1e-38, Identity=91%"; Hit description =Vegetative storage protein PNI288
MQLNAGLTTQLLLSLFKVKGIVHWGIAGNANEDLQIGDVTIPEYWAHLSLWNXQRYGDGPANELPLEAAGDYTREFGFLNFSDYT

SEQ ID NO: 88297 - protein, 234 aa, Setaria italica
  misc_feature (74)..(74): Xaa can be any naturally occurring amino acid
  misc_feature (156)..(156): Xaa can be any naturally occurring amino acid
  misc_feature (229)..(229): Xaa can be any naturally occurring amino acid
  Transcript Sequence Number=SeqID_22323
  Gene Ontology: Mol. function=catalytic activity; Biological process =nucleoside metabolic process
  Homolog annotation: Hit_ID=B6T4U2; Match level="QueryCoverage=87%, HitCoverage=56%, E-value=2e-98, Identity=84%"; Hit description =Vegetative storage protein PNI288
  Pfam annotation: Domain name=PNP_UDP_1; Domain location=50-232; Score= 4.1; E_value=0.00089; Accession=PF01048.12; Description=Phosphorylase family
  Subcellular localization annotation: CTP_CleavageSite=41; ConfidenceScore=5.44e-01
MAAGAVTPPQAVAAVVVLIMATAAATPAAGFISTKTWRAVRRANRAGAPFVGLVVPNAYEMEPVLKSPSYKPSXDIPILDVQGRRFWFGTIGGQSVVMVMTGLSMLNAGLTTQLLLSLFKVKGIVHWGIAGNANEDLQIGDVTIPEYWAHLSLWNXQRYGDGPANELPLEAAGDYTREFGFLNFSDYTVGKANPELSANTLNSIWCQPEEIFPVSGTPEQRQHAFWVPXSKRYY

SEQ ID NO: 88298 - protein, 105 aa, Setaria italica
  Transcript Sequence Number=SeqID_22324
  Subcellular localization annotation: CTP_CleavageSite=60; ConfidenceScore=5.61e-01
AGTASCPGIPPAAAPPRAARPAAPATTTSPPYPAHPPGAPTSTLSSGQAPPPPLRRPQPAARSPGGRRPLLLRRRRRSGEAPWQRIRNKSTKLTDADRRTPHKCL

SEQ ID NO: 88299 - protein, 112 aa, Setaria italica
  Transcript Sequence Number=SeqID_22325
  Gene Ontology: Mol. function=protein serine/threonine kinase activity
  Homolog annotation: Hit_ID=Q2R8P3; Match level="QueryCoverage=47%, HitCoverage=6%, E-value=4e-09, Identity=66%"; Hit description =Protein kinase domain containing protein, expressed
VLPAKSGGRSRRTMWIAIAAAAAGFLVLLVALQLALLLWCRRRRRRRMNEQDAAGDVQQSLMPPRLGSSKSKGPGSVVEHFTLEMLHAATDGFSDDCRIGTGSFGSVYRGTL

SEQ ID NO: 88300 - protein, 101 aa, Setaria italica
  Transcript Sequence Number=SeqID_22326
SLSYIWDGQNIAPHFFNCLWNTQPSRLQKHSMLQLLTDDHSHHRCDGWTGDQSLSFLLPVIDSALSSCRLCCTPLDSSFGGTSWTTPLVVGTSSGSLQVPV

SEQ ID NO: 88301 - protein, 61 aa, Setaria italica
  Transcript Sequence Number=SeqID_22327
  Gene Ontology: Mol. function=transcription regulator activity; Cellular component=nucleus
LMDPTAESDLFDMFGSEFHHLRCNVDNDLIGKAAKPESSNRDAPESSIHVDTSPAFDSVDD

SEQ ID NO: 88302 - protein, 83 aa, Setaria italica
  Transcript Sequence Number=SeqID_22328
PASSVPPEKKQKGTKSLSAGSHSDQLVKKESYHGKAGGHPKSNGRRDLGDALSQKRSSSHRRRISAGRTAVWKPHLECIVEDS

SEQ ID NO: 88303 - protein, 69 aa, Setaria italica
  Transcript Sequence Number=SeqID_22329
  Gene Ontology: Mol. function=endonuclease activity
QGGKSTLENCQVLQATVNRSKGNKTEISKSELIQKSAYCRVSGRDMDLVELSAYGNVRRGPDSGGCKIQ

SEQ ID NO: 88304 - protein, 185 aa, Setaria italica
  Transcript Sequence Number=SeqID_22330
  Gene Ontology: Mol. function=endonuclease activity
  Homolog annotation: Hit_ID=B6U703; Match level="QueryCoverage=63%, HitCoverage=65%, E-value=5e-31, Identity=50%"; Hit description =Endonuclease/ nucleic acid binding protein
  Pfam annotation: Domain name=HNH; Domain location=99-141; Score=38.0; E_value=3.7e-08; Accession=PF01844.15; Description=HNH endonuclease
  Subcellular localization annotation: CTP_CleavageSite=36; ConfidenceScore=5.47e-01
MVGRKPMRRRRDRQPPPPPQSFGATARPTSPRSSASAAAVAADLDELLLTAPPSSASEPRSFPYAVKQQCWEKAERVPGRDPERWRRDALGNIVFRKLVGCPGCLCHDYDHIVPYSKGGKSTLENCQVLQATVNRSKGNKTEISKSELIQKSAYCRVSGRDMDLVELSAYGNVRRGPDSGGCKIQ

SEQ ID NO: 88305 - protein, 57 aa, Setaria italica
  Transcript Sequence Number=SeqID_22331
  Gene Ontology: Mol. function=endonuclease activity
MQATVNRSKGNKTEISKSELIQKSAYCRVSGRDMDLVELSAYGNVRRGPDSGGCKIQ

SEQ ID NO: 88306 - protein, 79 aa, Setaria italica
  Transcript Sequence Number=SeqID_22332
  Gene Ontology: Mol. function=transferase activity, transferring groups other than amino-acyl groups
  Homolog annotation: Hit_ID=Q5VP58; Match level="QueryCoverage=100%, HitCoverage=29%, E-value=2e-13, Identity=51%"; Hit description =Anthocyanin 5-aromatic acyltransferase-like
MSSRVRVLSVTHVRPAETPNPPPHDADHSIKLSLFDTLFIALTPIRRLFFYEGDDLPPFPALVRTLRSSLAATLAVFTP

SEQ ID NO: 88307 - protein, 51 aa, Setaria italica
  Transcript Sequence Number=SeqID_22333
  Gene Ontology: Mol. function=microtubule motor activity; Cellular component=microtubule associated complex; Biological process =microtubule-based movement
  Homolog annotation: Hit_ID=Q2QMU6; Match level="QueryCoverage=100%, HitCoverage=1%, E-value=1e-16, Identity=72%"; Hit description =Kinesin motor domain containing protein, expressed
WNRLAADMGSYLVDGNSALDEAADQVAFISKSFSQRKWVEEQVQKMCFGIS

SEQ ID NO: 88308 - protein, 461 aa, Setaria italica
  Transcript Sequence Number=SeqID_22334
  Gene Ontology: Mol. function=protein serine/threonine kinase activity; Biological process=protein amino acid phosphorylation
  Homolog annotation: Hit_ID=B8K1X4; Match level="QueryCoverage=97%, HitCoverage=57%, E-value=0.0, Identity=81%"; Hit description =Putative ethylene constitutive triple response protein
  Pfam annotation: Domain name=Pkinase; Domain location=196-450; Score =220.9; E_value=3.3e-63; Accession=PF00069.17; Description=Protein kinase domain
  Pfam annotation: Domain name=Pkinase_Tyr; Domain location=196-450; Score=225.4; E_value=1.5e-64; Accession=PF07714.9; Description =Protein tyrosine kinase
  Pfam module annotation: Pfam domain module=Pkinase::Pkinase_Tyr; Domain location=196-450::196-450
KELADFIGLPCRIAQGCKYCSAPHRSSCLVKIDSERRYVREYVVDLVVEPGSISCPDSSINGQLLSTVPSPFKTSCKVGSGNYTTPVAAWNQAIADDRRNMVLSNSQYSVARCCVVEENSVQVASKEGLLPKCGQITENGNCNGISVLDVSAQLKAMDISAENGNKENVPGATLLTRLTIEPSFAVDWLEISWEELELKERVGAGSFGTVYRADWHGSDVAVKVLMDQDVGEAQLKEFLREIAIMKRVRHPNVVLFMGAVTKCPHLSIVTEYLPRGSLFRLINKAANGEMLDLKRRLRMALDVAKGINYLHCLNPPIVHWDLKTPNMLVDKNWSVKVGDFGLSRFKANTFISSKSVAGTPEWMAPEFLRGEPSNEKCDVYSFGVILWELLTMQQPWNGLGPAQVVGAVAFQNRRLPIPKHTSPELAALVESCWDDDPRQRPSFSSIVDTLKKLLKALLGGS

SEQ ID NO: 88309 - protein, 167 aa, Setaria italica
  Transcript Sequence Number=SeqID_22335
  Homolog annotation: Hit_ID=B9IQQ2; Match level="QueryCoverage=63%, HitCoverage=28%, E-value=5e-29, Identity=59%"; Hit description =Global transcription factor group (Fragment)
MDEKRKLSENLQNLPPEKLDAVVQLIKNKNLTVRQHDDEIEVEIDSMDAETLWELDRFVSNYKKNLSKQKRRAERAMLARQDAELRAQHSVQQLLAEERNTGEKSPKQNVMVGGQLASSAPNQNDNNGHVASRSNSSSGSSSDSGSSSSDSDSDSSSSDGSDAANLS

SEQ ID NO: 88310 - protein, 67 aa, Setaria italica
  Transcript Sequence Number=SeqID_22336
MDRAQLLLVGLPALLFFSDLTHIFAPPPPHLRHPPHHHHHPHPPHHHPHPPHHPHPHPPHHHPHPPH

SEQ ID NO: 88311 - protein, 199 aa, Setaria italica
  misc_feature (44)..(44): Xaa can be any naturally occurring amino acid
  misc_feature (174)..(174): Xaa can be any naturally occurring amino acid
  Transcript Sequence Number=SeqID_22337
  Gene Ontology: Mol. function=protein tyrosine/serine/threonine phosphatase activity; Cellular component=intracellular; Biological process=protein amino acid dephosphorylation
  Homolog annotation: Hit_ID=B9RA78; Match level="QueryCoverage=98%, HitCoverage=21%, E-value=3e-51, Identity=52%"; Hit description =Phosphoprotein phosphatase, putative
  Pfam annotation: Domain name=Act-Frag_cataly; Domain location=1-199; Score=215.9; E_value=1.1e-61; Accession=PF09192.2; Description=Actin- fragmin kinase, catalytic
VTVNSGGVVFIALFRTAENVDLPSKEAAAVIKIAPSRMATQSEXPQGRVIHNSSPEWQQIKDAVENARHVSITAGDELEEMICAEMLEALELSRCLFLMNYVHGSPLLENTVPFESREAAEKTAAALGRVLVLDLVLRNEDRLRCRPLGWRGNYANLLVANKEAYANLDSLDDXYDSAIIRYKPEIIRSPQNQKQRRTV

SEQ ID NO: 88312 - protein, 144 aa, Setaria italica
  Transcript Sequence Number=SeqID_22338
  Homolog annotation: Hit_ID=Q7XUK8; Match level="QueryCoverage=82%, HitCoverage=29%, E-value=3e-47, Identity=78%"; Hit description =OSJNBa0067K08.21 protein
MEPDRGLVAYEEPPPESTDLLSSAWCSSAIQVLQTGPKECSMALVEHPVMSLDRKDLLSKSNRSLVVDNSSFSTAQWKYDDLKSWIWLQKAIHPELDYDLCLKKKWLPRKMAPWNGISLKKWVKERKQKRKEEARLQRAEVHAA

SEQ ID NO: 88313 - protein, 121 aa, Setaria italica
  misc_feature (121)..(121): Xaa can be any naturally occurring amino acid
  Transcript Sequence Number=SeqID_22339
  Gene Ontology: Mol. function=protein binding; Cellular component =clathrin adaptor complex; Biological process=intracellular protein transport
  Homolog annotation: Hit_ID=B6TBI2; Match level="QueryCoverage=99%, HitCoverage=28%, E-value=6e-62, Identity=94%"; Hit description=AP-3 complex subunit mu-2
  Pfam annotation: Domain name=Adap_comp_sub; Domain location=1-116; Score=4.9; E_value=1e-05; Accession=PF00928.13; Description=Adaptor complexes medium subunit family
VLSFVPPDGQFKLMSYRVKKLKKTPIYVKPQLTSDSGNCRVSVMVGIRNDPGKPIDSITVQFQLPPLIISADLTANYGTVDILANKTCLWTIGQIPKDRAPMLSGNLRLEEGLAQLHTLPX

SEQ ID NO: 88314 - protein, 54 aa, Setaria italica
  Transcript Sequence Number=SeqID_22340
  Gene Ontology: Mol. function=substrate-specific transmembrane transporter activity; Cellular component=integral to membrane; Biological process=transmembrane transport
  Homolog annotation: Hit_ID=B9S6D9; Match level="QueryCoverage=100%, HitCoverage=11%, E-value=1e-09, Identity=57%"; Hit description=Sugar transporter, putative
LLSFLCSFFVKDNITAGSHLYSVMSMLSLAGLVAFVISFNLGLGAIPWIIMSEV

SEQ ID NO: 88315 - protein, 574 aa, Setaria italica
  Transcript Sequence Number=SeqID_22341
  Gene Ontology: Mol. function=transporter activity; Cellular component= integral to membrane; Biological process=oligopeptide transport
  Homolog annotation: Hit_ID=B9T755; Match level="QueryCoverage=94%, HitCoverage=97%, E-value=1e-176, Identity=56%"; Hit description =Peptide transporter, putative
  Pfam annotation: Domain name=MFS_1; Domain location=43-496; Score =14.8; E_value=0.0097; Accession=PF07690.8; Description=Major Facilitator Superfamily
  Pfam annotation: Domain name=PTR2; Domain location=105-488; Score =288.9; E_value=1.1e-83; Accession=PF00854.13; Description=POT family
  Pfam annotation: Domain name=PetM; Domain location=441-466; Score =1.6; E_value=0.094; Accession=PF08041.3; Description=PetM family of cytochrome b6f complex
  Pfam module annotation: Pfam domain module=MFS_1::PTR2::PetM; Domain location=43-496::105-488::441-466
MEKSLRVGSMEDRREWVHDSSVDHRGRPPSRDATGSWKAAMFIIMIEFSERLSYFGIATSLMLYLTKVLQEEMKVAAKNVNYWTSVTTLMPLLGGFLADGYLGRFSTVVCSTVVYLLGLMVLATAQLSPRLTPNHSLRLHETLFFVGIYLVSVGTGGHKPALESFGADQFDESHAAERVQKMSFFNWWNCALCSGVLLGVTVIVYAQDRIGWGAASVVLAAVMAASLVVFLAGWRFYRYRVPEGSPLTPLLQVVVAAVRKRRLALPADAGELYEVKPQNIKKRLLCHTHQLRFLDKAAIVEHDGGEDAAGPWRLATVTQVEETKLVLAMVPIWVATLPFGMAAAQVSTFFIKQGSMMDRRMGPHFVLPPASIFALSAISMIATVAVYDKVLVPFLRRATGGERGISILRRVGIGMVLAVVALAVAAVVERRRLLSPSPASMSVFWLLPQFVLIGVGDGFALVGLQEYFYDQVPDNMRSLGIGLYLSVIGAGSFLSSLVITAADRASSRGGHASWFAKDLNRSRLDLFYWLLACIGAANLVFYALVSTKYSYKTVSGAGKVGVDKSGDIECAAAA

SEQ ID NO: 88316 - protein, 131 aa, Setaria italica
  Transcript Sequence Number=SeqID_22342
  Gene Ontology: Mol. function=riboflavin kinase activity; Biological process=riboflavin biosynthetic process
  Homolog annotation: Hit_ID=B6SHI6; Match level="QueryCoverage=99%, HitCoverage=32%, E-value=3e-55, Identity=83%"; Hit description =Haloacid dehalogenase-like hydrolase domain-containing protein 1A
KESFSAIVGGDVLGKLLRWYSRFLEAAKRMNTTPSNCLVIEDSLPGVTAGKAAGMHVIAVPSVPKKTAEFSTADEVINSLLDVRPENWGLPPFNDWIEGTLPIEPWFISGPVIKGFGRGSKVLGIPTGTVG

SEQ ID NO: 88317 - protein, 245 aa, Setaria italica
  misc_feature (18)..(18): Xaa can be any naturally occurring amino acid
  Transcript Sequence Number=SeqID_22343
  Gene Ontology: Mol. function=riboflavin kinase activity; Biological process=riboflavin biosynthetic process
  Homolog annotation: Hit_ID=Q109K4; Match level="QueryCoverage=95%, HitCoverage=58%, E-value=1e-119, Identity=88%"; Hit description=HAD -superfamily hydrolase, subfamily IA, variant 3 containing protein, expressed
  Pfam annotation: Domain name=Flavokinase; Domain location=159-245; Score=24.8; E_value=1.4e-10; Accession=PF01687.9; Description =Riboflavin kinase
TSLIEYTSYCRWCNIKPXLPGANRLINHLRSNGVPTALASNSPRPNIEAKISCHQGWKESFSAIVGGDEIEKGKPYPDIFLEAAKRMNTTPSNCLVIEDSLKASVTAGKAAGMHVIAVPSVPKKTAEFSTADEVINSLLDVRPENWGLPPFNDWIEGTLPIEPWFISGPVIKGFGRGSKVLGIPTANLPAENFSDVVSEHTSGVYFGWAGLSTRGIYKMVMSIGWNPYFDNTEKTVEPWLLHDFG

SEQ ID NO: 88318 - protein, 393 aa, Setaria italica
  Transcript Sequence Number=SeqID_22344
  Gene Ontology: Mol. function=riboflavin kinase activity; Cellular component=cytoplasm; Biological process=riboflavin biosynthetic process
  Homolog annotation: Hit_ID=B6SHI6; Match level="QueryCoverage=98%, HitCoverage=97%, E-value=0.0, Identity=92%"; Hit description =Haloacid dehalogenase-like hydrolase domain-containing protein 1A
  Pfam annotation: Domain name=Flavokinase; Domain location=234-364; Score=157.6; E_value=3.8e-44; Accession=PF01687.9; Description =Riboflavin kinase
  Pfam annotation: Domain name=Hydrolase; Domain location=11-196; Score= 115.7; E_value=1.5e-31; Accession=PF00702.18; Description=haloacid dehalogenase-like hydrolase
  Pfam module annotation: Pfam domain module=Flavokinase::Hydrolase; Domain location=234-364::11-196
MAAPKPISRLISHVILDLDGTLLNTDSVVSKVVKPFLVKNGKTWDSKKAHKLVGKTPYEAAAVVLEDYGLPYSTEEFLSMLTPMFSEQWCNIKPLPGANRLINHLRSNGVPTALASNSPRPNIEAKISCHQGWKESFSAIVGGDEIEKGKPYPDIFLEAAKRMNTTPSNCLVIEDSLPGVTAGKAAGMHVIAVPSVPKKTAEFSTADEVINSLLDVRPENWGLPPFNDWIEGTLPIEPWFISGPVIKGFGRGSKVLGIPTANLPAENFSDVVSEHTSGVYFGWAGLSTRGIYKMVMSIGWNPYFDNTEKTVEPWLLHDFGEDFYGEELRLAIVGYIRPEANFPSLESLIERIHEDGRIAEKALDLPMYAKYKDSRYLRDPLQQGSNTDGTRLS

SEQ ID NO: 88319 - protein, 80 aa, Setaria italica
  Transcript Sequence Number=SeqID_22345
FFGQCQMYKCLYCIFQSHSTQKFQWNCEILTFVHLAGATITGTAYSLRFLLKADCMKQAQKSWWWYCVWCESLLLDDFLY

SEQ ID NO: 88320 - protein, 167 aa, Setaria italica
  Transcript Sequence Number=SeqID_22346
MARNAAAAACSAAVLLLAVSVYAAGDTTGPRTAVQAPDLAAGVEETRSLLPVHHDGDKEVEEDIKAGGRRAASAGDVASLATAGEEDKEVGSDWGEPKKRDDKNDSDSDSDDDSGSDSDSDSDSDSDSDDEEDHNSKKGSKKHPAPWRNGASGGQHDDKQPEMVIKI

SEQ ID NO: 88321 - protein, 78 aa, Setaria italica
  Transcript Sequence Number=SeqID_22347
CLPPQGANTRTNFAAGAHASPPDSLLAARIRGILNHKKLKKNTALPTVTFFPAAYHRAGHDAIATAAATSSTSTSTIT

SEQ ID NO: 88322 - protein, 266 aa, Setaria italica
  misc_feature (50)..(50): Xaa can be any naturally occurring amino acid
  Transcript Sequence Number=SeqID_22348
  Homolog annotation: Hit_ID=Q7XC99; Match level="QueryCoverage=99%, HitCoverage=11%, E-value=1e-108, Identity=70%"; Hit description =Transcriptional regulator, putative, expressed
IVDVCHDLKILSAVLDSTPFAFSIKLAAAASRKDYSYLEKWLTEKLYVIXFNFLKGTMSNTDYILVATTQQPRAIVTNLYWESCPVFIKVLQSHSGHLLSAELLDELRKLYALYESRNPGSVVRELANSQGGSDDIEVEANTYFHQMFSGQISTDSMIQMLVRFKESSDKREVSIFNCMISNLFEEYKFFPKYPDKQLKIAAVLFGSLIKHQLVAHVALGIALRGVLDALRKSVDSKMFMFGTAALEQFMDRVIEWPQYCNHILQI

SEQ ID NO: 88323 - protein, 152 aa, Setaria italica
  misc_feature (77)..(77): Xaa can be any naturally occurring amino acid
  misc_feature (80)..(80): Xaa can be any naturally occurring amino acid
  misc_feature (90)..(90): Xaa can be any naturally occurring amino acid
  Transcript Sequence Number=SeqID_22349
  Gene Ontology: Mol. function=aspartic-type endopeptidase activity; Cellular component=chromatin; Biological process=RNA-dependent DNA replication
  Homolog annotation: Hit_ID=Q7XW39; Match level="QueryCoverage=99%, HitCoverage=9%, E-value=3e-42, Identity=50%"; Hit description =OSJNBa0054D14.1 protein
MDDILVYSSSLEEHVQHLDQVLQIIQEHQFCIKKSKCVFTQQQLEYLGHLISADGVSTEPSKIQAVTYWPVPKSIKXLKXFLGLTGYYRXFIKHYNMSSKPLTNMLKKGVHFRWTSLAQNAFELLKQALVQALVLAIPNFNKQFIVEIGASQ

SEQ ID NO: 88324 - protein, 127 aa, Setaria italica
  Transcript Sequence Number=SeqID_22350
  Gene Ontology: Mol. function=drug transporter activity; Cellular component=membrane; Biological process=multidrug transport
  Homolog annotation: Hit_ID=B6TNR6; Match level="QueryCoverage=94%, HitCoverage=22%, E-value=6e-62, Identity=86%"; Hit description =Antiporter/ drug transporter/ transporter
LYTTPSGSNDDWYWLYAAIKLNCLLVTNDEMRDHIFELLGSSFFPKWKHRHRVKYTFNKGKAVLVMPPPYSSEIQESEVGSWHVPLEEKSGDERVRIWLCIGRTGTCKEPDEVPTTNGVVLGKLFLP

SEQ ID NO: 88325 - protein, 39 aa, Setaria italica
  Transcript Sequence Number=SeqID_22351
METRDSAPSTTPLPYSYSPLPAADAASGEVSGTGRARGG

SEQ ID NO: 88326 - protein, 144 aa, Setaria italica
  Transcript Sequence Number=SeqID_22352
  Gene Ontology: Mol. function=binding
  Homolog annotation: Hit_ID=Q69NX2; Match level="QueryCoverage=94%, HitCoverage=10%, E-value=4e-32, Identity=57%"; Hit description =Putative fanconi anemia, complementation group D2
  Subcellular localization annotation: CTP_CleavageSite=27; ConfidenceScore=5.41e-01
VKRQTKLLKLKQPTVLDAFKRAGVTVSQATNKASSQPSSSGMMSKNIEQEANDPGELGFVDLMAAPVQLDMQRFKFRTLHTRCLSLLNYSECQDSSCSYLETELPIYLYLLRDLHNKLDNLNPTTKPFLSTYQAKCSQVYCHKS

SEQ ID NO: 88327 - protein, 290 aa, Setaria italica
  misc_feature (280)..(280): Xaa can be any naturally occurring amino acid
  Transcript Sequence Number=SeqID_22353
  Gene Ontology: Mol. function=metal ion binding; Cellular component =plasma membrane; Biological process=innate immune response
  Homolog annotation: Hit_ID=B9SJF7; Match level="QueryCoverage=99%, HitCoverage=25%, E-value=2e-94, Identity=59%"; Hit description=Ran GTPase binding protein, putative
  Pfam annotation: Domain name=FYVE; Domain location=74-142; Score =83.9; E_value=5.7e-22; Accession=PF01363.13; Description=FYVE zinc finger
  Pfam annotation: Domain name=RCC1; Domain location=24-71; Score=31.5; E_value=3.3e-06; Accession=PF00415.10; Description=Regulator of chromosome condensation (RCC1)
  Pfam module annotation: Pfam domain module=FYVE::RCC1; Domain location=74-142::24-71
LMSEHVVQVACGSYHVAVLTNKSEVFTWGKGANGRLGHGDIEDRKIPTLVEALRDRAVRHIACGSNFTAAICQHKWVSGAEQSQCASCRQPFGFTRKRHNCHNCGLVHCNACTSRKALRAALAPNPAKPYRVCDSCFMKLNSAAYSSAINQNKRKEAVPRHSGESNPDTKLAKAIVPSNLDMIRSLDSKAAKQGKKTDALSFLRNPQMTSLLQLRDIALSGGIDLNKSVPRAVRTSAVRSLNSSRAVSPFSRKPSPPRSTTPVPTTHGLSIAKTAADSLXKTNEMLNQRG

SEQ ID NO: 88328 - protein, 89 aa, Setaria italica
  Transcript Sequence Number=SeqID_22354
  Gene Ontology: Mol. function=protein serine/threonine kinase activity; Biological process=protein amino acid phosphorylation
  Pfam annotation: Domain name=LRRNT_2; Domain location=44-85; Score =44.4; E_value=4.5e-10; Accession=PF08263.4; Description=Leucine rich repeat N-terminal domain
  Subcellular localization annotation: CTP_CleavageSite=41; ConfidenceScore=5.40e-01
CNHTSTQAPLSAMLLLGESFLLAFMFLTSSAGFVVPALSISTSSITDRLALISFKSLITSDPSQALASWGNLSIPMCQWHGVACGLRGR

SEQ ID NO: 88329 - protein, 97 aa, Setaria italica
  Transcript Sequence Number=SeqID_22355
  Gene Ontology: Mol. function=transcription factor activity; Cellular component=nucleus; Biological process=regulation of transcription, DNA-dependent
  Homolog annotation: Hit_ID=B6SHR5; Match level="QueryCoverage=98%, HitCoverage=43%, E-value=9e-21, Identity=59%"; Hit description =Ethylene-responsive factor-like protein 1
  Pfam annotation: Domain name=AP2; Domain location=32-83; Score=75.5; E_value=1.9e-19; Accession=PF00847.12; Description=AP2 domain
FWPDDSEADAEDSHAPRASDERAPRAKRGRKNQYRGIRQRPWGKWAAEIRDPVKGVRVWLGTYPTAEAAARAYDRAARRIRGAKAKVNFPNDTSSSP

SEQ ID NO: 88330 - protein, 141 aa, Setaria italica
  Transcript Sequence Number=SeqID_22356
  Gene Ontology: Mol. function=transcription factor activity; Cellular component=nucleus; Biological process=regulation of transcription, DNA-dependent
  Homolog annotation: Hit_ID=Q4F8A4; Match level="QueryCoverage=49%, HitCoverage=21%, E-value=2e-21, Identity=73%"; Hit description=Root abundant factor
  Pfam annotation: Domain name=AP2; Domain location=36-87; Score=81.4; E_value=3.2e-21; Accession=PF00847.12; Description=AP2 domain
EFDEEVEDHHFGVISRERTLVAHGGRAASQKKRGRRHFRGIRQRPWGKWAAEIRDPHKGTRVWLGTFDTAEDAARAYDVEARRLRGSKAKVNFPAAGARPRRRGNPRAAPKPQHHHAAAAEQPALLAGEKKQEEIAVKPEI

SEQ ID NO: 88331 - protein, 98 aa, Setaria italica
  Transcript Sequence Number=SeqID_22357
  Gene Ontology: Mol. function=protein serine/threonine kinase activity; Biological process=protein amino acid phosphorylation
  Homolog annotation: Hit_ID=Q7XTR9; Match level="QueryCoverage=100%, HitCoverage=9%, E-value=1e-36, Identity=78%"; Hit description =OSJNBa0008M17.16 protein
  Pfam annotation: Domain name=LRR_1; Domain location=19-41; Score =10.7; E_value=2.7; Accession=PF00560.25; Description=Leucine Rich Repeat
  Pfam annotation: Domain name=LRR_1; Domain location=43-65; Score =13.6; E_value=0.77; Accession=PF00560.25; Description=Leucine Rich Repeat
  Pfam annotation: Domain name=LRR_1; Domain location=67-89; Score =18.7; E_value=0.024; Accession=PF00560.25; Description=Leucine Rich Repeat
  Pfam module annotation: Pfam domain module=LRR_1::LRR_1::LRR_1; Domain location=19-41::43-65::67-89
LGSNNFNGTLPDELGKLTKLRQIYIDSNDFSGPLPSTLSQLKNLSVLWASDNNFTGQIPDYLGSLTNLTELKLQGNSFQGPIPKSLSNLVKLSKLRIG

SEQ ID NO: 88332 - protein, 134 aa, Setaria italica
  misc_feature (103)..(103): Xaa can be any naturally occurring amino acid
  Transcript Sequence Number=SeqID_22358
  Gene Ontology: Mol. function=protein serine/threonine kinase activity; Biological process=protein amino acid phosphorylation
  Homolog annotation: Hit_ID=Q7XTR9; Match level="QueryCoverage=100%, HitCoverage=17%, E-value=1e-59, Identity=64%"; Hit description =OSJNBa0008M17.16 protein
  Pfam annotation: Domain name=LRR_1; Domain location=14-36; Score =11.6; E_value=1.8; Accession=PF00560.25; Description=Leucine Rich Repeat
  Pfam annotation: Domain name=LRR_1; Domain location=38-60; Score =10.7; E_value=2.7; Accession=PF00560.25; Description=Leucine Rich Repeat
  Pfam annotation: Domain name=LRR_1; Domain location=62-84; Score =13.6; E_value=0.77; Accession=PF00560.25; Description=Leucine Rich Repeat
  Pfam annotation: Domain name=LRR_1; Domain location=86-108; Score =18.1; E_value=0.038; Accession=PF00560.25; Description=Leucine Rich Repeat
  Pfam module annotation: Pfam domain module=LRR_1::LRR_1::LRR_1::LRR _1; Domain location=14-36::38-60::62-84::86-108
LSGPIPKELGNLVNLVSLALGSNNFNGTLPDELGKLTKLRQIYIDSNDFSGPLPSTLSQLKNLSVLWASDNNFTGQIPDYLGSLTNLTELKLQGNSFQGPIPXSLSNLVKLSKIRIGEIVNGSSPLAFIGNMTS

SEQ ID NO: 88333 - protein, 108 aa, Setaria italica
  Transcript Sequence Number=SeqID_22359
TSSIQFIYIQASPRMFMKKNTQNECSRTETILTYLLKVSTNHNKKDFVYTMNKNIAQCGNKIKLTKEACEEHHREKCRWIMPLPVFTDSCASTMDLATSPPCEGHQVV

SEQ ID NO: 88334 - protein, 41 aa, Setaria italica
  Transcript Sequence Number=SeqID_22360
ECVAEHAGCAPAAGRRNWTGGLAGRQAAGLHRRAQAAVGQV

SEQ ID NO: 88335 - protein, 40 aa, Setaria italica
  Transcript Sequence Number=SeqID_22361
MAGGSGSSLLRGFLSLFFLLFIHIGHAGCCFSSGSAARAR

SEQ ID NO: 88336 - protein, 75 aa, Setaria italica
  Transcript Sequence Number=SeqID_22362
IGIRGFEGFTPLSVPSFIRVGITNRDKRPSILLSWLVWGRRRDLLSQLLFQIKIKDLSGSFFSLAFATGIKSPGW

SEQ ID NO: 88337 - protein, 208 aa, Setaria italica
  Transcript Sequence Number=SeqID_22363
  Gene Ontology: Mol. function=oxidoreductase activity, acting on CH-OH group of donors
  Homolog annotation: Hit_ID=B6SXM3; Match level="QueryCoverage=100%, HitCoverage=27%, E-value=6e-94, Identity=83%"; Hit description =Oxidoreductase
  Pfam annotation: Domain name=GMC_oxred_C; Domain location=62-206; Score=-37.9; E_value=0.00048; Accession=PF05199.5; Description=GMC oxidoreductase
IITSLHKVEGPPGAPARAILETPAMGLAAAGTQFPWVSGPDMKERMLRYGRTVHLFSLVRDRGSGTVHGERRVAYHLDAADREDMREGLRRALRVLAAAGAAEIGTHRSDGQRFVCRGATEAALEEFLDGVDVVRGPKSKAEAWSLFCTAHQMGSCRMGATAADGAVDARGESWEAQRLYVCDGSVLPSAVGVNPMVTIQSVAYCLAT

SEQ ID NO: 88338 - protein, 75 aa, Setaria italica
  Transcript Sequence Number=SeqID_22364
DDNPGESIDLSQGKPSQTSGSVGTARETGNEQTQPNTSDKSNSGTNDSSEEQHRTEQGSETTPKKPSQTSGPVET

SEQ ID NO: 88339 - protein, 114 aa, Setaria italica
  Transcript Sequence Number=SeqID_22365
HYDHVEANGHNETQVRVSISDAANSTAIILKVAGESCTVNIHSAITRETGRVIRMPFTSTYALVPVFLLLAVVGVCIKLRRMRKQDGGPASQSSPQLSSHLSDCLCSFLPPVRK

SEQ ID NO: 88340 - protein, 326 aa, Setaria italica
  Transcript Sequence Number=SeqID_22366
MRWGGALLLVAVFAVVAVAKDSADTLPVETNGDGSSAQSGVENLEHHDEPDPNKEHVAHENGGVKNDNSGNNKKDNSTEGTNIRRDDSIPQPKNKDNSGTKSSQAKDFLQDPLIMGCDPSHRCIIENKKFIGCLKVPGEDSLALSLLMDNKGVDPLDVSITAPDYVSLAEDTVHVEANGHNETQVRVSISDAANSTAIILKVAGESCTVNIHSAITRETGRVIRMPFTSTYALVPVFLLLAVVGVCIKLRRMRKQDGGPAYQKLDTADLPVSTGGKKEHKQSDKWDDNWGDDWDDEEAPMTPSKPMPNPSSKGLAPRRSTKDGWKD

SEQ ID NO: 88341 - protein, 46 aa, Setaria italica
  Transcript Sequence Number=SeqID_22367
GTGSCCGSTASDEYGSSEEDGATWGSLWNLDGVVDDAAGGGPCTLW

SEQ ID NO: 88342 - protein, 67 aa, Setaria italica
  Transcript Sequence Number=SeqID_22368
  Homolog annotation: Hit_ID=B6TIK3; Match level="QueryCoverage=92%, HitCoverage=24%, E-value=1e-25, Identity=98%"; Hit description =Stress-related protein
  Pfam annotation: Domain name=REF; Domain location=2-67; Score=-90.7; E_value=0.00023; Accession=PF05755.4; Description=Rubber elongation factor protein (REF)
CSWPLQVGESVEEIDRRVPPVVKEAPTLARSAAKEVRQAGLVGTATGLAKSAIARAEPKARELYTRY

SEQ ID NO: 88343 - protein, 103 aa, Setaria italica
  Transcript Sequence Number=SeqID_22369
  Homolog annotation: Hit_ID=B6TIK3; Match level="QueryCoverage=66%, HitCoverage=26%, E-value=6e-15, Identity=61%"; Hit description =Stress-related protein
  Pfam annotation: Domain name=REF; Domain location=8-103; Score=30.0; E_value=3.5e-12; Accession=PF05755.4; Description=Rubber elongation factor protein (REF)
EVRVERAATTQEEEERLRYLEFVQQAAAQALVLAAAAYAYAKQGAGPLRPGVDHVEGTVKAVVGPVYDRFHAVPLDLLKFLDRKVRRRAFFVVFNSSWSNLIA

SEQ ID NO: 88344 - protein, 112 aa, Setaria italica
  Transcript Sequence Number=SeqID_22370
  Gene Ontology: Mol. function=nucleoside-triphosphatase activity
  Homolog annotation: Hit_ID=Q945C8; Match level="QueryCoverage=99%, HitCoverage=13%, E-value=1e-44, Identity=79%"; Hit description =Origin recognition complex subunit 1
PHNLRRELYRTNDLGDIEMETILRHCSVMCPKDFRDANDGGDDVFYCEYEYDIHWHNFKRLADIDDEPETKEDPNDEPYNAGNDYNSGTDEDSEYDEEEEPKSCFSARRNQS

SEQ ID NO: 88345 - protein, 273 aa, Setaria italica
  misc_feature (20)..(20): Xaa can be any naturally occurring amino acid
  Transcript Sequence Number=SeqID_22371
  Gene Ontology: Mol. function=nucleic acid binding
  Homolog annotation: Hit_ID=B9SSN0; Match level="QueryCoverage=100%, HitCoverage=18%, E-value=1e-109, Identity=70%"; Hit description=ATP -dependent RNA helicase, putative
  Pfam annotation: Domain name=Helicase_C; Domain location=87-178; Score=46.5; E_value=1e-10; Accession=PF00271.23; Description =Helicase conserved C-terminal domain
WGDESTLSEGYVNPHYVSDXYKSYSERTNQNLKCLNEDVIDFDLLEDLICYIDENFPPGALLVFLPGVAEIDMLIDRLSASVRFGGASSDWILPLHSLLGPTDQRKVFQSPPDNFRKVIVATDIAETSITIDDVIYVVDAGKHKQNRYNPRKKMSSIVEDWISRANAKQRRGRAGRVKPGLCFCLYTRHRFENTMRPFQVPEMLRMPLTELCLQIKSLHLGDIKCFLLKAVEPPNEEAISSAVDLLYKVGAFEGHEELSPLGYHLAKLPVDVF

SEQ ID NO: 88346 - protein, 61 aa, Setaria italica
  Transcript Sequence Number=SeqID_22372
  Subcellular localization annotation: CTP_CleavageSite=20; ConfidenceScore=5.50e-01
PAMPAVPGAALPPLPAAVVPAVPKVTLPPIPGMPKVTLPPMPSVSIPGMPTTPFLAPPPKA

SEQ ID NO: 88347 - protein, 53 aa, Setaria italica
  Transcript Sequence Number=SeqID_22373
LLVCLILVKLYWRGQQAGFCYVSVLEPSSPILKKQFSTIGNNRVLIMQLYCYK

SEQ ID NO: 88348 - protein, 63 aa, Setaria italica
  Transcript Sequence Number=SeqID_22374
  Gene Ontology: Mol. function=transferase activity, transferring glycosyl groups; Cellular component=integral to membrane; Biological process=cell wall organization and biogenesis
  Homolog annotation: Hit_ID=Q6YWK8; Match level="QueryCoverage=87%, HitCoverage=9%, E-value=5e-17, Identity=65%"; Hit description =Probable mannan synthase 11
MLTNNLYERYHCSELFVGTCIIMCGCYDVFYAKKGYYIFLFLQGIAFLVAGFGYVGTLPPSTP

SEQ ID NO: 88349 - protein, 215 aa, Setaria italica
  misc_feature (28)..(28): Xaa can be any naturally occurring amino acid
  misc_feature (50)..(50): Xaa can be any naturally occurring amino acid
  misc_feature (170)..(170): Xaa can be any naturally occurring amino acid
  Transcript Sequence Number=SeqID_22375
  Gene Ontology: Mol. function=nucleic acid binding; Cellular component= mitochondrial matrix; Biological process=DNA duplex unwinding
  Homolog annotation: Hit_ID=Q94GP3; Match level="QueryCoverage=100%, HitCoverage=38%, E-value=9e-95, Identity=81%"; Hit description =Putative mitochondrial RNA helicase
  Pfam annotation: Domain name=Helicase_C; Domain location=96-181; Score=59.0; E_value=1.8e-14; Accession=PF00271.23; Description =Helicase conserved C-terminal domain
QMVGCKSRGFSFTRALLGLCSDELHVCXGDPAAVPLIQRILEATGDLVTXQVQYYERLSPLVPLKSPLGSFSNIKAGDCLVTFSRRGIYSLKKRIEMEGKHLCSVVYGSLPPETRTKQATMFNDDTSDLNVLVASDAIGMGLNLNISRIIFSTMMKFDGFSFRELTVAEXKQIAGRAGRYGSKFPVGEVTCLDAEDLPLLHSSLKSPSPIIERAG

SEQ ID NO: 88350 - protein, 72 aa, Setaria italica
  Transcript Sequence Number=SeqID_22376
DWKPFCLLPHCFLLRRALYFSHPPSVDLPGNERRIEACFLAGRELDLMSSDLLQLLVNPLRHIGCELVSHQY

SEQ ID NO: 88351 - protein, 312 aa, Setaria italica
  Transcript Sequence Number=SeqID_22377
  Gene Ontology: Cellular component=chloroplast envelope
  Homolog annotation: Hit_ID=A8J0N1; Match level="QueryCoverage=91%, HitCoverage=70%, E-value=2e-59, Identity=46%"; Hit description =Chloroplast lumenal protein
  Pfam annotation: Domain name=Mit_gmP; Domain location=197-260; Score=- 4.8; E_value=0.085; Accession=PF10247.1; Description=Putative mitochondrial genome mainten
GNGRTKDGGGGGAGEDDDDYEEAEFGPLLGFDEVLRLAAARGVALPGDMMEAAKDAAIREVLLLRYFDLQAAPWPLGAMIRAFSMLRNRMLADPSFLFKVGTEIVIDSCCATFAEVQKRGKDFWAEFELYAADLLVGVAVDIALVGLLAPYVRFGKPSASTGLLGRFNRMAVSLPSSVFEAERPGSRFTVQQRIGTYFYKGVLYGSVGFVCGIIGQGIANMIMTAKRSVKKSDEDIPVPPLVKSAALWGVFLAVSSNTRYQIINGLERVVEASPVAKRVPPVAMAFTIGVRFANNIYGGMQFVDWARWSGVQ

SEQ ID NO: 88352 - protein, 88 aa, Setaria italica
  misc_feature (63)..(63): Xaa can be any naturally occurring amino acid
  Transcript Sequence Number=SeqID_22378
  Gene Ontology: Mol. function=catalytic activity; Cellular component =plasma membrane; Biological process=cellular metabolic process
  Homolog annotation: Hit_ID=O22809; Match level="QueryCoverage=95%, HitCoverage=26%, E-value=8e-15, Identity=46%"; Hit description =Putative cinnamoyl-CoA reductase
ELLAPAVTGTMNVLKACSEAKVKRVVVVSSLSAVMVNPAWPQSEVMDEASWSDVEFCRSTQNXHCLAKTLAELQGMPGGPRHTLVPAS

SEQ ID NO: 88353 - protein, 109 aa, Setaria italica
  Transcript Sequence Number=SeqID_22379
  Subcellular localization annotation: CTP_CleavageSite=36; ConfidenceScore=5.21e-01
DGVASSSSSAPAASLSILRMLNSSTARGGGVELEPSAAGAAPPPDASAFSTDDSDEPESLAAIAAGFSGATSATFRSSSISSQHLAILAGANNKGRTTSVASHTDQAAR

SEQ ID NO: 88354 - protein, 72 aa, Setaria italica
  Transcript Sequence Number=SeqID_22380
AEQSNAQNDCEFLHYKISFLFFPSCSSNVYQELHDSRSLDLFSTLRRVQDAAGPCTSILLIITPKCTIFFTR

SEQ ID NO: 88355 - protein, 369 aa, Setaria italica
  Transcript Sequence Number=SeqID_22381
  Gene Ontology: Mol. function=hydrolase activity, acting on ester bonds; Cellular component=vacuole; Biological process=lipid metabolic process
  Homolog annotation: Hit_ID=B6TB52; Match level="QueryCoverage=100%, HitCoverage=91%, E-value=0.0, Identity=89%"; Hit description=Alpha-L- fucosidase 2
  Pfam annotation: Domain name=Lipase_GDSL; Domain location=4-326; Score=187.9; E_value=2.8e-53; Accession=PF00657.14; Description=GDSL- like LipaseAcylhydrolase
FRRVFSFGDSLTDTGNFLLSVPDDFPDPARNLPYGQTFFGRPSGRYSDGRNLLDFFAEAFGLPFVPPYLGGGDFQYGANFAVGGATALNGSFFRERGVEPTWTPHSLYEQIQWFKKLLPSIAPSETERSDIMSNSLFFVGEVGGNDYNHLIVRDKSLDELHELVPNVVGAISSAITDLTSLGANKLVVPGNFPIGCVPLYLSIFPSQKEDYYDEQTGCIKWLNEFAEYHNSMLQEELERLRNLYPDVTIIYADYYGASLNIFRAPLQFGFTVPLNACCGSDAPYNCSPSILCGRPGSTVCSDPSKYISWDGLHFTEASYRVVIQGVLGGYAIPPLSETCKGGEFKVSQLHQCTDNPTNTVTYDTLSSFI

SEQ ID NO: 88356 - protein, 126 aa, Setaria italica
  Transcript Sequence Number=SeqID_22382
  Gene Ontology: Cellular component=membrane
LNVLEVIELGASKEFPSSGLRLVFQEALCPFAFLCEREGHRRGELVYMLYALTVSGVAILCHLRSPFSYVSGSVLHQDDIVEFSLQTHAQSAKVTAVTAKPGCIVIGRQDGSICSYSLGKLAPNSP

SEQ ID NO: 88357 - protein, 94 aa, Setaria italica
  Transcript Sequence Number=SeqID_22383
  Gene Ontology: Mol. function=transferase activity; Cellular component= endoplasmic reticulum membrane; Biological process=GPI anchor biosynthetic process
  Homolog annotation: Hit_ID=UPI0001A7B05F; Match level="QueryCoverage =100%, HitCoverage=9%, E-value=2e-43, Identity=84%"; Hit description =catalytic/ transferase
YMLSIFDIYFKSPIVHGMDPVPPRLSAAPAKRLVLLVADGLRADKFFEPDERGRYRAPFLRSVIEEKGRWGVSHARPPTESRPGHVSLIAGFYE

SEQ ID NO: 88358 - protein, 131 aa, Setaria italica
  misc_feature (16)..(16): Xaa can be any naturally occurring amino acid
  Transcript Sequence Number=SeqID_22384
  Gene Ontology: Mol. function=transferase activity, transferring groups other than amino-acyl groups; Cellular component=cytoplasm
  Homolog annotation: Hit_ID=B6SSX1; Match level="QueryCoverage=99%, HitCoverage=27%, E-value=9e-48, Identity=83%"; Hit description =Anthocyanin 5-aromatic acyltransferase
MATKILDRLTVAASPXAPGGVLPLTFFDVPWLFTGPVERVFFYPYPHTAEHFTAHLLPHLVSSLSAALHRFYPLVGRVRPCPDGGGGYEFCSAGGDAGEGVELTFAESSDDFDELSGCGPRDVARLYALVP

SEQ ID NO: 88359 - protein, 156 aa, Setaria italica
  Transcript Sequence Number=SeqID_22385
  Gene Ontology: Mol. function=transporter activity; Cellular component= integral to membrane; Biological process=transport
  Homolog annotation: Hit_ID=Q9ATN0; Match level="QueryCoverage=75%, HitCoverage=39%, E-value=1e-58, Identity=94%"; Hit description =Aquaporin PIP1-6
  Pfam annotation: Domain name=MIP; Domain location=1-141; Score=103.5; E_value=7.4e-28; Accession=PF00230.12; Description=Major intrinsic protein
YYAVMQCLGAACGAGVVKALVGGALYEAAGGGANAVNPGYTKGDGLGAEIVGTFVLVYTVFSATDAKRSARDSHVPVLAPLPIGLAVFLVHLATIPITGTGINPARSLGAAIIYDRPHGWHGHWIFWVGPFTGAALAAVYHQVVIRAIPFKSSAHY

SEQ ID NO: 88360 - protein, 189 aa, Setaria italica
  Transcript Sequence Number=SeqID_22386
  Homolog annotation: Hit_ID=Q9FZF0; Match level="QueryCoverage=75%, HitCoverage=54%, E-value=7e-57, Identity=65%"; Hit description =T2E6.19
  Pfam annotation: Domain name=DUF862; Domain location=1-121; Score =174.9; E_value=2.3e-49; Accession=PF05903.6; Description=Eukaryotic protein of unknown function (DUF862)
FGSGLGIFHSAIEVHGVEYAFGAHDFPTSGVFEVEPRQCPGFRFRKSIFLGTTCLDPIQVRQFMELQSVNYNGDTYHLITKNCNHFCKDMCYKLTGNKIPKWVNRLARIGAICNCLLPESLKISPVGHDPNSQSEDSEKRRLRNPFSCFSSISSHRQLPSSSPFPPSPVKERLAHCSSRKSSTASLRNR

SEQ ID NO: 88361 - protein, 255 aa, Setaria italica
  misc_feature (17)..(17): Xaa can be any naturally occurring amino acid
  Transcript Sequence Number=SeqID_22387
  Homolog annotation: Hit_ID=Q2QYH4; Match level="QueryCoverage=62%, HitCoverage=27%, E-value=5e-37, Identity=55%"; Hit description =Retrotransposon protein, putative, Ty1-copia subclass
MGFESVSPLPEDHAVDXKSEVETSQAMSCDSTVTEKVEKSPSEKPFLLVLLEKKEDIESFSTTCDLENIAEAITPRGDTLELCISSEAPDDSLSLGCETPRESIFDPFAPGPDVAAWAPKKQVIRGAEVPSRRKLNFDSGDFPVKRLSFDWSDSEEEDEYLQVIQKMILDLIISDSPLDQQEESEKILIDSSLYESCKTPDSKPLLTGIASTCPDAPLRPSHKLLKLSPSICRKIDFDAVSNSVSPRSSVAKENN

SEQ ID NO: 88362 - protein, 65 aa, Setaria italica
  Transcript Sequence Number=SeqID_22388
TISISKISLSYWITFSTYEFKLGFMLCFRSTSMHILAVKSNVIHILQRLVYKGSLPRSCRVGKAC

SEQ ID NO: 88363 - protein, 74 aa, Setaria italica
  Transcript Sequence Number=SeqID_22389
  Gene Ontology: Mol. function=hydrolase activity, hydrolyzing O -glycosyl compounds; Cellular component=integral to membrane; Biological process=carbohydrate metabolic process
  Homolog annotation: Hit_ID=O04890; Match level="QueryCoverage=67%, HitCoverage=8%, E-value=4e-18, Identity=82%"; Hit description=Endo-1, 4-beta-glucanase
STLSQVLLSRLRLFLSPGYPYEEILRTFHNQTDNVMCSYLPLFNSFNFTKGWWCPSLFLSLFLVPQKKAKQRIF

SEQ ID NO: 88364 - protein, 61 aa, Setaria italica
  misc_feature (55)..(55): Xaa can be any naturally occurring amino acid
  Transcript Sequence Number=SeqID_22390
  Gene Ontology: Mol. function=hydrolase activity, hydrolyzing O -glycosyl compounds; Cellular component=integral to membrane; Biological process=carbohydrate metabolic process
  Homolog annotation: Hit_ID=B6U4I3; Match level="QueryCoverage=95%, HitCoverage=9%, E-value=3e-15, Identity=72%"; Hit description=Endo-1, 4-beta-glucanase Cel1
KSVLRTNYNYTEPTLAANAGLVAALISIADIPTGRYSIDKNTIFSAIPPMFPTPXPPPSAW

SEQ ID NO: 88365 - protein, 342 aa, Setaria italica
  misc_feature (128)..(128): Xaa can be any naturally occurring amino acid
  misc_feature (224)..(224): Xaa can be any naturally occurring amino acid
  misc_feature (255)..(255): Xaa can be any naturally occurring amino acid
  Transcript Sequence Number=SeqID_22391
  Gene Ontology: Mol. function=hydrolase activity, hydrolyzing O -glycosyl compounds; Cellular component=integral to membrane; Biological process=carbohydrate metabolic process
  Homolog annotation: Hit_ID=B6U4I3; Match level="QueryCoverage=97%, HitCoverage=53%, E-value=1e-178, Identity=92%"; Hit description=Endo- 1,4-beta-glucanase Cel1
  Pfam annotation: Domain name=Glyco_hydro_9; Domain location=2-340; Score=270.5; E_value=3.8e-78; Accession=PF00759.11; Description =Glycosyl hydrolase family 9
SVPHHIKELIKWGTDYILKTFNSSADTIDRIVAQVGIGDTSKGGSQPNDHYCWMRPEDIDYKRPVTECHSCSDLASEMAAALAAASIVFKDSKTYSDKLVKGAKALYKFGRTQRGRYSPNGSDQAIFXNSTSYWDEFVWGGAWMYFATGNNSYLTVATAPGMAKHAGAYWFGSPNYGVFTWDDKLPGAQVLLSRLRLFLSPGYPYEEILRTFHNQTDNVMCSYXPLFNSFNFTKGGLIQLNHGGPQPLQYAVNAXFLASLYSDYLESADTPGWYCGPNFYTTEVLRKFARSQLDYILGKNPLKMSYVVGFGNKYPKRPHHRGASIPHNGVKYGCKGGFDAPL

SEQ ID NO: 88366 - protein, 233 aa, Setaria italica
  misc_feature (102)..(102): Xaa can be any naturally occurring amino acid
  Transcript Sequence Number=SeqID_22392
  Gene Ontology: Mol. function=hydrolase activity, hydrolyzing O -glycosyl compounds; Cellular component=integral to membrane; Biological process=cell wall organization and biogenesis
  Homolog annotation: Hit_ID=Q84R49; Match level="QueryCoverage=98%, HitCoverage=36%, E-value=1e-109, Identity=84%"; Hit description =Endoglucanase 10
  Pfam annotation: Domain name=Glyco_hydro_9; Domain location=110-233; Score=-254.3; E_value=0.0062; Accession=PF00759.11; Description =Glycosyl hydrolase family 9
MFGRDPWGGPLEISNADSATDDDRSRDLDRAALMRQLDETQQSWLLAGPGDQAGKKKKKYVDLGCVVLDRKIFMWTVGTILGLGVFIGFIMMIVKLVPHKRXPPPPPPDQYTQAVHKALMFFNAQRSGPLPKHNGVSWRGNSCMKDGLSDSTTRRSLVGGFYDAGDAIKFNYPMAWSMTMLSWSVIEYKAKYEAIGELDHIKELIKWGTDYILKTFNSSADTIDRIVAQVRSY

SEQ ID NO: 88367 - protein, 530 aa, Setaria italica
  misc_feature (264)..(264): Xaa can be any naturally occurring amino acid
  Transcript Sequence Number=SeqID_22393
  Gene Ontology: Mol. function=hydrolase activity, hydrolyzing O -glycosyl compounds; Cellular component=integral to membrane; Biological process=carbohydrate metabolic process
  Homolog annotation: Hit_ID=B6U4I3; Match level="QueryCoverage=96%, HitCoverage=82%, E-value=0.0, Identity=91%"; Hit description=Endo-1 ,4-beta-glucanase Cel1
  Pfam annotation: Domain name=Glyco_hydro_9; Domain location=18-493; Score=732.9; E_value=2.4e-217; Accession=PF00759.11; Description =Glycosyl hydrolase family 9
  Subcellular localization annotation: CTP_CleavageSite=62; ConfidenceScore=5.05e-01
MIVKLVPHKRPPPPPPDQYTQAVHKALMFFNAQRSGPLPKHNGVSWRGNSCMKDGLSDSTTRRSLVGGFYDAGDAIKFNYPMAWSMTMLSWSVIEYKAKYEAIGELDHIKELIKWGTDYILKTFNSSADTIDRIVAQVGIGDTSKGGSQPNDHYCWMRPEDIDYKRPVTECHSCSDLASEMAAALAAASIVFKDSKTYSDKLVKGAKALYKFGRTQRGRYSPNGSDQAIFYNSTSYWDEFVWGGAWMYFATGNNSYLTVATAPXMAKHAGAYWFGSPNYGVFTWDDKLPGAQVLLSRLRLFLSPGYPYEEILRTFHNQTDNVMCSYLPLFNSFNFTKGGLIQLNHGGPQPLQYAVNAAFLASLYSDYLESADTPGWYCGPNFYTTEVLRKFARSQLDYILGKNPLKMSYVVGFGNKYPKRPHHRGASIPHNGVKYGCKGGFKWRESKKANPNILVGAMVAGPDKHDRFKDIRTNYNYTEPTLAANAGLVAALISIADIPTGRYSIDKNTIFSAIPPMFPTPPPPPSAWKP

SEQ ID NO: 88368 - protein, 127 aa, Setaria italica
  Transcript Sequence Number=SeqID_22394
  Gene Ontology: Mol. function=oxidoreductase activity; Cellular component=extracellular region; Biological process=lignin catabolic process
  Homolog annotation: Hit_ID=Q0JHP8; Match level="QueryCoverage=99%, HitCoverage=22%, E-value=1e-48, Identity=72%"; Hit description =Laccase-8
  Pfam annotation: Domain name=Cu-oxidase_2; Domain location=11-127; Score=145.6; E_value=1.5e-40; Accession=PF07731.6; Description =Multicopper oxidase
FRGVPGVYSEDFPRSPPAVAAARRATSVRKVNFNDVVEVVLQNEAYSSVLGAENHPIHLHGFNFFVLAQGLGRFDRGMKSTYNLVNPQVRNTVAVPAGGWAVIRFTANNPGMWFMHCHLDAHLPFGG

SEQ ID NO: 88369 - protein, 56 aa, Setaria italica
  Transcript Sequence Number=SeqID_22395
QWMPRYSAFIMFLVSDAKEYMNIDVSVQLLCHHVNESKYGNIVLCNFSTQKGKFIV

SEQ ID NO: 88370 - protein, 72 aa, Setaria italica
  Transcript Sequence Number=SeqID_22396
RVLREASASVTSMTASGILDFAVADMNAAVQDLRDDLRALPSGLLLAGAGSAASTALLVDAAQLFTVTSLLI

SEQ ID NO: 88371 - protein, 80 aa, Setaria italica
  Transcript Sequence Number=SeqID_22397
RAASGRSRKEVRRVKQSERARRGDDRLHPRSPCIKGGGAVPYPPAAPLAARAQPIHHPPWPTSPTRTPRGSSSSARSSSP

SEQ ID NO: 88372 - protein, 96 aa, Setaria italica
  Transcript Sequence Number=SeqID_22398
RTAVDPGLLGKPESASPRPPAGFTADDPNGHREDPRHRDQGFKSMATFLPGPVKGTADPPLLTPPLKFHGPLFESSVARTRSVDQGPRYVGKLPKI

SEQ ID NO: 88373 - protein, 58 aa, Setaria italica
  Transcript Sequence Number=SeqID_22399
  Gene Ontology: Mol. function=oxidoreductase activity, acting on single donors with incorporation of molecular oxygen, incorporation of two atoms of oxygen; Biological process=fatty acid biosynthetic process
  Homolog annotation: Hit_ID=A1XCI7; Match level="QueryCoverage=100%, HitCoverage=7%, E-value=1e-22, Identity=79%"; Hit description =Lipoxygenase
MQMPFCWHRSPAQAPENHIAINGTVVVSCHFGLLVPGKTTTLRLFSSTQIDHNTGKGR

SEQ ID NO: 88374 - protein, 107 aa, Setaria italica
  Transcript Sequence Number=SeqID_22400
  Gene Ontology: Mol. function=hydrolase activity; Biological process =lipid catabolic process
  Homolog annotation: Hit_ID=Q9XE79; Match level="QueryCoverage=99%, HitCoverage=24%, E-value=6e-50, Identity=87%"; Hit description =Patatin-like protein
KWGLLRWLYDGGFTPLIDIFCHASADMVDIHAKVLFEALGCEKNYLRIQDDSLVGHPSSVDIATKENMEALIGIGRELLKKPVARVNIDTGMYEPVAGEGNNEQALE

SEQ ID NO: 88375 - protein, 73 aa, Setaria italica
  Transcript Sequence Number=SeqID_22401
  Subcellular localization annotation: CTP_CleavageSite=38; ConfidenceScore=5.48e-01
SCRRRALAPTMAQHRQLGFFPSSVTRPCLALAVTALMCAVTAQPQPLPVPQPTTTTPMAAPPAVPSLPAACPP

SEQ ID NO: 88376 - protein, 42 aa, Setaria italica
  Transcript Sequence Number=SeqID_22402
LFLFHFSLYVITTIYMFVVKSKFMNRGSENLCNNSNIYSHIM

SEQ ID NO: 88377 - protein, 205 aa, Setaria italica
  Transcript Sequence Number=SeqID_22403
  Gene Ontology: Mol. function=transcription factor activity; Cellular component=nucleus; Biological process=regulation of transcription, DNA-dependent
  Homolog annotation: Hit_ID=B6SU49; Match level="QueryCoverage=100%, HitCoverage=100%, E-value=4e-30, Identity=39%"; Hit description =Ethylene-responsive transcription factor 4
  Pfam annotation: Domain name=AP2; Domain location=21-72; Score=78.8; E_value=2e-20; Accession=PF00847.12; Description=AP2 domain
MAPKNSAPPPVSAATDGMVEPRFRGVRKRPWGRYAAEIRDPARKARVWLGTFDTAEAAARAYDAAALHFRGPKAKTNFPVAFAHPAPPPKMLAVSPSSSTVESSSRDSPAASPAAALPAPSLDLSLGMPPMVAAQPFLFLDPRLAVTVAVPAPVPCRPAVVAGANKATCREDEQSDTGSSSSVVDASPAVDVGFDLNMPPPAEVA

SEQ ID NO: 88378 - protein, 768 aa, Setaria italica
  Transcript Sequence Number=SeqID_22404
  Gene Ontology: Mol. function=zinc ion binding; Cellular component =intracellular
  Homolog annotation: Hit_ID=B9RR31; Match level="QueryCoverage=92%, HitCoverage=93%, E-value=0.0, Identity=61%"; Hit description=DNA binding protein, putative
  Pfam annotation: Domain name=ARID; Domain location=576-698; Score= -5.1; E_value=0.00056; Accession=PF00759.11; Description=ARIDBRIGHT DNA binding domain
  Pfam annotation: Domain name=PHD; Domain location=689-743; Score =11.2; E_value=0.0015; Accession=PF00628.21; Description=PHD-finger
  Pfam module annotation: Pfam domain module=ARID::PHD; Domain location= 576-698::689-743
MSQIQSFSRSNCVLLAVLCGKHAEKRVTAAKSGPEAKRLRPSYPFPELSSVGRLEVHTLFNPTPEQFLEAQRVVQPNFLYIQGEQLEDEKEIGSLVWGDADVSDPQAFSTLISPPFPTIVYLEVPIGEKLAQAVHSKGIPYVIYWRNSFSSYAASHFRHALMSVIQSSVSHTWDAFQLAHASFRLYCVRNNHVQSVKLGPRLLGDAPKINISAPETETVDEEGSSEVTPAIKIYDEEITMKLLLCGVPCTLDPCLLGSLEDGLNALLNIEIRGSKLQNRISASPPPLEAASLPRGMVTMRCDISTCSSSHVSLLVSGSAQTCFDDQLLESHIKNEIIEKSQLVRALSNNEDKLSSSEPLTSMSTACGASTFEVWMTLPKWAAQVLKHLAPEISYRSLVALGIGCINGTPVASFERRDADRLLFFCSSQSKDLANENGPYFHLPRWSASLTKDRTKVASESRPNLLGANGVLEDKKHLTEGPSSFPSSQAKLKPATMRPIPHSRKQQMHPFMGLPETGLHDTSLVKPSLPAAPPVKHSLVSSAPTTHRKSTSGPSHTPSVIQLNPLPMKKHGCDRLPIQVCSEEDFLKDVMQFLIQRGHNRLVPHGGLAEFPDAILNAKRLDLYNLYKEVVSRGGFYVGNGINWKGQVFSKMRNHTATNRMTGVGNTLKRHYETYLLEYELAHDDVDGECCLLCHSSAPGDWVNCGLCGEWAHFGCDRRQGLGTFKDYAKTDGLEYICPHCSLANYKKKPPPPKVANGFANTASVSRNV

SEQ ID NO: 88379 - protein, 99 aa, Setaria italica
  Transcript Sequence Number=SeqID_22405
  Gene Ontology: Mol. function=hydrolase activity, hydrolyzing O -glycosyl compounds; Cellular component=cell wall; Biological process= carbohydrate metabolic process
  Homolog annotation: Hit_ID=B6TWP1; Match level="QueryCoverage=97%, HitCoverage=29%, E-value=3e-20, Identity=59%"; Hit description =Xyloglucan endotransglucosylase/hydrolase protein 26
  Pfam annotation: Domain name=XET_C; Domain location=56-99; Score =27.3; E_value=2e-05; Accession=PF06955.4; Description=Xyloglucan endo-transglycosylase (XET)
MYAFSSIWAGEDWATQGGRVKTDWNKAPFVAEYRDISLRVCDCDYGGAAAGCPESCASPSNWYAAPDLCQLSEAQLRQMRAVQLGYTIYDYCADGKRYN

SEQ ID NO: 88380 - protein, 129 aa, Setaria italica
  Transcript Sequence Number=SeqID_22406
  Gene Ontology: Mol. function=ribonuclease P activity; Biological process=RNA-dependent DNA replication
  Homolog annotation: Hit_ID=Q2QZQ1; Match level="QueryCoverage=95%, HitCoverage=5%, E-value=6e-32, Identity=62%"; Hit description =Retrotransposon protein, putative, Ty3-gypsy subclass
LEVDDLVRANIVLPKSLSVNSKSGDVEPSQANIFPLQLHVPRTIQMLRQYVKEFDRKYLSLSSGMETDADKPNLTSDDTIKMTCSVCLTRVLIRAFKEGSFEEGAVVCAPLPSDLPAWKIRGRRGRMCR

SEQ ID NO: 88381 - protein, 115 aa, Setaria italica
  Transcript Sequence Number=SeqID_22407
  Homolog annotation: Hit_ID=Q01KF8; Match level="QueryCoverage=92%, HitCoverage=39%, E-value=1e-45, Identity=82%"; Hit description =OSIGBa0115M15.1 protein
KGRAPINSDAVVVVGLLCTCLMGIFVYINRVKHGKSAAEKSNQSFFLILVIATLYCMWCASQIYLRQPSQPAIGEEADLGVIIFLAIYLFLPHGLCVLSMNKKDYTDALNELPLR

SEQ ID NO: 88382 - protein, 86 aa, Setaria italica
  Transcript Sequence Number=SeqID_22408
  Gene Ontology: Mol. function=DNA binding
  Homolog annotation: Hit_ID=B9RNC6; Match level="QueryCoverage=93%, HitCoverage=15%, E-value=2e-09, Identity=36%"; Hit description =Pentatricopeptide repeat-containing protein, putative
GKLDQDKIHKFQKYFEEHKDADGAERFCNCLRMQGCIDGKAYESLLRTYLAAGKKSSSLRQQIKDDKIEICYDIGKLLKRMGDKGR

SEQ ID NO: 88383 - protein, 87 aa, Setaria italica
  Transcript Sequence Number=SeqID_22409
  Subcellular localization annotation: CTP_CleavageSite=36; ConfidenceScore=5.49e-01
ALLAVLPPPQPPVRGRRRQKVPRPPRSGRRRRKLPPASVVPSLPWPDPPRRWLIQPRTTSPGSHDEHHQSLDPTPLPVHNDLCQAKV

SEQ ID NO: 88384 - protein, 108 aa, Setaria italica
  Transcript Sequence Number=SeqID_22410
TTTAGCSTRNKSLCICTLLQRVCLEGKKYAMHHNTSYLVAKQLSRISYFMVQYTILVRFIFPNGSQIFTVNNSEITDLRYQKTYLTSPCCRLPRLRSMIKKPVPSIWV

SEQ ID NO: 88385 - protein, 264 aa, Setaria italica
  Transcript Sequence Number=SeqID_22411
  Gene Ontology: Biological process=protein modification process
  Pfam annotation: Domain name=SAYSvFN; Domain location=191-260; Score =140.5; E_value=5.1e-39; Accession=PF10260.1; Description =Uncharacterized conserved domain (SAY
  Pfam annotation: Domain name=ubiquitin; Domain location=59-130; Score= 9.8; E_value=0.031; Accession=PF00240.15; Description=Ubiquitin family
  Pfam module annotation: Pfam domain module=SAYSvFN::ubiquitin; Domain location=191-260::59-130
MVQGPEPHKNRPRISESPPSKKKKTNLAESQSSLFLTSDESPAMAAAGDEPETVEVTLRAVGPSRPTTIRLPPLLSVSELRRRVARDRRLEATEEGRLRLVLRGRPLPHQDDAHVNLRDGDTLIVAVAPKPPAKHLLDNDDDEEEEEELKFKIPQTTTLWKRKIFMFLRDKLRLPDIILMGLFSLSMKAWIIIAMWFLFAPIAQHYSLGPLYILGTGFLIILLNLGRRQQGDVSAYSIFNEDFRELPGTLNADRIDRDIRAGQF

SEQ ID NO: 88386 - protein, 163 aa, Setaria italica
  Transcript Sequence Number=SeqID_22412
  Gene Ontology: Mol. function=nucleotide binding; Biological process =defense response
  Homolog annotation: Hit_ID=Q9FR63; Match level="QueryCoverage=91%, HitCoverage=18%, E-value=7e-31, Identity=48%"; Hit description =Stripe rust resistance protein Yr10
EVTDRRERYKFEANAAQPDTNLIDSRVLASFEHAAKLVGTDGPTEKISNLLTQGKGPQQQKLMIVSIVGVGGLGKTTIANMVYERLGGQFDCKAFVSVSLKPNVKQIFSSILRQISKDICTNIGEKDPEELIRSIRQFLMDKKYLIVIDYPFILFSFSSIFSI

SEQ ID NO: 88387 - protein, 181 aa, Setaria italica
  misc_feature (68)..(68): Xaa can be any naturally occurring amino acid
  misc_feature (149)..(149): Xaa can be any naturally occurring amino acid
  Transcript Sequence Number=SeqID_22413
  Gene Ontology: Mol. function=nucleotide binding; Cellular component =nucleus; Biological process=small GTPase mediated signal transduction
  Homolog annotation: Hit_ID=P41916; Match level="QueryCoverage=95%, HitCoverage=76%, E-value=1e-89, Identity=93%"; Hit description=GTP -binding nuclear protein Ran-1
  Pfam annotation: Domain name=Miro; Domain location=3-116; Score=17.1; E_value=0.00027; Accession=PF08477.5; Description=Miro-like protein
  Pfam annotation: Domain name=Ras; Domain location=10-162; Score =156.9; E_value=6.2e-44; Accession=PF00071.14; Description=Ras family
  Pfam module annotation: Pfam domain module=Miro::Ras; Domain location= 3-116::10-162
MSRCFMFPAGKTTFVKRHLTGEFEKKYEPTIGVEVHPLDFSTNCGKIRFYCWDTAGQEKFGGLRDGYXSCSIHGQCAIIMFDVTSRLTYKNVPTWHRDLCRVCENIPIVLCGNKVDVKNRQVKAKQVTFHRKKNLQYYEISAKSNYNFXEKPFLYLARKLAGDQNLHFVEAVALKPPEVQI

SEQ ID NO: 88388 - protein, 97 aa, Setaria italica
  Transcript Sequence Number=SeqID_22414
  Gene Ontology: Mol. function=nucleotide binding; Cellular component =nucleus; Biological process=small GTPase mediated signal transduction
  Homolog annotation: Hit_ID=Q6V8M6; Match level="QueryCoverage=76%, HitCoverage=37%, E-value=9e-29, Identity=86%"; Hit description=Small Ras-like GTP-binding protein (Fragment)
  Pfam annotation: Domain name=Ras; Domain location=1-82; Score=-53.2; E_value=2.6e-05; Accession=PF00071.14; Description=Ras family
NSVRLCIDYVGSFAKYLIFDCRVCENIPIVLCGNKVDVKNRQVKAKQVTFHRKKNLQYYEISAKSNYNFEKPFLYLASKLSFMLLLHGHINLHFWWL

SEQ ID NO: 88389 - protein, 146 aa, Setaria italica
  Transcript Sequence Number=SeqID_22415
  Gene Ontology: Mol. function=nucleotide binding; Cellular component =nucleus; Biological process=small GTPase mediated signal transduction
  Homolog annotation: Hit_ID=P41916; Match level="QueryCoverage=75%, HitCoverage=49%, E-value=4e-57, Identity=95%"; Hit description=GTP -binding nuclear protein Ran-1
  Pfam annotation: Domain name=Ras; Domain location=6-107; Score=37.5; E_value=3.6e-12; Accession=PF00071.14; Description=Ras family
MFRWACLTLIKFQRSCSIHGQCAIIMFDVTSRLTYKNVPTWHRDLCRVCENIPIVLCGNKVDVKNRQVKAKQVTFHRKKNLQYYEISAKSNYNFEKPFLYLARKLAGDQNLHFVEAVALKPPEVQIDMAMQQQHEAELAAAAAQPL

SEQ ID NO: 88390 - protein, 248 aa, Setaria italica
  Transcript Sequence Number=SeqID_22416
  Gene Ontology: Mol. function=nucleotide binding; Cellular component =nucleus; Biological process=small GTPase mediated signal transduction
  Homolog annotation: Hit_ID=P41916; Match level="QueryCoverage=77%, HitCoverage=87%, E-value=1e-108, Identity=96%"; Hit description=GTP -binding nuclear protein Ran-1
  Pfam annotation: Domain name=Arf; Domain location=22-198; Score= -93.4; E_value=0.021; Accession=PF00025.13; Description=ADP -ribosylation factor family
  Pfam annotation: Domain name=GTP_EFTU; Domain location=42-216; Score=- 96.4; E_value=0.092; Accession=PF00009.19; Description=Elongation factor Tu GTP binding domain
  Pfam annotation: Domain name=MMR_HSR1; Domain location=41-155; Score=- 6.2; E_value=0.0037; Accession=PF01926.15; Description=GTPase of unknown function
  Pfam annotation: Domain name=Miro; Domain location=42-155; Score =53.6; E_value=7.4e-13; Accession=PF08477.5; Description=Miro-like protein
  Pfam annotation: Domain name=Ras; Domain location=42-200; Score =231.7; E_value=1.9e-66; Accession=PF00071.14; Description=Ras family
  Pfam module annotation: Pfam domain module=Arf::GTP_EFTU::MMR _HSR1::Miro::Ras; Domain location=22-198::42-216::41-155::42-155::42 -200
  Subcellular localization annotation: CTP_CleavageSite=26; ConfidenceScore=5.05e-01
TPLSSSSPPRSAVPHPQTRVPLSRVAEMALPNQQVVDYPSFKLVIVGDGGTGKTTFVKRHLTGEFEKKYEPTIGVEVHPLDFSTNCGKIRFYCWDTAGQEKFGGLRDGYYIHGQCAIIMFDVTSRLTYKNVPTWHRDLCRVCENIPIVLCGNKVDVKNRQVKAKQVTFHRKKNLQYYEISAKSNYNFEKPFLYLARKLAGDQNLHFVEAVALKPPEVQIDMAMQQQHEAELAAAAAQPLPDDDDDLIE

SEQ ID NO: 88391 - protein, 318 aa, Setaria italica
  Transcript Sequence Number=SeqID_22417
  Gene Ontology: Mol. function=metal ion binding; Cellular component =integral to membrane
  Homolog annotation: Hit_ID=B6SSN5; Match level="QueryCoverage=100%, HitCoverage=84%, E-value=1e-126, Identity=71%"; Hit description =Protein binding protein
  Pfam annotation: Domain name=zf-C3HC4; Domain location=262-302; Score= 41.2; E_value=4e-09; Accession=PF00097.17; Description=Zinc finger, C3HC4 type (RING finger)
LVREAAAEHLEERQADWAYSRPVVALDLLWNLAFITVAAVVLVLSRDEDSPMPLRTWVAGYALQCVVHMVCVAIEYRMRHGQRGGGPAPADEERGSDGSSSSSDEDDRELDHRGRRTDYASIAKHLESANTMFSFIWWIIGFYWISAGGEEVIRDAPQLYWLCIVFLAFDVFFVVFCVALACIIGIAVCCCLPCIIAILYAVSDQEGASEDDIRQIPRYKFRRTDEPEKQDVDPMGPFGGIMTECGTNQPIEKVLAAEDAECCICLSAYDDGAELRELPCGHHFHCTCIDKWLHINATCPLCKYNIRKSSSSSGSEEV

SEQ ID NO: 88392 - protein, 69 aa, Setaria italica
  Transcript Sequence Number=SeqID_22418
HALQLGLPELEALRANRMPHRWIATEHAEAVPAPQAGEAAASESLQAAAAKPVRAAIALHCDFDALPFD

SEQ ID NO: 88393 - protein, 47 aa, Setaria italica
  Transcript Sequence Number=SeqID_22419
MEMKKIACAVLVAASAATVALAAEAPAPAPTSASSAAFPAVGAVLGA

SEQ ID NO: 88394 - protein, 79 aa, Setaria italica
  Transcript Sequence Number=SeqID_22420
  Gene Ontology: Mol. function=metal ion binding
  Homolog annotation: Hit_ID=B6TYI3; Match level="QueryCoverage=63%, HitCoverage=32%, E-value=3e-19, Identity=90%"; Hit description=RING zinc finger protein-like
  Pfam annotation: Domain name=zf-C3HC4; Domain location=9-51; Score =35.1; E_value=2.8e-07; Accession=PF00097.17; Description=Zinc finger, C3HC4 type (RING finger)
WRPAWAASCAVCLGALEARHRVRELGNCAHAFHKACIDKWVDKGQATCPLCRALLLPGAPDAGAGELADAFSSSSSFSF

SEQ ID NO: 88395 - protein, 60 aa, Setaria italica
  Transcript Sequence Number=SeqID_22421
ILTSLTMVTDQYLFHPDPSKFHSNKERNYSIPPIIEYGTIPEIRDGTTAYPISLFVENTT

SEQ ID NO: 88396 - protein, 76 aa, Setaria italica
  Transcript Sequence Number=SeqID_22422
  Homolog annotation: Hit_ID=B6TDK0; Match level="QueryCoverage=100%, HitCoverage=25%, E-value=5e-09, Identity=51%"; Hit description=B3 DNA binding domain containing protein
RCSVDHDPSNMQHAGESQWDRDNRSCSAASAPSRRLRLFGVNLDCGPGPEPEPETPTTMYSYMHQSPYAPDNWGSP

SEQ ID NO: 88397 - protein, 55 aa, Setaria italica
  misc_feature (42)..(42): Xaa can be any naturally occurring amino acid
  Transcript Sequence Number=SeqID_22423
  Homolog annotation: Hit_ID=B4FSP2; Match level="QueryCoverage=78%, HitCoverage=8%, E-value=3e-10, Identity=67%"; Hit description=HECT domain and RCC1-like domain-containing protein 2
TDSSDKSDTARIMQCPMDAAANGTSPAMQFHSIADDSTLHSXPLPTALESSKRHC

SEQ ID NO: 88398 - protein, 80 aa, Setaria italica
  Transcript Sequence Number=SeqID_22424
  Gene Ontology: Mol. function=alpha-1,3-mannosylglycoprotein 2-beta-N -acetylglucosaminyltransferase activity; Cellular component=Golgi membrane; Biological process=protein amino acid N-linked glycosylation
  Homolog annotation: Hit_ID=B6TLH4; Match level="QueryCoverage=76%, HitCoverage=14%, E-value=2e-23, Identity=88%"; Hit description=N -acetylglucosaminyltransferase I
FDYFEAAAKLLDNDKTIMAVSSWNDNLQKQIVNDPKALYRSDFFPGLGWMLTKSRKEIRPKSTLPLGFLSWTFVNIHPSP

SEQ ID NO: 88399 - protein, 64 aa, Setaria italica
  Transcript Sequence Number=SeqID_22425
  Gene Ontology: Mol. function=alpha-1,3-mannosylglycoprotein 2-beta-N -acetylglucosaminyltransferase activity; Cellular component=Golgi membrane; Biological process=protein amino acid N-linked glycosylation
  Homolog annotation: Hit_ID=B6TLH4; Match level="QueryCoverage=54%, HitCoverage=7%, E-value=2e-14, Identity=100%"; Hit description=N -acetylglucosaminyltransferase I
TTVSSWNDNGQKQFVNDPKALYRSDFFPGLGWMLTKSKSTLPLGFLSWAWMDVNKVHFGDSSIQ

SEQ ID NO: 88400 - protein, 191 aa, Setaria italica
  Transcript Sequence Number=SeqID_22426
  Gene Ontology: Mol. function=alpha-1,3-mannosylglycoprotein 2-beta-N -acetylglucosaminyltransferase activity; Cellular component=Golgi membrane; Biological process=protein amino acid N-linked glycosylation
  Homolog annotation: Hit_ID=B6TLH4; Match level="QueryCoverage=64%, HitCoverage=28%, E-value=5e-62, Identity=95%"; Hit description=N -acetylglucosaminyltransferase I
  Pfam annotation: Domain name=GNT-I; Domain location=27-191; Score= -203.2; E_value=9.3e-05; Accession=PF03071.7; Description=GNT-I family
NVFTVLKKIRSFQEGGGRRGFRRLLLLAAAAAFIYIQVRLFATQSHYADRLAEAERSENQCTSQLKSLIDQVSMQQEKIVALEEMKIRQDEERAQLKILIQDLEKRSVQKLLNKNVVPVAAVVIMACNRPDYLERTVESILKYQTSVASKFPLFISQVLETAISVLGSIKCVGLPFFHWFFSCQLMEQMEL

SEQ ID NO: 88401 - protein, 307 aa, Setaria italica
  misc_feature (26)..(26): Xaa can be any naturally occurring amino acid
  Transcript Sequence Number=SeqID_22427
  Gene Ontology: Mol. function=alpha-1,3-mannosylglycoprotein 2-beta-N -acetylglucosaminyltransferase activity; Cellular component=Golgi membrane; Biological process=protein amino acid N-linked glycosylation
  Homolog annotation: Hit_ID=B6TLH4; Match level="QueryCoverage=95%, HitCoverage=66%, E-value=1e-159, Identity=91%"; Hit description=N -acetylglucosaminyltransferase I
  Pfam annotation: Domain name=GNT-I; Domain location=1-306; Score =464.4; E_value=1.7e-136; Accession=PF03071.7; Description=GNT-I family
ERRIERIRQDEERAQLKILIQDLEKXVQNSLSKNVVPVAAVVIMACNRPDYLERTVESILKYQTSVASKFPLFISQDGTNGAVKKKALDYKQITYMQHMDLEPVRAERPGELTAYYKIAKHYKWALDQLFIKHNFARVIILEDDMEIAPDFFDYFEAAAKLLDNDKTIMAVSSWNDNGQKQFVNDPKALYRSDFFPGLGWMLTKSTWIELSPKWPKAYWDDWVRLKEVHGNRQFIHPEICRTYNFGKHGSSLGQFFEQYLEPIKLNDVHIDWNSEDLSYLREDKFLTKFGKEVASAMPLHGSDCLVV

SEQ ID NO: 88402 - protein, 169 aa, Setaria italica
  Transcript Sequence Number=SeqID_22428
  Gene Ontology: Mol. function=alpha-1,3-mannosylglycoprotein 2-beta-N -acetylglucosaminyltransferase activity; Cellular component=Golgi membrane; Biological process=protein amino acid N-linked glycosylation
  Homolog annotation: Hit_ID=B6TLH4; Match level="QueryCoverage=95%, HitCoverage=36%, E-value=7e-84, Identity=92%"; Hit description=N -acetylglucosaminyltransferase I
  Pfam annotation: Domain name=GNT-I; Domain location=1-169; Score= -68.4; E_value=2.1e-11; Accession=PF03071.7; Description=GNT-I family
FFLDEILRPKAYWDDWVRLKEVHGNRQFIHPEICRTYNFGKHGSSLGQFFEQYLEPIKLNDVHIDWNSEDLSYLREDKFLTKFGKEVASAMPLHGSDAVLKAQNMAADVRIQYNDQEDFEQIARQFGIFEEWKDGIPRTAYKGVVVFRYKSSPRRIFLVSPDSLRQLGV

SEQ ID NO: 88403 - protein, 338 aa, Setaria italica
  Transcript Sequence Number=SeqID_22429
  Gene Ontology: Mol. function=transcription factor activity; Cellular component=nucleus; Biological process=regulation of transcription, DNA-dependent
  Homolog annotation: Hit_ID=Q7XT53; Match level="QueryCoverage=88%, HitCoverage=63%, E-value=1e-103, Identity=69%"; Hit description =OSJNBa0010D21.13 protein
  Pfam annotation: Domain name=AP2; Domain location=125-176; Score =60.9; E_value=4.7e-15; Accession=PF00847.12; Description=AP2 domain
  Pfam annotation: Domain name=AP2; Domain location=32-82; Score=61.1; E_value=4.2e-15; Accession=PF00847.12; Description=AP2 domain
  Pfam module annotation: Pfam domain module=AP2::AP2; Domain location =125-176::32-82
  Subcellular localization annotation: CTP_CleavageSite=18; ConfidenceScore=5.52e-01
NGYVTSNGATASGAAGAAASKKSRRGPRSRSSQYRGVTFYRRTGRWESHIWDCGKQVYLGGFDTAHAAARAYDRAAIKFRGVEADINFNLEDYEDDMKQQMGNLSKEEFVHVLRRQSTGFPRGSSKYRGVTLHKCGRWEARMGQFLGKKYVYLGLFDTEEEAARAYDRAAIKCNGKDAVTNFDPSIYAEELEPAAATTGGGDEHNLDLSLGSSAGSKRGSLDGGGAGDDETSDQRVPMAFDLDWQTAAARSTKAKFDASSKQPQMPPPLQGAHHLPFSPRHQQFLSNEGDPGTAGGLSLAIGGAGAVGGHWPPQLLQQQQRLLHGWGNGGGTSWPLPA

SEQ ID NO: 88404 - protein, 102 aa, Setaria italica
  misc_feature (69)..(69): Xaa can be any naturally occurring amino acid
  Transcript Sequence Number=SeqID_22430
  Homolog annotation: Hit_ID=B6T3Q3; Match level="QueryCoverage=85%, HitCoverage=52%, E-value=3e-22, Identity=63%"; Hit description =Ethylene-responsive protein
MAAPAPQQGQGQKVMVAVDESECSRHALEWALRNLAPTLAPPLLLLTVQPLAPLGYVSAASFGAPLGMXSPELIKSMQEQQRELTQALLDKAKAICAEHRLD

SEQ ID NO: 88405 - protein, 179 aa, Setaria italica
  Transcript Sequence Number=SeqID_22431
  Gene Ontology: Biological process=response to stress
  Homolog annotation: Hit_ID=B6T3Q3; Match level="QueryCoverage=87%, HitCoverage=90%, E-value=2e-63, Identity=78%"; Hit description =Ethylene-responsive protein
  Pfam annotation: Domain name=Usp; Domain location=22-176; Score =110.3; E_value=6.4e-30; Accession=PF00582.18; Description=Universal stress protein family
KGNKQTKRNKDRRPDDRQQGQGQKVMVAVDESECSRHALEWALRNLAPTLAPPLLLLTVQPLAPLGYVSAASFGAPLGTVPPVAPELIKSMQEQQRELTQALLDKAKAICAEHGVNVETVVEVGDPKEMICEAAEKKNVDLLVLGSHSRGPIQRLFLGSVSNYCVHHCKCPVLVVKNQG

SEQ ID NO: 88406 - protein, 61 aa, Setaria italica
  Transcript Sequence Number=SeqID_22432
QRLLAVCGSRCDSLFLVRVYFFWCALPGTGNRLNLVHSTLMLWSLQSLNCLNLTLINGHYI

SEQ ID NO: 88407 - protein, 56 aa, Setaria italica
  Transcript Sequence Number=SeqID_22433
LEFVQQLTSVTMSHDCTLIKEPQAHRHQLAKSPWYKFKHKIIFKICYAPRRLGKLV

SEQ ID NO: 88408 - protein, 71 aa, Setaria italica
  Transcript Sequence Number=SeqID_22434
RGIMCIKPALVDITLISLVLMGISTCKVSASTIPFQCGTKLEMLHVQPFSAQLKYNHASKPSHAFMSFPFR

SEQ ID NO: 88409 - protein, 214 aa, Setaria italica
  Transcript Sequence Number=SeqID_22435
  Gene Ontology: Mol. function=protein serine/threonine kinase activity; Cellular component=plasma membrane; Biological process =protein amino acid phosphorylation
  Homolog annotation: Hit_ID=B6SYS4; Match level="QueryCoverage=97%, HitCoverage=28%, E-value=3e-62, Identity=61%"; Hit description=ATP binding protein
MLSPYLADADALENVGLEHDFRGNEKLDVCVVTNEENADGEEFLKDSYSIHPFPENTDPLDVYGVEDFVTADTNVRNSTTHKFQEDPKVDPALSKFHQEYEVFGLKIFHRKNRTGFEENKEFPIVMDSVITGRYRVTEYLGSAAFSKVVRAHDLQTGVDVCLKIIKNDKDFFDQSLDEIKLLKFVNKYDPDDDHHILRLYDYFYFQEHLFIVTE

SEQ ID NO: 88410 - protein, 98 aa, Setaria italica
  Transcript Sequence Number=SeqID_22436
QDVRCEPRNAPGGESSARVSAVFRAVAPWEHKYTASKRSGLSGMTLSAEGVWRASTGQLCMVGCLGVGEKACHSRVCLYVQTTFTATRRSITVGQITR

SEQ ID NO: 88411 - protein, 84 aa, Setaria italica
  Transcript Sequence Number=SeqID_22437
LSPTDCAVPAFGRCRVAVANLAAARGESPGADPAAAAPSARPAPPQLQSRVHTATAPAELFALLERGHFFITLGVGESKIRATG

SEQ ID NO: 88412 - protein, 357 aa, Setaria italica
  Transcript Sequence Number=SeqID_22438
  Gene Ontology: Mol. function=oxidoreductase activity; Cellular component=glycerol-3-phosphate dehydrogenase complex; Biological process=oxidation reduction
  Homolog annotation: Hit_ID=B6T7M6; Match level="QueryCoverage=94%, HitCoverage=94%, E-value=1e-175, Identity=87%"; Hit description =Disulfide oxidoreductase/ electron carrier/ oxidoreductase
  Pfam annotation: Domain name=Pyr_redox; Domain location=131-225; Score=51.4; E_value=3.5e-12; Accession=PF00070.19; Description =Pyridine nucleotide-disulphide oxidore
  Pfam annotation: Domain name=Pyr_redox; Domain location=8-103; Score =10.2; E_value=0.00065; Accession=PF00070.19; Description=Pyridine nucleotide-disulphide oxidore
  Pfam annotation: Domain name=Pyr_redox_2; Domain location=8-273; Score=46.4; E_value=1.1e-10; Accession=PF07992.6; Description =Pyridine nucleotide-disulphide oxidore
  Pfam module annotation: Pfam domain module=Pyr_redox::Pyr_redox::Pyr _redox_2; Domain location=131-225::8-103::8-273
MAAAGKARVVVVGGGVAGSLLAKTMERHADVVLLDPKEYLEIPWAELRSTVEPSFAERSLIYHKDYLTDATIVTSSAVDITKDAVLTADGQSLPYDYLVIATGHALTSPGSRDDRVKEFQRDNQKIESSDSVLIIGGGPTGVELAGEIAVDYPQKKVTLIHRGPRLLEFIGEKASRKSLDWLTSKKVDVLLQQSVDLGSLSDTEKVYKTSGGETITADCHFVCIGKPLSSSWLNDTILKESLDNKGRVMVEKDLRVKGYNNVFAIGDITDIPEIKQGYLAQKHALLVAKNLKLLIKGSPNTKLSTYNTGFPLALVSLGRNEGVAQFPYLTISGCLPGKIKSRDLFISKTRKQIGLNG

SEQ ID NO: 88413 - protein, 63 aa, Setaria italica
  Transcript Sequence Number=SeqID_22439
  Subcellular localization annotation: CTP_CleavageSite=24; ConfidenceScore=5.11e-01
NLRLNIQTLLLMFKIFNLNVKFIVQSPSFQFKSSNLELKIFKSFSRKPKILKVPILNLEVQNI

SEQ ID NO: 88414 - protein, 226 aa, Setaria italica
  misc_feature (163)..(163): Xaa can be any naturally occurring amino acid
  Transcript Sequence Number=SeqID_22440
  Gene Ontology: Cellular component=cytoplasm
  Homolog annotation: Hit_ID=Q259Y7; Match level="QueryCoverage=99%, HitCoverage=52%, E-value=2e-41, Identity=46%"; Hit description =B0414F07.2 protein
MVEEVHLGLPGPWAADYREKADHYTTKIGGVPDWPTGDTGIKPEMLQCSLCGAKLCLVAQVYAPVVKLNIEERTIYVLACPTPECGPKPQSWKVLRVQKCRSVEQTEGDGDELGQATGPSSTSIPEEQIDKNTSLDINDDDFDLDALAEALEQAAALASNSKXKKNKPKRANAPIKRPVLKEKASDLSIPVLPCFYIYYDKEQYQGKGAVGSSSNELVLDKEIIDA

SEQ ID NO: 88415 - protein, 253 aa, Setaria italica
  Transcript Sequence Number=SeqID_22441
  Gene Ontology: Cellular component=cytoplasm
  Homolog annotation: Hit_ID=Q259Y7; Match level="QueryCoverage=61%, HitCoverage=41%, E-value=8e-59, Identity=71%"; Hit description =B0414F07.2 protein
  Pfam annotation: Domain name=PDCD2_C; Domain location=95-250; Score= -14.7; E_value=4.1e-06; Accession=PF04194.5; Description=Programmed cell death protein 2, C-terminal putative domain
GQATGSTFRIRLTKYTSLDINDDDFDLDALAEALEQAAALASNSKKKNKPKRANAPIKRPVLKEKASDLSIPVLPCFYIYYDKEQYQGKGAVGSSSNELVLDKEIIDATNDEEEKWEGEKYEYDKAIGADRTFLKFKKRLDAYPEQCFRYSYGGKLLSAATKLQDAGTCRLCGSSRQYELQLMSPLSYFLHQAGDGSSNYAPSSWTWLTLIIYTCSKSCCPSSCGGKPCSCCWGVAEEDIVIQEDEAVKNLIC

SEQ ID NO: 88416 - protein, 242 aa, Setaria italica
  Transcript Sequence Number=SeqID_22442
  Gene Ontology: Mol. function=structural constituent of cell wall; Biological process=plant-type cell wall organization and biogenesis
  Homolog annotation: Hit_ID=Q40793; Match level="QueryCoverage=52%, HitCoverage=50%, E-value=3e-26, Identity=47%"; Hit description =Tyrosine-rich hydroxyproline-rich glycoprotein (Fragment)
  Pfam annotation: Domain name=DUF1210; Domain location=51-238; Score= -80.2; E_value=0.084; Accession=PF06735.3; Description=Protein of unknown function (DUF1210)
  Pfam annotation: Domain name=Pollen_Ole_e_I; Domain location=51-175; Score=49.0; E_value=1.8e-11; Accession=PF01190.9; Description=Pollen proteins Ole e I family
  Pfam module annotation: Pfam domain module=DUF1210::Pollen_Ole_e_I; Domain location=51-238::51-175
MKMSMTGQPKGHLWLVFTMLFVTFAMHGEGASSFAPPSLSISPTYDPVIKVIGKVYCYRCFNEAHPEESHGKRHLEGAMVKVTCQANDQALVAFGYTRSNGKYSVILKGLPISNTYGADSCKVELHGAPGGSDCNVPIELNLSGLSVYSKSSKEVVLQANQIMAFASKNTLECSKPHMPPPAHPYNSPQLPYQYPSPPASHKSQPLPYQHSPPPSNLFPPPAYQYPSPPLNNYASPPPYLQS

SEQ ID NO: 88417 - protein, 186 aa, Setaria italica
  misc_feature (178)..(178): Xaa can be any naturally occurring amino acid
  Transcript Sequence Number=SeqID_22443
  Gene Ontology: Cellular component=plasma membrane
  Pfam annotation: Domain name=DUF740; Domain location=1-186; Score= -149.3; E_value=8.3e-08; Accession=PF05340.4; Description=Protein of unknown function (DUF740)
AEGNVAREGKAIKDHIDLESSQTKKASPKDLKEIAGSFWVAASVFSKKWQKWRRKQKLKKEAAVSKAAAAAMPPPEKPSKPSFLRRRRLRGEAGSELAGGRRSCDTDPRFSLDAARMSVDDAGFSWDEPRASWDGYLFGAGAGIGLGRAPPPLSRLPPILSVLEDTPTDIVERSDGQXPVEDDFRP

SEQ ID NO: 88418 - protein, 152 aa, Setaria italica
  Transcript Sequence Number=SeqID_22444
DADRLGCSARRSFVRTRRAPARAGDYYYEDAAPCSPAPFPGYMASTASAKAKFRSMSTPKERSAGTDAFSEHCFPFADRMLSPIPSMSPIPSIASDMGFARSTRPPAAQRSPRVKGPMTPARSRSRRSPSHHSFGSEAALHQLQMEHYTPVR

SEQ ID NO: 88419 - protein, 239 aa, Setaria italica
  Transcript Sequence Number=SeqID_22445
  Gene Ontology: Mol. function=electron carrier activity; Biological process=oxidation reduction
  Homolog annotation: Hit_ID=Q4U0D3; Match level="QueryCoverage=100%, HitCoverage=45%, E-value=1e-86, Identity=70%"; Hit description =Cytochrome P450
  Pfam annotation: Domain name=p450; Domain location=3-238; Score= -140.1; E_value=6.8e-05; Accession=PF00067.14; Description=Cytochrome P450
FLPALRLLDFGRTAKKLAAIAKARHRFGQSLIDDYRRRHPRFASELETPRTVIGDLLRQQQEGSREPLDDVVIRSVCLSLLQAGTDTSSSTVEWAMALLLSNLGVLKKATTEIHSVVGTSQLMNESDLARLPYLRCIILETLRLKPLTPNHVPHEASRDCVIAGHTVARGAMVLVDVYSMQRDPTMWEDPEKFMPERFMDADEVDGDGGRFMMPFGLGRRKCPGEGLALRTVGMALGVM

SEQ ID NO: 88420 - protein, 352 aa, Setaria italica
  misc_feature (338)..(338): Xaa can be any naturally occurring amino acid
  Transcript Sequence Number=SeqID_22446
  Gene Ontology: Mol. function=RNA binding; Cellular component =ribonucleoprotein complex; Biological process=mRNA processing
  Homolog annotation: Hit_ID=Q84N49; Match level="QueryCoverage=100%, HitCoverage=52%, E-value=1e-175, Identity=83%"; Hit description=CRS2- associated factor 1, chloroplastic
  Pfam annotation: Domain name=CRS1_YhbY; Domain location=186-269; Score=99.7; E_value=9.8e-27; Accession=PF01985.13; Description=CRS1 YhbY domain
MATAAPFSCRSLLAPAQQSHPRLPASIRLDLSHPKQPPADPKRRRHHAASHPAFSAAARGRAKKIPVPDTEEPAAGVRVTDRGLSYRLDGAPFEFQYSYTEAPRARPVALREAPFLPFGPEATPRPWTGRKPLPKSRKELPEFDSFVLPQPGKKGVKPVQSPGPFLAGMEPRYQAASREEVLGEPLTKEEVAELVKGSLKTNRQLNMGRDGLTHNMLENIHSHWKRKRVCKIKCKGVCTVDMDNVCQQLEEKVGGKVIHRQGGVIFLFRGRNYNYRTRPSFPLMLWKPVAPVYPRLVKKVPDGLTPDEAAEMRMRGNQLPPICRLGKNGVYVNLVKQXREAFEACDLVRVDC

SEQ ID NO: 88421 - protein, 45 aa, Setaria italica
  Transcript Sequence Number=SeqID_22447
LDGECDFDNLLHTGQGISHLVVQCKLIYCLCCLSSDHPFLLSCTK

SEQ ID NO: 88422 - protein, 48 aa, Setaria italica
  misc_feature (14)..(14): Xaa can be any naturally occurring amino acid
  Transcript Sequence Number=SeqID_22448
VAAQIGVKGMLAGXGDFYQVVVQPGYDQAFVVGVIAILDNIHGESTRC

SEQ ID NO: 88423 - protein, 216 aa, Setaria italica
  Transcript Sequence Number=SeqID_22449
  Gene Ontology: Mol. function=7S RNA binding; Cellular component =signal recognition particle; Biological process=SRP-dependent cotranslational protein targeting to membrane
  Homolog annotation: Hit_ID=B9RMK3; Match level="QueryCoverage=99%, HitCoverage=29%, E-value=1e-47, Identity=50%"; Hit description =Signal recognition particle subunit srp72, putative
GRASEVQAAMKALKVDLTTRALRDARSFELAYNSACSLIENKKYSEAKEQLDLAKRIGKEELMVEDFDENAIEYELAPVSAQLAYVQQLQGQSQEAMQTYVNMVNGKSDDSSPLADSSSLAVATTNLISLKGTKDTADSLKKLDRLIEKSNAPNQLQLIESLDFKLYPRQKEALYSARVLLLLHANKIDQAHELVCGLLGMFQDSVFPVLLQAAVH

SEQ ID NO: 88424 - protein, 702 aa, Setaria italica
  misc_feature (408)..(408): Xaa can be any naturally occurring amino acid
  Transcript Sequence Number=SeqID_22450
  Gene Ontology: Mol. function=7S RNA binding; Cellular component =signal recognition particle; Biological process=SRP-dependent cotranslational protein targeting to membrane
  Homolog annotation: Hit_ID=B9RMK3; Match level="QueryCoverage=86%, HitCoverage=89%, E-value=1e-179, Identity=56%"; Hit description =Signal recognition particle subunit srp72, putative
  Pfam annotation: Domain name=SRP72; Domain location=553-641; Score =83.7; E_value=6.8e-22; Accession=PF08492.4; Description=SRP72 RNA -binding domain
  Pfam annotation: Domain name=TPR_2; Domain location=147-180; Score =9.6; E_value=2.2; Accession=PF07719.9; Description=Tetratricopeptide repeat
  Pfam annotation: Domain name=TPR_2; Domain location=222-255; Score =4.8; E_value=8.6; Accession=PF07719.9; Description=Tetratricopeptide repeat
  Pfam annotation: Domain name=TPR_2; Domain location=271-304; Score =1.6; E_value=22; Accession=PF07719.9; Description=Tetratricopeptide repeat
  Pfam annotation: Domain name=TPR_2; Domain location=394-427; Score =5.3; E_value=7.5; Accession=PF07719.9; Description=Tetratricopeptide repeat
  Pfam annotation: Domain name=TPR_2; Domain location=52-85; Score=6.6; E_value=5.1; Accession=PF07719.9; Description=Tetratricopeptide repeat
  Pfam module annotation: Pfam domain module=SRP72::TPR_2::TPR_2::TPR _2::TPR_2::TPR_2; Domain location=553-641::147-180::222-255::271 -304::394-427::52-85
SAIAPADEAPHDDPAFAVRRAGAQSSGDAAQVEGGGGGKSKAAAAAAEAVSVEDLFTSLHRHIQAGEFAKAVKVADQVLKAAPGDEDAVRCKVAAHIKADQIDKALAAIRDAERLPIDFSYYKAYCYYRQNKLEEALSLLRGQEETAAILQLESQILYRLGRMNDCMNSYEKLQKFKIDSMDMKINIIAALVAAGRASEVQAAMKVQKVDLTTRALRDARSFELAYNSACSLIEIKKYLEAKEQLDLSKRIGKEELMVEDYGEDEIEYELAPVSAQLAYVQQLQGQSQEAMQTYVNMVNRKSADSSSLAVATTNLISLKGTKDAADSLRKLDRLFEKSTAPNQLQLIENLDFKLSPRQKEAMYSARVLLLLHANKTDQAHELVSGLLGMFRDSVFTVLLQAAVHVKEXKVQKAEEVLSQYAEKHPENSTGILLALAQIAANANHFQLAADSLSKIPEIQHMPATVATLVALKERLGDSNAAASVLDSAIQWWKNSMTEDNKLDLFTREAAAFKLSHGRDEEACLLYEELVKSHGSIEALAGLVATAARTNLEKAEQYEKKLKPLPGLKGVNVESLEKTSGARHVEGPQDMKVDTPEEVKKQKARKRKRKPKYPKGFDPANPGSPPDPERWLPRRERSSYRPKRKDKRAQVRGAQGAVTRETAATNAGGSSKGSQTSSSSKTPAANTDQPKPSNKSRKKKSRS

SEQ ID NO: 88425 - protein, 61 aa, Setaria italica
  Transcript Sequence Number=SeqID_22451
RSVAPTPAPAMAPEPSSTEELPNVSSPTAAPAPKSSDAATIGGKAVVGLALGVVAMALVAM

SEQ ID NO: 88426 - protein, 48 aa, Setaria italica
  Transcript Sequence Number=SeqID_22452
RQVLASTPLIIFLSYVYIDDKIYQDNNWICIISKNHGDNPSISSLALT

SEQ ID NO: 88427 - protein, 212 aa, Setaria italica
  misc_feature (113)..(113): Xaa can be any naturally occurring amino acid
  Transcript Sequence Number=SeqID_22453
  Gene Ontology: Mol. function=protein dimerization activity; Cellular component=nucleus; Biological process=regulation of transcription, DNA-dependent
  Homolog annotation: Hit_ID=Q52MZ2; Match level="QueryCoverage=92%, HitCoverage=35%, E-value=4e-36, Identity=41%"; Hit description=TGA10 transcription factor
ELRAYADEAASHYGALMGHKARLAAADPLHLLSGLWKGAAERCFLWIGGFRPSELIKVAVRHAEPLAEQQAAGARDVEQAARRAEEALDAEMEALMRSLSEVVASDAQPPPGXFGGQFYPHHPTADAAGYMGMGHMHMALAMDKLATLGTFLRQADELRMQALQALRQILTARQAARCFVAVDDYFCRLRALSSLWTSSRAAPPQLARGPAG

SEQ ID NO: 88428 - protein, 128 aa, Setaria italica
  Transcript Sequence Number=SeqID_22454
LRCALEEALFLDRVLVMPLRMCLSSAHNTKGILHSSNATSEQRWETGSCAMESLYDLDLISRTVPVILDNPRSWYEIISRSTKLGEAGVVDVQGVSRVELKENPNYSSALLINRTASPLACSGLWSAR

SEQ ID NO: 88429 - protein, 142 aa, Setaria italica
  misc_feature (118)..(118): Xaa can be any naturally occurring amino acid
  misc_feature (120)..(120): Xaa can be any naturally occurring amino acid
  Transcript Sequence Number=SeqID_22455
VICSGVDRPVGEESSMFSSMEDLEAFLESVPHKIEQALCSEDADLGNLAERLVGLSVHALLVKHGKIAVRYSEHKEEEDASGAKIACELSNILLRKPKELVSKYRGSNSASVALEQTXKXSTCYKIREHELQILLRMEIIKS

SEQ ID NO: 88430 - protein, 59 aa, Setaria italica
  Transcript Sequence Number=SeqID_22456
RSKRPRTPPAGEPAYLERLYEAISENPHRVIFMEDVEQADRSCQLGIKEAIESGVVRNH

SEQ ID NO: 88431 - protein, 305 aa, Setaria italica
  Transcript Sequence Number=SeqID_22457
  Gene Ontology: Mol. function=nucleotide binding; Biological process =defense response
  Homolog annotation: Hit_ID=Q6ZD17; Match level="QueryCoverage=81%, HitCoverage=28%, E-value=3e-31, Identity=36%"; Hit description =Putative disease resistance protein RPM1
MEKRFAVTAATGALGPVLVKLAALLGDEYKLQEGTRRGIESIKSELEPVHHLLWKLWGSLDLDVACKNWMTEARELSYDMEDDIDGFTLGLERGDGSFIQREATDSPFMEFMERVKDVSKRCGEMQKIGDGIICNRSKLPTDPRALFLHKDASELVGMEPKKEELIQLLQKHEMVCLLGAGGMGKTTLADLVYHAVGDEFQCRAFVSVHPSPNMTDILGIILSQVTDGAMSAGSGTEPAAEQNMVTDISISLSEKSETLNLQPSKMISSKAYQISSLTRGTLSLFPLYFLIPFLNTTYVLVSVLF

SEQ ID NO: 88432 - protein, 95 aa, Setaria italica
  Transcript Sequence Number=SeqID_22458
  Gene Ontology: Mol. function=aspartic-type endopeptidase activity; Biological process=DNA integration
  Homolog annotation: Hit_ID=B9SDG1; Match level="QueryCoverage=92%, HitCoverage=8%, E-value=3e-17, Identity=47%"; Hit description =Pentatricopeptide repeat-containing protein, putative
  Pfam annotation: Domain name=PPR; Domain location=16-50; Score=41.7; E_value=2.9e-09; Accession=PF01535.12; Description=PPR repeat
  Pfam annotation: Domain name=PPR; Domain location=51-85; Score=37.0; E_value=7.4e-08; Accession=PF01535.12; Description=PPR repeat
  Pfam module annotation: Pfam domain module=PPR::PPR; Domain location =16-50::51-85
EIHEWMMDAGLHADIIVYNTLVNVLCCHGMTRKAKVVLDEMLGRGIAPDTITFNALILGHCKSSHLDNAFAMYAQMLRQGLSPNIATFLTTTFLV

SEQ ID NO: 88433 - protein, 83 aa, Setaria italica
  Transcript Sequence Number=SeqID_22459
  Gene Ontology: Biological process=response to biotic stimulus
  Homolog annotation: Hit_ID=B6SN88; Match level="QueryCoverage=98%, HitCoverage=38%, E-value=2e-16, Identity=56%"; Hit description=AT -rich element binding factor 3
VVRRFDRPQAYKHFIRSCRLVDGDGGAVGSVREVRVVSGLPATSSRERLEILDDERRVLSFRVVGGEHRLANYRSVTTVHEAD

SEQ ID NO: 88434 - protein, 326 aa, Setaria italica
  misc_feature (205)..(205): Xaa can be any naturally occurring amino acid
  Transcript Sequence Number=SeqID_22460
RRAREEGRRHGALRALQRRAREPAARRRGRRRAAPARPHGRPGVRHGGQGRLRPPLPGELRRGPRRRRGGRRHPRPRRDGGGRQLAAEGNRHALPATDLRGQRRLPHHGRPRGRHPSPRCPLPVILRPPQAQNQGGVADRDAAAAAEPEPPREANGGRCGGVTTPSSIGQSHPHLGSCVPASFTSSARRAGAGRPSGRPARACKXKQRVCVRERVYSFLKRDVVRRIEEQSSLPAISTLPTQPPSFLFPFPFPLPVLVASSPPAVARLSKAKGVCRAKLQESFELACARVGWIVLISHLYVCVCRISNESSWFPILWWIRKKKKKK

SEQ ID NO: 88435 - protein, 140 aa, Setaria italica
  Transcript Sequence Number=SeqID_22461
  Gene Ontology: Mol. function=catalytic activity; Cellular component =plasma membrane; Biological process=metabolic process
  Homolog annotation: Hit_ID=B6SVK5; Match level="QueryCoverage=100%, HitCoverage=21%, E-value=3e-68, Identity=91%"; Hit description=ACS -like protein
VPRVLDRIYSGLTAKISSGGILKKTLFNIAYKMKKLDSMRKGIKHEKAAPFFDKLVFSKVKERLGGKLRVIVSGGAPLAVPVEEFLRVVTCAYVIQGYGLTETCAGIVSIPSEYPMLGTVGPPIQHIDVRLESVPEMGYD

SEQ ID NO: 88436 - protein, 182 aa, Setaria italica
  misc_feature (32)..(32): Xaa can be any naturally occurring amino acid
  Transcript Sequence Number=SeqID_22462
  Gene Ontology: Mol. function=catalytic activity; Cellular component =plasma membrane; Biological process=metabolic process
  Homolog annotation: Hit_ID=B6SVK5; Match level="QueryCoverage=96%, HitCoverage=26%, E-value=7e-91, Identity=92%"; Hit description=ACS -like protein
GVMLSNESLLVNVVGPDSVIQYVGEVFDQDDXYLSYLPLAHVFDRMFEEVFIYHGSKIGFWRGDVKLLVDDIAALKPTVFCAVPRVLDRIYSGLTAKISSGGILKKTLFNIAYKMKLDSMRKGIKHEKAAPFFDKLVFSKVKERLGGKLRVIVSGGAPLAVPVEEFLRVVTSIYVNSKANRN

SEQ ID NO: 88437 - protein, 333 aa, Setaria italica
  Transcript Sequence Number=SeqID_22463
  Gene Ontology: Mol. function=electron carrier activity; Cellular component=extracellular region; Biological process=response to oxidative stress
  Homolog annotation: Hit_ID=B4G0X5; Match level="QueryCoverage=92%, HitCoverage=92%, E-value=1e-170, Identity=93%"; Hit description =Peroxidase 16
  Pfam annotation: Domain name=peroxidase; Domain location=48-297; Score=377.9; E_value=1.8e-110; Accession=PF00141.15; Description =Peroxidase
  Subcellular localization annotation: CTP_CleavageSite=33; ConfidenceScore=5.01e-01
MAAAGGLLLRGAAALTVAVLMLGIAGAARAQLRQNYYASSCPSAESTVRSVISQRLQQSFAVGPGTLRLFFHDCFVRGCDASVMLMAPNGDDESHSGADATLSPDAVDAINKAKAAVEALPGCAGKVSCADILAMAARDVVSLLGGPNYAVELGRLDGKSFNRAIVKHVLPGPGFNLDQLNSLFAQNGLTQTDMIALSGAHTIGVTHCDKFIRRIYTFKQHLPWNPPMNLEYLRSLRRVCPINYSPTAIAMLDASTPRVFDNAYFNNLRYNKGLLASDQVLFTDRRSRPTVNLFAANNTAFQEAFVAAMAKLGRIGLKTGSDGEVRRVCTAVN

SEQ ID NO: 88438 - protein, 91 aa, Setaria italica
  misc_feature (78)..(78): Xaa can be any naturally occurring amino acid
  misc_feature (88)..(88): Xaa can be any naturally occurring amino acid
  Transcript Sequence Number=SeqID_22464
  Gene Ontology: Mol. function=acid-amino acid ligase activity; Cellular component=intracellular; Biological process=ubiquitin -dependent protein catabolic process
  Homolog annotation: Hit_ID=B2RFH6; Match level="QueryCoverage=91%, HitCoverage=14%, E-value=6e-23, Identity=71%"; Hit description =Putative hect E3 ubiquitin ligase (Fragment)
STKKSASIKQDGAGSSSTENERSGRERLLREHPELLQQFGMDLLPTMTQVYGSSVNAPIRHKCLSIIGLFQRSSSTEXIQSLLGTTNXSSF

SEQ ID NO: 88439 - protein, 184 aa, Setaria italica
  Transcript Sequence Number=SeqID_22465
  Gene Ontology: Mol. function=ATP-dependent helicase activity
  Homolog annotation: Hit_ID=B9S326; Match level="QueryCoverage=98%, HitCoverage=14%, E-value=6e-84, Identity=77%"; Hit description=ATP -dependent RNA helicase, putative
  Pfam annotation: Domain name=HA2; Domain location=98-183; Score=59.9; E_value=9.4e-15; Accession=PF04408.15; Description=Helicase associated domain (HA2)
KRKDYDPYNNVSTLHASWVSKANARQREGRAGRCQAGICYHLYSRFRASSLPDYQIPEIKRMPIEELCLQVKLLDPNCRIADFLKKTLDPPVPETVRNAITVLQDLGALTQDEQLTELGEKLGSLPVHPSTTKMLLFAILMNCLDPALTLACAADYRDPFLLPMAPDERKRAAAAKVELASLLL

SEQ ID NO: 88440 - protein, 535 aa, Setaria italica
  Transcript Sequence Number=SeqID_22466
  Gene Ontology: Mol. function=protein serine/threonine kinase activity; Cellular component=plasma membrane; Biological process =protein amino acid phosphorylation
  Homolog annotation: Hit_ID=B6U7V0; Match level="QueryCoverage=100%, HitCoverage=100%, E-value=0.0, Identity=74%"; Hit description =Calcium-dependent protein kinase, isoform 1
  Pfam annotation: Domain name=Pkinase; Domain location=76-333; Score =321.8; E_value=1.4e-93; Accession=PF00069.17; Description=Protein kinase domain
  Pfam annotation: Domain name=Pkinase_Tyr; Domain location=76-313; Score=-55.7; E_value=5e-10; Accession=PF07714.9; Description=Protein tyrosine kinase
  Pfam annotation: Domain name=efhand; Domain location=379-407; Score =25.0; E_value=0.00031; Accession=PF00036.24; Description=EF hand
  Pfam annotation: Domain name=efhand; Domain location=415-443; Score =6.8; E_value=3.8; Accession=PF00036.24; Description=EF hand
  Pfam annotation: Domain name=efhand; Domain location=451-479; Score =6.0; E_value=4.7; Accession=PF00036.24; Description=EF hand
  Pfam annotation: Domain name=efhand; Domain location=483-511; Score =20.5; E_value=0.0068; Accession=PF00036.24; Description=EF hand
  Pfam module annotation: Pfam domain module=Pkinase::Pkinase _Tyr::efhand::efhand::efhand::efhand; Domain location=76-333::76 -313::379-407::415-443::451-479::483-511
MGNQCQNGTYGNKYNNYNQFKNERLASRYDDGDDTEDCYPGSSRSSVAVLMQRGLRRTLTSISVLGQKTPNVTEHYTLGRRLGEGKYGTTYLCTEISTGCQYACKSILKKKFVNMQDIEDVRHEIQIMHYLSGQKNIVTIKDAYEDEEAVHIVMELCEGGELYNRITEGNYSEQKAAELMRVIVGIIENCHSLGVMHRDLKPENFLLQDKDDDLSIKVIDFGLSVFFKPGDVFTEVVGSPYYIAPEVLQKHYGPEADIWTAGVILYVLLSGVPPFWADTRRGVYDKVQDGHFDLESEQWHKISDSAKDLIRKMLCPCPSERLKAHEVLKHPWICDNGVATDQTVDPTVSCLHKLSATNKLKKLALQVMTEHLPEQEITSLREMFKAIDTENRGVITFGDLKEGLRRCCSVFKRAGINGLMEAADSDTTTSINWEEFIAATVTLSNIEDKEHLMPSFTYFDKDGSGYITVDKLQKPPMERDMEGLEEIILEVDQNNDGQTNYSEFVAMIQSNSSGLGWQTMESSMNVPLREAPQVY

SEQ ID NO: 88441 - protein, 85 aa, Setaria italica
  Transcript Sequence Number=SeqID_22467
ALAGVGGLVDAQNEHGDVGRDYMGRIFYSPPISVAHPCHMLLLDSLAVMAMERGSGGAGRDRWSCSSASAWPRLGLGRPAGSDGR

SEQ ID NO: 88442 - protein, 187 aa, Setaria italica
  Transcript Sequence Number=SeqID_22468
  Gene Ontology: Mol. function=catalytic activity; Biological process =spermidine biosynthetic process
  Homolog annotation: Hit_ID=B9RQV3; Match level="QueryCoverage=99%, HitCoverage=54%, E-value=1e-78, Identity=74%"; Hit description =Spermidine synthase, putative
  Pfam annotation: Domain name=Spermine_synth; Domain location=1-130; Score=-100.2; E_value=0.027; Accession=PF01564.9; Description =Sperminespermidine synthase
LTVNREAFSSNKLCLIINDARVELEKSREKFDVIVGDLADPVEGGPCYQLYTKSFYEHIVKPKLNDHGIFITQAGPAGVLTHKEVFSSIYNTLKHVFKYVQAYTAHVPSFADTWGWVMASDHPFNLNAQKINERIKDRILGELDYLSGESLISSTTLNKSVHKSLLNETHVYTEDDARFIYGHGRAR

SEQ ID NO: 88443 - protein, 144 aa, Setaria italica
  Transcript Sequence Number=SeqID_22469
  Gene Ontology: Biological process=response to biotic stimulus
  Homolog annotation: Hit_ID=B6U3F5; Match level="QueryCoverage=97%, HitCoverage=55%, E-value=9e-53, Identity=74%"; Hit description =Pathogen-related protein
SVNGGRARSGEETLAVGSYNALLDSPLLASAGAYDAAAETFASSHDLFRAAFPRGFAWEVLGVYSGPPVIAFKFRHWGHMEGPYKGHAATGEKVEFRGVAVLKVDEQLRAEDVEVYYDPGELLGGLLKGPKVASSEEERGEVVL

SEQ ID NO: 88444 - protein, 129 aa, Setaria italica
  Transcript Sequence Number=SeqID_22470
  Gene Ontology: Mol. function=binding
  Homolog annotation: Hit_ID=Q84Z28; Match level="QueryCoverage=100%, HitCoverage=11%, E-value=2e-48, Identity=71%"; Hit description =Abnormal spindle-like protein
MTAKSSSHKKVVEGHHVQGYSESLGNIILKRIFLFVAALDRAKIESALPLEAGIDGLDGGSPLLFYHQGQVKSSRQIIQDSLGEAMHGEGDLLMHLTTMGYKLNYQQTALSEYDFTIRSLFEDLQDGII

SEQ ID NO: 88445 - protein, 137 aa, Setaria italica
  misc_feature (93)..(93): Xaa can be any naturally occurring amino acid
  Transcript Sequence Number=SeqID_22471
  Gene Ontology: Mol. function=DNA binding
  Homolog annotation: Hit_ID=B6T5P4; Match level="QueryCoverage=99%, HitCoverage=42%, E-value=1e-38, Identity=64%"; Hit description =Dnajc2 protein
  Pfam annotation: Domain name=Myb_DNA-binding; Domain location=73-123; Score=24.3; E_value=0.00049; Accession=PF00249.23; Description=Myb -like DNA-binding domain
KHPAGEPQRWEKIAAVFGGRRTPESVIHVAKSGAAAAGGGSFEQFLRKRKPLDPRADGPDAGDNAGGGGESADGAWSAGDDRALLNALKEFPXRDTAMRWEKVAAAVPGKTKAACMKRVTELKRDFRSNKAASEAAS

SEQ ID NO: 88446 - protein, 84 aa, Setaria italica
  Transcript Sequence Number=SeqID_22472
  Subcellular localization annotation: CTP_CleavageSite=46; ConfidenceScore=5.01e-01
IKTLNSDGRKKYSNAAQKVPANQRYSNGVPQLDKRDTVPAKRAIFPAKSKFPEKTSLEKSITVDKVTAVNQSWHKRPASSPSKL

SEQ ID NO: 88447 - protein, 231 aa, Setaria italica
  misc_feature (224)..(224): Xaa can be any naturally occurring amino acid
  Transcript Sequence Number=SeqID_22473
  Gene Ontology: Mol. function=metal ion binding
  Homolog annotation: Hit_ID=Q5VMF2; Match level="QueryCoverage=82%, HitCoverage=19%, E-value=7e-39, Identity=44%"; Hit description=PHD zinc finger protein-like
  Subcellular localization annotation: CTP_CleavageSite=23; ConfidenceScore=5.60e-01
LSGTTTASNASSSPSPNATTSISSSKRNTTNKIPTNLRELLATGLLEGQPVKYIMRKGKRAVLRGVIKRAGILCACSSCKGRKVVSPYYFEVHAGSTKKHPSDYIFLENGNNLHDVLRACTNATLDMVESAIQKAIGPAPHKRTFRCQTCKSSFSTLRSGKFALFCDSCLESKGAKNSTRSSKVARGRTSSAKGYKSASPGAKSASVGRLTRKDKGLHKVVFMXSGVLPEG

SEQ ID NO: 88448 - protein, 148 aa, Setaria italica
  misc_feature (47)..(47): Xaa can be any naturally occurring amino acid
  Transcript Sequence Number=SeqID_22474
SEDDSKMKRQISDLKSKELSGHDIFAPPEDPRPRNSENGSTSQTPGXNAYVLISQLISFLIEPHTHKKSCVAYCLLSFTQQVSNFKFGEADEDSVVKTAKKIPTKKFSDLTGNGIFKGDEAPGMAEKHLSASKLKEMTGSDIFADGKA

SEQ ID NO: 88449 - protein, 288 aa, Setaria italica
  Transcript Sequence Number=SeqID_22475
MERPAPVRKSHTSTADLLIWPEGAPQEPLAGATPPSNRRPHQPSEAVRKVVFGGQVTEEEAESLNKRKPCSAPKWKEMTGSGIFAAGGEVEEDESANASATPIRTAPKNYQAISTISHISFAEEESVSPKKPTSIAEVAKQRELSGTLLSEDDSKMKRQISDLKSKELSGHDIFAPPEDPRPRNSENGSTSQTPGKNAYVSNFKFGEADEDSVVKTAKKIPTKKFSDLTGNGIFKGDEAPGMAEKHLSASKLKEMTGSDIFADGKAPSRDYLGGIRKPPGGESSIALV

SEQ ID NO: 88450 - protein, 120 aa, Setaria italica
  Transcript Sequence Number=SeqID_22476
  Gene Ontology: Mol. function=transporter activity; Cellular component= integral to membrane; Biological process=transport
  Homolog annotation: Hit_ID=Q25AI7; Match level="QueryCoverage=90%, HitCoverage=22%, E-value=3e-22, Identity=49%"; Hit description =H0702G05.6 protein
ASLSLPWQQILLAWAVMPGLGWRWLLALSSAPCFVLLIFFPLTPESPRYLCSRGRTMDATVILERIARMNRGTLPPGILIYTPEKHVDNNLGTSETALLIAEDNAGTEDDTSSKTKVIVA

SEQ ID NO: 88451 - protein, 215 aa, Setaria italica
  Transcript Sequence Number=SeqID_22477
  Gene Ontology: Mol. function=nucleoside-triphosphatase activity; Cellular component=membrane; Biological process=transport
  Homolog annotation: Hit_ID=B9N0R0; Match level="QueryCoverage=96%, HitCoverage=31%, E-value=1e-59, Identity=61%"; Hit description=White- brown-complex ABC transporter family (Fragment)
  Pfam annotation: Domain name=ABC_tran; Domain location=21-214; Score =128.0; E_value=2.9e-35; Accession=PF00005.19; Description=ABC transporter
TGSSAREKTIISGMSGVVRPGEMLAMLGPSGSGKTTLLTALGGRHGGRALLSGKITYNGLPFSGAVKRRTGFVTQHDVLYPHLTVAETLWYTALLRLPRALSAGEKRSQAEAVARELGLAKVAHSMVGGVRGVRGLSGGERKRVSIGLEMLIDPSLLLLDEPTSGLDSTTAARIVGTLRRMAAGGGRTVVVTIHQPSSRLYHMFDKVLLLSADGC

SEQ ID NO: 88452 - protein, 88 aa, Setaria italica
  Transcript Sequence Number=SeqID_22478
  Gene Ontology: Mol. function=sequence-specific DNA binding; Cellular component=nucleus; Biological process=regulation of transcription, DNA-dependent
  Homolog annotation: Hit_ID=Q84KZ4; Match level="QueryCoverage=100%, HitCoverage=36%, E-value=9e-39, Identity=88%"; Hit description=MADS -box transcription factor MADS2
  Pfam annotation: Domain name=K-box; Domain location=1-57; Score=-0.4; E_value=0.00054; Accession=PF01486.9; Description=K-box region
SGLNVKELQSLENQLETSLRGVRSKKDHLLIDEIHELNRKASLFHQENMDLYNKINQIRQESAELYKKIYQTEGPSEVNRESPTPYNF

SEQ ID NO: 88453 - protein, 115 aa, Setaria italica
  Transcript Sequence Number=SeqID_22479
  Gene Ontology: Mol. function=sequence-specific DNA binding; Cellular component=nucleus; Biological process=regulation of transcription, DNA-dependent
  Homolog annotation: Hit_ID=Q84KZ4; Match level="QueryCoverage=100%, HitCoverage=47%, E-value=1e-53, Identity=89%"; Hit description=MADS -box transcription factor MADS2
  Pfam annotation: Domain name=K-box; Domain location=1-96; Score =114.6; E_value=3.4e-31; Accession=PF01486.9; Description=K-box region
QVAANPNSELKFWQREAASLRQQLHNLQENHRQLTGEDLSGLNVKELQSLENQLETSLRGVRSKKDHLLIDEIHELNRKASLFHQENMDLYNKINQIRQESAELYKKIYQTEGPS

SEQ ID NO: 88454 - protein, 83 aa, Setaria italica
  Transcript Sequence Number=SeqID_22480
  Gene Ontology: Mol. function=hydrolase activity; Biological process =lipid catabolic process
  Homolog annotation: Hit_ID=Q653V2; Match level="QueryCoverage=100%, HitCoverage=18%, E-value=5e-31, Identity=80%"; Hit description =Patatin-like phospholipase domain containing protein-like
RKVLSGRGGRGGLLFRRPEAVFRKVFGDLTVRDAAKPLLIPCYDMATAAPFVFSRADAVEAEAFDFPLWQVCAAACGVGPAEV

SEQ ID NO: 88455 - protein, 146 aa, Setaria italica
  Transcript Sequence Number=SeqID_22481
YLLLHRIGYGLDRAVQAGWLGATATSAATSLAFQTVWWLLCLLPTWQPPPTKDGAVNSPCSVRHCSRPIDRLTQRRAIPTCPCPRSSFASPHRHCCFYYTFSCCDPVILTIIHSTSAVPGFTISYRGRNPDQLLRDAITNYHLYAG

SEQ ID NO: 88456 - protein, 368 aa, Setaria italica
  Transcript Sequence Number=SeqID_22482
  Gene Ontology: Mol. function=racemase and epimerase activity, acting on carbohydrates and derivatives; Biological process=carbohydrate metabolic process
  Homolog annotation: Hit_ID=Q6B6L8; Match level="QueryCoverage=97%, HitCoverage=93%, E-value=0.0, Identity=88%"; Hit description=UDP-D -glucuronate decarboxylase
  Pfam annotation: Domain name=3Beta_HSD; Domain location=49-308; Score= -81.5; E_value=5.5e-05; Accession=PF01073.11; Description=3-beta hydroxysteroid dehydrogenaseisomerase family
  Pfam annotation: Domain name=Epimerase; Domain location=48-281; Score= 193.4; E_value=6.2e-55; Accession=PF01370.13; Description=NAD dependent epimerasedehydratase family
  Pfam annotation: Domain name=NAD_binding_4; Domain location=50-263; Score=-32.3; E_value=4.3e-07; Accession=PF07993.4; Description=Male sterility protein
  Pfam annotation: Domain name=Polysacc_synt_2; Domain location=48-327; Score=-145.8; E_value=0.00013; Accession=PF02719.7; Description =Polysaccharide biosynthesis protein
  Pfam annotation: Domain name=RmlD_sub_bind; Domain location=46-350; Score=-127.5; E_value=3.5e-05; Accession=PF04321.9; Description=RmlD substrate binding domain
  Pfam module annotation: Pfam domain module=3Beta_HSD::Epimerase::NAD _binding_4::Polysacc_synt_2::RmlD_sub_bind; Domain location=49 -308::48-281::50-263::48-327::46-350
  Subcellular localization annotation: CTP_CleavageSite=29; ConfidenceScore=5.11e-01
TSSSVAHLAAVGLASRQYSSRVALFEEPRGGVRPGRVPLGLKRKGLRVVVTGGAGFVGSHLVDRLLARGDSVIVVDNLFTGRKENVLHHAGNPRFEMIRHDVVEPILLEVDQIYHLACPASPVHYKHNPVKTIKTNVVGTLNMLGLAKRVGARFLLTSTSEVYGDPLQHPQVETYWGNVNPIGVRSCYDEGKRTAETLTMDYHRGANLEVRIARIFNTYGPRMCIDDGRVVSNFVAQALRKEPLTVYGDGKQTRSFQYVSDLVEGLMKLMEGEHVGPFNLGNPGEFTMLELAKVVQDTIDPNARIEFRPNTADDPHKRKPDITRAKDLLGWEPKIPLTKGLPLMVQDFRNRIFGDQQQKDANANAGDN

SEQ ID NO: 88457 - protein, 187 aa, Setaria italica
  misc_feature (173)..(173): Xaa can be any naturally occurring amino acid
  Transcript Sequence Number=SeqID_22483
  Gene Ontology: Mol. function=protein serine/threonine kinase activity; Cellular component=integral to membrane; Biological process=protein amino acid phosphorylation
  Homolog annotation: Hit_ID=B9RC79; Match level="QueryCoverage=99%, HitCoverage=17%, E-value=2e-67, Identity=64%"; Hit description =Leucine-rich repeat receptor protein kinase EXS, putative
  Pfam annotation: Domain name=Pkinase; Domain location=1-185; Score =6.7; E_value=6.9e-09; Accession=PF00069.17; Description=Protein kinase domain
  Pfam annotation: Domain name=Pkinase_Tyr; Domain location=1-184; Score=-64.4; E_value=1.9e-09; Accession=PF07714.9; Description =Protein tyrosine kinase
  Pfam module annotation: Pfam domain module=Pkinase::Pkinase_Tyr; Domain location=1-185::1-184
DHENLVPLRGFCIRGALRLLLYPYMANGSLHDWLHDRPGGGEQLRWCDRLRIARGASRGVLHIHEHCTPRIVHRDIKSSNILLDADHEARVADFGLARLILPGATHVTTELVGTPGYIPPEYGQEWVATRRGDVYSFGVVLLELLTGRRPVELLPARRQRWELVGWVAQMRAXGRREEVLDHRLEGE

SEQ ID NO: 88458 - protein, 76 aa, Setaria italica
  Transcript Sequence Number=SeqID_22484
YSSKTTSRIYIRDPVSPHDASTTMQAIPPSGIIRPHGTYHISWWLKARMVATNARRDDGTHNSKTHHVYIHLIRHL

SEQ ID NO: 88459 - protein, 37 aa, Setaria italica
  Transcript Sequence Number=SeqID_22485
TTAIMDTKQLHILVSAIINCYYDQYRRNLDNLLSMRI

SEQ ID NO: 88460 - protein, 158 aa, Setaria italica
  Transcript Sequence Number=SeqID_22486
  Gene Ontology: Mol. function=aspartyl esterase activity; Cellular component=cell wall; Biological process=cell wall modification
  Pfam annotation: Domain name=Pectinesterase; Domain location=47-158; Score=-181.2; E_value=7.5e-08; Accession=PF01095.11; Description =Pectinesterase
MARVVLLLVLLATLAGILPPSACQAATKCEYPRPSGHGYKHPVGVRKVVVDAGGAGDFTSIQQAVDSVPVNNNVRVIMQINAGTYIEKVLVPASKPYITFHGAGRDVTVVQWHDRASDPGPDGQPLRTYNTASVTILSNYFTAKNISFKVSTRLPSGP

SEQ ID NO: 88461 - protein, 62 aa, Setaria italica
  Transcript Sequence Number=SeqID_22487
CTPCWGCCRAPPWPKNPCVTSQLASLVCINIKFMIKSSILVTSSRAIPYIISCIRYHIYDII

SEQ ID NO: 88462 - protein, 64 aa, Setaria italica
  Transcript Sequence Number=SeqID_22488
  Subcellular localization annotation: CTP_CleavageSite=23; ConfidenceScore=5.17e-01
TDGKGRFRMAVNTTVAPSSVASYCDLVVDTPLASCNPALPATGMLQSDLRLLVSMVFFRGLLLR

SEQ ID NO: 88463 - protein, 90 aa, Setaria italica
  Transcript Sequence Number=SeqID_22489
  Homolog annotation: Hit_ID=B6TEG9; Match level="QueryCoverage=90%, HitCoverage=14%, E-value=4e-20, Identity=56%"; Hit description =Lipopolysaccharide-modifying protein
  Pfam annotation: Domain name=DUF821; Domain location=1-84; Score= -300.0; E_value=6e-05; Accession=PF05686.4; Description=Arabidopsis thaliana protein of unknown function (DUF821)
SVALVEYASLLRYKPTVPEKAVELCPEAIACPAQGREREFMMESRERYVAGYEPCTLPPPFTAQELSDMARRDQEVRAKVHKIMEQSQHH

SEQ ID NO: 88464 - protein, 181 aa, Setaria italica
  Transcript Sequence Number=SeqID_22490
  Gene Ontology: Mol. function=protein serine/threonine kinase activity; Cellular component=integral to membrane; Biological process=protein amino acid phosphorylation
  Homolog annotation: Hit_ID=B9S566; Match level="QueryCoverage=83%, HitCoverage=13%, E-value=2e-27, Identity=45%"; Hit description =Receptor protein kinase CLAVATA1, putative
  Pfam annotation: Domain name=LRR_1; Domain location=39-60; Score =12.5; E_value=1.2; Accession=PF00560.25; Description=Leucine Rich Repeat
  Pfam annotation: Domain name=LRR_1; Domain location=62-83; Score =12.1; E_value=1.5; Accession=PF00560.25; Description=Leucine Rich Repeat
  Pfam module annotation: Pfam domain module=LRR_1::LRR_1; Domain location=39-60::62-83
SPEASPTELCDIDGLDIALNLSRNGLTGLIPEKISVLSKLSVLDLSHNALDGSLAPLAGLDNLVTLNVSNNNFSGYLPDTKLFRQLSASCLTGNAGLCTRGGDVCFVSIDANGHPVMNTAEEAQRVHRLKLAIALLVTATVAMVLGMIGILRARRMGFGGKSGGGGGGGGDSESGGDLSWP

SEQ ID NO: 88465 - protein, 62 aa, Setaria italica
  Transcript Sequence Number=SeqID_22491
ASFGATSYIVIDVDLGCDQEASTGDKAVAPPWTELMLPLLCLLIGSHYQFFHFSRFCSQLSA

SEQ ID NO: 88466 - protein, 421 aa, Setaria italica
  misc_feature (24)..(24): Xaa can be any naturally occurring amino acid
  Transcript Sequence Number=SeqID_22492
  Gene Ontology: Mol. function=DNA binding
  Homolog annotation: Hit_ID=B2BXP4; Match level="QueryCoverage=44%, HitCoverage=24%, E-value=5e-22, Identity=34%"; Hit description=TF2
  Pfam annotation: Domain name=Myb_DNA-binding; Domain location=270 -315; Score=38.1; E_value=3.4e-08; Accession=PF00249.23; Description =Myb-like DNA-binding domain
MPDASGVVTPTVTNSEMDNVSDSXNDKLIDENLSNLSQQTVQKNSNDQEHNEGEPLDPPVEQQPKSGVGEIGSSMKLRSRKKSQKVGTHKDTDDYFDEDFVEPSLAEEDNDSGDDYTAGTTRKVRKKPRDSVEESLQQKVQKDKSQVSSRGRKRTLKDASAEKPEKKLTHRIRQSRAKEVKTLLEKPREEIDPMKLSAAHLRLLQEARERVNGKENPPEPSSNSSSFQFDDMDDLDYRDEERNFDNDRTQNPAQNVTKLNYHSYMNKQTRGKWSKSDTDMFYKGLRQFGSDFAMIQQLLPDKTRHQVRAKFKTEEKKIPLLVHDAIIHRSGDNLYFKTVIKNLNIEDVAQQEINNTRKQDGASSERGPGKENVLDDFIHGEEDDSNWLDEEHSVQKPDVQEEEHASGNDDDGDLGDVFDWY

SEQ ID NO: 88467 - protein, 59 aa, Setaria italica
  Transcript Sequence Number=SeqID_22493
  Gene Ontology: Mol. function=phosphoric diester hydrolase activity; Cellular component=nucleus
LVTLCWKGDEEKEPSTKTVRLPVPYQLPPQPYGTEDVPWSWDRRYTKKDVYGSVWPRHG

SEQ ID NO: 88468 - protein, 149 aa, Setaria italica
  Transcript Sequence Number=SeqID_22494
  Gene Ontology: Cellular component=extracellular region; Biological process=sexual reproduction
  Homolog annotation: Hit_ID=Q7XCA7; Match level="QueryCoverage=99%, HitCoverage=53%, E-value=1e-59, Identity=72%"; Hit description =Expansin-B6
  Pfam annotation: Domain name=Pollen_allerg_1; Domain location=46-133; Score=123.1; E_value=9.1e-34; Accession=PF01357.13; Description =Pollen allergen
SKYHFDLSGTAFGAMAKTGLNDKLRHAGILEIQFRRVPCNYKGLNVNFRVQVGSNPNYFAVLVQYAGKDGAVVQVDLMETDSTTGKPTGVWTPMRVSWGAVWRLDTDRPTQAPFSLRIRSDSGKTLVASNVIPADWKPMTDYPSNVQFP

SEQ ID NO: 88469 - protein, 127 aa, Setaria italica
  misc_feature (17)..(17): Xaa can be any naturally occurring amino acid
  Transcript Sequence Number=SeqID_22495
  Gene Ontology: Mol. function=nucleic acid binding; Cellular component= nucleus; Biological process=positive regulation of transcription from RNA polymerase II promoter
  Homolog annotation: Hit_ID=B4FG48; Match level="QueryCoverage=100%, HitCoverage=45%, E-value=1e-60, Identity=92%"; Hit description=CCR4 -NOT transcription complex subunit 7
  Pfam annotation: Domain name=CAF1; Domain location=1-96; Score=-69.8; E_value=1.3e-05; Accession=PF04857.12; Description=CAF1 family ribonuclease
VVMNSDVRWVTFHSGYXDFGYLLKLLRTNLPDTMSGFFDLIKIYFPVIYDIKHLMRFCNSLHGGLNKLAELLDVARVGICHQAGSDSLLTALSFKKLKEAYFNGLTEKYAGVLYGLGFEGGETTSAH

SEQ ID NO: 88470 - protein, 271 aa, Setaria italica
  Transcript Sequence Number=SeqID_22496
  Gene Ontology: Mol. function=nucleic acid binding; Cellular component= nucleus; Biological process=neuron development
  Homolog annotation: Hit_ID=B4FG48; Match level="QueryCoverage=99%, HitCoverage=96%, E-value=1e-132, Identity=87%"; Hit description=CCR4- NOT transcription complex subunit 7
  Pfam annotation: Domain name=CAF1; Domain location=15-248; Score =400.5; E_value=2.9e-117; Accession=PF04857.12; Description=CAF1 family ribonuclease
MATPAAEKPDDVEIREVWADNLEAEFAVIRDIVDDYPYVAMDTEFPGVVCRPLGTYKSAAEFNYATLKANVDMLKLIQLGLTFSDEHGGLPALGPGGRPCVWQFNFRGFDPRTDVAAADSIDLLRRSGIDFARHGADGADARRFAELLMSSGVVMNSDVRWVTFHSGYDFGYLLKLLTGTNLPDTMSGFFDLIKIYFPVIYDIKHLMRFCNSLHGGLNKLAELLDVARVGICHQAGSDSLLTALSFKKLKEAYFNGLTEKYAGVLYGLGVL

SEQ ID NO: 88471 - protein, 51 aa, Setaria italica
  Transcript Sequence Number=SeqID_22497
  Subcellular localization annotation: CTP_CleavageSite=36; ConfidenceScore=5.15e-01
APTQRWETFDLLSSAPSTSSAAVTTTMAAATTTSPAAATASPIPRFDWELF

SEQ ID NO: 88472 - protein, 70 aa, Setaria italica
  Transcript Sequence Number=SeqID_22498
QPNTDDYATTIELMLFSLRRMRLFSLTHYRIGALAKFDRKLIFLIASRLRSIRNLAVDLSNCPDSKTNTW

SEQ ID NO: 88473 - protein, 87 aa, Setaria italica
  Transcript Sequence Number=SeqID_22499
LQNQIRTLVVNYKQLNLFTLRQAHTGLTDSLLSSWHATQSHIHISLYFFRCTDAANSNFQVHIAYCSKELRTDINLRKNKLQHSKLK

SEQ ID NO: 88474 - protein, 97 aa, Setaria italica
  Transcript Sequence Number=SeqID_22500
PPPSPPPHHPVPLLLIPFPFLLGIDLAISCSSAGLESYDGGLASLREKVLDLCGSPRRSRLTVAREQLRSCLVHRRGEFSAFRSMEKTTILSFELQK

SEQ ID NO: 88475 - protein, 126 aa, Setaria italica
  Transcript Sequence Number=SeqID_22501
  Homolog annotation: Hit_ID=Q2R178; Match level="QueryCoverage=96%, HitCoverage=8%, E-value=1e-14, Identity=44%"; Hit description=Lipin, N-terminal conserved region family protein, expressed
PRSSKSHGSNDESSKSKLAEASSSNQMETSKTLLPEHSLDHGKETDSNCNSCSPRGGTNSSADETDQCLQTTSVKEEVVEIHTRETSDFTDRIISTVHQPGSESLSNDLGTDKSIHESVDTQDKLP

SEQ ID NO: 88476 - protein, 279 aa, Setaria italica
  Transcript Sequence Number=SeqID_22502
MGAPLEYDPDTSELAPDITEYTIKLKQSHERARKLRADLAVEEQREQELSRMLKGIVTAPNFTETHKKRPRRKSSIERLKVSRHLAEEALNYFEECVSISTMDSTDFSSPEDHQPNSVLNVQPKSNSRFFHKGRSSSQEPHTPADQHGHHEEFDKQTQCSISITGSDVSDGVNFSNTKCHMKFRNNSSEDLDGLDTPRSRSSCFSFTHESVKNVENCDVPQYLGNFGMGNNKELRETRSSYFADDYVSQKVNPDLLKDMATFQNRMQYGGFLICNIRTF

SEQ ID NO: 88477 - protein, 108 aa, Setaria italica
  misc_feature (13)..(13): Xaa can be any naturally occurring amino acid
  misc_feature (68)..(68): Xaa can be any naturally occurring amino acid
  misc_feature (93)..(93): Xaa can be any naturally occurring amino acid
  misc_feature (95)..(95): Xaa can be any naturally occurring amino acid
  Transcript Sequence Number=SeqID_22503
  Gene Ontology: Mol. function=aspartic-type endopeptidase activity; Cellular component=chromatin; Biological process=RNA-dependent DNA replication
  Homolog annotation: Hit_ID=Q9LQH2; Match level="QueryCoverage=100%, HitCoverage=5%, E-value=2e-43, Identity=75%"; Hit description =F15O4.13
KIVRLHRMPWTIXSDRDTKFVSYFWKTLWAKLGTKLLFSTTCHPQIDGQTEVVNRTLSMLLRAVIKKXNLKEWEECLPHVEFAYNRAIHSTTXMXPFKIVYSFKTNTP

SEQ ID NO: 88478 - protein, 149 aa, Setaria italica
  Transcript Sequence Number=SeqID_22504
  Gene Ontology: Mol. function=serine-type endopeptidase activity; Biological process=negative regulation of catalytic activity
  Homolog annotation: Hit_ID=Q9LDM8; Match level="QueryCoverage=65%, HitCoverage=12%, E-value=1e-22, Identity=55%"; Hit description =Putative pre-pro-subtilisin
  Pfam annotation: Domain name=Inhibitor_I9; Domain location=45-126; Score=81.1; E_value=4e-21; Accession=PF05922.8; Description =Peptidase inhibitor I9
ATHATHDSSDLIDRSLAGSEDGHLVAALLPHRLVVGRRRRRRGNQVYIVYMGAVPQRASPNLLQESHLRLVSTVLKRGRRAGSVVVRQYKHGFSGFAARLSEVEAAALRRKPGVVSVFADPVYHLHTTRSWDFLQQAAVKIDAAARRRG

SEQ ID NO: 88479 - protein, 134 aa, Setaria italica
  Transcript Sequence Number=SeqID_22505
  Gene Ontology: Mol. function=translation initiation factor activity; Cellular component=eukaryotic translation initiation factor 3 complex; Biological process=translational initiation
  Homolog annotation: Hit_ID=Q6YNS0; Match level="QueryCoverage=97%, HitCoverage=14%, E-value=4e-29, Identity=50%"; Hit description =Putative translation-initiation factor 3 subunit
  Pfam annotation: Domain name=PCI; Domain location=30-134; Score=12.1; E_value=0.0069; Accession=PF01399.19; Description=PCI domain
EDKLNFISAMLIEVPSMAASTYGNRKPVNKTFRALLEFSERLTFVSPPENVRGHVMAAARILKMGDYQKAFDVISSLEIWKLWRSREHVLDMLKLKIKEAALKTYLISYSSCYGSLSLGQLSVMYDLTESHTHN

SEQ ID NO: 88480 - protein, 78 aa, Setaria italica
  Transcript Sequence Number=SeqID_22506
  Gene Ontology: Mol. function=sequence-specific DNA binding; Cellular component=nucleus; Biological process=regulation of transcription, DNA-dependent
  Homolog annotation: Hit_ID=B2KJ76; Match level="QueryCoverage=84%, HitCoverage=26%, E-value=1e-10, Identity=50%"; Hit description=WRKY transcription factor 34 (Fragment)
  Subcellular localization annotation: CTP_CleavageSite=47; ConfidenceScore=5.22e-01
TNKSPSIHSYRGNQQPERNPYASQFQWTDTSSPTSSGPFMIEIDNVSGASASSSSAGALPRTLLPIGQSRCIEYFHFL

SEQ ID NO: 88481 - protein, 130 aa, Setaria italica
  Transcript Sequence Number=SeqID_22507
  Pfam annotation: Domain name=GRP; Domain location=35-127; Score= -30.0; E_value=0.1; Accession=PF07172.3; Description=Glycine rich protein family
FLEAFELEPATQVHNTRGDGIEQAMGRSCEQWRERELVLALALLVLAFALVQCAGVVDGEEGEGGRPAEAEPATEQTGPPLPPGWTGDSGSAHGSTPGGGSWEYGWGWAAGPDGKGGGFGFGYGGSGGEG

SEQ ID NO: 88482 - protein, 181 aa, Setaria italica
  Transcript Sequence Number=SeqID_22508
  Gene Ontology: Mol. function=protein dimerization activity; Cellular component=nucleus; Biological process=regulation of transcription, DNA-dependent
  Homolog annotation: Hit_ID=B9SGM7; Match level="QueryCoverage=61%, HitCoverage=34%, E-value=6e-44, Identity=83%"; Hit description =Transcription factor RF2a, putative
  Pfam annotation: Domain name=bZIP_1; Domain location=54-117; Score =32.2; E_value=2.1e-06; Accession=PF00170.13; Description=bZIP transcription factor
  Pfam annotation: Domain name=bZIP_2; Domain location=54-108; Score =36.3; E_value=1.2e-07; Accession=PF07716.7; Description=Basic region leucine zipper
  Pfam module annotation: Pfam domain module=bZIP_1::bZIP_2; Domain location=54-117::54-108
GSDNGGSSDSDGEKRGGGAPAGGGSNGCDDERNEASDAQALATGQAAAASTELIRDPKRVKRILANRQSAQRSRVRKLQYISELERSVTTLQNEVSVLSPRVAFLDQQRTILTVGNSHLKQRIAALAQDKIFKDAHQEALRKEIERLRQVYEQQSLKMSAGSAASEHGPPPPVRAEKELMS

SEQ ID NO: 88483 - protein, 129 aa, Setaria italica
  Transcript Sequence Number=SeqID_22509
  Gene Ontology: Mol. function=ATPase activity, coupled to transmembrane movement of substances; Cellular component=integral to membrane; Biological process=transport
  Homolog annotation: Hit_ID=Q6YUU5; Match level="QueryCoverage=86%, HitCoverage=8%, E-value=9e-46, Identity=78%"; Hit description =Putative multidrug resistance protein
MAGKDDDGPPGMAKVKAEPVQCPFVSVFMHADAADVALMVLGLVGAMGDGMSTPVMLLIASRIFNVTGSGPDRLQQFTSKMNENARNLLFLAVANWIMAFLEGYCWARTAERQASRIRLRYLRAVLRQD

SEQ ID NO: 88484 - protein, 144 aa, Setaria italica
  Transcript Sequence Number=SeqID_22510
  Gene Ontology: Mol. function=intramolecular transferase activity, phosphotransferases; Cellular component=chloroplast; Biological process=carbohydrate metabolic process
  Homolog annotation: Hit_ID=Q43156; Match level="QueryCoverage=100%, HitCoverage=24%, E-value=4e-52, Identity=63%"; Hit description =Phosphoglucomutase
GALKENYFLDDGAYMVVKIVIEMVRMKLSGLEGGVGSLIMDLEEPAESVLLRMNILGEPKYAKQRGTMAVEAFKKYIEEDKLSGWVLDDCGDCSVAEGCLVDTNDHPIDVDAYMYRAKLYDENKKPVGMVHVRQSVHNPNIALN

SEQ ID NO: 88485 - protein, 58 aa, Setaria italica
  Transcript Sequence Number=SeqID_22511
MASRRESPLMRGGGGGGGGQPLSRGSRIAAAVVVGVALGCLCAFFYPDGFFSRAPDSA

SEQ ID NO: 88486 - protein, 94 aa, Setaria italica
  Transcript Sequence Number=SeqID_22512
  Gene Ontology: Mol. function=inositol or phosphatidylinositol phosphatase activity; Biological process=abscisic acid mediated signaling
  Homolog annotation: Hit_ID=Q6L5I9; Match level="QueryCoverage=100%, HitCoverage=16%, E-value=6e-40, Identity=81%"; Hit description ='putative inositol-1,4,5-trisphosphate phosphatase'
SYERTHELISKQDWDGLLEKDQLKKELGKGSTFDGWVEGVISFPPTYKYEFNSEKYVSDATKSGRRTPAWCDRILSYGKGIRLLSYKRAELTFS

SEQ ID NO: 88487 - protein, 80 aa, Setaria italica
  Transcript Sequence Number=SeqID_22513
  Subcellular localization annotation: CTP_CleavageSite=45; ConfidenceScore=5.10e-01
PTHSHSSRPNLPPPTPTDLAAATAPAMAARLLILLAVAGALAFPAAAEIKTESFREDPRSSIMFEKFGFSKSGAVRIIVT

SEQ ID NO: 88488 - protein, 76 aa, Setaria italica
  Transcript Sequence Number=SeqID_22514
RPSTRSSRRRAPPTEATGSCGDVHMIRHPLVKHAAYAYLQLTPAAREEKARLRRRRGPLCRLLEGCLGFVGALFGR

SEQ ID NO: 88489 - protein, 119 aa, Setaria italica
  Transcript Sequence Number=SeqID_22515
  Gene Ontology: Mol. function=metal ion binding
  Homolog annotation: Hit_ID=B9RY52; Match level="QueryCoverage=87%, HitCoverage=15%, E-value=6e-24, Identity=50%"; Hit description=DNA binding protein, putative
AQFSFLVNCIKVSSKYELTCKKTYCRKVSLMDVSKKYGTDYRILHAVTTGHSWYGQWGFKLSKGSFGITSKEYFEAIDSLSSTPLLHFFPHSRSPRNQLQDTISFYQSLSKHPLTTIRE

SEQ ID NO: 88490 - protein, 94 aa, Setaria italica
  Transcript Sequence Number=SeqID_22516
  Gene Ontology: Mol. function=metal ion binding
  Homolog annotation: Hit_ID=B9RY52; Match level="QueryCoverage=82%, HitCoverage=11%, E-value=1e-23, Identity=61%"; Hit description=DNA binding protein, putative
FAIVSFKQLKVPASTDHLSLIRCQSCNHGMSYDDPEDWDYRQLDNPRHLLHGIVHDNGFGHLVRINGREGGSGLLTGTQLMDFWDRLCRYLRVR

SEQ ID NO: 88491 - protein, 69 aa, Setaria italica
  Transcript Sequence Number=SeqID_22517
RLRVAMTKLPIDGLVGRDSDSRSRTQHHYKTVSSHREQVKTAEPRLVLPEIPDQGSCSQRMGGGGGSTS

SEQ ID NO: 88492 - protein, 149 aa, Setaria italica
  Transcript Sequence Number=SeqID_22518
  Gene Ontology: Mol. function=hydrolase activity; Biological process =metabolic process
  Homolog annotation: Hit_ID=B6TLN8; Match level="QueryCoverage=81%, HitCoverage=33%, E-value=6e-48, Identity=77%"; Hit description =Gibberellin receptor GID1L2
MPDLSRRVFFLALFVAPLLRLPIRSCLLKPHTTMDSDSELEFEMPGVLRMYKTGRVERFEGTETVPPSPDGDTANGVASKDVVLDPAAGISARLYLPAGVEPGKRLPVIVFFHGGAFMVHTAASPLYHIYAASLAAAVPALVVSADYRT

SEQ ID NO: 88493 - protein, 221 aa, Setaria italica
  misc_feature (12)..(12): Xaa can be any naturally occurring amino acid
  Transcript Sequence Number=SeqID_22519
KVDEIRMRGHSXTIQRAGRVVWLGNLVFFNIKSVGRKAVFSILWILCATKVAQRFVFTEVGKRSYAHGKNASVLTSYMAQMLEREEHQAERHQAVQDGDELLKRCKYIVMGENKLVKKATADGYEFFFPTNDDGVITVGKVWELPETGSQHKEIQRLKRICLSFALFKLLRRRFEHQPAMSDEEARDCRKFLLNGLYGQRRKEDAHVLFQVMNDEVNFLSE

SEQ ID NO: 88494 - protein, 345 aa, Setaria italica
  Transcript Sequence Number=SeqID_22520
  Gene Ontology: Mol. function=indole-3-glycerol-phosphate synthase activity; Cellular component=chloroplast; Biological process =aromatic amino acid family biosynthetic process
  Homolog annotation: Hit_ID=Q01IS1; Match level="QueryCoverage=91%, HitCoverage=83%, E-value=1e-168, Identity=92%"; Hit description =OSIGBa0115M15.12 protein
  Pfam annotation: Domain name=IGPS; Domain location=69-334; Score =335.2; E_value=1.3e-97; Accession=PF00218.13; Description=Indole-3 -glycerol phosphate synthase
TTSSHAVAAFATDRGDSGSPVEDAAAAGASIEGVDGIRIRRRPVTGPAVHYVGPFQFRLENEGNTPRNILEKIVWDKDVEVSQMKERRPLYMLKGPLEAAPPARDFVGALKASYDRTGLPALIAEVKKASPSRGVLREDFDPVQVAQAYEKNGAACLSVLTDKKYFQGSFDNLAAIRNAGVQCPLLCKEFIVDAWQLYYARSKGADAVLLIAAVLPDLDIKYMLKICKILGMAALVEVHDEREMDRVLGIDGVQLIGINNRNLETFEVDISNTKKLLEGERGKMIAQKDIIVVGESGLFTPDHISFVQNAGGKAVLVGESLIKQEDPGKAIAGLFGKDISNAGAA

SEQ ID NO: 88495 - protein, 78 aa, Setaria italica
  misc_feature (37)..(37): Xaa can be any naturally occurring amino acid
  Transcript Sequence Number=SeqID_22521
  Gene Ontology: Mol. function=nucleotide binding; Cellular component =cytoplasm; Biological process=small GTPase mediated signal transduction
  Homolog annotation: Hit_ID=Q00ZZ1; Match level="QueryCoverage=98%, HitCoverage=11%, E-value=7e-23, Identity=63%"; Hit description=GTP -binding membrane protein LepA homolog (ISS)
HMVFSGLYPADGSDFEALSHAIEKLTCNDASVSVTKXESSNALGMGFRCGFLGLLHMDVFHQRLEQEYGAQVISTIPT

SEQ ID NO: 88496 - protein, 97 aa, Setaria italica
  Transcript Sequence Number=SeqID_22522
MDPSNAQSEASAPSVPKNPAMASCRKKKTDDDVTFLEDLKDHIDEFIHASMDEHKTCFKKTIQKMFGMSKVVAERSAAGAKEAEVESALPLQTSVSQ

SEQ ID NO: 88497 - protein, 113 aa, Setaria italica
  Transcript Sequence Number=SeqID_22523
  Gene Ontology: Mol. function=oxidoreductase activity; Cellular component=extracellular region; Biological process=oxidation reduction
  Homolog annotation: Hit_ID=Q0IQU1; Match level="QueryCoverage=100%, HitCoverage=20%, E-value=7e-51, Identity=84%"; Hit description =Laccase-22
  Pfam annotation: Domain name=Cu-oxidase_2; Domain location=1-97; Score=130.2; E_value=6.5e-36; Accession=PF07731.6; Description =Multicopper oxidase
VVLQDTGIISPESHPIHLHGFNFFVVGNGVGNYNPKTSPSTFNLIDPIERNTIGVPTGGWAAIRFRADNPGVWFMHCHFEVHTSWGLKMVFVVDNGKRPDETLIPPPKDLPQC

SEQ ID NO: 88498 - protein, 115 aa, Setaria italica
  Transcript Sequence Number=SeqID_22524
TVNVTADAAGGKPPHPQEQRGAARVTRVKLLKPRDTLALGQAYRLITFAEVTKALQAKKEEKTRRAQQQQLVLLQPKHAGGRATAAGEDSQLPPQLVDGSLDQQQDRDGHRSNPS

SEQ ID NO: 88499 - protein, 253 aa, Setaria italica
  misc_feature (9)..(9): Xaa can be any naturally occurring amino acid
  Transcript Sequence Number=SeqID_22525
  Gene Ontology: Mol. function=sequence-specific DNA binding; Cellular component=nucleus; Biological process=regulation of transcription, DNA-dependent
  Homolog annotation: Hit_ID=Q94LW3; Match level="QueryCoverage=86%, HitCoverage=70%, E-value=1e-121, Identity=95%"; Hit description =Homeobox protein knotted-1-like 3
  Pfam annotation: Domain name=ELK; Domain location=198-219; Score =25.3; E_value=0.00026; Accession=PF03789.5; Description=ELK domain
  Pfam annotation: Domain name=KNOX1; Domain location=32-76; Score =56.3; E_value=1.2e-13; Accession=PF03790.5; Description=KNOX1 domain
  Pfam annotation: Domain name=KNOX2; Domain location=87-142; Score =81.2; E_value=3.7e-21; Accession=PF03791.5; Description=KNOX2 domain
  Pfam module annotation: Pfam domain module=ELK::KNOX1::KNOX2; Domain location=198-219::32-76::87-142
GGGAECSSXSATAAAAAAAAAAAAAAEAEERQLLKGEIAVHPLCEQLVAAHVGCLRVATPIDHLPLIDAQLAQSSGLLHSYAAHHRPFLSPHDKHDLDSFLAQYLMLLCSFREQLQQHVRVHAVEAVMACREIEQSLQDLTGATLEEGSGATMSEDEDEPPMLEGPLDMGSDGHDVMGFGPLLPTDSERSLMERVRQELKIELKQGFKSRIEDVREEILRKRRAGKLPGDTTSILKQWWQQHSKWPYPTVSAL

SEQ ID NO: 88500 - protein, 74 aa, Setaria italica
  Transcript Sequence Number=SeqID_22526
  Gene Ontology: Mol. function=sequence-specific DNA binding; Cellular component=nucleus; Biological process=regulation of transcription, DNA-dependent
  Homolog annotation: Hit_ID=Q94LW3; Match level="QueryCoverage=56%, HitCoverage=13%, E-value=3e-16, Identity=97%"; Hit description =Homeobox protein knotted-1-like 3
MISFEWMVQEDDKAKLVEETGLQLKQINNWFINQRKRNWHNNSQTSTLKYKDVKGDRHIWRAAQCIPDTHIPTS

SEQ ID NO: 88501 - protein, 157 aa, Setaria italica
  Transcript Sequence Number=SeqID_22527
  Gene Ontology: Mol. function=sequence-specific DNA binding; Cellular component=nucleus; Biological process=regulation of transcription, DNA-dependent
  Homolog annotation: Hit_ID=Q94LW3; Match level="QueryCoverage=98%, HitCoverage=49%, E-value=6e-83, Identity=94%"; Hit description =Homeobox protein knotted-1-like 3
  Pfam annotation: Domain name=ELK; Domain location=61-82; Score=25.3; E_value=0.00026; Accession=PF03789.5; Description=ELK domain
GTFTGATLEEGSGATMSEDEDEPPMLEGPLDMGSDGHDVMGFGPLLPTDSERSLMERVRQELKIELKQGFKSRIEDVREEILRKRRAGKLPGDTTSILKQWWQQHSKWPYPTEDDKAKLVEETGLQLKQINNWFINQRKRNWHNNSQTSTLKSKRKR

SEQ ID NO: 88502 - protein, 37 aa, Setaria italica
  Transcript Sequence Number=SeqID_22528
VEQGLRALLAFVLPRPNLFRWSMLLARLGRPFASLLP

SEQ ID NO: 88503 - protein, 126 aa, Setaria italica
  misc_feature (112)..(112): Xaa can be any naturally occurring amino acid
  Transcript Sequence Number=SeqID_22529
  Gene Ontology: Mol. function=pantoate-beta-alanine ligase activity; Cellular component=cytoplasm; Biological process=pantothenate biosynthetic process
  Homolog annotation: Hit_ID=B6TYJ1; Match level="QueryCoverage=96%, HitCoverage=40%, E-value=2e-39, Identity=67%"; Hit description =Pantoate--beta-alanine ligase
  Pfam annotation: Domain name=Pantoate_ligase; Domain location=8-126; Score=-132.0; E_value=2.8e-05; Accession=PF02569.7; Description =Pantoate-beta-alanine ligase
MPAAAHEPEVIRDKAAMRAWSRRRRAEGKVVALVPTMGFLHDGHLSLVSAAVAAAAGPVAVVVSIYVNPSQFAPTEDLATYPSDFAGDLRKLAATGAVAAVFCPPDLYVRGXAPMPARSGGAISCL

SEQ ID NO: 88504 - protein, 94 aa, Setaria italica
  Transcript Sequence Number=SeqID_22530
GRQRRSSTPSCDYDRRATLRRRPLRAPAMTRRHQEYIAFGLAAPSDCLCKEVHSGESLAFPSQRCFGCTMHPNHPVSDSLSAINVLCVLSYVKI

SEQ ID NO: 88505 - protein, 79 aa, Setaria italica
  Transcript Sequence Number=SeqID_22531
  Gene Ontology: Cellular component=plastid outer membrane
  Homolog annotation: Hit_ID=Q6H7M7; Match level="QueryCoverage=73%, HitCoverage=8%, E-value=3e-27, Identity=100%"; Hit description=Outer envelope protein of 80 kDa
RPELEAAAAAALRACRPNAALTVREVQEDVHRVVESGLFRSCMPVAVDTRDGIRLVFEVEPNQDFHGLVCEGANMLPSK

SEQ ID NO: 88506 - protein, 94 aa, Setaria italica
  Transcript Sequence Number=SeqID_22532
  Gene Ontology: Cellular component=plastid outer membrane
  Homolog annotation: Hit_ID=Q6H7M7; Match level="QueryCoverage=97%, HitCoverage=13%, E-value=2e-34, Identity=80%"; Hit description=Outer envelope protein of 80 kDa
VVVGSGRSYAVGSGEVSCRMFGPLEGVVFGDYGSDVGSGPKVPGDPAGARGKPGSGYGYGVGIRVDSPLGPLRLEYAFNDKQARRFHFGVGYRN

SEQ ID NO: 88507 - protein, 507 aa, Setaria italica
  Transcript Sequence Number=SeqID_22533
  Gene Ontology: Mol. function=P-P-bond-hydrolysis-driven protein transmembrane transporter activity; Cellular component=plastid outer membrane; Biological process=intracellular protein transport
  Homolog annotation: Hit_ID=Q6H7M7; Match level="QueryCoverage=99%, HitCoverage=75%, E-value=0.0, Identity=90%"; Hit description=Outer envelope protein of 80 kDa
  Pfam annotation: Domain name=Bac_surface_Ag; Domain location=203-507; Score=221.2; E_value=2.7e-63; Accession=PF01103.15; Description =Surface antigen
  Pfam annotation: Domain name=Surf_Ag_VNR; Domain location=88-170; Score=30.9; E_value=5e-06; Accession=PF07244.7; Description=Surface antigen variable number repeat
  Pfam module annotation: Pfam domain module=Bac_surface_Ag::Surf_Ag _VNR; Domain location=203-507::88-170
MHNSGRLVFEVEPNQDFHGLVCEGANMLPSKFLEDAFRDRHGKIINIRHLDQVIKSVNGWYQHRGLTGLVSYAEILSGGILRLQISEAEVNNINIRFLDRKTGEPTVGKTQPETILRQLTTKKGQAYNRAQVKRDVETILTMGIMEDVTIIPQPVGDSNKVDLVMNLVERPSGGFSAGGGISSGITNGPLSGLIGSFAYSHRNVFGRNKKLNLSLERGQIDSIFRLNFTDPWIDGDNKRTSRTVMIQNSRTPGTLVHGGDHPNHEPITIGRVTAGVEYSRPFRPKWSGTLGLIFQHAGARDDKGNPVIRDFYNSQLTASGNAYDDTLLAKFESVYTDSGDHSSTMFVFNVEQGLPVLPEWLSFNRVTARLRQGYEIGPARLLLSASGGHVEGNFPPHEAFAIGGTNSVRGYEEGAVGSGRSYAVGSGEVSCRMFGPLEGVVFGDYGSDVGSGPKVPGDPAGARGKPGSGYGYGVGIRVDSPLGPLRLEYAFNDKQARRFHFGVGYRN

SEQ ID NO: 88508 - protein, 77 aa, Setaria italica
  Transcript Sequence Number=SeqID_22534
TSFTFFLQPCFGPYAVTKHLTSPIFLETFDVRIVDGHVLPGNPCRLETTLSRSLPRKQIEHRHRSKLTMVSSSRTSR

SEQ ID NO: 88509 - protein, 195 aa, Setaria italica
  Transcript Sequence Number=SeqID_22535
  Gene Ontology: Mol. function=DNA binding
  Homolog annotation: Hit_ID=Q339G0; Match level="QueryCoverage=95%, HitCoverage=58%, E-value=2e-16, Identity=31%"; Hit description=No apical meristem protein, expressed
TPDANEQDVSSKRQFEQKPLGAVDYIDVIATGDYLELNDLLSSEASASTSENSSKRSMISEEYFDSDALLGEILKGSNTTDGQNQDHKFSIAAPTKSANVVLGPSKQGLVQIHDNNVMVPGTSQKKPPPEGDRGQHSSQGFQHQSPGSSCFPSSHVKRSRSNSSSSSQSSIKSQKERSTSKFGKIGKKYCCFGSF

SEQ ID NO: 88510 - protein, 107 aa, Setaria italica
  misc_feature (38)..(38): Xaa can be any naturally occurring amino acid
  misc_feature (98)..(98): Xaa can be any naturally occurring amino acid
  Transcript Sequence Number=SeqID_22536
  Gene Ontology: Mol. function=serine-type endopeptidase activity; Cellular component=mitochondrial matrix; Biological process =proteolysis
  Homolog annotation: Hit_ID=Q9FIV6; Match level="QueryCoverage=100%, HitCoverage=18%, E-value=4e-51, Identity=88%"; Hit description =Protease Do-like 10, mitochondrial
KAEVQAVGHECDLALLTVESEEFWDGVNSLELGEIPFXQEAVAVVGYPQGGDNISVTKGVVSRVEPTQYAHGATQLMAIQIDAAINPGNSGGPAIMGXKVAGVAFQN

SEQ ID NO: 88511 - protein, 349 aa, Setaria italica
  misc_feature (94)..(94): Xaa can be any naturally occurring amino acid
  Transcript Sequence Number=SeqID_22537
  Gene Ontology: Mol. function=protein binding; Cellular component =nucleus; Biological process=imaginal disc development
  Homolog annotation: Hit_ID=B9SAR5; Match level="QueryCoverage=79%, HitCoverage=81%, E-value=3e-95, Identity=60%"; Hit description =Protein Peter pan, putative
  Pfam annotation: Domain name=Brix; Domain location=46-298; Score =255.2; E_value=1.5e-73; Accession=PF04427.10; Description=Brix domain
MRQPRSGPGKRRGRGPRIPATTLRKQQAALANVDQITGAKIPKSFVFSRGKLPSTLRHLQQDLRKVMLPYTALNLKEKKRNNLKDFVNVAGLPXGVTHFLILSNPKSLPHLRFSNSPQGPTFTFQIEEYALAADIANSQKRPRCPPGIFKNSPLVVLSGFSGLGNPFESLVEYFQHMVPAVDPSTVKLAECQRILLLKYDKEKEVVDFRHYSIKLQPVGVSRRIRKLMQNNQVPDLRDLKDVSDYVTKAGYGSESEVDDEAATVSLPSDVDKLNRASRKSAVRLQEIGPRMTMRLVKVEAGLCSGDVLYPWPVAKESVGEKGKVTEEEIEGQEETEDELEDGSEDEMEE

SEQ ID NO: 88512 - protein, 112 aa, Setaria italica
  Transcript Sequence Number=SeqID_22538
  Subcellular localization annotation: CTP_CleavageSite=44; ConfidenceScore=5.38e-01
MAAEGSELGSPATAPPPPPPLKRRKIEPPRRTRPSQVTLDKDKSAASSNSSVSGVLPARVDLNKVREAKRFVVLQAQHEGCLGSYKSFDSLFGNYLVPVIPSNDVSDQIGTK

SEQ ID NO: 88513 - protein, 83 aa, Setaria italica
  Transcript Sequence Number=SeqID_22539
  Gene Ontology: Mol. function=protein dimerization activity; Cellular component=nucleus; Biological process=regulation of transcription, DNA-dependent
  Homolog annotation: Hit_ID=Q8LNK9; Match level="QueryCoverage=86%, HitCoverage=9%, E-value=8e-14, Identity=47%"; Hit description=HAT family dimerisation domain containing protein
  Pfam annotation: Domain name=hATC; Domain location=2-66; Score=55.9; E_value=1.6e-13; Accession=PF05699.6; Description=hAT family dimerisation domain
YVLKWWKENASIYPTLARLARDILAIPASTVSAESAFDENDERMSLFNQKLSPELVEALICTQDWIKSSETNDIVGGNRNMPA

SEQ ID NO: 88514 - protein, 107 aa, Setaria italica
  Transcript Sequence Number=SeqID_22540
  Subcellular localization annotation: CTP_CleavageSite=44; ConfidenceScore=5.51e-01
PNLARSPPLRDPPARARLIHISPSLPLSSSPPGPAGRQPQLNCYGSSFVGRSSSINYSSSTDPSPGCRVNFKAFHMDAAAQDFQPRTFSIKLWPPSESTRLMLVERM

SEQ ID NO: 88515 - protein, 68 aa, Setaria italica
  Transcript Sequence Number=SeqID_22541
ISDEGIDEVKDILKAGKNSLDVLGSLDENDPEGEPDDDEEDDDEDAKDDDDEDGLDSKLQNVKVEQDG

SEQ ID NO: 88516 - protein, 118 aa, Setaria italica
  Transcript Sequence Number=SeqID_22542
  Gene Ontology: Mol. function=protein binding
  Homolog annotation: Hit_ID=B6T5J4; Match level="QueryCoverage=48%, HitCoverage=10%, E-value=3e-23, Identity=91%"; Hit description=Ran GTPase activating protein
VLVLLSSILVKVVFVLLSTNMLQRVGARCFARAVANKPGFVQLNINGNFISDEGIDEVKDILKAGKNSLDVLGSLDENDPEGEPDDGDEEEDDEDAEDGDDEDGLDSKLQNVQVDRDD

SEQ ID NO: 88517 - protein, 72 aa, Setaria italica
  misc_feature (1)..(12): Xaa can be any naturally occurring amino acid
  Transcript Sequence Number=SeqID_22543
XXXXXXXXXXXXFFFFFFFFLDMDKQQSAIKASFFTGIYDCGGVSQSWNRWECHYPTIPNRMSRNAKGQAEA

SEQ ID NO: 88518 - protein, 68 aa, Setaria italica
  Transcript Sequence Number=SeqID_22544
  Subcellular localization annotation: CTP_CleavageSite=62; ConfidenceScore=5.66e-01
GAAPPPSSSYWLSAPDGASGGGAGGGSTRGTGTRSHRSWGWALASPMRALRPTSSSSSKSIMAAPTAA

SEQ ID NO: 88519 - protein, 83 aa, Setaria italica
  Transcript Sequence Number=SeqID_22545
  Gene Ontology: Mol. function=transcription regulator activity; Cellular component=nucleus; Biological process=regulation of transcription
ENFLDLLASKNVTQEMFEDVPADAGHYSAHHQALSGRLGAGSDVAPIKYEATGSPLFFGNSNPPGMHQGMNMAGCTPCYPYAD

SEQ ID NO: 88520 - protein, 52 aa, Setaria italica
  Transcript Sequence Number=SeqID_22546
FRGQAQAPGMHYSSPYHLMNPRQRRRHMELERSLHQIWFFLFVFVLLCLLLF

SEQ ID NO: 88521 - protein, 267 aa, Setaria italica
  Transcript Sequence Number=SeqID_22547
  Gene Ontology: Mol. function=nucleotide binding; Biological process =defense response
  Homolog annotation: Hit_ID=Q5Z5Z4; Match level="QueryCoverage=95%, HitCoverage=26%, E-value=2e-35, Identity=31%"; Hit description =Putative Pib
MKQLASAGSSSFVMLAEERSTPTKQQDMDALTKLVTRRGSDRQVITVWELGGDLGAASKSSISKAYENAKNWGCRAWIKLGNPFNLHEFRRSLIDQFCGNGVQGRKQAPLTEDYLIHEQVNNRRYLVVLEDLSTKEDWDAILRSLPDRSNGSRIVVLTQQFQVARYCTGLPYIQYFWANNSVCVFFKEGSLIGRMSDINQLSGYLAKARMEALQVMSVWGIPGVGKSALVRNLCHNKVLQHHKFEKHGWVDVSHPFDLRDFLFDALL

SEQ ID NO: 88522 - protein, 127 aa, Setaria italica
  Transcript Sequence Number=SeqID_22548
  Gene Ontology: Mol. function=hydrolase activity, hydrolyzing O -glycosyl compounds; Cellular component=extracellular region; Biological process=carbohydrate metabolic process
  Homolog annotation: Hit_ID=B6SYY0; Match level="QueryCoverage=82%, HitCoverage=19%, E-value=7e-46, Identity=84%"; Hit description=Beta -fructofuranosidase, insoluble isoenzyme 7
  Pfam annotation: Domain name=Glyco_hydro_32C; Domain location=1-58; Score=34.7; E_value=3.7e-07; Accession=PF08244.4; Description =Glycosyl hydrolases family 32 C termi
DDAYKVLMCTDLTRSSTKEGVQKPVYAGFVDVDVEKDKCISLRTLIDHSVIESFGGGGRTCITARVYPEHVATGSSHLYVFNNGLHAVKVPKLEAWELATASVNVEDDGLNALLPPLVVPILSDDAE

SEQ ID NO: 88523 - protein, 100 aa, Setaria italica
  Transcript Sequence Number=SeqID_22549
  Gene Ontology: Mol. function=transferase activity, transferring glycosyl groups; Biological process=metabolic process
  Homolog annotation: Hit_ID=B9SCH3; Match level="QueryCoverage=94%, HitCoverage=19%, E-value=1e-12, Identity=34%"; Hit description=UDP -glucosyltransferase, putative
GWADVPMLCFPLLTDQITNRRLVAREWRAGVSIGDRGAVHAAEVRARVEGVMGGEEGVKLREQVRKLRATLEAAVAPGGSSRSSFDEFVDVLKRRCGGGQ

SEQ ID NO: 88524 - protein, 75 aa, Setaria italica
  Transcript Sequence Number=SeqID_22550
  Gene Ontology: Mol. function=ATP-dependent helicase activity
  Homolog annotation: Hit_ID=B6ST55; Match level="QueryCoverage=100%, HitCoverage=9%, E-value=2e-17, Identity=64%"; Hit description=Pre -mRNA-processing ATP-dependent RNA helicase prp-5
MSKRPKLGGFSIPRPTTYSFERSQPVPRLYRPTDDPDLDDIAFSDDAPTDAPAAAAVASKAQDAEEIDPLDAFMA

SEQ ID NO: 88525 - protein, 81 aa, Setaria italica
  Transcript Sequence Number=SeqID_22551
MASVARRAALLRGSCLAVVLALAALASAGESSGAPDWHVVSVGSLLPSSICAAATAASNSSALSVVHRHGPCSPLLARVGG

SEQ ID NO: 88526 - protein, 76 aa, Setaria italica
  Transcript Sequence Number=SeqID_22552
  Gene Ontology: Mol. function=ubiquinol-cytochrome-c reductase activity; Cellular component=mitochondrial respiratory chain; Biological process=mitochondrial electron transport, ubiquinol to cytochrome c
  Homolog annotation: Hit_ID=Q53PN7; Match level="QueryCoverage=90%, HitCoverage=71%, E-value=3e-20, Identity=68%"; Hit description =Ubiquinol--cytochrome-c reductase, putative
  Pfam annotation: Domain name=UCR_hinge; Domain location=14-76; Score =83.5; E_value=7.5e-22; Accession=PF02320.8; Description=Ubiquinol -cytochrome C reductase hinge protein
MIYVCASWADEEVSDPKALLEDRTKAKCVSQWYEYQKCVKRIENDETGQKHCTGQYFDYWKCVDKNVAEKLFELLK

SEQ ID NO: 88527 - protein, 111 aa, Setaria italica
  Transcript Sequence Number=SeqID_22553
  Gene Ontology: Mol. function=ubiquinol-cytochrome-c reductase activity; Cellular component=mitochondrial respiratory chain; Biological process=mitochondrial electron transport, ubiquinol to cytochrome c
  Homolog annotation: Hit_ID=B6TLS6; Match level="QueryCoverage=62%, HitCoverage=100%, E-value=8e-20, Identity=66%"; Hit description =Ubiquinol-cytochrome c reductase complex 7.8 kDa protein
  Pfam annotation: Domain name=UCR_hinge; Domain location=49-111; Score= 83.5; E_value=7.5e-22; Accession=PF02320.8; Description=Ubiquinol -cytochrome C reductase hinge protein
QIRPYLVIHTSHLFPAPLRPRRSPLAPLDQGFFLCSPEFVAPMADEEVSDPKALLEDRTKAKCVSQWYEYQKCVKRIENDETGQKHCTGQYFDYWKCVDKNVAEKLFELLK

SEQ ID NO: 88528 - protein, 152 aa, Setaria italica
  Transcript Sequence Number=SeqID_22554
  Subcellular localization annotation: CTP_CleavageSite=46; ConfidenceScore=5.37e-01
MYIDCYLCILSSLAAGRPPAPGRSFPRRFCPLRPCVTGVLLASGHRCRHGNPPRARFHRPHALFRRPRARLTSTEPSSTLRARCWSCRSSRRRCRAQTGSPRRRTRAGGRPRRRPRRGAAGAGREQRTAWGEAERTPARGRGARGAAARVAA

SEQ ID NO: 88529 - protein, 157 aa, Setaria italica
  Transcript Sequence Number=SeqID_22555
  Gene Ontology: Mol. function=nucleic acid binding; Cellular component= nucleosome; Biological process=nucleosome assembly
  Homolog annotation: Hit_ID=B9S4G9; Match level="QueryCoverage=96%, HitCoverage=9%, E-value=8e-45, Identity=57%"; Hit description=Snf2 histone linker phd ring helicase, putative
KKNMKPRIGRKKKPQCSIVDTEDKYICALCLELTEAAQTNIFSHATLIVCPAPILAQWHSEITRHTRPGSLKVCIYEGARNLDLATIQKIDTTEISTADVVLTTYDVLKEDLSHDFDRHDGDRRFLRFQKRYPVIPTVLTRIHWWRLCLDEAQMVES

SEQ ID NO: 88530 - protein, 106 aa, Setaria italica
  Transcript Sequence Number=SeqID_22556
  Gene Ontology: Mol. function=nucleoside-triphosphatase activity; Cellular component=membrane; Biological process=transport
  Homolog annotation: Hit_ID=Q9C6W5; Match level="QueryCoverage=70%, HitCoverage=11%, E-value=1e-21, Identity=65%"; Hit description=ABC transporter G family member 14
  Subcellular localization annotation: CTP_CleavageSite=80; ConfidenceScore=5.24e-01
KLDICARETSAAASPGGGQAPSSRRRGSASSEWTTGWCTQFLVLLQRGLKERRHESFNKLRIFQVLSVASLAGLLWWRTPASHLQDRTALVFFFSVFWGFFPLYNA

SEQ ID NO: 88531 - protein, 319 aa, Setaria italica
  misc_feature (174)..(174): Xaa can be any naturally occurring amino acid
  Transcript Sequence Number=SeqID_22557
  Gene Ontology: Mol. function=DNA binding; Cellular component=nucleus
  Homolog annotation: Hit_ID=B6SJB5; Match level="QueryCoverage=100%, HitCoverage=100%, E-value=7e-90, Identity=60%"; Hit description=DNA binding protein
  Pfam annotation: Domain name=DUF296; Domain location=127-245; Score =202.6; E_value=1.1e-57; Accession=PF03479.7; Description=Domain of unknown function (DUF296)
MDPVAASIHGHHLPPPFNTRDFHHHLQQQQHHHQLQLKTEDDQGGGTPGVFGGRGTKRDHEDDENSGANGNGSGGGGGGDELALVPPSGGGPEGGETTPRRPRGRPAGSKNKPKPPIIITRDSANTLRTHVMEVAGGCDISESITAFARRRQRGVCVLSGAGTVTNVTLRQPAXSQGAVVALHGRFEILSLSGSFLPPPAPPEATGLTVYLAGGQGQVVGGSVVGALTAAGPVVIMAASFANAVYERLPLEEDDMLAAQAQADSAGILAGAQQAAQLAGSVDPSLFQGLPPNLLGNVQLPPESAYGWNPGAAGGRPAPF

SEQ ID NO: 88532 - protein, 82 aa, Setaria italica
  Transcript Sequence Number=SeqID_22558
FSVVQMKNYKQYITVNSGTGSQNFEQNNTRTSIPQEDKTPTSMEMLYNFTQMIQNEINESIRKPLTFHLIVHSAKPQVPSTQ

SEQ ID NO: 88533 - protein, 90 aa, Setaria italica
  Transcript Sequence Number=SeqID_22559
  Gene Ontology: Mol. function=transferase activity, transferring groups other than amino-acyl groups
  Homolog annotation: Hit_ID=B6TZX2; Match level="QueryCoverage=100%, HitCoverage=20%, E-value=4e-42, Identity=85%"; Hit description =Taxadien-5-alpha-ol O-acetyltransferase
WAAGDVKVDPYQLAFEHNVLFVSDWTRLGFFEVDYGWGAPNHIIPFTYADYMAVAVLGAPPSPKKGTRIMTQCVEEKHLMDFKDQMKTFF

SEQ ID NO: 88534 - protein, 105 aa, Setaria italica
  Transcript Sequence Number=SeqID_22560
EEGKKTGSYWGKARKLDDDDDSDHGSDSDHDHDHDSDSDHDHDSDSDQAHDHDSDSDHDHDRDHDSDSDHDHDSDSDHDHDHDSDSGNNDDDDHNSKNERKKKHA

SEQ ID NO: 88535 - protein, 52 aa, Setaria italica
  Transcript Sequence Number=SeqID_22561
GWVLKHRNPSVVYWSWLSGASTPKLIPILKTMLEANPQTKGLIDPVYVDDDE

SEQ ID NO: 88536 - protein, 102 aa, Setaria italica
  misc_feature (31)..(31): Xaa can be any naturally occurring amino acid
  Transcript Sequence Number=SeqID_22562
CQIDKATHPSCIFKGCIACKSLPQNISPNKXIGDLSDNEVLVSVPLLLMLLLHQEEEEQTEGRGKAGLMCAALLLHPFHFRLGRGCIKKYVQRAMTICAKLY

SEQ ID NO: 88537 - protein, 96 aa, Setaria italica
  Transcript Sequence Number=SeqID_22563
  Gene Ontology: Mol. function=metal ion transmembrane transporter activity; Cellular component=membrane; Biological process=metal ion transport
  Homolog annotation: Hit_ID=B9GM76; Match level="QueryCoverage=97%, HitCoverage=34%, E-value=4e-35, Identity=78%"; Hit description=ZIP transporter
SKWQAFKLATLSGFAEPLGVVIVAYLFPSNLNPELLKRSSGLVGGVMAFLTLYEMLPLAFEYAGRKDAVKAVFVGMAFMSMSLYFLDVSLPKEMGA

SEQ ID NO: 88538 - protein, 101 aa, Setaria italica
  misc_feature (87)..(87): Xaa can be any naturally occurring amino acid
  Transcript Sequence Number=SeqID_22564
  Gene Ontology: Cellular component=cytoplasm; Biological process =multicellular organismal development
  Homolog annotation: Hit_ID=B0ZT31; Match level="QueryCoverage=100%, HitCoverage=57%, E-value=7e-46, Identity=88%"; Hit description =CTRSTFL-like protein
  Pfam annotation: Domain name=PBP; Domain location=1-93; Score=54.3; E_ value=4.7e-13; Accession=PF01161.12; Description=Phosphatidylethanolam ine-binding protein
VPGPSDPYLREHLHWIVTDIPGTTDASFGRELVSYENPRPNIGIHRFIFVLFRQSRRQAVSPPSSRDRFSTRQFAEENDLGLPVAAXVYFNAQRETAARRR

SEQ ID NO: 88539 - protein, 200 aa, Setaria italica
  Transcript Sequence Number=SeqID_22565
  Gene Ontology: Mol. function=protein binding
  Homolog annotation: Hit_ID=B6TSC4; Match level="QueryCoverage=88%, HitCoverage=54%, E-value=7e-88, Identity=85%"; Hit description =Ubiquitin-protein ligase
SRAPSLKSLQLSLCHHVSNEGFAEAINCLPQLEELEVTFCTLHGNVCDTIGRACPQLKRFRLNERWSILQSEFAPYEGMDDDTEALGIASTMPGLQELQLIGNNMTNDGLMAILDRCPHLESLDIRQCYNIQMDDAMKSKCARIRDLKLPHDSISDFKYRAHIVSANSGSDFEVDVYDDLLDPVTEDDDADFDDIDDFDD

SEQ ID NO: 88540 - protein, 120 aa, Setaria italica
  Transcript Sequence Number=SeqID_22566
  Gene Ontology: Mol. function=serine-type carboxypeptidase activity; Cellular component=extracellular region; Biological process =proteolysis
  Homolog annotation: Hit_ID=B6T4S1; Match level="QueryCoverage=99%, HitCoverage=23%, E-value=1e-51, Identity=78%"; Hit description=SCPL33
  Pfam annotation: Domain name=Peptidase_S10; Domain location=1-120; Score=-139.6; E_value=7.1e-07; Accession=PF00450.14; Description =Serine carboxypeptidase
FEAQTSPEKKPLLLWLNGGPGCSSVGYGAASEMGPLLVNGNGTGLEFNKFAWTREANLLFLESPVGVGFSYTNTTSDLDYLDDGFVAEDTYTFLVNWFNKFTQYKGHDFYIAGESYAGHL

SEQ ID NO: 88541 - protein, 144 aa, Setaria italica
  Transcript Sequence Number=SeqID_22567
VVDVEDPGVEAVGAGVDLVGVVGGLLHDAGQVPEVLAPGHVPLDVADALRGHRAPAPGVVGLHHDAPAQAPGVIGRLPRPEALPRDGGVEEEESEEHDELPPRGERPRGHRSNVAHQVAQVSPRCRSLWMCANAAATPRAETRL

SEQ ID NO: 88542 - protein, 212 aa, Setaria italica
  Transcript Sequence Number=SeqID_22568
  Gene Ontology: Mol. function=cation transmembrane transporter activity; Cellular component=membrane; Biological process=cation transport
  Homolog annotation: Hit_ID=B9MXD1; Match level="QueryCoverage=35%, HitCoverage=9%, E-value=8e-25, Identity=70%"; Hit description=Metal tolerance protein
  Pfam annotation: Domain name=Cation_efflux; Domain location=1-192; Score=-87.9; E_value=0.00028; Accession=PF01545.13; Description =Cation efflux family
ACHMLFDCAALAIGLYASYIARLPANGMYNFGRGRFEILSGYVNAVFLVLVGVLIVLESFERILEPREISTSSLLAVSIGGLVVNVIGLVFFHEEHHHAHGGTCSHSHSHSHSHQHGHEHHQHHGHGDHQHHDHDHHSVNHVKACCDHHGDESHHHYHHSNGNIDGIHNNLMDNACKEKHSHSHGHEHEHHHHDHSGHCHQSGDHAHQIAAV

SEQ ID NO: 88543 - protein, 202 aa, Setaria italica
  Transcript Sequence Number=SeqID_22569
  Gene Ontology: Mol. function=transferase activity, transferring glycosyl groups; Biological process=metabolic process
  Homolog annotation: Hit_ID=C4MF46; Match level="QueryCoverage=96%, HitCoverage=38%, E-value=5e-66, Identity=63%"; Hit description=UDP -glycosyltransferase
AIKRLREPFGRFLADHRPDAAVADSFYPWAADAAAEHGVPRLSFLGSSMFGRACHDSLLRNNPLEELDPDDTDAVVSLPGLPHRVALRKGQMMDPRKNELEWEFDKLVNAADRRSYGELFNSFAELEPGYAEHYRTTLGRRVWLVGPLAHARKDSAASGGAGGLAPEAERCLRWLDGKPDGSVVYVSFGTLARVTAVGSLVG

SEQ ID NO: 88544 - protein, 111 aa, Setaria italica
  misc_feature (90)..(90): Xaa can be any naturally occurring amino acid
  misc_feature (106)..(106): Xaa can be any naturally occurring amino acid
  Transcript Sequence Number=SeqID_22570
  Gene Ontology: Mol. function=nucleotide binding
  Homolog annotation: Hit_ID=Q7XS31; Match level="QueryCoverage=97%, HitCoverage=15%, E-value=4e-28, Identity=61%"; Hit description =OSJNBa0072D21.2 protein
TSASLSSRKDGTIIGSDIQLTAERGQKSRAVFARDATRKATSEQADTDAGTNLTGGSQMGNSQVGGSSSIKLPSIIQLKEPPITLKPSEXEQDATEVAIVKLLIKXYYDIV

SEQ ID NO: 88545 - protein, 241 aa, Setaria italica
  Transcript Sequence Number=SeqID_22571
  Gene Ontology: Mol. function=nucleotide binding; Cellular component =mitochondrion; Biological process=cell division
  Homolog annotation: Hit_ID=Q7XS31; Match level="QueryCoverage=77%, HitCoverage=24%, E-value=3e-71, Identity=72%"; Hit description =OSJNBa0072D21.2 protein
  Pfam annotation: Domain name=GED; Domain location=58-149; Score =109.2; E_value=1.4e-29; Accession=PF02212.10; Description=Dynamin GTPase effector domain
DKRSYFVLSSYFENIGTNLTGGSQMGNSQVGGSSSIKLPSIIQLKEPPITLKPSETEQDATEVAIVKLLIKSYYDIVRKSIEDAIPKAVMHFLVNHTKRDLHNFLIRKLYRENLLNELMRETDEVLIRRQRIQETLEVLEQAHRTLEEFPLEAEKIEKGYDLAEHATGLPKIHGLSEDGPNGILTSSSNRYGAHQASHIVKARRKGLIWRQIGGYVVSNCNQLWLYVLLNEDEYNCFSEKL

SEQ ID NO: 88546 - protein, 469 aa, Setaria italica
  misc_feature (19)..(19): Xaa can be any naturally occurring amino acid
  misc_feature (250)..(250): Xaa can be any naturally occurring amino acid
  Transcript Sequence Number=SeqID_22572
  Gene Ontology: Mol. function=nucleotide binding; Cellular component =mitochondrion; Biological process=cell division
  Homolog annotation: Hit_ID=Q7XS31; Match level="QueryCoverage=97%, HitCoverage=57%, E-value=0.0, Identity=88%"; Hit description =OSJNBa0072D21.2 protein
  Pfam annotation: Domain name=Dynamin_M; Domain location=120-412; Score=398.5; E_value=1.1e-116; Accession=PF01031.12; Description =Dynamin central region
  Pfam annotation: Domain name=Dynamin_N; Domain location=2-111; Score =84.8; E_value=3.1e-22; Accession=PF00350.15; Description=Dynamin family
  Pfam module annotation: Pfam domain module=Dynamin_M::Dynamin_N; Domain location=120-412::2-111
IKREIQLETDKEAGDNKGXSEKQIRLKIFSPNVLDITLVDLPGITRVPVGDQPSDIESRIRTMIMQYIKHPSCIILAVSPANADLANSDALQLARLADPDGSRTIGVITKLDIMDRGTDARNFLLGNVIPLKLGYVGVVNRSQEDINFNRSVKDALGFEEKFFSTLPAYHGLAHCCGVPQLAKKLNMILLKHITNMLPGLKTRINAQLVAVAKEHAAYGDTVESTAGQGVKLLNILRKYCEAFSSMVEGXNRVSTDKLSGGARIHYIFQSIFVKSLEEVDPCKSITDEDIRTTIQNYGGPKGAMFLPEVPFEILVRKQIGRLLDPSLQCAQFIYDELIKISHGCLTSELQKFPILKKRMGEVVSSFLRDGLRPAETMITHIIEMEMDYINTSHPSFVGGTKVVELAKHEVVPPKTSASLSSRKDGTIIGSDIQLTAERGQKSRAVFARDATRKATSEQASTVLNTIIIV

SEQ ID NO: 88547 - protein, 603 aa, Setaria italica
  misc_feature (6)..(6): Xaa can be any naturally occurring amino acid
  Transcript Sequence Number=SeqID_22573
  Gene Ontology: Mol. function=DNA binding
  Homolog annotation: Hit_ID=B9S516; Match level="QueryCoverage=79%, HitCoverage=23%, E-value=1e-121, Identity=51%"; Hit description=DNA binding protein, putative
QVDLVXQYEQKDYVEKRPEIHQFDSNGNFVVNGQHASKKPKLMNQAPDISLEALAPVGPIASPAASQMSNMANPKIKISTRGRKSKGPKMGAGHSGPGSPWSSFEDQALVVLVHDMGENWELVSDALNSIIQLKCIYRRPNECKERHKLLTDKSSGDGADSADDSGSSQHYPSALPGIPKGSARQLFQRLQGPFEEETLKTHFEKIIFFGQKLHQTRRKGEIQELRQINPLHTSHVFALSQACPGNLSGVVLTPLDLCDGPSNSDTLSVGYQGSHTSGLALQNNHGSIGPTLPTSNVNSRLPGSPGMVIGSNSPLPLNAPSRDAQRYGVPRPTLLQGDEQSRIHYSQMVNGRNLQQPGVPGVLPSGVDRGARMMPPAHGAGIMTGLNRGTPTRPGFPRVGSPGMANVVPHGNMSPNNGQGLQNTVNVHPGAIPGPGNTMLRPRDPMQMLRPVQNSEEHRQMMMPEFQLQVSQGNNQVVHFSGPPFSNAGGSSPVQSFPVQQSQPHQMPQQSHMYGNTHLSHTQGTNQSNPQQQQAYAMRFKERHIQQMMPQQQRPLPGTSTVPTVQNGSQMQQQSQGCAAGVIPASQPQHKQQHPCLLKFLFS

SEQ ID NO: 88548 - protein, 164 aa, Setaria italica
  Transcript Sequence Number=SeqID_22574
  Gene Ontology: Mol. function=unfolded protein binding; Cellular component=mitochondrion; Biological process=cellular protein metabolic process
  Homolog annotation: Hit_ID=P29185; Match level="QueryCoverage=93%, HitCoverage=26%, E-value=7e-76, Identity=94%"; Hit description =Chaperonin CPN60-1, mitochondrial
VAVLKIGGASEAEVGEKKDRVIDALNATKAAVEEGIVPGGGVALLYASKDLDKLQSANLDQKIGVQIIQNALKTPVQTIASNAGVEGAVIVGKLLEQENTDLGYDAAKGEYVDMVKAGIIDPLKVIRTALMDAASVSSLMTTTESIIVESPKEESSAPAGGMEY

SEQ ID NO: 88549 - protein, 109 aa, Setaria italica
  Transcript Sequence Number=SeqID_22575
  Subcellular localization annotation: CTP_CleavageSite=61; ConfidenceScore=5.24e-01
MAGGKAPARRRAVLAAVITLILLASVSFLLSATATSSAAANSPASRLAVVQRHAEDHAAVLAAYTAHARHLSALSASQTDAFLAISSRLSALASRLSVSTVGALEKEAK

SEQ ID NO: 88550 - protein, 144 aa, Setaria italica
  Transcript Sequence Number=SeqID_22576
  Gene Ontology: Mol. function=protein serine/threonine kinase activity; Biological process=protein amino acid phosphorylation
  Homolog annotation: Hit_ID=B6U4T7; Match level="QueryCoverage=100%, HitCoverage=44%, E-value=5e-80, Identity=97%"; Hit description =Serine/threonine-protein kinase WNK2
  Pfam annotation: Domain name=Pkinase; Domain location=2-142; Score= -50.4; E_value=1.7e-05; Accession=PF00069.17; Description=Protein kinase domain
  Pfam annotation: Domain name=Pkinase_Tyr; Domain location=1-140; Score=-136.7; E_value=0.00012; Accession=PF07714.9; Description =Protein tyrosine kinase
  Pfam module annotation: Pfam domain module=Pkinase::Pkinase_Tyr; Domain location=2-142::1-140
LHTHDPCIIHRDLNCSNVFINGNNGQVKIGDLGLAAIVDKTHVAHTILGTPEFMAPELYTETYTESVDIYSYGMCVLEMVTREVPYAECGSVVQIFHNVTRGVPPAALKRLKDPELRGFIERCIGQPRNRPSAAELLEDPFFNG

SEQ ID NO: 88551 - protein, 134 aa, Setaria italica
  Transcript Sequence Number=SeqID_22577
  Gene Ontology: Mol. function=protein serine/threonine kinase activity; Biological process=protein amino acid phosphorylation
  Homolog annotation: Hit_ID=B6U4T7; Match level="QueryCoverage=91%, HitCoverage=37%, E-value=4e-64, Identity=96%"; Hit description =Serine/threonine-protein kinase WNK2
  Pfam annotation: Domain name=Pkinase; Domain location=1-129; Score= -92.9; E_value=0.0058; Accession=PF00069.17; Description=Protein kinase domain
  Pfam annotation: Domain name=Pkinase_Tyr; Domain location=2-134; Score=-134.0; E_value=8.1e-05; Accession=PF07714.9; Description =Protein tyrosine kinase
  Pfam module annotation: Pfam domain module=Pkinase::Pkinase_Tyr; Domain location=1-129::2-134
VRLRALADRDPGMVDRLHAEVRLLRSLHHDHIIGFHKVWLDRDAGVLNFITEVCTSGSLREYRQRHRHVSVKALKKWARQILEGLNHLHTHDPCIIHRDLNCSNVFINGNNGQVKIGDLGLAAPNLPTIALPQP

SEQ ID NO: 88552 - protein, 295 aa, Setaria italica
  Transcript Sequence Number=SeqID_22578
  Gene Ontology: Mol. function=ATPase activity, coupled to transmembrane movement of ions, phosphorylative mechanism; Cellular component=integral to membrane; Biological process=phospholipid transport
  Homolog annotation: Hit_ID=B9HKJ9; Match level="QueryCoverage=100%, HitCoverage=24%, E-value=1e-127, Identity=73%"; Hit description =Aminophospholipid ATPase
SGIEDKLQDGVPEAIEKLRQAGIKVWVLTGDKQETAISIGYSCKLLTRDMVQIVINSRSRDSCRKSLDDAMAMVNKYQSFSADPQLRVPLALIIDGNSLVYIFDADWDEKLFEIAIACDVVLCCRVAPLQKAGIVDLIKKRTSDMTLAIGDGANDVSMIQMADVGIGISGQEGRQAVMASDFAMGQFRFLVPLLLVHGHWNYQRMAYMILYNFYRNATFVFVLFWYVLYTGFTLTTAITEWSSVLYSVIYTAVPTIVVAILDKDLSRRTLLKYPQLYSPGQREENYNLRLFIFIM

SEQ ID NO: 88553 - protein, 193 aa, Setaria italica
  misc_feature (155)..(155): Xaa can be any naturally occurring amino acid
  Transcript Sequence Number=SeqID_22579
  Gene Ontology: Mol. function=ATPase activity, coupled to transmembrane movement of ions, phosphorylative mechanism; Cellular component=integral to membrane; Biological process=phospholipid transport
  Homolog annotation: Hit_ID=B9HKJ9; Match level="QueryCoverage=91%, HitCoverage=16%, E-value=4e-66, Identity=60%"; Hit description =Aminophospholipid ATPase
DVLGEKQRYDVLGLHEFDSDRKRMSVIIGCPDKSVKLFVKGADSSMFGIIDKNVNSDVVQATEKHLHSYSSLGLRTLVIGMRELSQEEFQEWQMAYEKASTALLGRGNLLRGVAADIERNLCLLGASGIEDKLQDGVPEAIEKLRQAGIKVWVLXQIVINSRSRDSCRKSLDDAMAMVNLYQSFSASFRFLVT

SEQ ID NO: 88554 - protein, 103 aa, Setaria italica
  Transcript Sequence Number=SeqID_22580
ASAGEVYLGKCYARFWSNAGGGSGNGGVPAVGGGAGTGSSNGVGGVGGANNGYAYGGFVPNTYGQHDESGKTLAIIIGLVAAVAIVIVLLSFVRRAGGVGGKS

SEQ ID NO: 88555 - protein, 89 aa, Setaria italica
  Transcript Sequence Number=SeqID_22581
DGIMRLGGSKLRFPPFIAICLSSLSIYFYLFTEPRRKRPSFQISAACDRDCSQIAPCARAVPFLSSEPRRTGRSTCCLTRICKAKHLPP

SEQ ID NO: 88556 - protein, 74 aa, Setaria italica
  Transcript Sequence Number=SeqID_22582
DVLDVTGTSEQLGKTAGKDAAAGKATYPRLLGLEGARAYAGELLAKAEAELDGFDAARAAPLRHLARFVAYSQH

SEQ ID NO: 88557 - protein, 328 aa, Setaria italica
  Transcript Sequence Number=SeqID_22583
  Gene Ontology: Mol. function=transferase activity, transferring nitrogenous groups; Cellular component=apoplast; Biological process =cellular amino acid and derivative metabolic process
  Homolog annotation: Hit_ID=B9MYE9; Match level="QueryCoverage=99%, HitCoverage=77%, E-value=1e-136, Identity=66%"; Hit description =Aminotransferase family protein
  Pfam annotation: Domain name=Aminotran_1_2; Domain location=3-316; Score=109.5; E_value=1.1e-29; Accession=PF00155.13; Description =Aminotransferase class I and II
IAKYLSHNLPYELSPDDVYLTSGCAQAIEIICSVLARPGANILLPRPGYLFYEARAVFNGMEARYYDLLPEKDWEVDIHGVQALADENTVAMVIVNPGNPCGNVYTYEHLAKVAETARKLGIFVITDEVYAHLTFGERKFVPMGVFGEVAPVFTLGSISKRWLVPGWRLGWIVTNDPNSVFQRTKVVDSIKSYLDISSDPPTFVQGAIPNLLENTKEEFFDKTVKILRETSDICWEKLKGISAITCPSKPEGSMFVMVKLDLTCLQDIKDDMDFCCRLAKEELVVLLPGCAVGYKNWLRITFAIDPSSLEDGLDRLKSFCLRHSKPTK

SEQ ID NO: 88558 - protein, 70 aa, Setaria italica
  Transcript Sequence Number=SeqID_22584
AIIGWSAAMVIRWSIDRLLRAGVLVYRGKQGKLSCAVICLLSILYECCTYASVVGVLSRSHIPYCSSYPR

SEQ ID NO: 88559 - protein, 150 aa, Setaria italica
  Transcript Sequence Number=SeqID_22585
  Gene Ontology: Mol. function=oxidoreductase activity; Biological process=oxidation reduction
  Homolog annotation: Hit_ID=Q8SB92; Match level="QueryCoverage=95%, HitCoverage=50%, E-value=2e-53, Identity=68%"; Hit description =Putative ethylene-forming enzyme
MAARTVGSLPVANVQALAETCNGFNDKIPERYVRMEARSEEVIIGHGSTLVIPIVDLNKLLDPQSTEEECVKLVSACQNWGFFQLTNHGVPDEVIENLMNDIAEFFKQPLEAKKACSQLPNSLEGYGQAFVVSDNQKLDWSDSIFPSCSS

SEQ ID NO: 88560 - protein, 154 aa, Setaria italica
  misc_feature (52)..(52): Xaa can be any naturally occurring amino acid
  misc_feature (61)..(61): Xaa can be any naturally occurring amino acid
  misc_feature (140)..(140): Xaa can be any naturally occurring amino acid
  Transcript Sequence Number=SeqID_22586
  Homolog annotation: Hit_ID=Q53MB0; Match level="QueryCoverage=83%, HitCoverage=18%, E-value=3e-37, Identity=60%"; Hit description=GRAS family transcription factor containing protein, expressed
VVGGGGGGGLGDRDWRRRGRRDGRRLHIVDYGIGYGFQWPGLLRGLAARHGXPPEVRITGXIDLPQPGFRPAHQIDETGRRLMNCARELGVPFRFRGIAAKREAISPDDLDLGMADDDEVLVVSSLCHFRHLMDESVVAXGPAPRDQVLDNIRR

SEQ ID NO: 88561 - protein, 56 aa, Setaria italica
  Transcript Sequence Number=SeqID_22587
KDATIITEKHLTDRDGRDLDFMEHTPLATGSSNETESDYSHGNGLDIPEMDDMISD

SEQ ID NO: 88562 - protein, 62 aa, Setaria italica
  Transcript Sequence Number=SeqID_22588
RCCRVHSTRHLLHSLWFITLGECQFGVCVFPWSYLLLSFSHASMHYDEDLTYVCCGRMNIHY

SEQ ID NO: 88563 - protein, 237 aa, Setaria italica
  misc_feature (38)..(38): Xaa can be any naturally occurring amino acid
  misc_feature (46)..(46): Xaa can be any naturally occurring amino acid
  misc_feature (101)..(101): Xaa can be any naturally occurring amino acid
  Transcript Sequence Number=SeqID_22589
  Gene Ontology: Mol. function=transcription regulator activity; Cellular component=nucleus; Biological process=regulation of transcription
MRWLGLSVDVFRWGISLNLYCRISKLPHPVSGVAVKVXVVAWPKLXGERSGVLMVWKAAAQTRFRVFKHENGIAVRVIACFQPLQNCQAEIPRSSELSAGXFGGCLFMADKVNPWCHWPNPPWKFNTESSAGNIYPPDIGLVDSNSVALPTYLNTVAAPVPFFTASVADRPLPMAPRFVTKLAPSFEFSALYPSHKRSLVFYQENHTPIAAPLISKQTLDPVPELQGSNETNVTDVG

SEQ ID NO: 88564 - protein, 319 aa, Setaria italica
  misc_feature (37)..(37): Xaa can be any naturally occurring amino acid
  Transcript Sequence Number=SeqID_22590
  Gene Ontology: Mol. function=pseudouridine synthase activity; Biological process=pseudouridine synthesis
  Homolog annotation: Hit_ID=Q0J4D4; Match level="QueryCoverage=100%, HitCoverage=66%, E-value=1e-175, Identity=91%"; Hit description=RNA pseudourine synthase 3, mitochondrial
  Pfam annotation: Domain name=PseudoU_synth_2; Domain location=28-202; Score=77.5; E_value=4.9e-20; Accession=PF00849.14; Description=RNA pseudouridylate synthase
ETIPTATLHPNKDEIEYLRRLVIHRDSSILVLNKPPXKVPMKGHLPVHNSMDVLAAAALSYGNKEGPKLVHRLDRESSGLILMGRTKESFTRLHWLFTSVNLARTTSQTWNKACEAYVQKYWALVIGTPKEREGVISAPISKVLLDDGKAERVILAHPSGIDGAQEAITEYRVMGPTINGCSWIELRPLTGRKHQLRVHCAEALGTPIVGDYKYGWFVHQRWKQNPQPDFEPFTGEPYKIRRPEGLEVQKGSVLSKVPLLHLHCREMVLPNIAKFLSSTGEWHDGGAAWAKEKPNLLRFIAPMPPHMKISWNVMSSYLV

SEQ ID NO: 88565 - protein, 53 aa, Setaria italica
  Transcript Sequence Number=SeqID_22591
VWMSRKGQKEHYIKSIIPGKYKNKQNHQQTKLYITEHLSTAASSTVPLLSQDN

SEQ ID NO: 88566 - protein, 47 aa, Setaria italica
  Transcript Sequence Number=SeqID_22592
  Gene Ontology: Mol. function=RNA-directed RNA polymerase activity
  Homolog annotation: Hit_ID=Q7XM31; Match level="QueryCoverage=100%, HitCoverage=4%, E-value=2e-16, Identity=74%"; Hit description =Probable RNA-dependent RNA polymerase 2
WDGVRAEIIPAKRRVDLYLKHDSRSYKLEVLFEDIRECFGCSFDGTG

SEQ ID NO: 88567 - protein, 94 aa, Setaria italica
  Transcript Sequence Number=SeqID_22593
  Subcellular localization annotation: CTP_CleavageSite=57; ConfidenceScore=5.53e-01
NYNPDMCPQMHICVSPSRHILVTHFSAKSMHSTTGSNQNLPNQTTSRKPSLRNSSMHCSIISSKFPQQVQTKLNNDACTNSTNNCCRQHKTDKS

SEQ ID NO: 88568 - protein, 72 aa, Setaria italica
  Transcript Sequence Number=SeqID_22594
FEGPVAVAAVAPGEELQPGQIYFVLPAEMQRRRLTRDEVAKLAVKASSALVKAAAEAARRPAVLPCRRRRRG

SEQ ID NO: 88569 - protein, 65 aa, Setaria italica
  Transcript Sequence Number=SeqID_22595
  Gene Ontology: Mol. function=protein tyrosine phosphatase activity; Cellular component=cytoplasm; Biological process=dephosphorylation
  Homolog annotation: Hit_ID=B6TUQ6; Match level="QueryCoverage=95%, HitCoverage=28%, E-value=6e-30, Identity=96%"; Hit description =Tyrosine specific protein phosphatase family protein
  Pfam annotation: Domain name=Y_phosphatase2; Domain location=1-65; Score=-45.1; E_value=0.012; Accession=PF03162.5; Description =Tyrosine phosphatase family
PSIHCKRGKHRTGCVVGCLRKLQKWCLSSVFDEYLHFAAAKARSTDQRFMELFDASSLMHLTASQ

SEQ ID NO: 88570 - protein, 52 aa, Setaria italica
  Transcript Sequence Number=SeqID_22596
LKMTSFLDLITQHLHIKATPLHKPNTNRPLDTHNKIFNKHNSNLLVDNNNSL

SEQ ID NO: 88571 - protein, 84 aa, Setaria italica
  Transcript Sequence Number=SeqID_22597
MCSFGWCRDVALYSLAVGACSADAEDEKELQLVYQRNGQSSIKVLTEGYCGELVISFYSFNHISCILILVSTRVLRSVFNDRHI

SEQ ID NO: 88572 - protein, 198 aa, Setaria italica
  Transcript Sequence Number=SeqID_22598
  Subcellular localization annotation: CTP_CleavageSite=83; ConfidenceScore=5.76e-01
PAASWGRPAAAARVKPFSSKLSSVREDGQRSKQNAVPARPWPSSNARQGTAASRAKARSGSMSPRSRRQSASKATETAGGNTKATETRGRNAAIAVNKGDDELKPKGVVNHTGNAAVAKRPAGSSKVRIVPSRYSLTPGSSLAAGTQEKRCKQSLPGLAGGSSQRVEIRAKLTEPSTDELSPETIAKVAELLPRIRTM

SEQ ID NO: 88573 - protein, 86 aa, Setaria italica
  Transcript Sequence Number=SeqID_22599
  Gene Ontology: Mol. function=structural constituent of ribosome; Cellular component=ribonucleoprotein complex; Biological process =translation
  Homolog annotation: Hit_ID=B9FNL6; Match level="QueryCoverage=55%, HitCoverage=12%, E-value=2e-20, Identity=97%"; Hit description =Ribosomal protein L15
  Pfam annotation: Domain name=Ribosomal_L15e; Domain location=4-86; Score=13.1; E_value=2e-09; Accession=PF00827.9; Description =Ribosomal L15
GGGGGYGGGRLGFKAKQGYVVYRVRVRRGGRKRPVPKGIVYGKPKHQGITQLKFQRNKRSVAEERAGRKIGGLRVLNSYWVNEDST

SEQ ID NO: 88574 - protein, 470 aa, Setaria italica
  misc_feature (265)..(265): Xaa can be any naturally occurring amino acid
  Transcript Sequence Number=SeqID_22600
  Gene Ontology: Mol. function=binding; Cellular component=chloroplast
  Homolog annotation: Hit_ID=Q9SRY4; Match level="QueryCoverage=80%, HitCoverage=83%, E-value=1e-152, Identity=70%"; Hit description =F22D16.9 protein
  Pfam annotation: Domain name=TPR_1; Domain location=90-123; Score =35.1; E_value=2.8e-07; Accession=PF00515.20; Description =Tetratricopeptide repeat
  Pfam annotation: Domain name=TPR_2; Domain location=127-160; Score =13.0; E_value=0.81; Accession=PF07719.9; Description=Tetratricopeptid e repeat
  Pfam annotation: Domain name=TPR_2; Domain location=90-123; Score =33.4; E_value=9.4e-07; Accession=PF07719.9; Description =Tetratricopeptide repeat
  Pfam module annotation: Pfam domain module=TPR_1::TPR_2::TPR_2; Domain location=90-123::127-160::90-123
  Subcellular localization annotation: CTP_CleavageSite=81; ConfidenceScore=5.45e-01
EKRPPHLSFFPRQWRPPQQAWPQLSGPHITFLSGGSVPIPSTTLQILPSVSPLPFRRRGRIVLVSSASSSPSSPPSPEDAVAEAVPVPTAESCVNLGLELFSKGRVREALEQFENALELNPTPIEAQAALYNKACCHAYREESKKAAECLRTALRDYNLKFGTILNDPDLAPFRASPEFKELQEEALRGGEDIGSGFRRDLKLISEVQAPFRGVRRFFYVALTAAAGISTFFTIPRLILAVQGGDGAPDLLETAGNAAINIGVYXGIVVLVALYFWENKKEEKQITQISRNETLSRLPVRLSTNRIIELVQLRDITRPVILAGSKESVTRAMQRAERYRTELLKRGVLLIPVIFGASQKDQTRPRGFGTRRAAASIPSVGGDFEKRTESIAAKSRLKAEVRFKADIVSPEQWESWIRDQQESEGVTPGEDVYIILRLDGRVRRSGIGMPNWNDILQELPRLEDLMSKLER

SEQ ID NO: 88575 - protein, 204 aa, Setaria italica
  Transcript Sequence Number=SeqID_22601
  Gene Ontology: Mol. function=structural constituent of ribosome; Cellular component=ribonucleoprotein complex; Biological process =translation
  Homolog annotation: Hit_ID=B9FNL6; Match level="QueryCoverage=99%, HitCoverage=53%, E-value=2e-96, Identity=85%"; Hit description =Ribosomal protein L15
  Pfam annotation: Domain name=Ribosomal_L15e; Domain location=2-193; Score=468.4; E_value=1e-137; Accession=PF00827.9; Description =Ribosomal L15
MGAYKYVSELWRRKQSDVMRFVQRVRCWEYRQQPAIVRLTRPTRPDKARRLGFKAKQGYVVYRVRVRRGGRKRPVPKGIVYGKPKHQGITQLKFQRNKRSVAEERAGRKIGGLRVLNSYWVNEDSTYKYFEVILVDVAHTAIRNDPRINWLCKDVHKHRELRGLTSAGKKYRGLRGKGSAHHKNRPSRRATWKRNQTLSLRRYR

SEQ ID NO: 88576 - protein, 219 aa, Setaria italica
  Transcript Sequence Number=SeqID_22602
  Gene Ontology: Mol. function=structural constituent of ribosome; Cellular component=ribonucleoprotein complex; Biological process =translation
  Homolog annotation: Hit_ID=B9FNL6; Match level="QueryCoverage=92%, HitCoverage=53%, E-value=7e-95, Identity=84%"; Hit description =Ribosomal protein L15
  Pfam annotation: Domain name=Ribosomal_L15e; Domain location=17-208; Score=462.7; E_value=5.4e-136; Accession=PF00827.9; Description =Ribosomal L15
FGGRGRRSRTQPHPPWGRYKYVSELWRRKQSDVMRFVQRVRCWEYRQQPAIVRLTRPTRPDKARRLGFKAKQGYVVYRVRVRRGGRKRPVPKGIVYGKPKHQGVTQLKFQRNKRSVAEERAGRKIGGLRVLNSYWVNEDSTYKYFEIILVDVAHAAIRNDPRINWLCKDVHKHRELRGLTSAGKKYRGLRGKGSSHHKNRPSRRATWKRNQTLSLRRYR

SEQ ID NO: 88577 - protein, 88 aa, Setaria italica
  Transcript Sequence Number=SeqID_22603
NQEQSFKIAPPSSIEKQIDANTLKNHIVLPEAFCDGIGLRERCAITLKTLRNGSESWQVHSLPCKNNSYQLKKGKTSPSVRTTCCIQD

SEQ ID NO: 88578 - protein, 125 aa, Setaria italica
  Transcript Sequence Number=SeqID_22604
RQNIEEQQEAPSASIQKQQEAPSASIQKQYNNNLPSSNGEKEQQSLTASWNQTSFKIAPPSSIEKQIDANTLKNHIVLPEAFCDGIGLRERCAITLKTLRNGSESWQVHSLPCKNNSYQLKKEFS

SEQ ID NO: 88579 - protein, 294 aa, Setaria italica
  Transcript Sequence Number=SeqID_22605
  Homolog annotation: Hit_ID=Q10A52; Match level="QueryCoverage=99%, HitCoverage=79%, E-value=1e-113, Identity=66%"; Hit description=F -box domain containing protein, expressed
  Pfam annotation: Domain name=F-box; Domain location=1-47; Score=24.2; E_value=0.00053; Accession=PF00646.25; Description=F-box domain
MTLPDDVLIDIFLLLPPHPSCLLRASLVCKHWHSLILDNRFLHRFQALHGLPVLGVFTNSTRIPRFLPVGDPPNRVAAASFSLPDIHWHVLGCRHSHILLIGSTWNQLLVWNPINGHERLISAPPDVDPRFNYGHVPESNAAVVCAANHADHGYCHSCPFFVIWVFTTTRYAYATRYSSESRSWEMMASSPIPSDVDFRPSILVRNILYWPLKSKYILAFELVTHRLYHIECPPETHDIYRRNVHMMKIEDGGLGLAAVTKFNLRLWAWDTDVKGVTGWVLRRIIELDKFLPLE

SEQ ID NO: 88580 - protein, 139 aa, Setaria italica
  Transcript Sequence Number=SeqID_22606
  Homolog annotation: Hit_ID=Q10A51; Match level="QueryCoverage=89%, HitCoverage=49%, E-value=2e-42, Identity=66%"; Hit description=F-box domain containing protein, expressed
NNNNRRNVHMMKIEDGGLGLAAVTKFNLRLWAWDTDVKGVTGWVLRRIIELDKFLPLELPSLPSMDNRPCGRPPVRILGLVEDDDLVFIWTKTGVFTVQLKTMKHKKVFEADVSASVYPYTGFRIAGAVAHDGGNVAAE

SEQ ID NO: 88581 - protein, 74 aa, Setaria italica
  Transcript Sequence Number=SeqID_22607
  Gene Ontology: Mol. function=microtubule motor activity; Cellular component=microtubule associated complex; Biological process =microtubule-based movement
  Homolog annotation: Hit_ID=Q93XG2; Match level="QueryCoverage=100%, HitCoverage=9%, E-value=6e-35, Identity=94%"; Hit description =Kinesin heavy chain (Fragment)
LSLGGNARTAIICTMSPALTHVEQSRNTLFFATCAKEVTNTAKVNMVVSDKQLVKHLQTEVARLEAELRTPDRA

SEQ ID NO: 88582 - protein, 64 aa, Setaria italica
  Transcript Sequence Number=SeqID_22608
  Homolog annotation: Hit_ID=Q8RZ62; Match level="QueryCoverage=93%, HitCoverage=67%, E-value=2e-18, Identity=76%"; Hit description =B1065G12.33 protein
  Pfam annotation: Domain name=DUF971; Domain location=25-64; Score= -10.7; E_value=0.0017; Accession=PF06155.4; Description=Protein of unknown function (DUF971)
MAAAMGAVIRRMHAAAAAAHPPRLTKLALHPPKSVEVEFADGSSFHLSAEFLRVYSPAADSKIR

SEQ ID NO: 88583 - protein, 100 aa, Setaria italica
  Transcript Sequence Number=SeqID_22609
  Homolog annotation: Hit_ID=O65250; Match level="QueryCoverage=100%, HitCoverage=23%, E-value=4e-27, Identity=53%"; Hit description =F21E10.11 protein
  Pfam annotation: Domain name=PAE; Domain location=1-86; Score=-187.2; E_value=0.00037; Accession=PF03283.5; Description=Pectinacetylesterase
  Subcellular localization annotation: CTP_CleavageSite=24; ConfidenceScore=5.55e-01
KSNRSACNASQMNVLQGFRDQMVSSVQGFSRSRSNGLFISSCFAHCQSEQLGTWNIVPGGSPTIQNKGIAKSVGDWYYNRAEVRAIDCRYPCDKTCHHIM

SEQ ID NO: 88584 - protein, 138 aa, Setaria italica
  misc_feature (17)..(17): Xaa can be any naturally occurring amino acid
  Transcript Sequence Number=SeqID_22610
  Gene Ontology: Mol. function=DNA binding; Cellular component=chromatin
  Homolog annotation: Hit_ID=B6SJB5; Match level="QueryCoverage=81%, HitCoverage=35%, E-value=4e-42, Identity=76%"; Hit description=DNA binding protein
  Pfam annotation: Domain name=DUF296; Domain location=43-138; Score =98.8; E_value=1.9e-26; Accession=PF03479.7; Description=Domain of unknown function (DUF296)
GGCAGEEQAPQPMVMRXPRGRPAGSKNKPKPPVIITRDSASALRAHVLEVAAGCDVVDSVAGFSRRRQVGVCVLSGAGNVANVSIRQPGAGPGAAVNLAGRFEILSLCGSFLPPPAPPSATGLTVYLSGGQGQIVGGA

SEQ ID NO: 88585 - protein, 251 aa, Setaria italica
  misc_feature (12)..(12): Xaa can be any naturally occurring amino acid
  misc_feature (120)..(120): Xaa can be any naturally occurring amino acid
  Transcript Sequence Number=SeqID_22611
  Gene Ontology: Mol. function=binding
  Homolog annotation: Hit_ID=UPI0001739457; Match level="QueryCoverage =62%, HitCoverage=12%, E-value=6e-33, Identity=50%"; Hit description =binding
SPFLNVLLIIVXRLLESCMRNIRSASDGKYGCNQSNDHDDGGLANVEVGNSANMNECPKEIHGADHTEASVSIKQLKQLELKQLKELKQLKDLRSLCIKIVFSALSHYESHDFGENFWNXFFSSVKPLVDCFTQEASSSEKPSSLFACFMAMSRSPTLAPLLESNNLVPAIFSILTVKTASGSITSYALEFIENLLRLDIDLEQQDDNSVKKILVPHMDVLIHSLHDFVNHRKELNRLSGTWLGQRELCPN

SEQ ID NO: 88586 - protein, 140 aa, Setaria italica
  Transcript Sequence Number=SeqID_22612
  Gene Ontology: Mol. function=protein dimerization activity
  Homolog annotation: Hit_ID=Q5VMY6; Match level="QueryCoverage=88%, HitCoverage=33%, E-value=1e-26, Identity=48%"; Hit description =Putative o-methyltransferase
  Pfam annotation: Domain name=Methyltransf_2; Domain location=2-140; Score=-20.8; E_value=2.9e-07; Accession=PF00891.10; Description=O -methyltransferase
MIQQLSPGCSSILDPPLTKNDVAYNKVLNEACAADSNFAMDTILKDPGLASIFSGLSSLVDVGGGHGAAAVAIARAFPHIQCSVLDLEQVVSEAPADGTVQFISGDMFESVPPADGVLLKFVLHCWDDDSSVKILRQCKK

SEQ ID NO: 88587 - protein, 359 aa, Setaria italica
  Transcript Sequence Number=SeqID_22613
  Gene Ontology: Mol. function=protein binding; Cellular component =membrane; Biological process=vesicle-mediated transport
  Homolog annotation: Hit_ID=Q2HRK3; Match level="QueryCoverage=96%, HitCoverage=96%, E-value=4e-29, Identity=30%"; Hit description=T -snare
  Pfam annotation: Domain name=Syntaxin-6_N; Domain location=13-106; Score=140.6; E_value=4.8e-39; Accession=PF09177.3; Description =Syntaxin 6, N-terminal
MAAPGGLEQWQKDGFFPAAEEVQESADLMESIYRTWMRERSNGSSSEEVADLQRELQTALGTAKWQLEQFERAVSSSNDKYSLEEGTVARRRQFVVAIKDQISRVEKEINGSSVDSGRRGLNWVKLDDEERDDLVAFLSAPAEFYSEMKSTDSSYHIPSRQKNVPIGMNDQKDAALIIKDIHEVPPRQISSVKSDVCSLADQLHGHRTNLSSGDGHWKIDIGNEMDDDRKLSPNGVQASSQTTALSGIRRSTESLTRVRWFWNSLWKPKSDEHRPLRYDMPNNLDFRVISLLTQRLIGLTERSRSYLTSWKESSRISARTGGLHIQGQQQTIQFGRSIRITLLLVLSIFLIVPFLVSSA

SEQ ID NO: 88588 - protein, 68 aa, Setaria italica
  Transcript Sequence Number=SeqID_22614
RASGAYRLKQYHIVCCLTFCWGLPFDDLKQLMVTCWRCAIPSSSFIKLQQLHVNNASLIIYLCISFWL

SEQ ID NO: 88589 - protein, 117 aa, Setaria italica
  Transcript Sequence Number=SeqID_22615
  Gene Ontology: Mol. function=nucleoside-triphosphatase activity; Cellular component=integral to membrane; Biological process=transport
  Homolog annotation: Hit_ID=Q6ZIV9; Match level="QueryCoverage=81%, HitCoverage=10%, E-value=1e-46, Identity=88%"; Hit description =Putative ABC transporter
SQEREVVEQLLLEPIANQPIICDNLKKVYHGRDGNPDKVAVRGLSLALPKGQCFGMLGPNGAGKTSFISMMIGLIPPTSGTAYIHGMDIRSDMDAIYTNMGVCPQHVLTLGKLFSNG

SEQ ID NO: 88590 - protein, 79 aa, Setaria italica
  Transcript Sequence Number=SeqID_22616
  Gene Ontology: Mol. function=protein binding; Cellular component =nucleus; Biological process=regulation of transcription, DNA -dependent
  Homolog annotation: Hit_ID=B9S6I2; Match level="QueryCoverage=100%, HitCoverage=12%, E-value=1e-20, Identity=60%"; Hit description =Chitin-inducible gibberellin-responsive protein, putative
GPEEGAERTDRMAASREWQTLMECCGFEPVKLSNYAMSQADFLLWNYDAKYKYSLVELPPAFLSLAWEKRPLLTVSAWR

SEQ ID NO: 88591 - protein, 233 aa, Setaria italica
  Transcript Sequence Number=SeqID_22617
  Gene Ontology: Mol. function=DNA binding
KKANKSKNKRRRPGNDRHKSDCICAVCQVTRRKKERDEILAVVDNETAAMDSNTSDQHDMEGNSGANHPGSHDTSSSHEQPPRTDVYKETVEADDSGIRMEDVGKFSSDRPSSLPHPDYDDEGSRQHFEGKEQVEYRDMNSNGEHTSTQPNEYSDVENHQQKAQIETSQEVEMEEDYPMLQLNPAFQQLCASLFPSNPSSTFGVRHSLFRPRRRAPMKESPLHAAMAELMKRR

SEQ ID NO: 88592 - protein, 222 aa, Setaria italica
  Transcript Sequence Number=SeqID_22618
  Gene Ontology: Mol. function=protein dimerization activity; Cellular component=nucleus; Biological process=regulation of transcription, DNA-dependent
  Homolog annotation: Hit_ID=B6TV32; Match level="QueryCoverage=99%, HitCoverage=44%, E-value=1e-108, Identity=85%"; Hit description =Transcription factor TGA6
AQNIDANLGTIVEECMRHYDELFHLRAMLARSDVFHLMTGLWATTAERCFLWMGGFRPSEILKMLIPQLDPLTEQQLLGMCNLQRSSEQTEEALVQGLQQLHKSLADAVGASPLSDGANVANYTALMALALDRLDTLESFYRQADNLRQQTLHHMRRLLTTRQTARCFLSIGEYHRRLRALSSVWASRPLESFVAAAENVSPTGTAEQAIHHPYHQSQFSGF

SEQ ID NO: 88593 - protein, 245 aa, Setaria italica
  Transcript Sequence Number=SeqID_22619
  Gene Ontology: Cellular component=integral to membrane; Biological process=response to stress
  Homolog annotation: Hit_ID=B6TG06; Match level="QueryCoverage=100%, HitCoverage=85%, E-value=3e-34, Identity=87%"; Hit description=HVA22- like protein c
FFICWLVLPYFNGAAYVYQNYVRPAFIKNQMVNIWYVPQKKGLFGKSDDFLTALDKFVEENGTEALKKLANKAGKSFKQSGKSSKESKPAKELKESKPAKELKESKASKDSKEPKPSKDAKQSKSSKDSKELKPSKDSKSPKDSKEQKKAAPKDPKKASLKDSKELKKALKDSKEQESLKDPKEYTPKKRVTFAEVEPEKELKASNSDWHPSSDFHSMYPEQNSWTSSFMIFEDENSYWNRDPLD

SEQ ID NO: 88594 - protein, 95 aa, Setaria italica
  Transcript Sequence Number=SeqID_22620
  Gene Ontology: Mol. function=calcium ion binding; Cellular component =flagellin-based flagellum
  Homolog annotation: Hit_ID=Q8RYJ8; Match level="QueryCoverage=47%, HitCoverage=30%, E-value=2e-10, Identity=73%"; Hit description =Putative calcium-binding protein CML19
  Pfam annotation: Domain name=efhand; Domain location=14-42; Score =29.5; E_value=1.3e-05; Accession=PF00036.24; Description=EF hand
  Pfam annotation: Domain name=efhand; Domain location=51-79; Score =19.4; E_value=0.015; Accession=PF00036.24; Description=EF hand
  Pfam module annotation: Pfam domain module=efhand::efhand; Domain location=14-42::51-79
MVVASKSKSSSSSELGSLFAAFDKDADGRISAAELRLCMRATLGEDVSAEDAEALVASVDADGDGLLDGDEFARLVHAEVEEEERHRGLRLAFGM

SEQ ID NO: 88595 - protein, 65 aa, Setaria italica
  Transcript Sequence Number=SeqID_22621
YDQSFWTVHLSSDTRLKYEKLDKIERKQHGYCFVVELVQLYNKICRFLISVEGIIVFLAELLPNI

SEQ ID NO: 88596 - protein, 430 aa, Setaria italica
  Transcript Sequence Number=SeqID_22622
  Gene Ontology: Mol. function=sulfate adenylyltransferase (ATP) activity; Biological process=sulfate assimilation
  Homolog annotation: Hit_ID=B6SRJ5; Match level="QueryCoverage=100%, HitCoverage=90%, E-value=0.0, Identity=96%"; Hit description =Bifunctional 3-phosphoadenosine 5-phosphosulfate synthetase 2
  Pfam annotation: Domain name=ATP-sulfurylase; Domain location=91-417; Score=529.5; E_value=4.2e-156; Accession=PF01747.9; Description=ATP -sulfurylase
PHSPSPGHHRSRRAMSVRSSLIDPDGGALVELVAPPDRLPALRAEAETLPRVRLAPVDLQWAHVLAEGWASPLRGFMREAEYLQSLHFNCIRLPDGGLVNMSLPIVLAIGDADKEQIGDKPDVALEGPDGGVVAILRRVEIYPHNKEERIARTWGTTAPGLPYVDEAIASAGNWLIGGDLEVLEPIKYNDGLDHYRLSPRQLRNEFDKRGADAVFAFQLRNPVHNGHALLMNDTRRRLLEMGYKNPILLLHPLGGFTKADDVPLPVRMEQHSKVLEDGVLDPETTIVSIFPSPMHYAGPTEVQWHAKARINAGANFYIVGRDPAGMGHPTEKRDLYNPDHGKKVLSMAPGLEKLNILPFKVAAYDTVAKKMAFFDPSRSQDFLFISGTKMRNFAKTGENPPDGFMCPGGWKVLVDYYNSLQAEEATPVPV

SEQ ID NO: 88597 - protein, 47 aa, Setaria italica
  Transcript Sequence Number=SeqID_22623
  Gene Ontology: Mol. function=structural molecule activity; Cellular component=membrane coat
  Homolog annotation: Hit_ID=Q6Z844; Match level="QueryCoverage=100%, HitCoverage=25%, E-value=7e-15, Identity=80%"; Hit description =Coatomer subunit zeta-2
LKTNARAEDEITLFDGYIVVYKFVHDLHVFVTTGDDENELVLASVLH

SEQ ID NO: 88598 - protein, 94 aa, Setaria italica
  Transcript Sequence Number=SeqID_22624
  Subcellular localization annotation: CTP_CleavageSite=66; ConfidenceScore=5.58e-01
RGGGALGFTPFWRNTSAAPPTPSPVATRGSSNPACDASSLHVWIPLRCCACSTWTSHRRAADEPRRADNEPTTSRGTGGDLAVHVDELLRSCWT

SEQ ID NO: 88599 - protein, 224 aa, Setaria italica
  misc_feature (206)..(206): Xaa can be any naturally occurring amino acid
  Transcript Sequence Number=SeqID_22625
  Homolog annotation: Hit_ID=B6SXX8; Match level="QueryCoverage=100%, HitCoverage=91%, E-value=4e-73, Identity=67%"; Hit description=MtN19- like protein
  Pfam annotation: Domain name=SURNod19; Domain location=1-200; Score =44.6; E_value=8.3e-15; Accession=PF07712.4; Description=Stress up -regulated Nod 19
IADDYAGGLLCCYDQTRCRVEEGFVDGEARKLFFRYTVMWLDWSDAVVPVKIYIFDATHRPLPVGCKVEYEVEECSPERRAKNDCVHVQVAKQVVPRGGDLVFGVAHQHAAGIGSSLHGQDGRLLCESIPTYGDGEEAGNEAGYIVGMSTCYHPAPGAVTVRDGETLTVVSNYSSERRHTGVMGLFYILVAEHQRPAPDTKPSLLXCFSFPVSWCLPSWLWSNL

SEQ ID NO: 88600 - protein, 207 aa, Setaria italica
  misc_feature (183)..(183): Xaa can be any naturally occurring amino acid
  Transcript Sequence Number=SeqID_22626
RRLRNADRAARNSDRRNNVVSWISEIKDTSSVAVRKKRGRRAPPSAKRLRDKKVDTEIDSDDAVDNEIGDTDEGQVGKSQSVVHNEENLDGSDGLQKIGQSGNSSGGPSSASEEQDHSTNSKDILQKGSSGTTKKVSACSPRSKQVASHLDQEGADEDDSHAQAAVAKKGVDDKRGSHEIKDXVSDAQVNTTSSDDKSSEEVEDVKV

SEQ ID NO: 88601 - protein, 153 aa, Setaria italica
  Transcript Sequence Number=SeqID_22627
  Gene Ontology: Cellular component=integral to membrane
  Homolog annotation: Hit_ID=B6T959; Match level="QueryCoverage=95%, HitCoverage=78%, E-value=5e-48, Identity=61%"; Hit description =UPF0497 membrane protein 2
  Pfam annotation: Domain name=DUF588; Domain location=24-153; Score =140.9; E_value=4.1e-39; Accession=PF04535.4; Description=Domain of unknown function (DUF588)
MTKDVVVEHGESSKAPLVAAAGVGRAVSFADIFLRFLAIIGTIGSAISMGTTNETLPFFTQFIQFEAKYSDLPSFTFFVAANAVVCTYLVLSIPLSIVHIIRPRARYSRLILIFLDASMLTLLTAGASAAAAIVYLAHKGNVRANWFSICQQF

SEQ ID NO: 88602 - protein, 183 aa, Setaria italica
  Transcript Sequence Number=SeqID_22628
  Gene Ontology: Cellular component=plasma membrane
  Homolog annotation: Hit_ID=B9T190; Match level="QueryCoverage=90%, HitCoverage=41%, E-value=3e-50, Identity=56%"; Hit description =Dopamine beta-monooxygenase, putative
NALSWGLLLPVGAAVARYLRPCAYAGPAWFYAHAAMQATGYTLGAAGFALGLVMGSASPGVTYKLHRGLGIAAATAGSLQTLAMFFRPKTTNRYRKYWKSYHHLVGYGCVVVGVVNVFQGFEVMGLGASYWKLGYCLALATLMGACVALEVNAWVLFCRRQQEEKLMRREVEDVVVKDRAAAF

SEQ ID NO: 88603 - protein, 181 aa, Setaria italica
  Transcript Sequence Number=SeqID_22629
  Gene Ontology: Biological process=nitrogen fixation
  Homolog annotation: Hit_ID=Q9M2C3; Match level="QueryCoverage=98%, HitCoverage=88%, E-value=3e-39, Identity=50%"; Hit description =Nodulin-like protein
  Pfam annotation: Domain name=DUF125; Domain location=3-169; Score =201.5; E_value=2.3e-57; Accession=PF01988.11; Description=Integral membrane protein DUF125
  Subcellular localization annotation: CTP_CleavageSite=48; ConfidenceScore=5.12e-01
AQWLRAAVLGANDGLVSVASLMIGVGAVNASRKAMLVSGMAGLVAGACSMAIGEFVSVYAQYDIEVSQLKRDGTDGDEDARDGLPSPTQAALASALAFAFGAILPLLSGGFVALWWARLIAVAAASTVGLAAFGAAGAYLGGSSMVKSGLRVLLGGWFAMLVSFGVLRLFGAAFHMDVSSV

SEQ ID NO: 88604 - protein, 192 aa, Setaria italica
  misc_feature (40)..(40): Xaa can be any naturally occurring amino acid
  Transcript Sequence Number=SeqID_22630
  Gene Ontology: Mol. function=structural constituent of cell wall
  Homolog annotation: Hit_ID=B6UHM8; Match level="QueryCoverage=68%, HitCoverage=65%, E-value=6e-62, Identity=86%"; Hit description =Pistil-specific extensin-like protein
  Pfam annotation: Domain name=Pollen_Ole_e_I; Domain location=59-191; Score=3.4; E_value=3.4e-05; Accession=PF01190.9; Description=Pollen proteins Ole e I family
MASLKIHGAVAVVAVIFLAAVVPSASTTVDEPATYKPTAXPPPPPSYPSPPPVQPVIVVHGVIYCKSCKLRGYNSGMDASPLPNATASLVCYGEEESKYRVLNQTSTASDKNGYFIVMVYDVDMFDRHTCRLYLRSSPTALCAKPFMPSNPKLGLNLVRDRAATAPRGARSVWHVKTALMYAPSAGGKCPPY

SEQ ID NO: 88605 - protein, 123 aa, Setaria italica
  Transcript Sequence Number=SeqID_22631
GFLSAMASKISATMSGTNGSGGEANAAAASDGEALKRDGSGEPGDEDGFLSAMASKIGAAMSGADGGGESNGGGNAAGAADDEGREKDEGNGGGGIFHKLLSSSPPASSSASGTLEAEAAKGE

SEQ ID NO: 88606 - protein, 260 aa, Setaria italica
  misc_feature (31)..(31): Xaa can be any naturally occurring amino acid
  Transcript Sequence Number=SeqID_22632
  Gene Ontology: Mol. function=oxidoreductase activity; Biological process=oxidation reduction
  Homolog annotation: Hit_ID=B6TUM2; Match level="QueryCoverage=95%, HitCoverage=70%, E-value=1e-96, Identity=79%"; Hit description=Sex determination protein tasselseed-2
  Pfam annotation: Domain name=KR; Domain location=26-215; Score=-71.6; E_value=0.0069; Accession=PF08659.2; Description=KR domain
  Pfam annotation: Domain name=adh_short; Domain location=25-194; Score= 79.7; E_value=1e-20; Accession=PF00106.17; Description=short chain dehydrogenase
  Pfam module annotation: Pfam domain module=KR::adh_short; Domain location=26-215::25-194
PAEAAAMATSSSDQVPAAARKLEGKVAVITXGGASGIGECTARLFVKHGARVVVADIQDELGGRLCAELGATAASYVHCDVTAEADVAAAVDHAVARFGRLDIMFNNAGIGGAACHSIRESTKEDFERVLSVNLVGPFLGTKHAARVMVPAGRGGCIIGTSSLASAVAGAASHAYTCAKRALVGLTENAAAELGRHGIRVNCVSPAAAATPLATGYVGLEGEAFEEAMEAVANLKGVRLRVADIATAVLFLASDDARYIS

SEQ ID NO: 88607 - protein, 35 aa, Setaria italica
  Transcript Sequence Number=SeqID_22633
NLLHCIEICQVKSRLKCCPNASMNPMKVATYSVRL

SEQ ID NO: 88608 - protein, 125 aa, Setaria italica
  Transcript Sequence Number=SeqID_22634
  Subcellular localization annotation: CTP_CleavageSite=73; ConfidenceScore=5.26e-01
HVRHCFSEHLSIIYFFCSNYLNKTKRSVIRQMLVSCQNKAAAKNGFSRHSRMVLHQSTNTTTASLLQCFRDLSAPAEKPYVFTERTCPPHCSAVSSAKQGCSTCAPFRRRLEGAASHHQQQRTKQ

SEQ ID NO: 88609 - protein, 86 aa, Setaria italica
  Transcript Sequence Number=SeqID_22635
MASMKLLSLTCILLLSGLVVFGEIGGVAAAAEPCPVVCIQGGYITCDNYPYQKLDGCDCECAPKDGINCVLHHLVTGDTFKCPAQA

SEQ ID NO: 88610 - protein, 531 aa, Setaria italica
  misc_feature (190)..(190): Xaa can be any naturally occurring amino acid
  Transcript Sequence Number=SeqID_22636
  Gene Ontology: Mol. function=sequence-specific DNA binding; Cellular component=nucleus; Biological process=regulation of transcription, DNA-dependent
  Homolog annotation: Hit_ID=UPI0001A7B219; Match level="QueryCoverage =86%, HitCoverage=44%, E-value=2e-77, Identity=38%"; Hit description =sequence-specific DNA binding / transcription factor
  Pfam annotation: Domain name=DDT; Domain location=290-349; Score =32.1; E_value=2.3e-06; Accession=PF02791.9; Description=DDT domain
ETSSSSSSCNEAPMYGISCSRPEFDSSTSVVGEENTVQSQVLFPKDYILRKIFRKDGPPLGSEFDPLPKSERDRIRDTTCHHSSQNQRAVKKRKIIESTSQRSSVPYEDTVPVRKHGIGKGLMTVWHAMYSQSHNVECQSGPNFIDETGCLRSLRPFDDRDGLEDNGKTTQNQSMAQKKVDKRSKPPLNXRKVPCKRVTGPKEHPPMDCHLSINKSESSELLTEQVTLVDDEELELSELQAGPNPLRCSAHLSSSGRHGCPLCKDLLAKFPPQSVKMKQPFSAKPWDSSPEMVKKLFQVIRFVYTHFGTIDVHPFTFDEFAQAFHDKDSLLLGEVHIGLLKLLLLNAEMGSDGVFVPRSSKDCRFLSFLNFVREQEFDVNFWIRSLNSLTWVEILRQVLVASGFGSKQHMLNLNLFNKEKNQMVKYGLRPRTLKGELFALLSKAGSGGLKVSVLAKSSEIVDLNVSGTLELEQLIYLTLSSDITLFEKIAPSAYRLRVDPQIKGKEDARSDSEDSGSVDDDEDASSSDDES

SEQ ID NO: 88611 - protein, 100 aa, Setaria italica
  Transcript Sequence Number=SeqID_22637
  Subcellular localization annotation: CTP_CleavageSite=49; ConfidenceScore=5.31e-01
MEGDLGWFCGSGSNNWDLHAVVRFACSGSGRVTPPSASNDTFSWLNTPSASEESSSGLPPLQPQTDQIMDAAASQPLLADLAVDDLCLQAFFASPKPETP

SEQ ID NO: 88612 - protein, 78 aa, Setaria italica
  Transcript Sequence Number=SeqID_22638
  Gene Ontology: Mol. function=ubiquitin-protein ligase activity; Cellular component=ubiquitin ligase complex; Biological process =ubiquitin-dependent protein catabolic process
  Homolog annotation: Hit_ID=B9R8Q6; Match level="QueryCoverage=98%, HitCoverage=9%, E-value=9e-11, Identity=49%"; Hit description =Ubiquitin-protein ligase, putative
LRNVIDEWRARNQDKELDKACASLTQLDMPSEDDALRALLYISQVCHRSGANKNLVRRQGIIPAIAAMLKSSSRRVRL

SEQ ID NO: 88613 - protein, 342 aa, Setaria italica
  Transcript Sequence Number=SeqID_22639
  Gene Ontology: Mol. function=structural constituent of ribosome; Cellular component=ribonucleoprotein complex; Biological process =translation
  Homolog annotation: Hit_ID=Q7XAN0; Match level="QueryCoverage=88%, HitCoverage=89%, E-value=1e-112, Identity=72%"; Hit description =Putative 30S ribosomal protein S9
  Pfam annotation: Domain name=Ribosomal_S9; Domain location=222-342; Score=156.4; E_value=8.5e-44; Accession=PF00380.11; Description =Ribosomal protein S9S16
VRLRGVSGDPDPFPHEEAAADAGEALPVGPAAVADEPWAKGFGVEDGDSGDVFEGIYKEAASAAPASGEAAPAGDEEQWTLSGDEKDPFADAVLGEGIDGIQGEGGGLDELDAGEDPEAELKRQKNMEREKELMEILKGPNRAFGDAIASSGITEGMIDSLILLKDVRDVPGMPPLTEIEDEAIEKLSATSSRAEVERQKQEEIAKARVRQVDEKGRAYGTGKRKCSIARVWIEPGDGKFIVNEKEFDAYFPILDHRADLLRPFTVTKTLGLWDVTCTVKGGGVSGQVGAIRLGISRALQNWEPGLRPYLKAAGYLTRDSRVVERKKPGKAKARKSFQWVKR

SEQ ID NO: 88614 - protein, 117 aa, Setaria italica
  Transcript Sequence Number=SeqID_22640
  Gene Ontology: Cellular component=plasma membrane
  Homolog annotation: Hit_ID=B2ZAS0; Match level="QueryCoverage=99%, HitCoverage=25%, E-value=1e-19, Identity=48%"; Hit description=UNE1 -like protein
GRGSHDRRRFFDEFAELKSAPAAEFLGEGNPRWGALREFLRDRYLSVVHERMEAAFFGGRAEQRAAVRKGGAFPRTAWFAEFAEMARRVWLLHCLFWSFDGAASVFQARPGERFSEV

SEQ ID NO: 88615 - protein, 93 aa, Setaria italica
  Transcript Sequence Number=SeqID_22641
  Gene Ontology: Mol. function=metalloendopeptidase activity; Cellular component=chloroplast; Biological process=proteolysis
  Homolog annotation: Hit_ID=B9R9Q2; Match level="QueryCoverage=100%, HitCoverage=12%, E-value=3e-31, Identity=60%"; Hit description =Mitochondrial intermediate peptidase, putative
HSHTRFTHLINYGAGYYSYLYARCFATTIWQEICQEDPLSRSAGSAIREKFLQHGGSKDPSSLLKDFAGDAIIRNSGAGIIPDISSLCKEIGL

SEQ ID NO: 88616 - protein, 93 aa, Setaria italica
  Transcript Sequence Number=SeqID_22642
AGGVGVLALGSLGRRPFNLSSSRPAHLGMEKHPQTAPSTNKGVASLLPWCHYSVDPTPANRHGIEKNWFRPFSFTRIFNMFLKRWEGKTVGKR

SEQ ID NO: 88617 - protein, 119 aa, Setaria italica
  Transcript Sequence Number=SeqID_22643
LSSCLCSSSVYVSILCLGAYCVGQCLGEVDAGDVRLAPDTFLAFVSGFFHWMVVWYSLSCTWFYFGVHRFISNRFMVAIFLPQYLNVIISKKISECHFQQHITNNHRIVDCSSLFNLLS

SEQ ID NO: 88618 - protein, 92 aa, Setaria italica
  Transcript Sequence Number=SeqID_22644
  Subcellular localization annotation: CTP_CleavageSite=46; ConfidenceScore=5.08e-01
RPSQASSVPPSIFLSAEQCDQSALPSSGLLLCSDKPVEVLRRAKPRSDARRSPLSTIRRHLQHLRVEISYPRILLITGFYSERSRQIAGLSA

SEQ ID NO: 88619 - protein, 75 aa, Setaria italica
  Transcript Sequence Number=SeqID_22645
IHSFVSSYFYPNLSHHIEAAKQMQFVTQFAVSTFFDKTETNITLSQSLSLLKIISVLGSGNNTHHIQSISLANNS

SEQ ID NO: 88620 - protein, 103 aa, Setaria italica
  misc_feature (11)..(11): Xaa can be any naturally occurring amino acid
  misc_feature (15)..(15): Xaa can be any naturally occurring amino acid
  Transcript Sequence Number=SeqID_22646
  Gene Ontology: Mol. function=DNA-directed RNA polymerase activity; Cellular component=nucleus; Biological process=transcription
  Homolog annotation: Hit_ID=Q84R88; Match level="QueryCoverage=100%, HitCoverage=8%, E-value=4e-48, Identity=88%"; Hit description=DNA -directed RNA polymerase
YMDEKVTYPGXGNQXEGRSKSILRDVFIAHVPVKNGNFRQKCIYTGVMLRRMMDAILNANTFDDKDYVGNKRLELSGQLISLLFEDLFKTMNSQAVELMNKNS

SEQ ID NO: 88621 - protein, 73 aa, Setaria italica
  Transcript Sequence Number=SeqID_22647
  Homolog annotation: Hit_ID=B6TTZ5; Match level="QueryCoverage=93%, HitCoverage=21%, E-value=3e-16, Identity=72%"; Hit description =WRKY69-superfamily of TFs having WRKY and zinc finger domains
MADGGECGARAQLVSELCRVQDLVRRLELLLHAPADAASVDLCHRLVHEIVALTDRSIGMARSPDLAAHFLLP

SEQ ID NO: 88622 - protein, 80 aa, Setaria italica
  misc_feature (58)..(58): Xaa can be any naturally occurring amino acid
  Transcript Sequence Number=SeqID_22648
  Gene Ontology: Mol. function=protein kinase activity; Biological process=protein amino acid phosphorylation
  Homolog annotation: Hit_ID=B6TZ93; Match level="QueryCoverage=100%, HitCoverage=14%, E-value=2e-14, Identity=57%"; Hit description=ATP binding protein
  Subcellular localization annotation: CTP_CleavageSite=47; ConfidenceScore=5.10e-01
MGCCGSSLRTGTHPEKKPPGRATEPLPPHRPSLSLNQHQSTASSAARAGAAGREVPAXKEFSLAELRAATGGFVAENIVS

SEQ ID NO: 88623 - protein, 139 aa, Setaria italica
  misc_feature (47)..(47): Xaa can be any naturally occurring amino acid
  Transcript Sequence Number=SeqID_22649
SHKDAAGRRTRPPSRNALSAVFQREDEGLRAEQKASSWADQGDLRKXWDREPESQAIIHESYGALLEATDATQREPKNADSVHQKETHSGCLPAMSDDVHFMEALKVENCETPRSHQSSTVPDAMSSSKTNDELQSSST

SEQ ID NO: 88624 - protein, 91 aa, Setaria italica
  Transcript Sequence Number=SeqID_22650
  Gene Ontology: Mol. function=catalytic activity; Biological process =metabolic process
  Homolog annotation: Hit_ID=Q2QY22; Match level="QueryCoverage=91%, HitCoverage=33%, E-value=4e-25, Identity=71%"; Hit description =Phosphoglycerate mutase family protein
  Pfam annotation: Domain name=PGAM; Domain location=13-90; Score=22.3; E_value=1.3e-05; Accession=PF00300.14; Description=Phosphoglycerate mutase family
MAPASPHGEHFAEVVLVRHGQTDWNVSRIIQGRIDQELNETGRQQAAKVARRLSEEAKPAAVYSSDLKRASETAQTIAAHCCVSDSDLVID

SEQ ID NO: 88625 - protein, 43 aa, Setaria italica
  Transcript Sequence Number=SeqID_22651
MAASHLAVLSVLALLAVSATAQAPSGAPAAAPKAAPPTPATPP

SEQ ID NO: 88626 - protein, 163 aa, Setaria italica
  Transcript Sequence Number=SeqID_22652
  Gene Ontology: Mol. function=electron carrier activity; Biological process=response to oxidative stress
  Homolog annotation: Hit_ID=Q9FEQ8; Match level="QueryCoverage=98%, HitCoverage=47%, E-value=4e-60, Identity=66%"; Hit description =Peroxidase 2
  Pfam annotation: Domain name=peroxidase; Domain location=1-127; Score= 6.8; E_value=2e-10; Accession=PF00141.15; Description=Peroxidase
LNNLPPPVFNVAQLVGSFAGKGLNAEDMVVLSGAHTIGRSHCSSFVPDRLAVPSDINAGFANFLRGQCPANPTPANDPTVNQDIVTPNGLDNQYYKNVLAHKVLFTSDATLLTTPATAKMVQDSANIPGWWEGKFKKAFVEMSKIEVKTGKQGEIRKQCRVVN

SEQ ID NO: 88627 - protein, 240 aa, Setaria italica
  misc_feature (85)..(85): Xaa can be any naturally occurring amino acid
  misc_feature (211)..(211): Xaa can be any naturally occurring amino acid
  misc_feature (224)..(224): Xaa can be any naturally occurring amino acid
  misc_feature (230)..(230): Xaa can be any naturally occurring amino acid
  Transcript Sequence Number=SeqID_22653
  Gene Ontology: Mol. function=hydrolase activity, acting on acid anhydrides, in phosphorus-containing anhydrides; Cellular component =TRAMP complex; Biological process=positive regulation of cell division
  Homolog annotation: Hit_ID=B9SPB9; Match level="QueryCoverage=93%, HitCoverage=22%, E-value=1e-120, Identity=91%"; Hit description =Helicase, putative
  Pfam annotation: Domain name=DEAD; Domain location=27-179; Score =104.3; E_value=4.2e-28; Accession=PF00270.21; Description=DEADDEAH box helicase
  Pfam annotation: Domain name=ResIII; Domain location=23-175; Score= -34.8; E_value=0.044; Accession=PF04851.7; Description=Type III restriction enzyme, res subunit
  Pfam module annotation: Pfam domain module=DEAD::ResIII; Domain location=27-179::23-175
TSASASRLLAGGAEGSEPAKKFPFQLDPFQAEAIRCLDNGESVMVSAHTSAGKTVVALYAIAMSLRNQQRVIYTSPIKALSNQKXYREFKEEFSDVGLMTGDVTIEPNASCLVMTTEIWRSMQYKGSEVMREVAWVIFDEVHYMRDRERGVVWEESIVMAPKNSRFVFLSATVPNAKEFADWVAKVHKQPCHIVYTDYRPTPLQHYVFPSXGGDGLYLVVDEEXKFREDXSFQKALNALV

SEQ ID NO: 88628 - protein, 65 aa, Setaria italica
  Transcript Sequence Number=SeqID_22654
  Gene Ontology: Mol. function=pyridoxal phosphate binding; Cellular component=mitochondrion; Biological process=metabolic process
  Homolog annotation: Hit_ID=O49543; Match level="QueryCoverage=100%, HitCoverage=14%, E-value=8e-26, Identity=80%"; Hit description =Cysteine desulfurase 1, mitochondrial
RALGVEEDMAHTSIRFGIGRFTTEEEVDRAIELTVRQVKKLRDMSPLYEMAKAGIDLKSIEWSQH

SEQ ID NO: 88629 - protein, 103 aa, Setaria italica
  Transcript Sequence Number=SeqID_22655
  Gene Ontology: Mol. function=oxidoreductase activity; Cellular component=membrane; Biological process=oxidation reduction
  Homolog annotation: Hit_ID=Q7XC87; Match level="QueryCoverage=100%, HitCoverage=25%, E-value=1e-26, Identity=59%"; Hit description =Oxidoreductase, 2OG-Fe oxygenase family protein
MAHANAGGHLEVPNVQVLAQTWNGSGEQVPPRYVRTDEADAVVAAGHALPVVDLGRLLDPRSSEEELANLGSACQQGFFQLINHGVPDDVIRDVKRDIAEFFK

SEQ ID NO: 88630 - protein, 452 aa, Setaria italica
  misc_feature (13)..(13): Xaa can be any naturally occurring amino acid
  Transcript Sequence Number=SeqID_22656
  Gene Ontology: Mol. function=protein transporter activity; Cellular component=nuclear pore; Biological process=protein import into nucleus, docking
  Homolog annotation: Hit_ID=Q53QC6; Match level="QueryCoverage=91%, HitCoverage=39%, E-value=1e-174, Identity=73%"; Hit description =Importin-beta N-terminal domain containing protein, expressed
ITCYPVYASASGXIAELIENSYAPPDWLVLLQTVVKRISTGDENESALLFKLLGTIVEGGQEKIMPHIPEIVSNIANTIMKLLPPVPEPWPQVVEQGFASLVAMAQAWESSAPDENKKHEKRVWQSGQSAIAQTFSLLLQKAWLLPVQENSCSALPPPSCVNDASVLLEFVMRSVTCMEETASMKVFELVVVWADTIANWDSWEEMEDQEVFNTIKEAVNFHQRFDLTGFFLKMLPSQSENGSQSSIIGRVSNFVTRAIAAYPSATWRACSCIHTLLHAPNFSLGTEDARKTVAVSFAQAAFSHFKSISDSPAGIWKPLLLAISSCYICYPDVIEQVLNNYDGNGYAIWASALAQVSSSSFSPGLSSESEIKLALLTLSTVIERLLVLSMGGTKLLQDCYVSLMESCIQLKEVQEDGDNDDDDDGAEDLDDEEEEEDTDDDDEDSEDDDVRE

SEQ ID NO: 88631 - protein, 129 aa, Setaria italica
  misc_feature (107)..(107): Xaa can be any naturally occurring amino acid
  Transcript Sequence Number=SeqID_22657
  Gene Ontology: Mol. function=DNA binding
  Homolog annotation: Hit_ID=UPI000034EF88; Match level="QueryCoverage =86%, HitCoverage=5%, E-value=1e-16, Identity=47%"; Hit description =DNA binding
RAGNACLCFSSMVNAEPCSMGGIIDYGVGVGTKLSPRSLSIEKAQEELRQEFDVREERRRELEFLEKGGNPLDFKFVHVETVSVHSASLTKSKQKAQKCDKVTLKGXFPASPYGDSVESTGKTRKFTVP

SEQ ID NO: 88632 - protein, 126 aa, Setaria italica
  misc_feature (117)..(117): Xaa can be any naturally occurring amino acid
  Transcript Sequence Number=SeqID_22658
  Gene Ontology: Mol. function=protein serine/threonine kinase activity; Cellular component=plasma membrane; Biological process =protein amino acid phosphorylation
  Homolog annotation: Hit_ID=C5DB54; Match level="QueryCoverage=73%, HitCoverage=21%, E-value=2e-45, Identity=93%"; Hit description=ATP binding / kinase/ protein kinase/ protein serine/threonine kinase/ protein-tyrosine kinase
VLNQLILSSSFSVLCILSIGNTYVDISFLFPLPQDYTAKLSDFGLAKAGPEGDETHVSTRVMGTYGYAAPEYVMTGHLTARSDVYSFGVVLLELLTGRKSIDKSRPSREQSLVDWAXPKLNDKRRL

SEQ ID NO: 88633 - protein, 51 aa, Setaria italica
  Transcript Sequence Number=SeqID_22659
  Gene Ontology: Mol. function=protein serine/threonine kinase activity; Cellular component=chloroplast; Biological process=protein amino acid phosphorylation
  Homolog annotation: Hit_ID=Q9LFD4; Match level="QueryCoverage=72%, HitCoverage=9%, E-value=3e-14, Identity=91%"; Hit description =Protein kinase-like protein
LVKLIGYCCEDDHRLLVYEFMFRGSLENHLFRSKPSTHVCQIVNDIITEFL

SEQ ID NO: 88634 - protein, 410 aa, Setaria italica
  Transcript Sequence Number=SeqID_22660
  Gene Ontology: Mol. function=protein serine/threonine kinase activity; Cellular component=plasma membrane; Biological process =protein amino acid phosphorylation
  Homolog annotation: Hit_ID=C5DB54; Match level="QueryCoverage=100%, HitCoverage=100%, E-value=1e-166, Identity=70%"; Hit description=ATP binding / kinase/ protein kinase/ protein serine/threonine kinase/ protein-tyrosine kinase
  Pfam annotation: Domain name=Pkinase; Domain location=81-358; Score =159.9; E_value=7.4e-45; Accession=PF00069.17; Description=Protein kinase domain
  Pfam annotation: Domain name=Pkinase_Tyr; Domain location=81-358; Score=111.8; E_value=2.3e-30; Accession=PF07714.9; Description =Protein tyrosine kinase
  Pfam module annotation: Pfam domain module=Pkinase::Pkinase_Tyr; Domain location=81-358::81-358
MGNCGTREENAVVAAHAQVQQLHLLQHPAKNAIADRKHTRTSSDLSDPSTPRKIEDAKNISIYNDVIAFTLFELETITKSFRADYVLGEGGFGTVYKGYIDENVRVGLKSLPVAVKVLNKDGHQGHREWLTEVNFLGQLRHPNLVKLIGYCCEDDHRLLVYEFMFRGSLENHLFRKTAMPLPWGTRMSIALGAAKGLACLHNAQRPVIYRDFKTSNILLDSDYTAKLSDFGLAKAGPEGDETHVSTRVMGTYGYAAPEYVMTGHLTARSDVYSFGVVLLELLTGRKSIDKSRPSREQSLVDWALPKLNDKRRLLQIIDPKLEGQYSVRAAHKACSLAFYCLSHNPKARPLMSDVVETLEPLQGSGGSDGSGQSSGLPDYRVRRRLTGNSVHFRAIPNPKCSPVVPACRVR

SEQ ID NO: 88635 - protein, 126 aa, Setaria italica
  Transcript Sequence Number=SeqID_22661
  Subcellular localization annotation: CTP_CleavageSite=75; ConfidenceScore=5.58e-01
ARWSLPNPYPHRACSISPNHHRALPLPTSRNLLPPPNLAPPPSFAASSALAAPIFSTFLFPRPRSLSLLHRRSLCCKNKASFPLCIRSSSSTAWNWGSIPSLDSIFGWCSTVWGSIEKTNKAFLNA

SEQ ID NO: 88636 - protein, 102 aa, Setaria italica
  Transcript Sequence Number=SeqID_22662
  Subcellular localization annotation: CTP_CleavageSite=84; ConfidenceScore=5.60e-01
MEFVDPCDSQSRARVVHSGANSTSSPSSSTTARASPSLPHAASCAATAVALLAAAFYLPPAYQIFSSLLVWVASSLLLAPFAPSSATGGDISVGRGRLPSRP

SEQ ID NO: 88637 - protein, 69 aa, Setaria italica
  Transcript Sequence Number=SeqID_22663
  Subcellular localization annotation: CTP_CleavageSite=49; ConfidenceScore=5.17e-01
TSAPAGQGVRALGFPWHVNTSSSRRLLGCRRAPPLHRELHRSFHWASLRENTAGKWHQTLAVHTQTGRK

SEQ ID NO: 88638 - protein, 88 aa, Setaria italica
  misc_feature (28)..(28): Xaa can be any naturally occurring amino acid
  misc_feature (38)..(38): Xaa can be any naturally occurring amino acid
  Transcript Sequence Number=SeqID_22664
IRSSRRKKHRNVGSYKVKKRSCKVKKIXPVRREQLQRXEDMKKDEDGGLDEKLNQDNTELVLDMNHLNQCSGRPRCTRSWVSMACEHL

SEQ ID NO: 88639 - protein, 193 aa, Setaria italica
  misc_feature (12)..(12): Xaa can be any naturally occurring amino acid
  misc_feature (30)..(30): Xaa can be any naturally occurring amino acid
  Transcript Sequence Number=SeqID_22665
  Gene Ontology: Mol. function=protein serine/threonine kinase activity; Cellular component=integral to membrane; Biological process=protein amino acid phosphorylation
  Homolog annotation: Hit_ID=Q2L3U3; Match level="QueryCoverage=95%, HitCoverage=51%, E-value=1e-76, Identity=42%"; Hit description =CLAVATA-like kinase
  Pfam annotation: Domain name=LRR_1; Domain location=122-144; Score =9.5; E_value=4.7; Accession=PF00560.25; Description=Leucine Rich Repeat
  Pfam annotation: Domain name=LRR_1; Domain location=146-168; Score =13.7; E_value=0.72; Accession=PF00560.25; Description=Leucine Rich Repeat
  Pfam annotation: Domain name=LRR_1; Domain location=50-72; Score=5.6; E_value=25; Accession=PF00560.25; Description=Leucine Rich Repeat
  Pfam annotation: Domain name=LRR_1; Domain location=74-96; Score=2.8; E_value=89; Accession=PF00560.25; Description=Leucine Rich Repeat
  Pfam annotation: Domain name=LRR_1; Domain location=98-120; Score =15.9; E_value=0.17; Accession=PF00560.25; Description=Leucine Rich Repeat
  Pfam module annotation: Pfam domain module=LRR_1::LRR_1::LRR_1::LRR _1::LRR_1; Domain location=122-144::146-168::50-72::74-96::98-120
LMQFTLYDNELXGPIPASIGNLKKLQVLRXAGGNQGMKGPLPPEIGGCTDLTMLGLAETGLSGSLPETIGQLKKIQTIAIYTAMLTGSIPESIGNCTELTSLYLYQNSLTGPIPPQLGRLRKLQTVLLWQNQLVGTIPPEIANCKELVLIDLSLNSLTGPIPSSFGTLPNLQQLQLSNEQPRPGVTSRRSTLV

SEQ ID NO: 88640 - protein, 102 aa, Setaria italica
  Transcript Sequence Number=SeqID_22666
METMMAADGGREAAARSSSYGGKRDDGGQQQHRQAGVGCGGHYFQMPLHYPRYTREEYEAMPEWQLDRLLSEYGLPATGTLHHKRTFAIGAFLWGANGGGNH

SEQ ID NO: 88641 - protein, 37 aa, Setaria italica
  Transcript Sequence Number=SeqID_22667
HFRKWLKVCVKLKVKVEFNVVVFYLKVKCLLFLSCLK

SEQ ID NO: 88642 - protein, 65 aa, Setaria italica
  Transcript Sequence Number=SeqID_22668
PPDQITHRGSGSGGGSSSRPRRNGHAKTPTSPPGIRRGWIEAKQLGIAEGGEVIWLKKKEINNFG

SEQ ID NO: 88643 - protein, 178 aa, Setaria italica
  misc_feature (16)..(16): Xaa can be any naturally occurring amino acid
  misc_feature (167)..(167): Xaa can be any naturally occurring amino acid
  Transcript Sequence Number=SeqID_22669
  Gene Ontology: Mol. function=DNA binding; Cellular component=nucleus
  Homolog annotation: Hit_ID=B9S7K7; Match level="QueryCoverage=37%, HitCoverage=5%, E-value=2e-09, Identity=52%"; Hit description =Transcription factor, putative
LMTSSTNASLCYSYKXDKMHITTETNGLVTTEKDSCQARAASSQPFVRTVSRAQIVSQEASASIFASKPPVGPSVVKNTYGGFSSGSAHFGYPNFGNPLPNDGCLQRKSESLSGLEARGHSPLLVQPALENGSPQKGPRIANVVHRFKSSVELLEIGAVVSGRLWSXSKAIFPKGSEA

SEQ ID NO: 88644 - protein, 55 aa, Setaria italica
  Transcript Sequence Number=SeqID_22670
MKSSLRKLRGFALQRHEQRVDRDRGRGHSTAAAATAADELLVAAQDMADMRSCYD

SEQ ID NO: 88645 - protein, 393 aa, Setaria italica
  Transcript Sequence Number=SeqID_22671
  Gene Ontology: Mol. function=protein serine/threonine phosphatase activity; Cellular component=protein serine/threonine phosphatase complex; Biological process=protein amino acid dephosphorylation
  Homolog annotation: Hit_ID=B6T9X8; Match level="QueryCoverage=89%, HitCoverage=85%, E-value=1e-130, Identity=70%"; Hit description =Protein phosphatase 2C
  Pfam annotation: Domain name=PP2C; Domain location=78-382; Score =249.7; E_value=6.9e-72; Accession=PF00481.13; Description=Protein phosphatase 2C
  Subcellular localization annotation: CTP_CleavageSite=46; ConfidenceScore=5.46e-01
PKSTPATAVAAAAAAAAAAVASSALERRRRRLEMRRFQAPVADDVRAGKRQRLARTASGSCPEVVSEFERPELPERLPRHGVTSVCGRRREMEDAVSIRPDFLPGATKHHFFGVFDGHGCSHVATLCQDRMHEVVADEHNNAGSGEETAWKGVMERSFARLDEQAASWASSRSGDEPACRCEQQMPSRCDHVGSTAVVAVVNPTHVVVANAGDSRAVLSRAGAPVPLSVDHKPDRPDELARIEAAGGRVIYWDGARVLGVLAMSRAIGDGYLKPFVSSEPEVTVTERTDDDEFLILASDGLWDVVDNVMACGVVRACFRSNGPPAAPAARANGVAPPAGDADAENGSAVVKGVSKVDSDKACSDAAMLLAKLALARRSADNVSVVVVDLRRGI

SEQ ID NO: 88646 - protein, 49 aa, Setaria italica
  Transcript Sequence Number=SeqID_22672
  Subcellular localization annotation: CTP_CleavageSite=38; ConfidenceScore=5.30e-01
RAAPPSRGESSLKTPKVPNPFDRRQWRRRRPTMPRHPQATSSAPLFRVT

SEQ ID NO: 88647 - protein, 74 aa, Setaria italica
  Transcript Sequence Number=SeqID_22673
PAPPSSPPPPAAQRPCPCRPRRCWHAAVCCLWPFPLRAVNCDGNYIKGIDLSHDSCGQASLSLASFSGRLGGRL

SEQ ID NO: 88648 - protein, 169 aa, Setaria italica
  Transcript Sequence Number=SeqID_22674
  Subcellular localization annotation: CTP_CleavageSite=25; ConfidenceScore=5.35e-01
SSPAVRGTPRATSPAPSKCVVPSLVAAKEENRRAAREPAIVVPSRYRQPSPAGGRRGAASPAVGGRRASLSPSSRRLSGEGTGKKKVGVLVAGISKMTDLGNGSAMKPGRKSWDDPTMALAAATAGSVMKSKAKVDKDTILRTQEAMSRRLSDATTEQSSNDDSSVDER

SEQ ID NO: 88649 - protein, 53 aa, Setaria italica
  Transcript Sequence Number=SeqID_22675
MHRPCNNQPCRGSRVAAAAVLAALMCAAGVADAGTGTFIYAGCSPSKYQPGHP

SEQ ID NO: 88650 - protein, 80 aa, Setaria italica
  Transcript Sequence Number=SeqID_22676
  Gene Ontology: Mol. function=voltage-gated potassium channel activity; Cellular component=voltage-gated potassium channel complex
  Homolog annotation: Hit_ID=Q7X607; Match level="QueryCoverage=50%, HitCoverage=6%, E-value=3e-12, Identity=87%"; Hit description =OSJNBa0014F04.24 protein
  Pfam annotation: Domain name=PUF; Domain location=29-63; Score=27.0; E_value=7.7e-05; Accession=PF00806.11; Description=Pumilio-family RNA binding repeat
GSQVYHDNTLANYMDNADRSGDDSVDLNDVVGRVKEVSMDQFGSRFIQQKLENASPDEREKIFPEILSNAIALTTDCFWL

SEQ ID NO: 88651 - protein, 45 aa, Setaria italica
  misc_feature (3)..(3): Xaa can be any naturally occurring amino acid
  Transcript Sequence Number=SeqID_22677
LCXPLMRVSGLYTACLLTWVIWGSFRFCQITPYRNHYNHGVFKCM

SEQ ID NO: 88652 - protein, 75 aa, Setaria italica
  misc_feature (65)..(65): Xaa can be any naturally occurring amino acid
  Transcript Sequence Number=SeqID_22678
  Gene Ontology: Mol. function=acyltransferase activity; Cellular component=integral to membrane; Biological process=metabolic process
  Homolog annotation: Hit_ID=B6SRR0; Match level="QueryCoverage=100%, HitCoverage=15%, E-value=3e-25, Identity=84%"; Hit description =Glycerol-3-phosphate acyltransferase 8
VEAVARGVLPRHYAAGVRADTWAVFRGCAERRVVVTASPAVMVGEFVREFLGAEVAGTELETCAXGKRFTGRIKA

SEQ ID NO: 88653 - protein, 278 aa, Setaria italica
  Transcript Sequence Number=SeqID_22679
  Gene Ontology: Mol. function=hydrolase activity; Cellular component =nucleus; Biological process=metabolic process
  Homolog annotation: Hit_ID=Q8RZ79; Match level="QueryCoverage=94%, HitCoverage=63%, E-value=1e-124, Identity=81%"; Hit description =B1065G12.16 protein
  Pfam annotation: Domain name=Abhydrolase_3; Domain location=5-244; Score=242.9; E_value=7.7e-70; Accession=PF07859.5; Description =alphabeta hydrolase fold
AVTNGGAFVTGAADSAANDAFCRRVARLCDAIVVAVGYRLAPESRYPAAFEDGIAVLRWIAKQANLAACGRTMMGKGTGADSFGAAMVEPWLAAHADPSRCVLLGVSCGANIADYVARKAVEAGKLLDPVRVVAQVLMYPFFMGSAPTRSELKLANSYFYDKSSCLLAWKLFFPEGEFSLDHPAANPLVPGRGPPLKLMPPTLTVVAELDWMKDRAIAYSEELRKVNVDAPVLEYKDAVHEFATLDVLLKTPQAQACAEDIAIWIKKYISLRGHELSY

SEQ ID NO: 88654 - protein, 89 aa, Setaria italica
  Transcript Sequence Number=SeqID_22680
  Subcellular localization annotation: CTP_CleavageSite=60; ConfidenceScore=5.02e-01
RATARHPRWPPHVATETGTATTLLLLLLPQKARAASNATVDLLSLARARLYGGDRLAAPRSMVGRSRAGEVESRWMGERVMDSPPTATD

SEQ ID NO: 88655 - protein, 102 aa, Setaria italica
  Transcript Sequence Number=SeqID_22681
  Gene Ontology: Mol. function=ubiquitin thiolesterase activity; Cellular component=intracellular; Biological process=ubiquitin -dependent protein catabolic process
  Homolog annotation: Hit_ID=Q7XU95; Match level="QueryCoverage=100%, HitCoverage=45%, E-value=5e-40, Identity=76%"; Hit description =OSIGBa0101C23.12 protein
  Pfam annotation: Domain name=Peptidase_C12; Domain location=1-88; Score=-12.5; E_value=9.6e-06; Accession=PF01088.13; Description =Ubiquitin carboxyl-terminal hydrolase, family 1
TADMDPVQRAAFLEEDDEMEDAHSVAATAGDTDANVDVNEHFVCFSCVDGELYELDGRKSEPISHGPSSPETLLQDAAKVIKARIAENPNSMNFNVMALSKQ

SEQ ID NO: 88656 - protein, 110 aa, Setaria italica
  Transcript Sequence Number=SeqID_22682
SCTTDGSRPADLKDLIAGLYGSQPSPTAGGAADAGPQEEAEDGEGIGDDDWEFTAATAEPADQDRGGRVPGDGIGKIENCVFETDENRSSSSTGDCILIDFYHRLKEESL

SEQ ID NO: 88657 - protein, 458 aa, Setaria italica
  misc_feature (114)..(114): Xaa can be any naturally occurring amino acid
  misc_feature (314)..(314): Xaa can be any naturally occurring amino acid
  Transcript Sequence Number=SeqID_22683
  Homolog annotation: Hit_ID=A6YTC8; Match level="QueryCoverage=68%, HitCoverage=33%, E-value=4e-47, Identity=38%"; Hit description =Nucleolar GTPase
RSATAEPADQDRGGRALGDGIVKIEGITKSLSTDQEVQSSLTSVDEKLNHFRQTTVDIGTHESTGECVKASGYSPPNNSAILNLYEESVRADVIRIEESSAESVQNSYDLFLTXNDENRSSSSTGDCILIEFYHRLKEESLALVFKHVKDLKAAQKVFTLSGENRKATAIGREIQEIYDKLKDSSLPNGFCTEEHPRDVCITEVLNCIKEEQLKDFEQEYCLAEKISRAIEDTSVAVELYKHSVSTLHTLELASRKEQGDYVGAWYSMLLPCAQELQHGAAIWQKSCHTNVCDQVISEGGRYFIALGEIYRVAXILCFSMQCFKPWVLADPGMLSKMLVCLDRCINAWTSGLEMALKRVVDSNHLDASVAKPLLESINNINELEVPSLQNFLPTNKTTCRLSLLPPSSVPGMKLIMWNGNHYIVKVANLWANWISSYPPQMSVTPVVEEQRSNTWQSY

SEQ ID NO: 88658 - protein, 97 aa, Setaria italica
  Transcript Sequence Number=SeqID_22684
  Subcellular localization annotation: CTP_CleavageSite=35; ConfidenceScore=5.27e-01
NLNIITRTEQHASNTHPKSTENMRMFHLSRPCQSRGARASACLRPRIAPPGGPDRRDCFLGSNEARRASGMASRMELLEGGREEGGRGLRGRRGGSR

SEQ ID NO: 88659 - protein, 49 aa, Setaria italica
  misc_feature (34)..(34): Xaa can be any naturally occurring amino acid
  Transcript Sequence Number=SeqID_22685
  Subcellular localization annotation: CTP_CleavageSite=12; ConfidenceScore=5.03e-01
PPPPPYPPPPPPARPPPPKPPPPPPPPLPPPPPXPPPPPRPPYPPPPPR

SEQ ID NO: 88660 - protein, 149 aa, Setaria italica
  Transcript Sequence Number=SeqID_22686
  Subcellular localization annotation: CTP_CleavageSite=26; ConfidenceScore=5.45e-01
AAALTIRSTAQHPAAAAAAPAHGHRRAAAAVARRRRAPCGSRLRALPPELSEILSPKLVPGSPSDTGDVSSLIPVSVLMLLFYFVSNWVVPELLMKRLQSKAEDQEASAAASMSFSGDDTDGQTDGDASRPKIRLKVKKKKNRKASVEV

SEQ ID NO: 88661 - protein, 195 aa, Setaria italica
  misc_feature (182)..(182): Xaa can be any naturally occurring amino acid
  misc_feature (185)..(185): Xaa can be any naturally occurring amino acid
  Transcript Sequence Number=SeqID_22687
  Gene Ontology: Mol. function=ATP binding; Cellular component =chromosome; Biological process=chromosome organization and biogenesis
  Homolog annotation: Hit_ID=Q8GU52; Match level="QueryCoverage=81%, HitCoverage=15%, E-value=2e-42, Identity=57%"; Hit description=SMC6 protein
AHEIDNLKKKLAWAWVYDVVKKIEEQANKLEKLKERIPACQERIDRNTAIIEELRKDFIVKKENVRSFLEKTQEVRRMKEKLEHDMHEAGKLKMDLEKEHERGMQMLNKMNNRVRQLQVQVDEFELQHMQETQAEVSQIEDKMRELQQEINSAHLSATRLKEEEKKLSEELWGITKSIGDIXKKXAEDARKINHL

SEQ ID NO: 88662 - protein, 73 aa, Setaria italica
  Transcript Sequence Number=SeqID_22688
  Subcellular localization annotation: CTP_CleavageSite=43; ConfidenceScore=5.40e-01
CMTLYYPIASSPAATHITSLIRSSISRGRRHREAAGACRTSPSAAARSAPPPPPTCWPWTPAAVGRLLLLHHL

SEQ ID NO: 88663 - protein, 43 aa, Setaria italica
  Transcript Sequence Number=SeqID_22689
LASGHTYYITPCVSDDTNNSKRYNSFTMLTIEILVIAHTWCDA

SEQ ID NO: 88664 - protein, 79 aa, Setaria italica
  Transcript Sequence Number=SeqID_22690
  Gene Ontology: Mol. function=structural constituent of ribosome; Cellular component=ribonucleoprotein complex; Biological process =translational elongation
  Homolog annotation: Hit_ID=P46252; Match level="QueryCoverage=100%, HitCoverage=70%, E-value=4e-13, Identity=54%"; Hit description=60S acidic ribosomal protein P2A
  Pfam annotation: Domain name=Ribosomal_60s; Domain location=1-78; Score=84.7; E_value=3.2e-22; Accession=PF00428.11; Description=60s Acidic ribosomal protein
IDNEKMELLLSQLSGRDITELIAAGREKFASVPCGGGGVAVAAAAPAAGGAAPAAEAKKEEKVEEKEESDDDMGFSLFD

SEQ ID NO: 88665 - protein, 37 aa, Setaria italica
  Transcript Sequence Number=SeqID_22691
LAILAGREKFASVPCGGGGVAVAAAAPAAGGAAPAAE

SEQ ID NO: 88666 - protein, 112 aa, Setaria italica
  Transcript Sequence Number=SeqID_22692
  Gene Ontology: Mol. function=structural constituent of ribosome; Cellular component=ribonucleoprotein complex; Biological process =translational elongation
  Homolog annotation: Hit_ID=P46252; Match level="QueryCoverage=100%, HitCoverage=100%, E-value=1e-30, Identity=65%"; Hit description=60S acidic ribosomal protein P2A
  Pfam annotation: Domain name=Ribosomal_60s; Domain location=17-111; Score=134.7; E_value=2.9e-37; Accession=PF00428.11; Description=60s Acidic ribosomal protein
MKFVAAYLLAVLAGNPSPSAEDLSAILESVGCEIDNEKMELLLSQLSGRDITELIAAGREKFASVPCGGGGVAVAAAAPAAGGAAPAAEAKKEEKVEEKEESDDDMGFSLFD

SEQ ID NO: 88667 - protein, 112 aa, Setaria italica
  Transcript Sequence Number=SeqID_22693
  Gene Ontology: Mol. function=structural constituent of ribosome; Cellular component=ribonucleoprotein complex; Biological process =translational elongation
  Homolog annotation: Hit_ID=P46252; Match level="QueryCoverage=100%, HitCoverage=100%, E-value=3e-30, Identity=66%"; Hit description=60S acidic ribosomal protein P2A
  Pfam annotation: Domain name=Ribosomal_60s; Domain location=17-111; Score=140.9; E_value=4.1e-39; Accession=PF00428.11; Description=60s Acidic ribosomal protein
MKFVAAYLLAVLAGNNSPSAEDLTTILESVGAEVDNEKMELLLSQLSGKDITELIAAGREKFASVPCGGGGVAVAAAAPAGGGAAPAAEAKKEEKVEEKEESDDDMGFSLFD

SEQ ID NO: 88668 - protein, 112 aa, Setaria italica
  Transcript Sequence Number=SeqID_22694
  Gene Ontology: Mol. function=structural constituent of ribosome; Cellular component=ribonucleoprotein complex; Biological process =translational elongation
  Homolog annotation: Hit_ID=P46252; Match level="QueryCoverage=100%, HitCoverage=100%, E-value=3e-30, Identity=66%"; Hit description=60S acidic ribosomal protein P2A
  Pfam annotation: Domain name=Ribosomal_60s; Domain location=17-111; Score=141.6; E_value=2.4e-39; Accession=PF00428.11; Description=60s Acidic ribosomal protein
MKFVAAYLLAVLAGNNSPSAEDLTTILESVGAEVDNEKMELLLSQLSGKDITELIAAGREKFASVPCGGGGVAVAAAAPAAGGAAPAAEAKKEEKVEEKEESDDDMGFSLFD

SEQ ID NO: 88669 - protein, 91 aa, Setaria italica
  Transcript Sequence Number=SeqID_22695
  Gene Ontology: Mol. function=methionine-tRNA ligase activity; Cellular component=cytoplasm; Biological process=tRNA aminoacylation for protein translation
  Homolog annotation: Hit_ID=Q9SVN5; Match level="QueryCoverage=68%, HitCoverage=7%, E-value=2e-31, Identity=96%"; Hit description =Probable methionyl-tRNA synthetase
  Subcellular localization annotation: CTP_CleavageSite=49; ConfidenceScore=5.19e-01
MASSSSSPPPPPPPPKLPIPGRRNILITSALPYVNNVPHLGNIIGCVLSADVFARYCRLRGYNAIYICGTDEYGTATIDLSAQTPKNRTET

SEQ ID NO: 88670 - protein, 89 aa, Setaria italica
  Transcript Sequence Number=SeqID_22696
SGRQPHPPTAAASAAPAPAAPLPTPLPPPAKKARTSPAPLYSDDDIDWAVAGGPDVGIAGNLPDWPLVDEQFSAPVPRPAAEAHVTRTP

SEQ ID NO: 88671 - protein, 213 aa, Setaria italica
  Transcript Sequence Number=SeqID_22697
  Gene Ontology: Mol. function=zinc ion binding; Cellular component =intracellular
  Homolog annotation: Hit_ID=B6TH99; Match level="QueryCoverage=83%, HitCoverage=50%, E-value=9e-47, Identity=61%"; Hit description=B-box zinc finger family protein
AANRLAGKHRRLPLHPPAAASAPAKKARTSPAPLYSDDDIDWAVAGGPDVGIAGNLPDWPLVDEQFSAPVPRPAAEAHVTRTPSKRSPRRPLAAAFTVQGGLAGGMPDWPLDEFFGFSEFNAGLGFTENGTSKADSGKLGSTDGSPAGRSSSDTAQDFFGQVPEFHHWSVPELPSPPTASGLHWQGGPRHGAAAADTAAVSVPDISAPEEMLT

SEQ ID NO: 88672 - protein, 108 aa, Setaria italica
  Transcript Sequence Number=SeqID_22698
  Gene Ontology: Mol. function=acylphosphatase activity
  Homolog annotation: Hit_ID=B6SM25; Match level="QueryCoverage=69%, HitCoverage=55%, E-value=2e-20, Identity=68%"; Hit description =Acylphosphatase
  Pfam annotation: Domain name=Acylphosphatase; Domain location=15-105; Score=93.3; E_value=8.5e-25; Accession=PF00708.10; Description =Acylphosphatase
  Subcellular localization annotation: CTP_CleavageSite=20; ConfidenceScore=5.38e-01
SPSDPPPQQQPSSPAPKAVRVVVKGRVQGVFFRDWTVETARSLGLAGWVRNRRDGTVEALLSGDPDKVDEMVSRRIPVGPPAAAVTAVVPSPVDPVDPAEGFHRKPTT

SEQ ID NO: 88673 - protein, 52 aa, Setaria italica
  Transcript Sequence Number=SeqID_22699
  Gene Ontology: Mol. function=metal ion binding
  Homolog annotation: Hit_ID=Q8H055; Match level="QueryCoverage=100%, HitCoverage=8%, E-value=7e-14, Identity=76%"; Hit description =Putative DHHC-type zinc finger protein
NESNFSDAAMEISGSLAPLQLEARSAFQPSTAGSARNIVSSPESSFDSPDLH

SEQ ID NO: 88674 - protein, 145 aa, Setaria italica
  misc_feature (117)..(117): Xaa can be any naturally occurring amino acid
  Transcript Sequence Number=SeqID_22700
  Gene Ontology: Mol. function=hydrolase activity; Cellular component =integral to membrane; Biological process=lipid catabolic process
  Homolog annotation: Hit_ID=Q69VY8; Match level="QueryCoverage=100%, HitCoverage=12%, E-value=1e-73, Identity=82%"; Hit description =Putative calcium-independent phospholipase A2
  Pfam annotation: Domain name=Patatin; Domain location=12-144; Score =13.7; E_value=3.6e-05; Accession=PF01734.14; Description=Patatin -like phospholipase
GRPVAKKGLRILSMDGGGMKGLATVQMLKQIEQGTGKRIHEMFDLICGTSTGGMLAMALGIKQMTLDQCEEIYTKLGKLVFAEPIPKDEAATWKEKIDQLFKSSSQSFRVVVHGSKXDQFERLLKEMCADEDGDLLIESAVKGIP

SEQ ID NO: 88675 - protein, 134 aa, Setaria italica
  Transcript Sequence Number=SeqID_22701
  Homolog annotation: Hit_ID=B6SU97; Match level="QueryCoverage=58%, HitCoverage=37%, E-value=2e-21, Identity=66%"; Hit description =Loricrin
NGSGVVVGAPVYGGGGYGNNSPHGGSGYGHNSSYGGGGGHGNGGAPYGTGGDGSYAPYNNNAPAGYWAHQDGTRSPLYINTREVHVYGAPPGYDNDNTNNDDQRRRGGGGGFFGPAFHAVGNFFDRRFGLNDRD

SEQ ID NO: 88676 - protein, 88 aa, Setaria italica
  Transcript Sequence Number=SeqID_22702
  Subcellular localization annotation: CTP_CleavageSite=80; ConfidenceScore=5.24e-01
MRTMKAQHSNGRGRSPFLTSYALTLAFITFVSVLYFKDFSSTLHQPFLHRPPSHRRGQISRPLRPAHHGGGGGDVSELSSAEHRAAAA

SEQ ID NO: 88677 - protein, 146 aa, Setaria italica
  Transcript Sequence Number=SeqID_22703
  Gene Ontology: Mol. function=hydrolase activity, acting on glycosyl bonds; Cellular component=vacuole; Biological process=cell wall organization and biogenesis
  Homolog annotation: Hit_ID=B9RR75; Match level="QueryCoverage=95%, HitCoverage=28%, E-value=4e-61, Identity=76%"; Hit description =Polygalacturonase, putative
VPPGRWLTAPFNLTSHMTLFLAEGAEILGIPYEKYWPLMPALPSYGYGRERKGPCFGSLIHGQNLKDVVITGHNGSINGQGEVWWMKHRRRMLNNTRPPLVQLMWSKDIIVANITLRNSPFWHFHPYDCTNVTVSNVTIIHMIAQT

SEQ ID NO: 88678 - protein, 433 aa, Setaria italica
  misc_feature (108)..(108): Xaa can be any naturally occurring amino acid
  Transcript Sequence Number=SeqID_22704
  Gene Ontology: Mol. function=hydrolase activity, acting on glycosyl bonds; Cellular component=vacuole; Biological process=cell wall organization and biogenesis
  Homolog annotation: Hit_ID=B9RR75; Match level="QueryCoverage=96%, HitCoverage=85%, E-value=0.0, Identity=74%"; Hit description =Polygalacturonase, putative
  Pfam annotation: Domain name=Glyco_hydro_28; Domain location=45-405; Score=107.2; E_value=5.4e-29; Accession=PF00295.9; Description =Glycosyl hydrolases family 28
LPPSRPAPRLRPTAYNLTDFGGVGDGRALNTEAFERAVEAIAALAERGGGQLNVPPGRWLTAPFNLTSHMTLFLAEGAEILGIPYEKYWPLMPALPSYGYGRERKGPXFGSLIHAQNLKDVVITGHNGSINGQGEVWWMKHRRRMLNNTRPPLVQLMWSKDIIVANITLRNSPFWHFHPYDCTNVTVSNVTILSPISGAPNTDGIDPDSCQDVLIENCYISVGDDAIAVKSGWDQYGIAYGRPSSNILIRNVTARSLVSAGISIGSEMSGGVANVTVENVRVWESRRGVRIKTATGRGGYIRNITYRNITFDNVRAGIVIKVDYNEHADDGYDRTAFPDITSISFKGIHGRGVRVPVRAHGSDVIPIKDISFQDMSVGISYKKKHIFQCSYVKGRVIGSVFPKPCENLDVYNEQGQLVKRAISLNSTELDYDI

SEQ ID NO: 88679 - protein, 51 aa, Setaria italica
  Transcript Sequence Number=SeqID_22705
LLYKNHFSPIARHEQVFQRFITFVQIDPSLYKKEEIKPINQRIGHLIILQL

SEQ ID NO: 88680 - protein, 128 aa, Setaria italica
  Transcript Sequence Number=SeqID_22706
  Gene Ontology: Mol. function=transferase activity, transferring groups other than amino-acyl groups
  Homolog annotation: Hit_ID=Q9LGF6; Match level="QueryCoverage=98%, HitCoverage=29%, E-value=1e-29, Identity=58%"; Hit description=3'-N -debenzoyltaxol N-benzoyltransferase-like
PELPLSWLDRYPTQRALIESLHVFKGRAGADAEAPARAIERALAAALVSYYPIAGRLAVSDDGDLVVDCTGEGVWFVEATASCTLEDVDYLEYPLMVPKDELLPHPTYPASDPLPEDSLILLVQVTRF

SEQ ID NO: 88681 - protein, 79 aa, Setaria italica
  Transcript Sequence Number=SeqID_22707
  Gene Ontology: Mol. function=transferase activity, transferring groups other than amino-acyl groups
  Homolog annotation: Hit_ID=B6SRZ2; Match level="QueryCoverage=92%, HitCoverage=16%, E-value=4e-30, Identity=86%"; Hit description =Anthranilate N-benzoyltransferase protein 1
ILNSLEVRARVQVTFLKCGGVVLGTGIHHVALDGMGAFHFIQTWTGVSRGLGTAEACGPPPFHDRTLLRARSPPAPAFH

SEQ ID NO: 88682 - protein, 222 aa, Setaria italica
  Transcript Sequence Number=SeqID_22708
  Gene Ontology: Mol. function=transferase activity, transferring groups other than amino-acyl groups
  Homolog annotation: Hit_ID=B6SRZ2; Match level="QueryCoverage=99%, HitCoverage=51%, E-value=1e-97, Identity=80%"; Hit description =Anthranilate N-benzoyltransferase protein 1
  Pfam annotation: Domain name=Transferase; Domain location=1-222; Score=-101.0; E_value=5.3e-06; Accession=PF02458.7; Description =Transferase family
MKVDVMETTLVAPSEDTPRRELWLSNLDLAVPKTHTPLVYYYPASELGAGVGPEGSFFAAERLKAALARALVPFYPLAGRLGVGEGGRLQIDCNAEGALFVVAQADFAGDNVFRDYEPSPEVRRMFVPFVPSGDPPCVMAMFQVTFLKCGGVVLGTGIHHVALDGMGAFHFIQTWTGVSRGLGTAEACGPPPFHDRTLLRARSPPAPAFHHPVYSPALLSGR

SEQ ID NO: 88683 - protein, 93 aa, Setaria italica
  Transcript Sequence Number=SeqID_22709
  Gene Ontology: Mol. function=protein tyrosine kinase activity; Biological process=protein amino acid phosphorylation
  Pfam annotation: Domain name=LRRNT_2; Domain location=29-72; Score =41.1; E_value=4.3e-09; Accession=PF08263.4; Description=Leucine rich repeat N-terminal domain
RSSLPRLLLLLLLLLLLLSSTNASSSSSRNAELDALMDLKAALDPSGRALASWARGGDPCGRGDYFEGVTCDARGRVATISLQGKGLAGAVPP

SEQ ID NO: 88684 - protein, 143 aa, Setaria italica
  Transcript Sequence Number=SeqID_22710
QAEQDGLRGARGDMATLPSCGSGGWRASNVGLPLLSRSWATAWHGLSQLVRACSVDLFLAGECRRRQALSWLASAGGCSFSRRYSGGATGPFLLQLRAHLQSIPHSVTLYIHGGPSNSGMPLTLPEDVCCTARATAGAGSLPE

SEQ ID NO: 88685 - protein, 109 aa, Setaria italica
  Transcript Sequence Number=SeqID_22711
  Gene Ontology: Mol. function=nucleoside-triphosphatase activity; Biological process=protein transport
  Homolog annotation: Hit_ID=B6SSC5; Match level="QueryCoverage=100%, HitCoverage=19%, E-value=1e-52, Identity=95%"; Hit description=ATP -dependent Clp protease ATP-binding subunit clpX
SVPEKGARRHPRGDNIQIDTKNILFICGGAFVGLEKTISERLRHDSSIGFRAQVRSNMRTGGVINAEITSSLLESVESGDLIAYGLIPEFVGRFPILVSLSSLSEDQLV

SEQ ID NO: 88686 - protein, 69 aa, Setaria italica
  Transcript Sequence Number=SeqID_22712
  Homolog annotation: Hit_ID=B6SSC5; Match level="QueryCoverage=49%, HitCoverage=6%, E-value=6e-10, Identity=94%"; Hit description=ATP -dependent Clp protease ATP-binding subunit clpX
ALRLIAKRAIVKNTGARGLRSILESILTEAMYEVYTLSLPTTAILTSINWVGTTFLEYLTQHLSRQAML

SEQ ID NO: 88687 - protein, 157 aa, Setaria italica
  Transcript Sequence Number=SeqID_22713
FVIGVILVVFVLSSKSCWICKSTWNRSKDSCGEGALELYLAKHDNKESMVFVVFVNFTAIDCIVWLKETEKPGHLTNWLLGIWCFTADFRDFDISSCLTIFNDSLEACWTFWRQSISIITSNIKECPYLCFIGHEIPLCIGVGMCIDTCKEQSGYCA

SEQ ID NO: 88688 - protein, 367 aa, Setaria italica
  misc_feature (23)..(23): Xaa can be any naturally occurring amino acid
  Transcript Sequence Number=SeqID_22714
  Gene Ontology: Mol. function=nucleoside-triphosphatase activity; Biological process=protein transport
  Homolog annotation: Hit_ID=B6SSC5; Match level="QueryCoverage=99%, HitCoverage=65%, E-value=0.0, Identity=90%"; Hit description=ATP -dependent Clp protease ATP-binding subunit clpX
  Pfam annotation: Domain name=AAA; Domain location=13-216; Score=-1.3; E_value=3.2e-05; Accession=PF00004.21; Description=ATPase family associated with various cellular activities (AAA)
  Pfam annotation: Domain name=AAA_2; Domain location=9-216; Score =231.7; E_value=1.8e-66; Accession=PF07724.6; Description=ATPase family associated with various
  Pfam annotation: Domain name=ClpB_D2-small; Domain location=222-319; Score=56.3; E_value=1.2e-13; Accession=PF10431.1; Description=C -terminal, D2-small domain, of ClpB pr
  Pfam module annotation: Pfam domain module=AAA::AAA_2::ClpB_D2-small; Domain location=13-216::9-216::222-319
MSDTDMVELEKSNILVMGPTGSXGKTLLAKTLARFVNVPFVIADATTLTQAGYVGEDVESILYKLLAAADFDVAAAQQGIVYIDEVDKITKKAESINLSRDVSGEGVQQALLKMLEGTVVSVPEKGARRHPRGDNIQIDTKNILFICGGAFVGLEKTISERRHDSSIGFRAQVRSNMRTGGVINAEITSSLLESVESGDLIAYGLIPEFVGRFPILVSLSSLSEDQLVEVLTEPKNALGRQYTKLFEMNDVKLHFTEKALRLIAKRAIVKNTGARGLRSILESILTEAMYEIPETRTGQDKIDAVVVEESVGSANQHGIGAKILCGEGALELYLAKHDNKESMHQQLEKSNGESEIDAEAPSRVASM

SEQ ID NO: 88689 - protein, 132 aa, Setaria italica
  misc_feature (98)..(98): Xaa can be any naturally occurring amino acid
  Transcript Sequence Number=SeqID_22715
  Gene Ontology: Mol. function=transporter activity; Cellular component= membrane; Biological process=oligopeptide transport
  Homolog annotation: Hit_ID=A2Q2S5; Match level="QueryCoverage=100%, HitCoverage=20%, E-value=1e-36, Identity=56%"; Hit description=TGF -beta receptor, type I/II extracellular region
WRSAILLLANYGLVTCAFFGVGVNLVVFLRRVLHQDNAEAANNISKWTGTVYIFSLIGAFLSDSYWGRYITCAIFQIIYVTGLVILSLASWFLLVNPXGCGGVNSRCDEPSAPGVALFYLSTYMIAFGNGGY

SEQ ID NO: 88690 - protein, 60 aa, Setaria italica
  Transcript Sequence Number=SeqID_22716
MEHNYSCSRDVNCLAALLLAALCLGAAVVARGQLTDDFYDDCCPQAEDIVKARVSAAMKA

SEQ ID NO: 88691 - protein, 87 aa, Setaria italica
  Transcript Sequence Number=SeqID_22717
  Subcellular localization annotation: CTP_CleavageSite=38; ConfidenceScore=5.18e-01
VTSGGGSIRQWTGTSVTESPCLTATCVPPCSLLLRVLRAVFTSAILGDCEFCDSLKQRRRRREAYKKSLSRRSDAARSHRRHVVYVR

SEQ ID NO: 88692 - protein, 60 aa, Setaria italica
  Transcript Sequence Number=SeqID_22718
  Gene Ontology: Mol. function=transporter activity; Cellular component= integral to membrane; Biological process=transport
  Homolog annotation: Hit_ID=B6SRZ4; Match level="QueryCoverage=95%, HitCoverage=11%, E-value=3e-23, Identity=91%"; Hit description =Glycerol 3-phosphate permease
MAQSHDMMSRRPPGLRLFGGAGSLRTYQTLVLVLTFFAYTCFHMTRKITSIVKSALDSPS

SEQ ID NO: 88693 - protein, 61 aa, Setaria italica
  Transcript Sequence Number=SeqID_22719
IPACSFSSETIGQRKALALLLPGLACLVHTRTKPPFFLAAARYLCLLHSSRRVAVADHERL

SEQ ID NO: 88694 - protein, 51 aa, Setaria italica
  Transcript Sequence Number=SeqID_22720
DKIVIFTYFVALSIRCIFFFMNFQSSESIDAAIGDCFIETMAATAPWPEAT

SEQ ID NO: 88695 - protein, 171 aa, Setaria italica
  Transcript Sequence Number=SeqID_22721
  Gene Ontology: Mol. function=DNA binding; Biological process =regulation of transcription
  Homolog annotation: Hit_ID=Q52PH1; Match level="QueryCoverage=97%, HitCoverage=36%, E-value=1e-24, Identity=45%"; Hit description =Golden2-like transcription factor
RPQPMQHFGRPLHVWGHPTPGVESPRVPMWPRHLVPRAPTPPWAPPPPSDPAFWHHPYMRGPAQMPGQMAPCMAVPMPAARFPAPPVRGVLPCPPPMYRPLVPPVLANKSQQDAQLQLQTQPSSESIDAAIGDVLSKPWLPLPLGLKPPSVDSVMDELQRQGVADVPPACG

SEQ ID NO: 88696 - protein, 87 aa, Setaria italica
  Transcript Sequence Number=SeqID_22722
  Gene Ontology: Mol. function=nucleotide binding; Biological process =defense response
  Homolog annotation: Hit_ID=Q5Z5Z4; Match level="QueryCoverage=93%, HitCoverage=6%, E-value=3e-23, Identity=72%"; Hit description =Putative Pib
  Pfam annotation: Domain name=LRR_1; Domain location=28-50; Score=9.3; E_value=5.1; Accession=PF00560.25; Description=Leucine Rich Repeat
  Pfam annotation: Domain name=LRR_1; Domain location=52-73; Score =12.4; E_value=1.3; Accession=PF00560.25; Description=Leucine Rich Repeat
  Pfam module annotation: Pfam domain module=LRR_1::LRR_1; Domain location=28-50::52-73
KVLRVLDLEDASNVTDKDLEEIVKQLPRLKFLSLRGRCEITRLPHSLGDLRQLETLDVRGTSIVTLPASITKLKKLQYVRAGATSLA

SEQ ID NO: 88697 - protein, 70 aa, Setaria italica
  misc_feature (1)..(1): Xaa can be any naturally occurring amino acid
  Transcript Sequence Number=SeqID_22723
XKSMSQSRLPKPACRCSKQTTLLKNTTRTLSFLLAPCIPHIHEFNFNHGDKCAQNAKTRITRVESLLFKY

SEQ ID NO: 88698 - protein, 105 aa, Setaria italica
  Transcript Sequence Number=SeqID_22724
  Homolog annotation: Hit_ID=Q7XAL8; Match level="QueryCoverage=100%, HitCoverage=37%, E-value=4e-46, Identity=82%"; Hit description =Transducin / WD-40 repeat protein family-like protein
  Pfam annotation: Domain name=WD40; Domain location=37-74; Score=19.3; E_value=0.016; Accession=PF00400.24; Description=WD domain, G-beta repeat
CLALYDYLLVSGSEDGSIKVWDLITVLDEQSRLEAQTPYLYSFNQHALPVTDIACFLGAIAVSSSEDRTCKIWSLSKGRMLRSIQFPTSIDSVALDPRSHVFYAG

SEQ ID NO: 88699 - protein, 72 aa, Setaria italica
  misc_feature (54)..(54): Xaa can be any naturally occurring amino acid
  misc_feature (59)..(59): Xaa can be any naturally occurring amino acid
  Transcript Sequence Number=SeqID_22725
  Homolog annotation: Hit_ID=B9R7A8; Match level="QueryCoverage=68%, HitCoverage=10%, E-value=3e-09, Identity=57%"; Hit description=WD -repeat protein, putative
  Subcellular localization annotation: CTP_CleavageSite=38; ConfidenceScore=5.10e-01
FSKAVTSLVSSTDGLLLVSGSEDGNVRVWDTRSQQVTRKFKHSQGPVTNVLNRXTPKRXVNLPPLHPLRKSL

SEQ ID NO: 88700 - protein, 443 aa, Setaria italica
  misc_feature (176)..(176): Xaa can be any naturally occurring amino acid
  misc_feature (204)..(204): Xaa can be any naturally occurring amino acid
  Transcript Sequence Number=SeqID_22726
  Gene Ontology: Cellular component=nucleus; Biological process =ribosome biogenesis
  Homolog annotation: Hit_ID=Q7XAL8; Match level="QueryCoverage=62%, HitCoverage=80%, E-value=1e-93, Identity=63%"; Hit description =Transducin / WD-40 repeat protein family-like protein
  Pfam annotation: Domain name=WD40; Domain location=133-170; Score =9.5; E_value=3; Accession=PF00400.24; Description=WD domain, G-beta repeat
  Pfam annotation: Domain name=WD40; Domain location=225-262; Score =5.6; E_value=8.7; Accession=PF00400.24; Description=WD domain, G -beta repeat
  Pfam annotation: Domain name=WD40; Domain location=275-313; Score =40.7; E_value=5.9e-09; Accession=PF00400.24; Description=WD domain, G-beta repeat
  Pfam annotation: Domain name=WD40; Domain location=40-78; Score=9.9; E_value=2.7; Accession=PF00400.24; Description=WD domain, G-beta repeat
  Pfam annotation: Domain name=WD40; Domain location=82-118; Score =41.6; E_value=3.2e-09; Accession=PF00400.24; Description=WD domain, G-beta repeat
  Pfam module annotation: Pfam domain module=WD40::WD40::WD40::WD40::WD4 0; Domain location=133-170::225-262::275-313::40-78::82-118
RPRASRPRALASVAGRFLAAAQAPPSGGNSGTVHFYHWDKPQVAVKSFPAEPIRALLADQEGSYLIGGGSNGNLFLWEVASGELLHTWHAHYRAVRCLALYDYLLVSGSEDGSIKVWDLITVLDEQSRLEAQTPYLYSFNQHALPVTDIACFLGAIAVSSSEDRTCKVRKRLYYLXLNAMQKGCCLFLADSSYLHCLPSNTCGXLFTSFSIAFLLLPQIWSLSKGRMLRSIQFPTSIDSVALDPRSHVFYAGGRDGKIYVTAMGVDISSHGSDESSILGALDDHSKAVTSLVSSTDGLLLVSGSEDGNVRVWDTRSQQVTRKFKHSQGPVTNVLIVTPKRVNLPPLHPLRKVCSANGEVEPRSVILPRPENDVPIPGNRTSIFMERYLDELQKYGGSSMLFDSGLNIQNGAQNQQGEWRSRYLELQDLFVHEVLDQMPSSRNP

SEQ ID NO: 88701 - protein, 181 aa, Setaria italica
  Transcript Sequence Number=SeqID_22727
  Gene Ontology: Mol. function=binding
  Homolog annotation: Hit_ID=B9REU1; Match level="QueryCoverage=100%, HitCoverage=11%, E-value=2e-59, Identity=66%"; Hit description =Guanine nucleotide-exchange, putative
PESEESMSQALGICLYLLESSRSSDSVRNTAAATFRQAVALVFDNVIRAESLPSGKASSARLSSRVSSVADNVTHSFSRILSLASNSGEPTMRENLSDVGKLGLRLLEDLTALAAGGSATWLRVHSLHRTFALDILEFVLSTYVSIFRALLSYQQVLRHQICSLLMTSLRTNVELEGEAGE

SEQ ID NO: 88702 - protein, 52 aa, Setaria italica
  Transcript Sequence Number=SeqID_22728
  Gene Ontology: Mol. function=oxidoreductase activity; Cellular component=chloroplast envelope
  Homolog annotation: Hit_ID=B6U2Y9; Match level="QueryCoverage=84%, HitCoverage=10%, E-value=5e-15, Identity=86%"; Hit description=Aldo -keto reductase/ oxidoreductase
QMVDAWGGWSLFQTLLQTLKKVSLKHGVPIATVAVRYILNQVSLLHLNIKLA

SEQ ID NO: 88703 - protein, 337 aa, Setaria italica
  Transcript Sequence Number=SeqID_22729
  Gene Ontology: Mol. function=oxidoreductase activity; Cellular component=chloroplast envelope
  Homolog annotation: Hit_ID=B6U2Y9; Match level="QueryCoverage=99%, HitCoverage=82%, E-value=1e-174, Identity=88%"; Hit description=Aldo- keto reductase/ oxidoreductase
  Pfam annotation: Domain name=Aldo_ket_red; Domain location=6-319; Score=205.7; E_value=1.2e-58; Accession=PF00248.13; Description =Aldoketo reductase family
PTVSNRDDSLAICRVLNGMWQTSGGWGRIDRDAAVDAMLAYADAGLSTFDMADHYGPAEDLYGMFINRVRRERPPELLEEIKGLTKWVPPPVKMTRSYVEENINRSRKRMDVAALDMLQFHWWDYTNPGYLDALKHITDLKEEGKIKTVALTNFDTERLQIILENGIPVVSNQVQHSIVDMRPQQRMAELCQLTGVKLITYGTVMGGLLSEKFLDTNVSIPFAGPPLNTPSLQKYKRMVDAWGGWSLFQTLLQTLKKVSLKHGVPIATVAVRYILNQTSVAGSMVGVRLGLSEHIKDTNAIFSLELDEEDMNSITEVSKKGRNLMDIIGDCGDEYRA

SEQ ID NO: 88704 - protein, 111 aa, Setaria italica
  Transcript Sequence Number=SeqID_22730
  Gene Ontology: Mol. function=transferase activity, transferring nitrogenous groups; Biological process=biosynthetic process
  Homolog annotation: Hit_ID=Q5W6F9; Match level="QueryCoverage=100%, HitCoverage=23%, E-value=1e-41, Identity=71%"; Hit description =Putative 1-aminocyclopropane-1-carboxylate synthase
TQKALAAMLADDAFAAAYIRTNRERLRARHDYIVAGLARAGVPCLRGNAGLFVWMDMRRLLGEATVAGELRLWDRMLREVKLNISPGSSCHCSEPGWFRVCFANMSLDTLD

SEQ ID NO: 88705 - protein, 190 aa, Setaria italica
  Transcript Sequence Number=SeqID_22731
  Gene Ontology: Mol. function=histone-lysine N-methyltransferase activity; Cellular component=nucleus; Biological process=chromatin modification
  Homolog annotation: Hit_ID=B9H9Y6; Match level="QueryCoverage=100%, HitCoverage=67%, E-value=1e-58, Identity=59%"; Hit description=SET domain protein (Fragment)
  Pfam annotation: Domain name=SET; Domain location=50-167; Score=0.2; E_value=0.0022; Accession=PF00856.20; Description=SET domain
CSSRGLKYPYMAKRLACMVISGAANADCLNILQPARLHQGTLIEMEEEFELLESTFMKAGFQEELTTFLTKEWYINVLARIRINAFRIELVPSSYEDLLSSAAASVSCDASVGNAVYMLPSFYNHDCDPNSHIVWLENADAKLKALRDIEEGEELRICYIDTSMDVNARQRILADGFGFECHCHRCLSGD

SEQ ID NO: 88706 - protein, 80 aa, Setaria italica
  Transcript Sequence Number=SeqID_22732
  Subcellular localization annotation: CTP_CleavageSite=66; ConfidenceScore=5.05e-01
VSYKVMHVVLNTSKDEIRHCMSYLSMNQSNSSVRHVTRGTRFFFRDNQMHKQSGQIRLQGCFRPTRCPMDSLEPATLHTV

SEQ ID NO: 88707 - protein, 312 aa, Setaria italica
  Transcript Sequence Number=SeqID_22733
  Gene Ontology: Mol. function=protein tyrosine kinase activity; Cellular component=integral to membrane; Biological process=protein amino acid phosphorylation
  Homolog annotation: Hit_ID=B9RW50; Match level="QueryCoverage=91%, HitCoverage=40%, E-value=2e-95, Identity=59%"; Hit description=Lrr receptor-linked protein kinase, putative
  Pfam annotation: Domain name=Pkinase; Domain location=31-300; Score= -0.1; E_value=1.8e-08; Accession=PF00069.17; Description=Protein kinase domain
  Pfam annotation: Domain name=Pkinase_Tyr; Domain location=31-300; Score=6.8; E_value=3.5e-14; Accession=PF07714.9; Description=Protein tyrosine kinase
  Pfam module annotation: Pfam domain module=Pkinase::Pkinase_Tyr; Domain location=31-300::31-300
PPPRTSTPTSATPFSVASLQQYTNSFSEENVIRESRLGKVYLAELPDGKLLEVMKIDNANGRISVDDFLEQVECISEIKHPNILELVGYCAEYGQRLLVYNHFSRTTLDDALHDAEETGSALSWNARLQVALGSGKALEYLHESFQPPIVHQNFEPANVLLDKKFSVCVAECGLAEMMPSGSVTQLSGRMRALMNYEAPEFQDSGVISERGDVYSFGVVMLELLTGRKPYDSSRPRHEQHLVRWASSQLHDIESLSKMVDPSIRGQCSEKALSRFADIISRCVQRQPEFRPPMSEIVQDLARLVNATGEESE

SEQ ID NO: 88708 - protein, 69 aa, Setaria italica
  Transcript Sequence Number=SeqID_22734
  Gene Ontology: Mol. function=sugar binding
SDEPRHAQHCGAPGSPGLATALPPFAEPLGAHSSNLPFGMEPDGNGHSADLPQAADVGTGAAALGGAAG

SEQ ID NO: 88709 - protein, 209 aa, Setaria italica
  misc_feature (200)..(200): Xaa can be any naturally occurring amino acid
  Transcript Sequence Number=SeqID_22735
  Gene Ontology: Mol. function=hydrolase activity; Cellular component =chromosome
  Homolog annotation: Hit_ID=B4G027; Match level="QueryCoverage=100%, HitCoverage=50%, E-value=4e-93, Identity=81%"; Hit description=Acid phosphatase
  Pfam annotation: Domain name=SurE; Domain location=1-151; Score=6.4; E_value=3.4e-10; Accession=PF01975.9; Description=Survival protein SurE
TIRETITAISVDFTGAKAFEISGTPVDCVSLALSGRLFPWSAPALVISGINAGPNCGYEMFHSSAIAAAREALVYGVPSIVISLNWKKDESKDSDFKDAAQACLPLINAALADIEKGAFLKGCLLNIGVPSAPSANKGFKLTKQSEYSPAQSWQAVSTSRPSSAVHFMGMHQSLGIQLAQLGKDASAAGAARRVSAQRKXVEVESVAAA

SEQ ID NO: 88710 - protein, 222 aa, Setaria italica
  misc_feature (213)..(213): Xaa can be any naturally occurring amino acid
  Transcript Sequence Number=SeqID_22736
  Gene Ontology: Mol. function=transcription regulator activity; Cellular component=nucleus
SSISTSMERHPLLMTNTRQLEQGNMGELSDPRNILLKSLAYRNPLVHENTNMTLLHGRSQVSDFVNGHGGFDFLPEGTRVVKGNLYASTANQILEQRCSSTSGVTGHKATISYEMPQSSQYVMKMESPKGEAFQASAAVSSASHLSSSLKTAISQGKQMSSSDLAGPGKANEVQNPADVIVQAVKNMDRRKLPDISNERAPSLLMDPTAESDXLFDMFGSEF

SEQ ID NO: 88711 - protein, 76 aa, Setaria italica
  Transcript Sequence Number=SeqID_22737
  Homolog annotation: Hit_ID=B5RHT1; Match level="QueryCoverage=67%, HitCoverage=6%, E-value=1e-13, Identity=72%"; Hit description =Pentatricopeptide (PPR) repeat-containing protein
  Pfam annotation: Domain name=PPR; Domain location=12-46; Score=19.3; E_value=0.016; Accession=PF01535.12; Description=PPR repeat
TMPSFNVAPDEATLAALIAAYGKAAIPQEAVKLFRMMPDLGITRTALSYNAVLKAILCRGREAMARRIYNAMIAEG

SEQ ID NO: 88712 - protein, 79 aa, Setaria italica
  Transcript Sequence Number=SeqID_22738
SLLPYVNFTIQTPESIHHYPCIAETCTSSLLITEKLVVCCVCTVTKRLWGFMSESIFHQIKPLLFYISMDHQAGGQWIL

SEQ ID NO: 88713 - protein, 103 aa, Setaria italica
  misc_feature (6)..(6): Xaa can be any naturally occurring amino acid
  Transcript Sequence Number=SeqID_22739
  Gene Ontology: Mol. function=transferase activity, transferring glycosyl groups; Cellular component=cell wall
  Homolog annotation: Hit_ID=Q7XZZ4; Match level="QueryCoverage=100%, HitCoverage=9%, E-value=3e-44, Identity=89%"; Hit description=C2 domain-containing protein, putative, expressed
QWYTLXEGHCCEDGAAACDVMLAVWVGTQVDEAFQEAWHSDSGGYLVHTRSKAYLSPKLWYLRLSVIQAQDLRLPSPPDAKAKQCGGPIFPELYVKAQLGAQV

SEQ ID NO: 88714 - protein, 86 aa, Setaria italica
  Transcript Sequence Number=SeqID_22740
  Gene Ontology: Mol. function=transporter activity; Cellular component= integral to membrane; Biological process=transport
  Homolog annotation: Hit_ID=Q9ATN0; Match level="QueryCoverage=100%, HitCoverage=28%, E-value=3e-34, Identity=86%"; Hit description =Aquaporin PIP1-6
MAGGKLQDRFQDDEDVRVGVDRFPERHPIGATAADDLGRDYTEPPPAPLFDAAELSSWSFYRAGIAEFVATFLFLYVTVLAVMGVS

SEQ ID NO: 88715 - protein, 580 aa, Setaria italica
  Transcript Sequence Number=SeqID_22741
  Gene Ontology: Mol. function=translation elongation factor activity; Cellular component=cytoplasm; Biological process=translation
  Homolog annotation: Hit_ID=B9T217; Match level="QueryCoverage=98%, HitCoverage=96%, E-value=0.0, Identity=64%"; Hit description=Protein binding protein, putative
  Pfam annotation: Domain name=Ank; Domain location=34-64; Score=6.3; E_ value=4.5; Accession=PF00023.22; Description=Ankyrin repeat
  Pfam annotation: Domain name=Ank; Domain location=65-97; Score=18.3; E_value=0.033; Accession=PF00023.22; Description=Ankyrin repeat
  Pfam annotation: Domain name=BTB; Domain location=170-278; Score =31.6; E_value=3.1e-06; Accession=PF00651.23; Description=BTBPOZ domain
  Pfam annotation: Domain name=BTB; Domain location=338-455; Score =60.7; E_value=5.4e-15; Accession=PF00651.23; Description=BTBPOZ domain
  Pfam module annotation: Pfam domain module=Ank::Ank::BTB::BTB; Domain location=34-64::65-97::170-278::338-455
MDSKTDVELRGLDIDVELDPEDLQPSVPLKKVPGGDLFEAARAGDCDRLALLLEAGANVNARDRWDSVALYYACLAGHAEAARMLLEAGAVCAERTFDGDRCHYAALNLRLRWLLKSFEARPPPLAPLPAALRATFLACPANRAAFLEMLQGSAGAEATALAAAAGFGPKDDPSSACLFPPDITFYLDGKPVEAHRVILCARSPFFEKKFKTDWKDRKEVRFSNQKLYYGALYSLIHFFYSDRLEVAVDDMENLARACKVCKCEELQKILDSEVVHQKYAEYKSARELDLDNSQKRFILQAQSLPEEDRLPSTLQRILHTCLANSREEGYYSEDSNEMRKNLEEDLADLYIKVGDKVFHCHMVILASRSEYFRARLSRTVDFLEGSSGFQAAQNLPLLEEHDLSAEAFEKMLEYMYTDKLEHLDPDQAEELFDVASRYLLFPLKRVVADMLLPYLEHVSPAELCRWLMLSDIYGVMKIREYILDIIACNFEMFAGTLEFRALLLTLPPPSGDDSLRTTRPSAPGTAGNTDQGNILDDLREKWLEAEGAELDERDESAALFDKRLETLMLVAEKEAVDEDA

SEQ ID NO: 88716 - protein, 62 aa, Setaria italica
  Transcript Sequence Number=SeqID_22742
ARGHHQGEVWLTHLQVLLLLRQRMNVPAQLRLRSLPPVYKVIHFSAEKKEAGFVSRCTYTVW

SEQ ID NO: 88717 - protein, 63 aa, Setaria italica
  Transcript Sequence Number=SeqID_22743
  Homolog annotation: Hit_ID=B6T144; Match level="QueryCoverage=77%, HitCoverage=56%, E-value=5e-21, Identity=95%"; Hit description=B12D protein
  Pfam annotation: Domain name=B12D; Domain location=1-63; Score=53.3; E_value=9.2e-13; Accession=PF06522.3; Description=B12D protein
MCMLDLRSKLLEFYRVNKAGRAAGVLENHEEGRRYAMHGLRSFVHDKTPEIMPAINKFFTEPK

SEQ ID NO: 88718 - protein, 50 aa, Setaria italica
  Transcript Sequence Number=SeqID_22744
  Gene Ontology: Mol. function=voltage-gated chloride channel activity; Cellular component=integral to membrane
MASPLEDLPVEGEEQRPPLTRALLHRSATNNTSQVAMVGSNPCPIESLDY

SEQ ID NO: 88719 - protein, 64 aa, Setaria italica
  Transcript Sequence Number=SeqID_22745
  Subcellular localization annotation: CTP_CleavageSite=52; ConfidenceScore=5.51e-01
PHVPSHRHSPPPSPSHGKAPPPRGHRKFPPAYSTIAPSPAYYSAISPSNAPLAGQNGASPPWYF

SEQ ID NO: 88720 - protein, 111 aa, Setaria italica
  Transcript Sequence Number=SeqID_22746
  Gene Ontology: Mol. function=electron carrier activity; Cellular component=plasma membrane; Biological process=oxidation reduction
  Homolog annotation: Hit_ID=B6U863; Match level="QueryCoverage=100%, HitCoverage=20%, E-value=9e-37, Identity=72%"; Hit description =Cytochrome P450 CYP81A4
VNVYAIHRDPGMWADPAAFRPERFEAGGGAADGLFMMPFGMGRRKCPGEALALRTLGLVLGTLIQCFDWGAVGGAAGVDMAEGVGITLPRDVPLEAMCKPRQGMLRVLQEL

SEQ ID NO: 88721 - protein, 199 aa, Setaria italica
  Transcript Sequence Number=SeqID_22747
  Gene Ontology: Mol. function=electron carrier activity; Biological process=oxidation reduction
  Homolog annotation: Hit_ID=B6SYC0; Match level="QueryCoverage=100%, HitCoverage=38%, E-value=6e-91, Identity=80%"; Hit description =Cytochrome P450 CYP81A3v2
  Pfam annotation: Domain name=p450; Domain location=1-187; Score= -186.2; E_value=0.011; Accession=PF00067.14; Description=Cytochrome P450
GAETTSTTAEWAMSLLLNHPEALKKAQAEIDACVGPSRLLNADDVPRLGYLQCIISETLRLYPVVPTLIPHESTADCAVGGHHVPAGTMLLVNVYAIHRDPGVWEDPAEFRPERFEDGKAEGRLLMPFGMGRRKCPGETLALRTVGLVLGTLIQCFDWDRVDGVEVDMTESGGLTIPMAVPLEAMCRPRAVMRDVLEEL

SEQ ID NO: 88722 - protein, 147 aa, Setaria italica
  misc_feature (27)..(27): Xaa can be any naturally occurring amino acid
  Transcript Sequence Number=SeqID_22748
ALVAQKKDFSWLGLPAPSEGTVKRHSXGEEGIDIRTKTRRLAREKAAEQWNEERDKAAREAAEKGYTIPSGQSVSQSTDEMMEVDGPTEIGKSSPPLCADEMHKKDHHLATGIDSGSKHADLEKSFGVKSRIPGINLWSRMISGPSR

SEQ ID NO: 88723 - protein, 77 aa, Setaria italica
  Transcript Sequence Number=SeqID_22749
  Subcellular localization annotation: CTP_CleavageSite=63; ConfidenceScore=5.72e-01
TKTPCTVGKQVPHESKPGNQKKPNKTPPPASPFLPLPRSRRHTRLRCGRKARARARPWRASCRARSLSPRARPCTSR

SEQ ID NO: 88724 - protein, 56 aa, Setaria italica
  Transcript Sequence Number=SeqID_22750
DIQFKKFWLGGCSGITNKKRKQCKPIYRTCAIQKHQGCRVVIYLLFFGVGVLTKKK

SEQ ID NO: 88725 - protein, 170 aa, Setaria italica
  Transcript Sequence Number=SeqID_22751
  Gene Ontology: Mol. function=catalytic activity; Biological process =metabolic process
  Homolog annotation: Hit_ID=B9R8M5; Match level="QueryCoverage=95%, HitCoverage=29%, E-value=3e-60, Identity=65%"; Hit description=AMP dependent ligase, putative
MRREEEAGEVMFRGNTVMSGYYKDLKATQESMAGGWLHSGDLAVRHPDGYIQLRDRAKDIIISGGENISSIEVESVIFSHPAVLEAAVVARPDDHWGETPCAFVKLKDGASATEAEIISFCRERLPHYMAPKTVVFEDLPKTSTGKTQKFVLRDKARAMGSLTKAANSKL

SEQ ID NO: 88726 - protein, 139 aa, Setaria italica
  Transcript Sequence Number=SeqID_22752
  Gene Ontology: Mol. function=inositol or phosphatidylinositol phosphatase activity
  Homolog annotation: Hit_ID=Q9SIS4; Match level="QueryCoverage=92%, HitCoverage=30%, E-value=4e-41, Identity=60%"; Hit description =Putative inositol polyphosphate-5-phosphatase
DQVVLLGDLNYRISLEEAETRSLVKAKNWAILLENDQLLFEFSRGRHFEGWQEGLITFSPTYKYHPNSDQYYWCFDAARGEKKRAPAWCDRILWRGKGLKQVQYETCNYKLSDHRPVRAVFHAECDVSEGAEVNGQNPH

SEQ ID NO: 88727 - protein, 68 aa, Setaria italica
  Transcript Sequence Number=SeqID_22753
SIMNGIWASVTGSEKMPSKSKRKERTKNRFREEVQIFVYSISGAIQIFFFFSRLKFVYSGLWAFIFHR

SEQ ID NO: 88728 - protein, 517 aa, Setaria italica
  Transcript Sequence Number=SeqID_22754
  Gene Ontology: Mol. function=substrate-specific transmembrane transporter activity; Cellular component=integral to membrane; Biological process=transmembrane transport
  Homolog annotation: Hit_ID=Q6AWX0; Match level="QueryCoverage=96%, HitCoverage=99%, E-value=1e-175, Identity=63%"; Hit description=D -xylose-proton symporter-like 2
  Pfam annotation: Domain name=MFS_1; Domain location=69-468; Score =108.2; E_value=2.8e-29; Accession=PF07690.8; Description=Major Facilitator Superfamily
  Pfam annotation: Domain name=Sugar_tr; Domain location=65-517; Score =358.0; E_value=1.7e-104; Accession=PF00083.16; Description=Sugar (and other) transporter
  Pfam module annotation: Pfam domain module=MFS_1::Sugar_tr; Domain location=69-468::65-517
MASRPPPEPSSDSNKGWGDNEEIHVSSGGVQAYTDDDADCESRRPLLLGTPAAAECYSVPAAVLPFLFPALGGLLYGYDIGATSGATISLKSSKFSGTTWYNLSSVQTGLVVSGSLYGALIGSILAYTIADFLGRRKELILSSISYLIGALLTAAAPNFAIMVVGRLLYGIGIGLAMHAAPMYIAETAPSRIRGMLISLKEFFIVLGMLLGYIAGNLYVEVVSGWRYMYATSTPLCLIMGVGMCWLPSSPRWLLLCAIQGKRNLQETKEIATLCLCRLRGQASPDLVSEQVNLILEELSYIDEEKQAGFSEIFQGKCLKAMIIGCGLVFFQQVTGQPSVLYYAATIFQSAGFSGASDATRVSILLGLLKLIMTGVAVLVVDRLGRRPLLIGGVSGITVSLFLLSSYYTLLKDASYVAVIALLLYVGCYQLSFGPIGWLMISEVFPLKLRGRGLSVAVLVNFASNALVTFAFSPLEDLIGTGLLFCGFGVIAVASLVFIFWIIPETKGLTLEEIEASL

SEQ ID NO: 88729 - protein, 227 aa, Setaria italica
  misc_feature (209)..(209): Xaa can be any naturally occurring amino acid
  Transcript Sequence Number=SeqID_22755
  Gene Ontology: Mol. function=protein methyltransferase activity; Cellular component=cytoplasm; Biological process=protein amino acid methylation
  Homolog annotation: Hit_ID=B6U5U6; Match level="QueryCoverage=99%, HitCoverage=45%, E-value=3e-67, Identity=58%"; Hit description =Protein binding protein
  Pfam annotation: Domain name=zf-C3HC4; Domain location=2-33; Score =18.7; E_value=0.00075; Accession=PF00097.17; Description=Zinc finger, C3HC4 type (RING finger)
RKEQRTVMECLHRFCRDCIDKSMRLGNNECPACRTHCASRRSLRDDPNYDSLILALYPDIDKYEEEELAFSEQERTRNKKIQQSIAETFRRQTEALVKKRSAAKAPDAASTRKTRRNMRSRRRGRTSSPDIVPTDFEDEDREENGNDGSKESSSVDDRSPEVRPKRARRWPVPRRSPAKTIGSMDNGIEDNDDSGGARDLVTAAPLRGXMLAWGKMAPQPNRHGNAS

SEQ ID NO: 88730 - protein, 175 aa, Setaria italica
  misc_feature (15)..(15): Xaa can be any naturally occurring amino acid
  misc_feature (39)..(39): Xaa can be any naturally occurring amino acid
  Transcript Sequence Number=SeqID_22756
  Gene Ontology: Mol. function=protein tyrosine kinase activity; Biological process=protein amino acid phosphorylation
  Homolog annotation: Hit_ID=Q5JNH7; Match level="QueryCoverage=80%, HitCoverage=45%, E-value=3e-44, Identity=63%"; Hit description =Putative receptor-like protein kinase 1
GACISDFGIAKILSXDSSSCTRLPGITGYLAPELACTTXEKCDAYSFGVVVLELFMGSHPSDFLSTLLCTTQRSMPLKDLLETRLALPEAETAREIFGFVKVSLMCLDPNPATRPTMHSAIQKLSAVLRAGDADYLHTDIFNNGCTWNWFVTELISFPADQDPSFDGFLGYLLST

SEQ ID NO: 88731 - protein, 435 aa, Setaria italica
  Transcript Sequence Number=SeqID_22757
  Gene Ontology: Mol. function=phosphoribosylformylglycinamidine synthase activity; Cellular component=chloroplast; Biological process='de novo' IMP biosynthetic process
  Homolog annotation: Hit_ID=B9SDY9; Match level="QueryCoverage=99%, HitCoverage=30%, E-value=0.0, Identity=79%"; Hit description =Phosphoribosylformylglycinamidine synthase, putative
  Pfam annotation: Domain name=AIRS_C; Domain location=24-182; Score =102.7; E_value=1.2e-27; Accession=PF02769.14; Description=AIR synthase related protein, C-terminal domain
LKPIMFSGAIGQIDHAHISKGDPEIGMLVVKIGGPAYRIGMGGGAASSMVSGQNDAELDFNAVQRGDAEMAQKLYRVVRACAEMGENNPIISIHDQGAGGNCNVVKEIIYPKGAEIDIRSIVVGDHTLSVLEIWGAEYQEQDALLVKPESRSLLESLCQRERVSMAVIGKIDGCGKIVLIDSAAMEHAKLNGLPPPTPVEELELEKVLGDMPQKTFEFKRVSQVTEPLDIAPEVTLLDALKRVLRLPSVCSKRFLTTKVDRCVTGLVAQQQTVGPLQLPLADVAVIAQTYTDLTGGACSIGEQPIKGLLNPKAMARLAVGEALTNLVWAKVTSLADVKASGNWMYAAKLDGEGADMYDAAVALADCMVELGIAIDGGKDSLSMAAQCDGEVVKAPGNLVISTYVTCPDITLTVTPDLKLGKDGILLHIDLANGIA

SEQ ID NO: 88732 - protein, 61 aa, Setaria italica
  Transcript Sequence Number=SeqID_22758
EFEQAKATLDTAGKRTGLSSRFIFESKTRGKDTIAAELSTRLGAGGVHLGEATGRPVELTR

SEQ ID NO: 88733 - protein, 69 aa, Setaria italica
  Transcript Sequence Number=SeqID_22759
RELPQGLKLEKLNSYREKWQRHIQEDATVEIEEEGEFMVIGSLFGSDDEDDDGISLPETPATAAVAVGF

SEQ ID NO: 88734 - protein, 74 aa, Setaria italica
  Transcript Sequence Number=SeqID_22760
  Gene Ontology: Mol. function=heat shock protein binding
LGEDGALPAPGPGPSGPSKRTVLDDDSSSDDSSDDDIARTVPYRTPAFTQGIGRLFRCLCNPAYDVDDDFEPRK

SEQ ID NO: 88735 - protein, 70 aa, Setaria italica
  Transcript Sequence Number=SeqID_22761
EAAGRAAPRQPPGRSAAESAVNQPAAIWSAAPSICGIGVRVWEHWHGPERHDSDRLLLLALVVGARMEAP

SEQ ID NO: 88736 - protein, 228 aa, Setaria italica
  Transcript Sequence Number=SeqID_22762
  Gene Ontology: Mol. function=pyridoxal phosphate binding; Biological process=metabolic process
  Homolog annotation: Hit_ID=Q9LGZ2; Match level="QueryCoverage=99%, HitCoverage=47%, E-value=1e-112, Identity=81%"; Hit description =Isopenicillin N epimerase-like
VDAAHAIGQVPIDVRDIGADFYASNLHKWFFCPSAVAFLHIRKDDPIASELHHPVVSSEYGNGLPMESAWIGVRDYSAQLVVPDAVDFMSRFEGGIEGISRRNHDKVIEMGLMLAEAWGTFLGSPPEMCGSMVMIGLPGCLGIDSDDDAMKVRDMLRNDFKVEVPIFHNSRSVEGQEMAKDANGDQVTGYVRISHQVYNVREEYEVLRDAVNRLVLDGFSCSKLRPSG

SEQ ID NO: 88737 - protein, 99 aa, Setaria italica
  Transcript Sequence Number=SeqID_22763
  Subcellular localization annotation: CTP_CleavageSite=21; ConfidenceScore=5.21e-01
SASSSWRNTRWRRSLLRWTLTAASAPERRARYTVLNPPSPTTAEVNPPVIASTCAHDRPRGPASAPFSTFSSNTPKSPSSSPSRSPAAALAPHPQQKNL

SEQ ID NO: 88738 - protein, 134 aa, Setaria italica
  Transcript Sequence Number=SeqID_22764
  Gene Ontology: Mol. function=nucleic acid binding; Cellular component= nucleus; Biological process=metabolic process
  Homolog annotation: Hit_ID=B9HG87; Match level="QueryCoverage=97%, HitCoverage=14%, E-value=2e-55, Identity=76%"; Hit description =Chromatin remodeling complex subunit
  Pfam annotation: Domain name=Helicase_C; Domain location=3-76; Score =61.9; E_value=2.5e-15; Accession=PF00271.23; Description=Helicase conserved C-terminal domain
VGGIQFRRLDGAMSLNLREKGVNEFKNDPKVRVMLMSLKAGNLGLNMIAACHVIMLDPWWNPYAEDQAVDRAHRIGQTRPVTVSRFTVKDTVEDRILALQEKKRTMVQSAFGEDGSSGNATRLTDEDLRYLFMV

SEQ ID NO: 88739 - protein, 51 aa, Setaria italica
  Transcript Sequence Number=SeqID_22765
KKNLDACATVDQNITYASRWQVTSVRGKDLFCPDVPLSSSHTAPFLCSSHV

SEQ ID NO: 88740 - protein, 184 aa, Setaria italica
  Transcript Sequence Number=SeqID_22766
  Gene Ontology: Mol. function=protein dimerization activity; Biological process=RNA-dependent DNA replication
  Homolog annotation: Hit_ID=Q5VMY6; Match level="QueryCoverage=86%, HitCoverage=45%, E-value=1e-34, Identity=46%"; Hit description =Putative o-methyltransferase
  Pfam annotation: Domain name=Dimerisation; Domain location=31-79; Score=54.6; E_value=3.8e-13; Accession=PF08100.3; Description =Dimerisation domain
MSRVQEELSTQDMLRGYVEIHHLGLCHVKSMAFWCAIQLGIPSAIHRRGGAATLSDLVTETGVDPSKLPYLRRLMRVLTVSGIFAADQPASPVDYESETIYMLTPASRLLADGGASTTSCDISPMVRLLVRPTTTVSTYFNLEEWLKDDGTASLFEVVHGMTPWMMTKNRGGSRGPGLARAARG

SEQ ID NO: 88741 - protein, 100 aa, Setaria italica
  Transcript Sequence Number=SeqID_22767
HNGLDLKSLLGFLDRPAFEDGILEKYPVFLNIVLNHVSDDTSDLSCAVSCLKASFEMLGCKLWLRTTLSPSVMRNTLLGHCFHTRDEKSHKEIFDLFLPF

SEQ ID NO: 88742 - protein, 124 aa, Setaria italica
  misc_feature (26)..(26): Xaa can be any naturally occurring amino acid
  Transcript Sequence Number=SeqID_22768
  Gene Ontology: Mol. function=hydrolase activity, acting on ester bonds; Biological process=lipid metabolic process
  Homolog annotation: Hit_ID=Q7XXR3; Match level="QueryCoverage=100%, HitCoverage=48%, E-value=7e-54, Identity=80%"; Hit description=GDSL -like Lipase/Acylhydrolase family protein, expressed
  Pfam annotation: Domain name=Lipase_GDSL; Domain location=1-118; Score=-8.9; E_value=0.03; Accession=PF00657.14; Description=GDSL -like LipaseAcylhydrolase
AALADIYARKADILLRGYIGWNTRRXLQVMDKVFPKDSPVQPSLVIVYFGGNDSIAAHPSGLGPHVPVDEYIDNMRKIAEHLKSLSEKTRVIFLSCPPLNEEMLRRSTRFVAIISIHVCCNLHT

SEQ ID NO: 88743 - protein, 255 aa, Setaria italica
  Transcript Sequence Number=SeqID_22769
  Gene Ontology: Mol. function=hydrolase activity, acting on ester bonds; Biological process=lipid metabolic process
  Homolog annotation: Hit_ID=Q7XXR3; Match level="QueryCoverage=98%, HitCoverage=96%, E-value=1e-132, Identity=87%"; Hit description=GDSL- like Lipase/Acylhydrolase family protein, expressed
  Pfam annotation: Domain name=Lipase_GDSL; Domain location=8-202; Score=124.3; E_value=3.9e-34; Accession=PF00657.14; Description=GDSL- like LipaseAcylhydrolase
MLGRRPLIVLFGSSIVQYSFSNGGWGAALADIYARKADILLRGYIGWNTRRALQVMDKVFPKDSPVQPSLVIVYFGGNDSIAAHPSGLGPHVPVDEYIDNMRKIAEHLKSLSEKTRVIFLSCPPLNEEMLRRSTSTILSEIVRTNETCRLYSDACVALCKEMNLKVVDLWHAMQTREDWMTACFTDGLHLSEEGSNIVVEEILKVLKEADWDPCLHWKAMPTEFAEDSPYDLVSSSGDATVNPSEWTIHRRIPWD

SEQ ID NO: 88744 - protein, 69 aa, Setaria italica
  Transcript Sequence Number=SeqID_22770
EMIQFWKRIQKNVYANAGIPNRRELVKCISDMNTEKAVKTLACIISNKEDSTIRMSKHELKKMFKKRTN

SEQ ID NO: 88745 - protein, 137 aa, Setaria italica
  Transcript Sequence Number=SeqID_22771
  Gene Ontology: Mol. function=electron carrier activity; Biological process=oxidation reduction
  Homolog annotation: Hit_ID=A4D8H9; Match level="QueryCoverage=100%, HitCoverage=26%, E-value=2e-69, Identity=87%"; Hit description=P450 monooxygenase
TMVVLSMHPEWQDRAREEVLGLFGKNKPEYEGLSRLKTVTMILYEVLRLYPPAISFLRKTYKEMEIGGITYPAGVILELPVLFIHHDPDIWGRDVHEFRPDRFSEGISKASKDPGAFLPFGWGPRICIGQNFALLEA

SEQ ID NO: 88746 - protein, 112 aa, Setaria italica
  Transcript Sequence Number=SeqID_22772
EWRNWNLAGGRSGETKSRPEAEETSVVRASGSVHQPRIRSLLSLSAGPKKRRSGPSPRRNNGAGTENRSFRGAESKRRPRTGENPAGEPRGKLVVVAGEKRKGKRRATPSAG

SEQ ID NO: 88747 - protein, 123 aa, Setaria italica
  Transcript Sequence Number=SeqID_22773
  Subcellular localization annotation: CTP_CleavageSite=50; ConfidenceScore=5.15e-01
TSHLFDVRDAIASNRTSSAAAAGGATDHGGRIGSSDWIGSSSRPLSRTTSAAAASTGFALGSLHLLSKGMRGAAAGSNGYHPNGDANTTSSDPVVTREALGSRLETHLVLRHATEDRQGTQGI

SEQ ID NO: 88748 - protein, 523 aa, Setaria italica
  misc_feature (15)..(15): Xaa can be any naturally occurring amino acid
  Transcript Sequence Number=SeqID_22774
  Gene Ontology: Mol. function=binding; Biological process=cell redox homeostasis
  Homolog annotation: Hit_ID=B6U8P1; Match level="QueryCoverage=100%, HitCoverage=76%, E-value=0.0, Identity=79%"; Hit description =Electron transporter
  Pfam annotation: Domain name=TPR_1; Domain location=113-146; Score =10.6; E_value=0.31; Accession=PF00515.20; Description=Tetratricopepti de repeat
  Pfam annotation: Domain name=TPR_1; Domain location=240-273; Score =17.1; E_value=0.052; Accession=PF00515.20; Description =Tetratricopeptide repeat
  Pfam annotation: Domain name=TPR_1; Domain location=286-319; Score =6.9; E_value=0.87; Accession=PF00515.20; Description=Tetratricopeptid e repeat
  Pfam annotation: Domain name=TPR_1; Domain location=320-353; Score =39.5; E_value=1.3e-08; Accession=PF00515.20; Description =Tetratricopeptide repeat
  Pfam annotation: Domain name=TPR_1; Domain location=354-387; Score =7.5; E_value=0.73; Accession=PF00515.20; Description=Tetratricopeptid e repeat
  Pfam annotation: Domain name=TPR_1; Domain location=45-78; Score =30.0; E_value=9.9e-06; Accession=PF00515.20; Description =Tetratricopeptide repeat
  Pfam annotation: Domain name=TPR_1; Domain location=79-112; Score =21.1; E_value=0.0046; Accession=PF00515.20; Description =Tetratricopeptide repeat
  Pfam annotation: Domain name=TPR_2; Domain location=113-146; Score =16.0; E_value=0.16; Accession=PF07719.9; Description=Tetratricopeptid e repeat
  Pfam annotation: Domain name=TPR_2; Domain location=156-189; Score =4.1; E_value=11; Accession=PF07719.9; Description=Tetratricopeptide repeat
  Pfam annotation: Domain name=TPR_2; Domain location=191-224; Score =10.1; E_value=1.9; Accession=PF07719.9; Description=Tetratricopeptide repeat
  Pfam annotation: Domain name=TPR_2; Domain location=240-273; Score =26.9; E_value=8.5e-05; Accession=PF07719.9; Description =Tetratricopeptide repeat
  Pfam annotation: Domain name=TPR_2; Domain location=286-319; Score =17.4; E_value=0.058; Accession=PF07719.9; Description=Tetratricopepti de repeat
  Pfam annotation: Domain name=TPR_2; Domain location=320-353; Score =26.9; E_value=8.4e-05; Accession=PF07719.9; Description =Tetratricopeptide repeat
  Pfam annotation: Domain name=TPR_2; Domain location=354-387; Score =16.4; E_value=0.12; Accession=PF07719.9; Description=Tetratricopeptid e repeat
  Pfam annotation: Domain name=TPR_2; Domain location=45-78; Score =29.1; E_value=1.8e-05; Accession=PF07719.9; Description =Tetratricopeptide repeat
  Pfam annotation: Domain name=TPR_2; Domain location=79-112; Score =25.0; E_value=0.0003; Accession=PF07719.9; Description =Tetratricopeptide repeat
  Pfam annotation: Domain name=TPR_4; Domain location=113-138; Score =8.3; E_value=4.4; Accession=PF07721.6; Description=Tetratricopeptide repeat
  Pfam annotation: Domain name=TPR_4; Domain location=191-216; Score =7.1; E_value=6.2; Accession=PF07721.6; Description=Tetratricopeptide repeat
  Pfam annotation: Domain name=TPR_4; Domain location=240-265; Score =19.7; E_value=0.012; Accession=PF07721.6; Description=Tetratricopepti de repeat
  Pfam annotation: Domain name=TPR_4; Domain location=79-104; Score =18.9; E_value=0.022; Accession=PF07721.6; Description=Tetratricopepti de repeat
  Pfam annotation: Domain name=Thioredoxin; Domain location=418-517; Score=7.5; E_value=5.2e-05; Accession=PF00085.12; Description =Thioredoxin
  Pfam module annotation: Pfam domain module=TPR_1::TPR_1::TPR_1::TPR _1::TPR_1::TPR_1::TPR_1::TPR_2::TPR_2::TPR_2::TPR_2::TPR_2::TPR _2::TPR_2::TPR_2::TPR_2::TPR_4::TPR_4::TPR_4::TPR_4::Thioredoxin; Domain location=113-146:...
  Pfam module annotation: Domain location=:240-273::286-319::320 -353::354-387::45-78::79-112::113-146::156-189::191-224::240-273::286- 319::320-353::354-387::45-78::79-112::113-138::191-216::240-265::79 -104::418-517
  Subcellular localization annotation: CTP_CleavageSite=50; ConfidenceScore=5.26e-01
YGHGSIMRGAGMAPXARSSIDAPSFLGHSSRSPASSPASGGGGSLQEVTRLGNEWYKKGKYAEALRYYERAVSLCPESAACRGNRAAALIGLGRLADALRECEEAVRLDPASGRAHSRLAGVCLRLGMIDKARRNFTQAGHLQQSDPAEWQKLQEVEMHLGRSTDARKIGDWKSALREADAAIASGADSSQLLLALRSEALLRLHKLDEAESTLASLLKLDGTLPSSLTAAKLSGMLAESYVHIVRAQVDMALGRFDTAVAAAEKARDLDPGNAEVGMILNNVRLVAKARAQGNDLFKVGKFSDASIAYGEGLKYDPSNSVLHCNRAACWSKLEKWEKAVDDCNEALRIQPNYTKALLRRAASYAKLERWADCVRDYEVLRKELPSDKEVAEALFHAQIALKATRGEDVSNMKFGGEVEIVTNVEQLHAAIGSPGVSVVYFMSAMNQQCTQITPSVNTLCTECPSVNFLKVNVDSSPLVAKAENVRIVPTFKIYKDGMKVKEMICPTLHVLRYTVRHYSVSSS

SEQ ID NO: 88749 - protein, 95 aa, Setaria italica
  Transcript Sequence Number=SeqID_22775
  Pfam annotation: Domain name=DUF593; Domain location=1-80; Score =103.9; E_value=5.4e-28; Accession=PF04576.7; Description=Protein of unknown function, DUF593
RAELQRELEKERSAAASAAEEAMAMILRLQKDKSALEIEARQQRRTADERCAFYEDEVEELRDIVLLREREARALRKEVDAYRRLLGLRPRPGRR

SEQ ID NO: 88750 - protein, 57 aa, Setaria italica
  Transcript Sequence Number=SeqID_22776
QNKVQSVYRSSLLVMNTKVAFAKCYLGLYVCMLSFSGCRARYKLMNWLVDGSLFLSS

SEQ ID NO: 88751 - protein, 144 aa, Setaria italica
  misc_feature (124)..(124): Xaa can be any naturally occurring amino acid
  Transcript Sequence Number=SeqID_22777
  Gene Ontology: Mol. function=metal ion binding; Cellular component =intracellular
  Homolog annotation: Hit_ID=Q7F9L7; Match level="QueryCoverage=99%, HitCoverage=24%, E-value=2e-59, Identity=76%"; Hit description =OSJNBa0006A01.7 protein
  Pfam annotation: Domain name=zf-C3HC4; Domain location=53-102; Score =7.0; E_value=0.016; Accession=PF00097.17; Description=Zinc finger, C3HC4 type (RING finger)
RGEEIVLSKNDVTCDADKRACLDNGSPNVIIPRMMRYNDNKHHEAFLRAIHDCMICFSECPGVDFIKLPCHHFFCCKCMQTYCKMNVKEGNVVKLLCPDTKCESAVPPNVLKRLLGEDEFERWXGLLLQRTLDAMSDVVYCPRC

SEQ ID NO: 88752 - protein, 278 aa, Setaria italica
  misc_feature (21)..(21): Xaa can be any naturally occurring amino acid
  Transcript Sequence Number=SeqID_22778
  Gene Ontology: Mol. function=metal ion binding; Cellular component =intracellular
  Homolog annotation: Hit_ID=Q01HG7; Match level="QueryCoverage=99%, HitCoverage=98%, E-value=1e-115, Identity=72%"; Hit description =OSIGBa0142I02-OSIGBa0101B20.22 protein
  Pfam annotation: Domain name=FYVE; Domain location=134-261; Score= -18.9; E_value=0.072; Accession=PF01363.13; Description=FYVE zinc finger
  Pfam annotation: Domain name=IBR; Domain location=40-99; Score=38.3; E_value=3.1e-08; Accession=PF01485.13; Description=IBR domain
  Pfam module annotation: Pfam domain module=FYVE::IBR; Domain location= 134-261::40-99
LTKMNVKEGNVVKLLCPDTKXESAVPPNVLKRLLGEDEFERWEGLLLQRTLDAMSDVVYCPRCQTACLEDVVGNEAVCSSCLFSFCTLCRNRRHIGEQCMSPAEKLLILEKRQESGQVQADQQRIVEELKSLKEIMKDAKQCPKCKMAISKTEGCNKMHCWNCGEYFCYQCNRAITGYEHFKGSCALFPQEEIDRWEVQMNPRVRRQFVAQAHAEMHVQHGQAHLCPTCRQPSPKVGNNNHLFCWACQKHFCALCHKPVPKTAQHYGPKGCKQHTSDP

SEQ ID NO: 88753 - protein, 162 aa, Setaria italica
  Transcript Sequence Number=SeqID_22779
  Gene Ontology: Mol. function=binding
  Homolog annotation: Hit_ID=UPI0001A7B04D; Match level="QueryCoverage =100%, HitCoverage=13%, E-value=2e-38, Identity=46%"; Hit description= nucleotide binding
HRVLAASLLLQLDMMEKTDGRSVFQDEAMEVLLDSLSSQENSKVQVLSASFLSNLGGTYSWSGEPYTAAWVAKKAGLTSTSHRNTIRSIDWLDSCLQDTEIITWSSRSARAIIKIGIPFISALAKGMQSKIKGISHDCLVCTAWLGSELAALGENAIRYSAC

SEQ ID NO: 88754 - protein, 390 aa, Setaria italica
  Transcript Sequence Number=SeqID_22780
  Gene Ontology: Mol. function=binding; Cellular component=ubiquitin ligase complex; Biological process=protein ubiquitination
  Homolog annotation: Hit_ID=B9RT68; Match level="QueryCoverage=100%, HitCoverage=28%, E-value=1e-116, Identity=51%"; Hit description =Nucleotide binding protein, putative
  Pfam annotation: Domain name=WD40; Domain location=100-136; Score =8.2; E_value=4.2; Accession=PF00400.24; Description=WD domain, G -beta repeat
  Pfam annotation: Domain name=WD40; Domain location=142-180; Score =33.6; E_value=7.7e-07; Accession=PF00400.24; Description=WD domain, G-beta repeat
  Pfam annotation: Domain name=WD40; Domain location=353-388; Score =1.1; E_value=29; Accession=PF00400.24; Description=WD domain, G-beta repeat
  Pfam module annotation: Pfam domain module=WD40::WD40::WD40; Domain location=100-136::142-180::353-388
LGSELAALGENAIRYSACEILLHDIASHLHPGFDLDERVLACMCLYNYTSGKGKQMLMSLSEGSRESLRRLSSFTWMAEELLQVTDYFLSSKPRVSCVHTQILEIGQPSNGAATAIAVFRGQLFAGYSNGTIRAWDIKGQRAVIIREVKEHKKAVTCFTLSETGENLLSGSADKSIRVWEMAQRKLECVEVIQTREAVQKLDICGDKILVLTQNNVLKFSCASRSSQTLYRGKHVKSLAVCQGKAYLGCTDLSIQELDMSVESKIEIRAPKRRWRIRKQSISAIVVYKDLLYCAGAQVEGSALKDWKKRCKPNMTMPLPKGTSVEAMAVVEDFIYLNCSKSPSIIQIWLREKQQKVGRLSAGSKVTSLFAANDMIFCGTETGLIKAWIPL

SEQ ID NO: 88755 - protein, 83 aa, Setaria italica
  misc_feature (45)..(45): Xaa can be any naturally occurring amino acid
  Transcript Sequence Number=SeqID_22781
  Subcellular localization annotation: CTP_CleavageSite=58; ConfidenceScore=5.03e-01
TSRFHHKGDLHCTGDKRFSSFQTWFKPMLVDFGWLRRYPKGLNVXFSGQGRECPNLMRAFQVWWRRSFVRSSRLNRKRIRLGV

SEQ ID NO: 88756 - protein, 80 aa, Setaria italica
  misc_feature (44)..(44): Xaa can be any naturally occurring amino acid
  Transcript Sequence Number=SeqID_22782
  Homolog annotation: Hit_ID=Q2QWP0; Match level="QueryCoverage=81%, HitCoverage=12%, E-value=4e-18, Identity=65%"; Hit description =F13j11 PRLI-interacting factor G, putative, expressed
GEVAVEGKVEVESFREAVEMMLEDEDETAAMRRLARGGVARAIXAFSRGVNNCLMYLEAVPWNESEEDIIKQLLSQHSSY

SEQ ID NO: 88757 - protein, 62 aa, Setaria italica
  Transcript Sequence Number=SeqID_22783
DGFASIVCSYPRLNKILLGSRPVKYSIRQVTYAIILTTLQHESRFFPMVARLEHCCCLTTNI

SEQ ID NO: 88758 - protein, 117 aa, Setaria italica
  Transcript Sequence Number=SeqID_22784
  Subcellular localization annotation: CTP_CleavageSite=18; ConfidenceScore=5.16e-01
REVTAWRRSTSSTATTATATAAFSPIPPAPLRVGEGEPPPFLGSGTNSNRDRIRKRREEEDDDMMMFLFPALYLMGSAREGGVKKKRHISEETGEVKVRRLLEGHIKNCQVTFRMEP

SEQ ID NO: 88759 - protein, 128 aa, Setaria italica
  Transcript Sequence Number=SeqID_22785
  Subcellular localization annotation: CTP_CleavageSite=35; ConfidenceScore=5.45e-01
KPIQISATTYSQSMGNRLLSLRQFLLTMNNHCTTLLQTKKQFLSTQDDTVSTPLFLGQRGCSLGSSPNWQQVSPCRSLESARRRQSLSRWWPSKMCYAAMPSPRVTTPPPRAAASSPRAPPVESPRVA

SEQ ID NO: 88760 - protein, 72 aa, Setaria italica
  misc_feature (8)..(8): Xaa can be any naturally occurring amino acid
  Transcript Sequence Number=SeqID_22786
  Subcellular localization annotation: CTP_CleavageSite=42; ConfidenceScore=5.24e-01
SCSLVSFXLASCLASYFACFVLISRNLSIMTSIFALFLGLCPSFLVSFLMQPFFVLHLPPLHLLHHFLLLAV

SEQ ID NO: 88761 - protein, 90 aa, Setaria italica
  misc_feature (73)..(73): Xaa can be any naturally occurring amino acid
  Transcript Sequence Number=SeqID_22787
  Gene Ontology: Mol. function=transposase activity; Biological process= transposition, DNA-mediated
QAEDEAKHLARENKARDKEAAKGDEYSIKRCISIINTMEVTKQEKAKAYAIFTKSKENRETFYCASEEDEESXLIWLRMRWPSRDGKCCG

SEQ ID NO: 88762 - protein, 54 aa, Setaria italica
  Transcript Sequence Number=SeqID_22788
HNKSLSVFFALGEDCIRFGLFLFLFTFLFVVCINFVIYLHLLMEYSSTFRQDLP

SEQ ID NO: 88763 - protein, 154 aa, Setaria italica
  Transcript Sequence Number=SeqID_22789
  Gene Ontology: Mol. function=transposase activity; Biological process= transposition, DNA-mediated
  Homolog annotation: Hit_ID=Q2QT97; Match level="QueryCoverage=99%, HitCoverage=20%, E-value=1e-69, Identity=79%"; Hit description =Transposon protein, putative, CACTA, En/Spm sub-class
  Pfam annotation: Domain name=Plant_tran; Domain location=24-136; Score=-50.9; E_value=0.04; Accession=PF04827.6; Description=Plant transposon protein
CDFDLNITFISSGWEGSATDSRVLRSAMSKGFQVPPGKFYLVDGGYANTPSFLAPYRGVRYHLKEFGAGHRRPQNSKELFNHRHALLRNHVERTLGVLKKRFPILKVATFHTLENQVKIPIAASIFHNLIRLLHGDEKWLDHQPVLIIDPTHFC

SEQ ID NO: 88764 - protein, 81 aa, Setaria italica
  Transcript Sequence Number=SeqID_22790
NPALEHDQSLDELKIKLEPKKVNISCIYIEAHQGDHPEKPTPQCSRQVFFDGEKATERVEAGREPVAVEDVPRRRVVASPG

SEQ ID NO: 88765 - protein, 53 aa, Setaria italica
  Transcript Sequence Number=SeqID_22791
DETGDGAVLGVWMMFYVCDWLVTGHCLDVDVDKELVTTNNDGDFPAGREPLIM

SEQ ID NO: 88766 - protein, 117 aa, Setaria italica
  Transcript Sequence Number=SeqID_22792
  Gene Ontology: Mol. function=protein binding
  Homolog annotation: Hit_ID=Q2QWP0; Match level="QueryCoverage=64%, HitCoverage=12%, E-value=1e-25, Identity=69%"; Hit description =F13j11 PRLI-interacting factor G, putative, expressed
RFSFFQAWFRPMLVDFGWLRRYPKGLNVTTLEEGIGQALLTLTLAQQQVLFMEWFEAFSGQGRECPNLMRAFQVWWRRSFIPPAPLRVGKGEPPPSWDPVPTPIVMVGKGSPKLNVI

SEQ ID NO: 88767 - protein, 51 aa, Setaria italica
  Transcript Sequence Number=SeqID_22793
  Gene Ontology: Mol. function=magnesium ion binding; Cellular component=integral to membrane; Biological process=photosynthesis, light harvesting
  Homolog annotation: Hit_ID=Q9SDM1; Match level="QueryCoverage=96%, HitCoverage=20%, E-value=2e-21, Identity=95%"; Hit description =Chlorophyll a-b binding protein 1B-21, chloroplastic
AGRLAMLAFVGFCVQQSAYPGTGPLENLATHLADPWHNNIGDIIIPRTIYP

SEQ ID NO: 88768 - protein, 64 aa, Setaria italica
  Transcript Sequence Number=SeqID_22794
ALHYKGFPAGRKVAVVVRCTVPARTQAVPSNQPITHIEHHPHSQHSPISCLVSSSSLTIISAQG

SEQ ID NO: 88769 - protein, 126 aa, Setaria italica
  Transcript Sequence Number=SeqID_22795
VSMKYMVFKDRKLIAVTANNSLLFFCKLCNHDRLAVTSDSKDLHGDTCCQFGLLPRLQPLWPRNSTLLYVMNYVYVSVRLTCENHFCLFAPYFYISFLFLFPGGGVETVSSCVDRNCFFVCSNVVQ

SEQ ID NO: 88770 - protein, 101 aa, Setaria italica
  Transcript Sequence Number=SeqID_22796
REETDAPLAAREATRRRREVAAWRRSTSPTATTMTATATFSPIPPAPLRVGEGEPPPSWDPVPTPIAMVGKGSPKLNVIARGSPKLSRFLPTTSAIKKSFS

SEQ ID NO: 88771 - protein, 155 aa, Setaria italica
  misc_feature (150)..(150): Xaa can be any naturally occurring amino acid
  Transcript Sequence Number=SeqID_22797
  Gene Ontology: Mol. function=transposase activity; Biological process= transposition, DNA-mediated
  Homolog annotation: Hit_ID=Q2QT97; Match level="QueryCoverage=85%, HitCoverage=17%, E-value=5e-29, Identity=47%"; Hit description =Transposon protein, putative, CACTA, En/Spm sub-class
MNISLRDRIRKRREEEDDDMMMFLFPALYLMGSAREGGVKKKRHISEETGEVKVRRLLEGHIKNCQVTFRMEPHIFKELATYLRRKILVVDTRITVEEKLGFFLYMLSRNASYEDLAVTFGHSNDTFHRHINHFFKKVIPTLSRRFLQSXDPNQV

SEQ ID NO: 88772 - protein, 224 aa, Setaria italica
  Transcript Sequence Number=SeqID_22798
  Gene Ontology: Mol. function=bile acid:sodium symporter activity; Cellular component=membrane; Biological process=sodium ion transport
  Homolog annotation: Hit_ID=B6UCT7; Match level="QueryCoverage=96%, HitCoverage=54%, E-value=2e-88, Identity=79%"; Hit description=Bile acid sodium symporter/ transporter
  Pfam annotation: Domain name=SBF; Domain location=1-105; Score=-53.8; E_value=0.1; Accession=PF01758.8; Description=Sodium Bile acid symporter family
VVQVTLVAKGDVPLSIVMTVCSTLAAVFLTPLLTKVLAGAYIPVDAVKLSLSTLQVFVAPILLGSSIQTAFPSIVQFVTPFAPLMAVLASSLLACSVFSENFVRLSSTIADASSVNGNFFSGDIGVVMLSVSLLHFAGFFVGYTAAAISGLKEKQRRAISIEVGMQNSSLGVVLAAAHFSSPLVSLPPALSAVIMNIMGSTLGLVWQYITPSDLENETTGMHNA

SEQ ID NO: 88773 - protein, 52 aa, Setaria italica
  Transcript Sequence Number=SeqID_22799
  Gene Ontology: Mol. function=magnesium ion binding; Cellular component=integral to membrane; Biological process=photosynthesis, light harvesting
  Homolog annotation: Hit_ID=Q9SDM1; Match level="QueryCoverage=96%, HitCoverage=20%, E-value=2e-18, Identity=90%"; Hit description =Chlorophyll a-b binding protein 1B-21, chloroplastic
AGRLAMLAFVGFCVQDKSAYPGTRPLENLATHLADPWHNNIGDIIIPRTIYP

SEQ ID NO: 88774 - protein, 139 aa, Setaria italica
  Transcript Sequence Number=SeqID_22800
  Gene Ontology: Mol. function=transposase activity; Biological process= transposition, DNA-mediated
  Homolog annotation: Hit_ID=Q2QT97; Match level="QueryCoverage=69%, HitCoverage=12%, E-value=2e-21, Identity=44%"; Hit description =Transposon protein, putative, CACTA, En/Spm sub-class
TTPFFLGSGTNSNSSAMNISLRDRIRKRREEEDDDMMMFLFPALYLMGSAREGVKKKRHTSEETGEVKVRRLLEGHIKNCQVTFRMEPHIFKEVETYLRRKRLVVDTRITVEEKLGFFLYMLSRNASYEDLAVTFWAQQ

SEQ ID NO: 88775 - protein, 113 aa, Setaria italica
  Transcript Sequence Number=SeqID_22801
NHVENLTLQFWIVRSIKQFWIYYIDELELIAISSTFTRSTQYLNSFIITCTKEPCSTKHHLSSIWREGSGRRRGGGRWRCCAATPRARAVSRAANGVSVSSRRVWPGTDPRGM

SEQ ID NO: 88776 - protein, 244 aa, Setaria italica
  misc_feature (152)..(152): Xaa can be any naturally occurring amino acid
  Transcript Sequence Number=SeqID_22802
  Gene Ontology: Mol. function=transposase activity; Biological process= transposition, DNA-mediated
  Homolog annotation: Hit_ID=Q53MW6; Match level="QueryCoverage=81%, HitCoverage=26%, E-value=3e-49, Identity=54%"; Hit description =Transposon protein, putative, CACTA, En/Spm sub-class
REVTAWRRSTSSTATTATATAAFSPIPPAPLRVGEGEPPPSWDPVPTPIAMVGKGSPKLNVIARGSPKLSRFLPTTSAIKKKPSPTCSGAKRSGGKQRADWNPTLEKSLVEILHEYKDSGYRSDNGWNTEGWNKMVKEFHLRNKSVSYTKAXIQDKECQLKRDYKMLKAARMQSGSKWNEQRNMVEGSASMWENLIVTFPKIKKFQNNKASFPLFDALGELYDGHLAEGTYNFTSIESEHVPRR

SEQ ID NO: 88777 - protein, 164 aa, Setaria italica
  Transcript Sequence Number=SeqID_22803
  Gene Ontology: Mol. function=transposase activity; Biological process= transposition, DNA-mediated
  Homolog annotation: Hit_ID=Q53MW6; Match level="QueryCoverage=58%, HitCoverage=14%, E-value=3e-19, Identity=54%"; Hit description =Transposon protein, putative, CACTA, En/Spm sub-class
RSLPGHTRREERNAPLAAREVAAWRREVTACRRSTSSTATTATATAAFSPIPPAPLRVGKGEPPPSWDPVPTPIVMVGKGSPKLNVIARGSPKLSRFLPTTSAIKKKPSPKCSGAKRSGGSPRGKQRADWNPTLEKSLVEILHEYKDSGYRSDNGWNTEGGTRW

SEQ ID NO: 88778 - protein, 466 aa, Setaria italica
  misc_feature (119)..(119): Xaa can be any naturally occurring amino acid
  misc_feature (240)..(240): Xaa can be any naturally occurring amino acid
  Transcript Sequence Number=SeqID_22804
  Gene Ontology: Mol. function=transposase activity; Cellular component= membrane; Biological process=transposition, DNA-mediated
  Homolog annotation: Hit_ID=Q2QT97; Match level="QueryCoverage=79%, HitCoverage=49%, E-value=1e-138, Identity=61%"; Hit description =Transposon protein, putative, CACTA, En/Spm sub-class
  Pfam annotation: Domain name=Plant_tran; Domain location=301-413; Score=-54.5; E_value=0.096; Accession=PF04827.6; Description=Plant transposon protein
  Pfam annotation: Domain name=Transposase_11; Domain location=240-406; Score=3.5; E_value=0.028; Accession=PF01609.13; Description =Transposase DDE domain
  Pfam module annotation: Pfam domain module=Plant_tran::Transposase _11; Domain location=301-413::240-406
RREERNAPLAAREVAAWRREVTACRRSTSSTATTATATAAFSPIPPAPLRVGKGEPPPFLGSGTNSNSSTVNISLRDRIRKRREEEDDDMMMFLFPALYLMGFAREGGVKKKHHTSEEXGEVKVRRLLEGHIKNCQVTFRMEPHIFKELATYLRRKRLVVDTRITVEEKLRFFLYMLSRNASYEDLAVTFEHSNDTFHRHTNHFFKKVILTLSRRFLQSPDPNQVHQKIQDNPRFYPFFXNCLGAIDGTHIPVSISPEKHSPFRNRKGTLSINVMVACDFDLNITFISSGWEGSATDSRVLRSAMSKGFQVPPGKFYLVDGGYANTPSFLAPYQGVRYHLKEFGAGHRRPQNSKELFNHRHALLRNHVERTLGVLKKRFPILKVATFHTLENQVKIPIAASIFHNLIQLLHGNEEWLDHQPDNIDPIHFVSLPNGDQNNDSGTAQGNALRDTIAQEMWVQYQQHVN

SEQ ID NO: 88779 - protein, 356 aa, Setaria italica
  misc_feature (29)..(29): Xaa can be any naturally occurring amino acid
  misc_feature (211)..(211): Xaa can be any naturally occurring amino acid
  misc_feature (317)..(317): Xaa can be any naturally occurring amino acid
  Transcript Sequence Number=SeqID_22805
  Gene Ontology: Mol. function=transposase activity; Biological process= transposition, DNA-mediated
  Homolog annotation: Hit_ID=Q53MW6; Match level="QueryCoverage=55%, HitCoverage=25%, E-value=2e-50, Identity=54%"; Hit description =Transposon protein, putative, CACTA, En/Spm sub-class
  Subcellular localization annotation: CTP_CleavageSite=38; ConfidenceScore=5.54e-01
MVGKGSPKLNVIARGSPKLSRFLPTTSAXKKKPSPTCSGAKRSGGKQRVDWNPTLEKSLVEILHEYKDSGYRSDNGWNTEGWNKMVKEFHLRNKSVSYTKAQIQDKECQLKRDYKMLKAARMQSGSKWNEQRNMVEGSASMWENLIVTFPKIKKFQNNKASFPLFDALGELYDGHLAEGTYNFTSIESERVEEPLQQIDVVEEEAEEEALXEIYEIRDEEDEEKDARDKEEEARSGQRRMVASRKKPEKEGQRPKKECKKLKLMMERFLEMRTKQAEDEAQQLARENETREKKDAKGDEYSIKKCISIINTMEVTKXEKAKAYAIFTKSKENRETFICASEEDEESALIWLRNEMA

SEQ ID NO: 88780 - protein, 404 aa, Setaria italica
  Transcript Sequence Number=SeqID_22806
  Gene Ontology: Mol. function=protein binding
  Homolog annotation: Hit_ID=Q2QWP0; Match level="QueryCoverage=81%, HitCoverage=54%, E-value=1e-136, Identity=71%"; Hit description =F13j11 PRLI-interacting factor G, putative, expressed
PPPPPAAAVEKPRATLRLRLVEKGVVLEVDEVERVRRESKVVRKVLGGRGGEVAVEGKVEVESFREAVEMMLEDEDETAAMRRLARGGVARAIGVLEVSLSLLFDRGVNNCLMYLEAVPWNESEEDIIKQLLSQHSSYEAAFRNLLARLQPQRPTSSAELVVELVDSITKGTNNNARKELRNLVNGILSKSSVYIKGDKELDKRSIYCICHSCLNSLVGLFEESSDLVHADERSISSVGKGPLERIYKLVEDINWLLQILIDRQMGEEFVDVWANKKTLSSMQERVSPMIRHELSRISATIFIAMGSGKLHCTGDKRFSFFQAWFRPMLVDFGWLRRYPKGLNVTTLEEGIGQALLTLTLAQQQVLFMEWFEAFSGQGRECPNLMRAFQVWWRRSFVRSLGSSS

SEQ ID NO: 88781 - protein, 385 aa, Setaria italica
  misc_feature (167)..(167): Xaa can be any naturally occurring amino acid
  misc_feature (236)..(236): Xaa can be any naturally occurring amino acid
  Transcript Sequence Number=SeqID_22807
  Gene Ontology: Mol. function=transposase activity; Biological process= transposition, DNA-mediated
  Homolog annotation: Hit_ID=Q2QT97; Match level="QueryCoverage=81%, HitCoverage=42%, E-value=2e-41, Identity=36%"; Hit description =Transposon protein, putative, CACTA, En/Spm sub-class
GHTRREETDAPLAAREATRRRRKVAAWRCSTSPTATTATVTVAFSPIPPAPLRVGEGEPPPSWDPVPTPIGKQRVDWNPTLEKSLVEILHEYKDCGYRSDNGWNTKGWNKMVKEFHLRNKSVSYIKAQIQDKECLKRDYKMLKAARMQSGSKWNEQRNMVEGSATMXENLMVTFLKIKKFQNNKASFLLFDALGELYDGHLAEGTYNFTSIESQRVEEPLQQIDVVKEEAEEEALXEIHEIRDEEDEEKDARDKEEEARSGQRRMAASRKKPEKEGQRPRKSAKIEAMMERFLEMRTKQAEDEAQQLARENETREKEARDKEAAKGDEYSIKRCISIINTMEVTKQEKAKAYAIFTKSKENKETFICASEEDEESALIWLRNEMA

SEQ ID NO: 88782 - protein, 507 aa, Setaria italica
  misc_feature (20)..(20): Xaa can be any naturally occurring amino acid
  misc_feature (32)..(32): Xaa can be any naturally occurring amino acid
  misc_feature (70)..(70): Xaa can be any naturally occurring amino acid
  misc_feature (178)..(178): Xaa can be any naturally occurring amino acid
  misc_feature (359)..(359): Xaa can be any naturally occurring amino acid
  misc_feature (361)..(361): Xaa can be any naturally occurring amino acid
  Transcript Sequence Number=SeqID_22808
  Gene Ontology: Mol. function=transposase activity; Biological process= transposition, DNA-mediated
  Homolog annotation: Hit_ID=Q2QT97; Match level="QueryCoverage=100%, HitCoverage=74%, E-value=1e-120, Identity=43%"; Hit description =Transposon protein, putative, CACTA, En/Spm sub-class
  Pfam annotation: Domain name=Plant_tran; Domain location=29-143; Score=-53.5; E_value=0.077; Accession=PF04827.6; Description=Plant transposon protein
  Subcellular localization annotation: CTP_CleavageSite=30; ConfidenceScore=5.06e-01
NVMVACDFDLNITFISTGWXGSATDSRVLRSXMSKGFQVPPSKFYLVDGGYANTPSFLAPYRGVRYHLKXFGAGHRRPQNSKELFNHHHTLLRNHVERTLGVLKKRFPILKVATFHTLENQVKIPIATSILNNLIPLLHGDEEWLDHQPYNINPTHVLNVIARGSPKLSRFLPTTSAXKKKPSPKCSGAKRSGGSPRGKQRADWNPTLEKSLVEILHEYKDSGHRSDNGWNTEGWNKMVKEFHLRNKSISYTKAQIQDKECQLKRDYKMLKAARMQSGSKWNEQRNMVEGSAAMWENLMVTFPKIKKFQNNKASFSLFDALGELYDGHLAEGTYNFTSIESQRVQEPLQQIDVVEEEAXYXEIEIHDEEDEEKDARDEEEASGEQRMVASRKKPEKEGQRPRKSAKIEVMMERFLEMRTKQAKYEAKQLARENETREQEARDKEAVKGDEYSIKRCISIINTMEVTKQEKAKAYVIFTKSKENRETFICASEEDEESALIWLRNEMT

SEQ ID NO: 88783 - protein, 721 aa, Setaria italica
  misc_feature (42)..(42): Xaa can be any naturally occurring amino acid
  misc_feature (399)..(399): Xaa can be any naturally occurring amino acid
  misc_feature (625)..(625): Xaa can be any naturally occurring amino acid
  Transcript Sequence Number=SeqID_22809
  Gene Ontology: Mol. function=transposase activity; Biological process= transposition, DNA-mediated
  Homolog annotation: Hit_ID=Q2QT97; Match level="QueryCoverage=94%, HitCoverage=97%, E-value=0.0, Identity=47%"; Hit description =Transposon protein, putative, CACTA, En/Spm sub-class
  Pfam annotation: Domain name=Transposase_11; Domain location=185-351; Score=6.3; E_value=0.018; Accession=PF01609.13; Description =Transposase DDE domain
LLSDYKFICFSSAMNISLRDRIRKRREEEDDDMMMFLFPCLXIILMGFAREGGVKKKRHTSEETGEVKVRRLLEGHIKNCQVTFRMEPHIFKELATYLRRKRLVVDTRITVEEKLGFFLYMLSHNASYEDLAVTFGHINDTFHRHINHFFKKVIPTLSRHFLQSPDPNQVHPKIQDNTRFYPFFKNYLGAIDGTHIPVSISPEKHSPFRNRKGTLSINVMVACDFDLNITFISSGWEGSATDSRVLRSAMSKGFQVPPGKFYLVDGGYANTPSFLAPYRGVRYHLKEFGAGHRRPQNSKELFNHRHALLRNHVERTLGVLKKCFPILKVATFHTLENQVKIPIAASIFHNLIRLLHGDEEWLDHQPDNIDPTHFLNVIARGSPKLSRFLPTTSAIKKKXSPKCSGAKRSGGKQRADWNPTLEKSLVEILHEYKDSGYRSDNGWNTEGWNKMVKEFHLRNKSVSYTKAQIQDKECQLKRDYKMLKAARMQSGSKWNEQRNMVEGSTSMWENLIVTFPKIKKFQNNKASFPLFDTLGELYDGHMAEETYNFTSIESEHVEEPLQQIDVVEEEAEEEALQEIHEIRDEEDEEKDARDKEEEARSGQRRMAASRKKPEKEGQRPRKSAXIEAMMERFLEMRTKQAEDEAQQLARENEARDKEAAKGDEYSIKRCISIINTMEVTKQEKAKSYAIFTKSKENRETFICASEEDEESALIWLRNEMS

SEQ ID NO: 88784 - protein, 364 aa, Setaria italica
  misc_feature (108)..(108): Xaa can be any naturally occurring amino acid
  Transcript Sequence Number=SeqID_22810
  Gene Ontology: Mol. function=transposase activity; Biological process= transposition, DNA-mediated
  Homolog annotation: Hit_ID=Q2QT97; Match level="QueryCoverage=97%, HitCoverage=47%, E-value=1e-53, Identity=36%"; Hit description =Transposon protein, putative, CACTA, En/Spm sub-class
  Subcellular localization annotation: CTP_CleavageSite=38; ConfidenceScore=5.48e-01
MVGKGSPKLNVIARGSPKLSRFLPTTSAIKKKPSPKCSGAKRSGGSPRGKQRADWNPTLEKSLVEILHEYKDSGYRSDNGWNTEGWNKMVKEFHLRNKSVSYTKAQIXDKECQLKRDYKMIKAARMQSGSKWNEQRNMVEGSASMWENLIVTFPKIKKFQNNKASFPLFDALGELYDGHLAEGTYNFTSIESEHVEEPLQQINVVEEEAEEEALQEIHEIRDEDDEEKDARDKEEEARSGQRRMAASRKKPEKKGQRPRKSAKIEAMMERFLEMRTKQAEDEAQQLARENETREKEARDKEAAKGDEYSIKRCISIINTMEVTKQEKAKSYAIFTKSKENRETFICASEEDEESALIWLRNEMA

SEQ ID NO: 88785 - protein, 83 aa, Setaria italica
  Transcript Sequence Number=SeqID_22811
  Gene Ontology: Mol. function=magnesium ion binding; Cellular component=integral to membrane; Biological process=photosynthesis, light harvesting
  Homolog annotation: Hit_ID=Q9SDM1; Match level="QueryCoverage=98%, HitCoverage=33%, E-value=3e-40, Identity=95%"; Hit description =Chlorophyll a-b binding protein 1B-21, chloroplastic
  Pfam annotation: Domain name=Chloroa_b-bind; Domain location=1-49; Score=-25.6; E_value=0.0019; Accession=PF00504.13; Description =Chlorophyll A-B binding protein
PEKKKYPGGAFDPLGFSKDPVKFEEYKLKEIKNGRLAMLAFVGFCVQQSAYPGTGPLENLATHLADPWHNNIGDIIIPRTIYP

SEQ ID NO: 88786 - protein, 270 aa, Setaria italica
  misc_feature (37)..(37): Xaa can be any naturally occurring amino acid
  misc_feature (83)..(83): Xaa can be any naturally occurring amino acid
  Transcript Sequence Number=SeqID_22812
  Gene Ontology: Mol. function=protein domain specific binding; Cellular component=cytoplasm; Biological process=response to stress
  Homolog annotation: Hit_ID=Q2R2W2; Match level="QueryCoverage=99%, HitCoverage=99%, E-value=1e-124, Identity=85%"; Hit description=14-3- 3-like protein GF14-D
  Pfam annotation: Domain name=14-3-3; Domain location=8-253; Score =467.3; E_value=2.3e-137; Accession=PF00244.12; Description=14-3-3 protein
MSPSEPTREESVYMAKLAEQAERYEEMVEFMERVARXAGGAGGGEELSVEERNLLSVAYKNVIGARRASWRIISSIEQKEEGXRGNEAHAASIRAYRSKIEAELARICDGILALLDSHLVPSAGAAESKVFYLKMKGDYHRYLAEFKSGAERKEAAESTMNAYKAAQDIALADLAPTHPIRLGLALNFSVFLLIVVFLVTSPDRACNLAKQAFDEAISELDSLGEESYKDSTLIMQLLRDNLTLWTSDTNEDGGDEIKEAAAPKESGEGQ

SEQ ID NO: 88787 - protein, 278 aa, Setaria italica
  Transcript Sequence Number=SeqID_22813
  Subcellular localization annotation: CTP_CleavageSite=12; ConfidenceScore=5.68e-01
DLRTGAGAAAASASAGAAASSAAAAAAGAASSLASSSFASASVAAVSASASAGLVSTTGAASTSASAAAGSASLVSASAGAAASCSASLVSATAGAASGSASLVSASAGAATGSASFVSVSAATASVSVSLASTSAVAASGSASFVSPSAGAASGSASLVSVSAGAASGSASLASASAGAATASTSRVSVSAGAASASGSLAASGSAGAASAAGVSSTTGAAASSFGASSATTAGWTGTGSATTGASSTGSVAVGTWTSTVAIGAELRLPSLTDLCVL

SEQ ID NO: 88788 - protein, 38 aa, Setaria italica
  Transcript Sequence Number=SeqID_22814
DERIINKPSVLPLTGLILNRCHRVQEHGGAILKIFLAS

SEQ ID NO: 88789 - protein, 129 aa, Setaria italica
  misc_feature (6)..(6): Xaa can be any naturally occurring amino acid
  Transcript Sequence Number=SeqID_22815
  Gene Ontology: Mol. function=sequence-specific DNA binding; Cellular component=nucleus
  Homolog annotation: Hit_ID=B4FZE9; Match level="QueryCoverage=100%, HitCoverage=30%, E-value=2e-36, Identity=67%"; Hit description=GATA transcription factor 29
LKRSRXTHIQSETELEGTMRTPKRVLKSGDLASQFKSSSMLKSGYATKGSTCTGGALSLFMLPPEKLSLLVPPQYGNGDSDQDLLLDIPLNARHAEAELLCQPSQLSSITHSSTSVDGVAGGEGCLKQP

SEQ ID NO: 88790 - protein, 120 aa, Setaria italica
  Transcript Sequence Number=SeqID_22816
VTTPGAIKKKKSWEAPPHAHVASHTIFHAKYARARAAWDSNPRPPASRIAFLPSHLHNTSNYIGDAIPFILTRGDLFIPVGDPSWKHQPGIKRPPFLSRLVLQTGIKGFEGFSPLSSTPL

SEQ ID NO: 88791 - protein, 171 aa, Setaria italica
  misc_feature (109)..(109): Xaa can be any naturally occurring amino acid
  Transcript Sequence Number=SeqID_22817
  Gene Ontology: Mol. function=catalytic activity
MVIAGIILSIEDDGSAVIAANSKFFGMKKRFVVNFPNATGYEQELDVRKPIKSAGGFYIFAAKPSENGYIKAVRFETQSVQVGDPVHSFVFPREGYITPTGYCRGSVMXKISHILSHYVILDVCCRVLFHDCDMHEYAYLGSPLFNLSGDLVGITYLDQGHWQAWTVWELT

SEQ ID NO: 88792 - protein, 210 aa, Setaria italica
  Transcript Sequence Number=SeqID_22818
  Gene Ontology: Mol. function=catalytic activity
MEQEVRKSIVRISFDWKPKPEDKRFMVIAGIILSIEDDGSAVIAANSKFFGMKKRFVVNFPNATGYEQELDVRKPIKSAGGFYIFAAKPSENGYIKAVRFETQSVQVGDPVHSFVFPREGYITPTGYCRGSVIDVCCRVLFHDCDMHEYAYLGSPLFNLSGDLVGITYLDQGHWQAWTVWELLDTFKKWKSTIVSKGIEEPAGAEPQVEE

SEQ ID NO: 88793 - protein, 397 aa, Setaria italica
  misc_feature (154)..(154): Xaa can be any naturally occurring amino acid
  Transcript Sequence Number=SeqID_22819
  Homolog annotation: Hit_ID=Q8LPX2; Match level="QueryCoverage=61%, HitCoverage=94%, E-value=1e-74, Identity=56%"; Hit description=36I5.7
  Pfam annotation: Domain name=NIF; Domain location=145-340; Score= -59.4; E_value=0.0042; Accession=PF03031.10; Description=NLI interacting factor-like phosphatase
MLKEEATGTVVSASEGTPKRKKRKRKKKMQEQPESKQASPGVVRVNKIVSNKSENGCADGIEASGHADVNMDPINANVADVLIENCSENSSLLQESSAGRKRRKRKRKRGSSIRGPGFHDLSCICASCLVEAHKEKIKSIYSPRGSLVRFQRKXLLILDLNGLLADINQDTHNAHKAHAKVRGKLVFRRPYCDDFLRFCFENFELGIWSSRKRENVDSVVDILMRNLKPYLLFCWDMSHCTVTGCNTIDNKHKPLVLKELKKLWNKEEPTLPWEQGEFSPSNTLLVDDSPYKALRNPPNTAIFPQPYSYRNERDDYSLGPDGDLRIYLERIASADNVQNFVRDNPFGQNSITESDPNWNFYVQIVNKVEKQVVDKVEKQILDKVENQIADKVDSQIS

SEQ ID NO: 88794 - protein, 253 aa, Setaria italica
  misc_feature (53)..(53): Xaa can be any naturally occurring amino acid
  misc_feature (147)..(147): Xaa can be any naturally occurring amino acid
  misc_feature (153)..(153): Xaa can be any naturally occurring amino acid
  misc_feature (180)..(180): Xaa can be any naturally occurring amino acid
  Transcript Sequence Number=SeqID_22820
MSGREVREYTNLSDPKDRKFGKGKDKIDDEDITFQRMVAKGFWLSTRRLIPTXMQEVAGERGGYLHGRGALDSDDLLYLKEQMEAEEDAERLLRRTEKRAFAAFKISLLNIITSLFLLYTSEYNMVQLIFLSMKLSHIFNSDSFVPXFASLTXHYKAAILADSTPAVPVALRVEPKPKKXIRQQDLLKHIVGIKPKRPKVSSPSQPADSNKTNQCEEDSVSKLSSSQNQLEPPLGEKGSSHGTVNAEYTVPRP

SEQ ID NO: 88795 - protein, 216 aa, Setaria italica
  Transcript Sequence Number=SeqID_22821
MSGREVREYTNLSDPKDRKFGKGKDKIDDEDITFQRMVAKMQEVAGESLGYLHGRGALDSDDLLYLKEQMEAEEDAERLLRRTEKRAFAAFKKAAILADSTPAVPVALRVEPKPKSDIRQQDLLKHIVGIKPKRPKVSSPSQPADSNKTNQCEEDSVSKLSSSQNQLEPPLGEKGSSHGTVNAEYTVPRPDEPSVAKQQNTAGSLLGLAYESSDEE

SEQ ID NO: 88796 - protein, 243 aa, Setaria italica
  Transcript Sequence Number=SeqID_22822
  Gene Ontology: Mol. function=potassium ion transmembrane transporter activity; Cellular component=integral to membrane; Biological process=potassium ion transport
  Homolog annotation: Hit_ID=Q9AYN4; Match level="QueryCoverage=89%, HitCoverage=28%, E-value=1e-110, Identity=85%"; Hit description=High- affinity potassium transporter
  Pfam annotation: Domain name=K_trans; Domain location=1-243; Score= -313.8; E_value=1.1e-09; Accession=PF02705.8; Description=K+ potassium transporter
TIVMLLVWKKHVIFILLFYVVFSLTEVVYLSSILSKFIDGGYLPFCFSLVLMSLMATWHYVHVKRYWHELEHIVPTNEMKALLEKNDVRRIPGVGLLYTELIQGIPPVFPRLIKKIPSVHSIFVFMSIKHLPIPHVVPPERFLFRQVGPREQRMFRCVARYGYSDRLEEPKEFVGFLVDRLKMFIQEESALTQHEGENDETSSNTAVSEVQTRPRRSTHSVVHSEEVVESRVSSHSRRITFHV

SEQ ID NO: 88797 - protein, 129 aa, Setaria italica
  Transcript Sequence Number=SeqID_22823
  Pfam annotation: Domain name=DUF789; Domain location=1-129; Score= -72.9; E_value=2.4e-07; Accession=PF05623.4; Description=Protein of unknown function (DUF789)
IFLLSNCMQIHPDLLQELVNFLAYLRRPGDESDGESMDTSSESSSDNDVDRLRVSSVEATHRLENGGLQSDDCETDASSSFPIFEYLERDPPYGREPLTDKVSALADRCPALKTFKSCDLLPSSWMSVA

SEQ ID NO: 88798 - protein, 236 aa, Setaria italica
  Transcript Sequence Number=SeqID_22824
  Pfam annotation: Domain name=DUF789; Domain location=56-236; Score =183.4; E_value=6.2e-52; Accession=PF05623.4; Description=Protein of unknown function (DUF789)
  Subcellular localization annotation: CTP_CleavageSite=46; ConfidenceScore=5.59e-01
VAVAASADIDSRMDSDDSSSTTSSKPSVASTATTTTNTAGELNVITAGAAAAEEAGNLERFLTSTTPSVPVQYLSKTSLRMRRSSDAMDSRPYFCLGDLWESFREWSAYGAGVPLVLNGSDSVVQYYVPYLSAIQLYADPSRPTSRNSESSVDNDVDRLRVSSVEATHRLENGGLQSDDCETDASSSFPIFEYLEMDPPYGREPLTDKVSALADRCPALKTFKSCDLLPSSWMSVA

SEQ ID NO: 88799 - protein, 89 aa, Setaria italica
  Transcript Sequence Number=SeqID_22825
  Gene Ontology: Mol. function=6-phosphofructokinase activity; Cellular component=6-phosphofructokinase complex; Biological process=glycolysis
  Homolog annotation: Hit_ID=B6SWS5; Match level="QueryCoverage=100%, HitCoverage=16%, E-value=4e-45, Identity=97%"; Hit description=6 -phosphofructokinase 2
RRRGLRCAVVGVPKTIDNDIAVIDKSFGFDTAVEEAQRAINAAHVEAESAENGVGVVKLMGRNSGFIAMYATLASRDVDCCLIPESPFY

SEQ ID NO: 88800 - protein, 299 aa, Setaria italica
  Transcript Sequence Number=SeqID_22826
  Gene Ontology: Mol. function=hydrolase activity, hydrolyzing O -glycosyl compounds; Cellular component=vacuole; Biological process =carbohydrate metabolic process
  Homolog annotation: Hit_ID=B6SKG0; Match level="QueryCoverage=98%, HitCoverage=55%, E-value=1e-148, Identity=83%"; Hit description=Non -cyanogenic beta-glucosidase
  Pfam annotation: Domain name=Glyco_hydro_1; Domain location=1-299; Score=208.7; E_value=1.6e-59; Accession=PF00232.10; Description =Glycosyl hydrolase family 1
EDGRSPSIWDTFTHAGRMPDKSTGDLGAGGYHKYKEDVKLMSDTGLEAYRFSISWSRLIPRGRGPINPKGLEYYNNLINELVKRGIEIHVTLYHLDFPQILEDEYHGWLSPRVVEDFAAYADACFREFGDRVKHWTTMDEPNVISIAAYDNGAFPPCRCSPPFGINCTEGNSSVEPYIVGHNSILAHAAAVRLYREQYQATQKGVVGMNVYSIWNYPFSTSPADMAATRRSMDFMIGWIINPLVYGDYPETMKRIVGSRLPKFTKEQSEMIRGTADFIGINHYTSVYVSDRSNSADYRA

SEQ ID NO: 88801 - protein, 103 aa, Setaria italica
  Transcript Sequence Number=SeqID_22827
  Subcellular localization annotation: CTP_CleavageSite=39; ConfidenceScore=5.42e-01
GTRLKGFQFEVTQSSSTSCCRQNSCVIRSRKISPSRYCRALERATYTYARTPSNQWRRLELFDTRSSTPARRRSVGHADRLRQERRLLTRRQRAAVRHDDRAD

SEQ ID NO: 88802 - protein, 149 aa, Setaria italica
  Transcript Sequence Number=SeqID_22828
  Gene Ontology: Mol. function=electron carrier activity; Biological process=response to oxidative stress
  Homolog annotation: Hit_ID=B6UBA1; Match level="QueryCoverage=98%, HitCoverage=42%, E-value=6e-35, Identity=50%"; Hit description =Peroxidase 1
  Pfam annotation: Domain name=peroxidase; Domain location=1-149; Score= 49.0; E_value=1.1e-13; Accession=PF00141.15; Description=Peroxidase
GSSIGLRGFDVIDRIKSRLESRYPGVVSCADILAFAARDATRYLSDGHIDYAVPSGRRDGVVSRAKDADDTLPGSTFSFADLKRNFAKKKFDAEELVVLSGAHAIGSAHYPSFRDRLAAPRGEIDARYQTALRNAASDRSRLVANNIRD

SEQ ID NO: 88803 - protein, 62 aa, Setaria italica
  Transcript Sequence Number=SeqID_22829
  Gene Ontology: Cellular component=nuclear pore; Biological process =poly(A)+ mRNA export from nucleus
MGFERVELRCPRALDPHQSWTLGDVLAELDALDATRRAAPPTPLKQAPDWASDGGAREKAFV

SEQ ID NO: 88804 - protein, 122 aa, Setaria italica
  misc_feature (84)..(84): Xaa can be any naturally occurring amino acid
  Transcript Sequence Number=SeqID_22830
LVSFSFSSESHRRAIIPIPSLESWVNQGLKPAQRAWPRRILLPTFPQPPPPSSKSDLPRPCATPPPPSPLPPPPCTAPYPPTSXPASSAPPAAGTPTRHPPPPAAAPPTPRSPPTRAPSAYP

SEQ ID NO: 88805 - protein, 55 aa, Setaria italica
  Transcript Sequence Number=SeqID_22831
PAVRWLGLMRSKMEPSWYDVATVSNSNVLECYLNYPKPLFNLLLFVCNCYLIMFG

SEQ ID NO: 88806 - protein, 303 aa, Setaria italica
  misc_feature (296)..(296): Xaa can be any naturally occurring amino acid
  Transcript Sequence Number=SeqID_22832
  Gene Ontology: Mol. function=protein binding
  Homolog annotation: Hit_ID=Q10GD4; Match level="QueryCoverage=99%, HitCoverage=50%, E-value=1e-100, Identity=62%"; Hit description =Leucine Rich Repeat family protein, expressed
RLARLVLRMDSDVDATMIACVAFSCPNLQTLDISMANSAVNRISGDELSRFVSEKRSLSVLKLDGCSSLGFLNISSSSLSTLWLSGLCSLTKAVMNCPNLNELSLDFPKQNNDSTDLVALMDSLGRTCPNLRNMHISSIRLCNEAVFALESANLRGLCMLSLVLGSKITDAAVASIVRSYASLELLDLSGSSITDNGLGMICNAFPNTLTRLLMALCPNITSSGVQVAAAQLPLLRLMDCGRSICAKPQPEDGRSYFGDLTGGIKFCSKLPTQKKQQPSYQKLIIKHSSLKKLSLXWGCSAIE

SEQ ID NO: 88807 - protein, 75 aa, Setaria italica
  Transcript Sequence Number=SeqID_22833
  Subcellular localization annotation: CTP_CleavageSite=59; ConfidenceScore=5.21e-01
KYSNPLSAIDFNFSSPTCHCRQFLLAFLRYSVKTCDSSPSSHTWICTPPYASPWPPPTEARAAPSPPSLVRRTQP

SEQ ID NO: 88808 - protein, 63 aa, Setaria italica
  Transcript Sequence Number=SeqID_22834
  Gene Ontology: Mol. function=biotin-[acetyl-CoA-carboxylase] ligase activity; Biological process=protein modification process
  Homolog annotation: Hit_ID=B9RJ98; Match level="QueryCoverage=95%, HitCoverage=17%, E-value=5e-21, Identity=76%"; Hit description =Biotin protein ligase, putative
CCGCDKTQGLPELDVRIKWPNDLYLKGLKVGGILCTSSYEPKVYNICTGIGLNVDNEKPTTCL

SEQ ID NO: 88809 - protein, 274 aa, Setaria italica
  Transcript Sequence Number=SeqID_22835
  Gene Ontology: Mol. function=biotin-[acetyl-CoA-carboxylase] ligase activity; Cellular component=mitochondrion; Biological process =protein modification process
  Homolog annotation: Hit_ID=B9RJ98; Match level="QueryCoverage=60%, HitCoverage=50%, E-value=1e-65, Identity=65%"; Hit description =Biotin protein ligase, putative
  Pfam annotation: Domain name=BPL_LipA_LipB; Domain location=125-253; Score=108.7; E_value=2e-29; Accession=PF03099.11; Description =Biotinlipoate AB protein ligase family
  Subcellular localization annotation: CTP_CleavageSite=76; ConfidenceScore=5.78e-01
MPFPVRLTPPSTGAAAAAAAVGAVLAAVALRRYLSTSRPRPSASVTMSALSSCSSTAGAATTLVAYGRSPQDQELLASAAGSVALGEGVSAGEFAVALSYEGAGFDAGAYMGALRARRFGRWMLWSPRIGSTQDLIAQNFAKLPVGVVCVADVQFKGRGRSKNVWESPPGCLMFSFTSQMQDARKLPLMQYVVCLSMTEAIKELCRAKGLPELDVRIKWPNDLYLKGLKVGGILCTSSYEPKVYNICTGIGLNVDNEKPTTCLNAALQEANVIS

SEQ ID NO: 88810 - protein, 251 aa, Setaria italica
  Transcript Sequence Number=SeqID_22836
  Gene Ontology: Mol. function=biotin-[acetyl-CoA-carboxylase] ligase activity; Cellular component=mitochondrion; Biological process =protein modification process
  Homolog annotation: Hit_ID=Q8S4V8; Match level="QueryCoverage=96%, HitCoverage=65%, E-value=3e-90, Identity=63%"; Hit description =Holocarboxylase synthetase 1
  Pfam annotation: Domain name=BPL_C; Domain location=188-243; Score =23.5; E_value=0.00089; Accession=PF02237.9; Description=Biotin protein ligase C terminal domain
  Pfam annotation: Domain name=BPL_LipA_LipB; Domain location=4-126; Score=93.1; E_value=9.9e-25; Accession=PF03099.11; Description =Biotinlipoate AB protein ligase family
  Pfam module annotation: Pfam domain module=BPL_C::BPL_LipA_LipB; Domain location=188-243::4-126
KVLSGWVVCSCRLSCTRLGVVCVADVQFKGRGRSKNVWESPPGCLMFSFTSRMQDARKLPLMQYVVCLSMTEAIKELCRAKGLPELDVRIKWPNDLYLKGLKVGGILCTSSYEPKVYNICTGIGLNVDNEKPTTCLNAALQEANVISPRLKREDILAYFFNKFENLFEVFSNQGFQALEEQYYNSWLHSGQRVVVQDAHEGQSVDSVVTIQGLTPTGYLYAIGEDGKNYELHPDGNSFDFFTGLVRRKMEA

SEQ ID NO: 88811 - protein, 89 aa, Setaria italica
  Transcript Sequence Number=SeqID_22837
  Gene Ontology: Mol. function=binding
  Homolog annotation: Hit_ID=Q2R9P0; Match level="QueryCoverage=94%, HitCoverage=3%, E-value=3e-25, Identity=69%"; Hit description =Armadillo/beta-catenin-like repeat family protein, expressed
MIWDGAVKALLHLLNRDNVISVRESAADALEALSSKSSIAKKAVVDAGGLPILIGAVVAPSKECMQGETCHSLQSHAVHALSNICGGTT

SEQ ID NO: 88812 - protein, 43 aa, Setaria italica
  Transcript Sequence Number=SeqID_22838
KSTSAYHLYIFSRILTFAHTECYSSIDLSTNNLTCQTVQQRQR

SEQ ID NO: 88813 - protein, 88 aa, Setaria italica
  Transcript Sequence Number=SeqID_22839
  Homolog annotation: Hit_ID=Q5GAQ4; Match level="QueryCoverage=100%, HitCoverage=21%, E-value=2e-33, Identity=76%"; Hit description=F-box protein
GSWRQVAAMPPAMSHAFRGTKADVNCVGHGDRVIVCVSSGDAGASGCFMCDVRSNRWEELPPRAGGGEEASTGFVAALSFEPRMEAAV

SEQ ID NO: 88814 - protein, 505 aa, Setaria italica
  misc_feature (243)..(243): Xaa can be any naturally occurring amino acid
  Transcript Sequence Number=SeqID_22840
  Gene Ontology: Mol. function=nucleic acid binding
  Homolog annotation: Hit_ID=Q657B3; Match level="QueryCoverage=99%, HitCoverage=72%, E-value=1e-114, Identity=49%"; Hit description=Zinc finger CCCH domain-containing protein 7
  Pfam annotation: Domain name=zf-CCCH; Domain location=269-294; Score =16.2; E_value=0.011; Accession=PF00642.16; Description=Zinc finger C- x8-C-x5-C-x3-H type (and similar)
  Pfam annotation: Domain name=zf-CCCH; Domain location=295-320; Score =26.5; E_value=0.00011; Accession=PF00642.16; Description=Zinc finger C-x8-C-x5-C-x3-H type (and similar)
  Pfam module annotation: Pfam domain module=zf-CCCH::zf-CCCH; Domain location=269-294::295-320
MTEVEESVEGALGNDDGQLLLDAMMTNFTGLIDDVGAGVVPPQPCVVSGGELQNSKASEDLNQSVGRIEDGEPVTNLDHELNGDGGFEEGEIEGEFQALDSEESGDSELGDNDDSEEKLGGDSVSRGSGANKSSDHGTQFGNLHSTPAIIGNGHLTLNNDGVRGGAQISVTRAPAVSYDEIVDWNGTPLPDNMAPNPGKKRKRSMTEERKAKKTETKRKKRAQQRIADGVNRPKIQHVKKPSXPSFVLDHGKCQQGNKGKFSHDWTPSTKSKPCKHFACGSCLKGDDCPYDHELSKYECHNYKNNGMCIRGDRCKFSHVMQTTEGTPTQDAKPSDASLAYEKTNLREHTSSQKTSTVHNGEPVTSAPTKQQCSILKNLAGFSINSQNVSNRIPKGVQFLPIDKSGSNLSSLRLGALSIEKPRNANATQHQYLREHEAERQKIAKQNGQGSLLDEKNSSNEATVHPFSDPKKATLPISSTATSVHTQPEVSEASRILQEFLFGAGS

SEQ ID NO: 88815 - protein, 50 aa, Setaria italica
  Transcript Sequence Number=SeqID_22841
KRRPRFSRDDSTTQVTGQLAFLPSNAPLCHASSIMVSRALCTVWPCAATP

SEQ ID NO: 88816 - protein, 94 aa, Setaria italica
  Transcript Sequence Number=SeqID_22842
SRNENQSFELSILNRTCSDFTDSIHFIRTSSLAQYTSSEQCKSLIICLTCGLGLWTFIINCLMFVSLKLKPTSNIRGGRSIYQCYFVFSVLSNK

SEQ ID NO: 88817 - protein, 56 aa, Setaria italica
  Transcript Sequence Number=SeqID_22843
GVAIFSYHSCELGDMGILVSGDGEVEQQASDSSSAFVVLGCGSCSLKVRLIINETL

SEQ ID NO: 88818 - protein, 149 aa, Setaria italica
  Transcript Sequence Number=SeqID_22844
  Gene Ontology: Mol. function=protein serine/threonine kinase activity; Cellular component=integral to membrane; Biological process=protein amino acid phosphorylation
  Homolog annotation: Hit_ID=Q65X94; Match level="QueryCoverage=99%, HitCoverage=15%, E-value=1e-61, Identity=77%"; Hit description =Putative receptor like protein kinase
  Pfam annotation: Domain name=Pkinase; Domain location=2-149; Score= -49.2; E_value=1.5e-05; Accession=PF00069.17; Description=Protein kinase domain
  Pfam annotation: Domain name=Pkinase_Tyr; Domain location=1-149; Score=-113.9; E_value=3.7e-06; Accession=PF07714.9; Description =Protein tyrosine kinase
  Pfam module annotation: Pfam domain module=Pkinase::Pkinase_Tyr; Domain location=2-149::1-149
ARTGDHMGLVYEYMSEGTLHEQIAGNGSSRRCLTWTQRLRIALESAQGLEYLHRGCNPPLIHRDVKATNILLNEKLEAKIADFGLSKTFNHDSGMQVSTYSLVGTHGYLDPEYYATQKPTTKSDVYSFGVVLLELVTGKPAIVRDPEPN

SEQ ID NO: 88819 - protein, 99 aa, Setaria italica
  Transcript Sequence Number=SeqID_22845
TLLFQKKLTFALPDFLLFCCKEEENNSRCALNSDLLAAAAPHIWSLSSRQVPSMRRWAYPWHRHLGPKIRSFSFPCPAAPGPVPTSASAEQETEPSRWH

SEQ ID NO: 88820 - protein, 113 aa, Setaria italica
  Transcript Sequence Number=SeqID_22846
VVHEPAEYAVRRQPKEHEEHGRRGGGGGRVQLQDGAVDHHGFRLCGVGAVTRCSSIKEDVSRGREAAMVGSATSSLSLSQFLVKRMDGLNSCWAARCSIFSFRCPHFRTRLIY

SEQ ID NO: 88821 - protein, 208 aa, Setaria italica
  Transcript Sequence Number=SeqID_22847
MGHIAEPAGAVVIGCKVLPIFNEHGIVEGAVKKMVHRIDGKKAVARVKELLKLAAQARPHGATFSGKKWKKVLSFHARDGAAAAKGGRHQEKKQQQEASDEMSCSSSKLSFKWDAGSCSSASSVAYSPLSLMSAPAKASEQTPSRKDYYASRLSSMSQQSMLCGGSPKSMKNMEGEEVEEDACSCRMGQWITTDSDCKFCLLSIILIQ

SEQ ID NO: 88822 - protein, 62 aa, Setaria italica
  Transcript Sequence Number=SeqID_22848
  Gene Ontology: Mol. function=amino acid transmembrane transporter activity; Cellular component=integral to membrane; Biological process=amino acid transport
  Homolog annotation: Hit_ID=B6TZ59; Match level="QueryCoverage=100%, HitCoverage=12%, E-value=2e-24, Identity=95%"; Hit description =Cationic amino acid transporter
ERAVKAAGPLFTLLGFLVFPFAWGVPESLVTAELSAALPGNGGFVRWADRAFGPLAGSLLGT

SEQ ID NO: 88823 - protein, 43 aa, Setaria italica
  Transcript Sequence Number=SeqID_22849
  Subcellular localization annotation: CTP_CleavageSite=19; ConfidenceScore=5.17e-01
MASNMQPSGPPQPPRPPMMGSNAQPQNLGPPMPMQFRPVVPSQ

SEQ ID NO: 88824 - protein, 95 aa, Setaria italica
  Transcript Sequence Number=SeqID_22850
  Gene Ontology: Cellular component=extracellular region
MARTRMSSLWSILLLLALSAALCTRSAAATNDDDGSYGTDLDAGRRARAAATVAEILSVHNEARREVGVPPLVWSPQIAGYAKGFAQSRRGDCAP

SEQ ID NO: 88825 - protein, 144 aa, Setaria italica
  Transcript Sequence Number=SeqID_22851
  Subcellular localization annotation: CTP_CleavageSite=44; ConfidenceScore=5.74e-01
MASSPAATATAKPIALPPAPIRGGGCCFWAASPSPVAAARLRVSASAASSDVPDFLSSNWLETRKRKPFGPRLNFSAEEAVEYQLESLKYNDQHRQDYGIEVMYRFAGFDPFERSTYFGRQFDLGQFERFRRLFHHSAYRVLLG

SEQ ID NO: 88826 - protein, 305 aa, Setaria italica
  misc_feature (174)..(174): Xaa can be any naturally occurring amino acid
  Transcript Sequence Number=SeqID_22852
  Gene Ontology: Cellular component=nucleus; Biological process=cell division
  Homolog annotation: Hit_ID=Q0INT0-2; Match level="QueryCoverage=99%, HitCoverage=87%, E-value=1e-124, Identity=69%"; Hit description =Isoform 2 of Cyclin-A1-3
  Pfam annotation: Domain name=Cyclin_C; Domain location=168-296; Score= 142.9; E_value=1e-39; Accession=PF02984.11; Description=Cyclin, C -terminal domain
  Pfam annotation: Domain name=Cyclin_N; Domain location=39-166; Score =226.5; E_value=7e-65; Accession=PF00134.15; Description=Cyclin, N -terminal domain
  Pfam module annotation: Pfam domain module=Cyclin_C::Cyclin_N; Domain location=168-296::39-166
EVAAFNWRKHSPSPMKAESISDLDNNYEDPQLCATLAYEIYENLREAETSKMPSTNFVETTQTDMSTTMRAVLIDWLVEVTEEYRLVPETLYLTVNYIDRYLSVKEISRNRLQLLGVACLLIAAKYEEICPPQVEELCYVTDDSYTKEEVLEMEASILNYLKFEMTVPTPKCFXLRGFVDAAQVFDKDPTMHLEFLANYICELSLLEYSLLCYLPSLVAASSVFLARFILKPAKNPWNSSLSYYTQYTPSELRCCVRVLHRLFCFGPGRDLPAIREKYSQHKYKFVAKKYCPPSIPTEFFQDATS

SEQ ID NO: 88827 - protein, 181 aa, Setaria italica
  Transcript Sequence Number=SeqID_22853
  Homolog annotation: Hit_ID=Q9SGZ8; Match level="QueryCoverage=25%, HitCoverage=28%, E-value=2e-10, Identity=60%"; Hit description =F28K19.24
  Pfam annotation: Domain name=DUF581; Domain location=80-138; Score =87.6; E_value=4.4e-23; Accession=PF04570.6; Description=Protein of unknown function (DUF581)
MLPRPSQRSIFHLGEEGGYDHQGADDTTTRHQEGRLDHGRHRRKRDAVDDAGVGLQILVQHHHHTRAPSHSHIVLKQVVLPTAAARHRRGPCGSFLRACSLCLRELSPNKDVYMYRGDQGFCSEECRCQQMLRDEAREHEAMIKKERVRRGLPHHLRHGPRPAPVAAAIRGTPRRPVAVAF

SEQ ID NO: 88828 - protein, 133 aa, Setaria italica
  Transcript Sequence Number=SeqID_22854
  Subcellular localization annotation: CTP_CleavageSite=48; ConfidenceScore=5.11e-01
RACTPGLVWLGVWTHPSARRSSIDHLGRSGRQPRGSKGNVGARWVVVRSLHEESCARVRACPPYLPRWRFGSATRCCLPGAPRAGVERVGEHGASKFYSSARSRAGAVGPRLCHAPTPITRWQAGTARAGSLS

SEQ ID NO: 88829 - protein, 211 aa, Setaria italica
  Transcript Sequence Number=SeqID_22855
  Gene Ontology: Mol. function=ubiquitin-protein ligase activity; Cellular component=ubiquitin ligase complex; Biological process =ubiquitin-dependent protein catabolic process
  Homolog annotation: Hit_ID=B9RIW5; Match level="QueryCoverage=89%, HitCoverage=24%, E-value=3e-11, Identity=28%"; Hit description =Receptor protein kinase, putative
MPLVEAENLRQEAYEETRRRQMAERELAEASKMADDAERSYRREAGQRKEMEDTLGRERAAMEHDRRELHDILDKIRKVDERSAELELQITNSERMMTDLEARLSESCSLLGTLRPRQAATTAREEEIDGERQQLVVGAASSSLRRLGYAELDEATNHFDESARVDGGGGGGRGKVYRAELRGMAVAVKVLGRDVAVDEDRFAREVERISG

SEQ ID NO: 88830 - protein, 89 aa, Setaria italica
  Transcript Sequence Number=SeqID_22856
QTRFFELHGHGTLAACTGFHFFKWGKHWYTSDFGCLASACSRHFTSVVVHMNVCIHTLHCVHAHQKNISKVLEANSLSKYAIKTKSCLN

SEQ ID NO: 88831 - protein, 61 aa, Setaria italica
  Transcript Sequence Number=SeqID_22857
  Pfam annotation: Domain name=DUF1909; Domain location=2-57; Score =43.5; E_value=8.3e-10; Accession=PF08927.2; Description=Domain of unknown function (DUF1909)
LQRKRIAIRRELMITSKTSSLQCKICMQTFICTTSEAKCKEHAEARHPKNDLFQCFPHLKN

SEQ ID NO: 88832 - protein, 61 aa, Setaria italica
  Transcript Sequence Number=SeqID_22858
SGSKRWPKSERSSIQYTHNGYIRLPFDCMQSKQLSPNASGSLGWGHNKVRYVAFFNQIISY

SEQ ID NO: 88833 - protein, 77 aa, Setaria italica
  Transcript Sequence Number=SeqID_22859
  Gene Ontology: Mol. function=zinc ion binding; Cellular component =intracellular
  Pfam annotation: Domain name=DUF1909; Domain location=4-73; Score =136.6; E_value=7.8e-38; Accession=PF08927.2; Description=Domain of unknown function (DUF1909)
MGGGNGQKAKMARERNAEKNKGPKGSQLEANKKAMNIQCKICMQTFICTTSEAKCKEHAEARHPKNDLFQCFPHLKN

SEQ ID NO: 88834 - protein, 104 aa, Setaria italica
  Transcript Sequence Number=SeqID_22860
  Subcellular localization annotation: CTP_CleavageSite=48; ConfidenceScore=5.63e-01
MASLPDPTVYYPTSSNAILRAHPSTAASSKGSFGPVFAVLSVISVLAVAACVVGRLCGRRLSRKKAADHDFYGSDAVGGDLEKGFEVKYPPAMKPMASSRAMIH

SEQ ID NO: 88835 - protein, 73 aa, Setaria italica
  Transcript Sequence Number=SeqID_22861
  Gene Ontology: Mol. function=hydrolase activity, hydrolyzing O -glycosyl compounds; Biological process=carbohydrate metabolic process
  Homolog annotation: Hit_ID=B6TDK5; Match level="QueryCoverage=80%, HitCoverage=17%, E-value=4e-24, Identity=89%"; Hit description =Glucan endo-1,3-beta-glucosidase GVI
FDLVVILTPGCVNAGAEGAIGVNYGMVANNLPAPEQVISMYVAKNISYVRLFHPDTSVLTALRGSGIGVVLGT

SEQ ID NO: 88836 - protein, 395 aa, Setaria italica
  Transcript Sequence Number=SeqID_22862
  Gene Ontology: Mol. function=hydrolase activity, hydrolyzing O -glycosyl compounds; Cellular component=vacuole; Biological process =carbohydrate metabolic process
  Homolog annotation: Hit_ID=B6TDV9; Match level="QueryCoverage=86%, HitCoverage=94%, E-value=1e-128, Identity=70%"; Hit description =Glucan endo-1,3-beta-glucosidase GVI
  Pfam annotation: Domain name=Glyco_hydro_17; Domain location=77-391; Score=590.2; E_value=2.2e-174; Accession=PF00332.10; Description =Glycosyl hydrolases family 17
KQRCRVRAQFRHQSSGRGEFQKGEKRERQRFLIALACGGAARMMAAAAGVKKTAAPWVLACGFLLCLAGFLGAEGAIGVNYGMVANNLPAPEQVISMYVAKNISYVRLFHPDTSVLTALRGSGIGVVLGTLNEDLQRLASDQSFAASWVATNVQPFAGAVQFRYINAGNEVIPGESAAHVLPAMQNLESALRSAGVSGVAVTTAVATAVLGASYPPSQGAFSEAAAPVMAPIVSYLSSKNAPLLVNVYPYFAYSNSGGQVALGYALLSAAGSGAASSSSVADGGVVYTNMFDAIVDATHAAVEKAGVQGLELVVSETGWPSGGGEGASVENAAAYNNNVVRHVGGGTPRRPGKPVETYLFAMFNENQKTEGVEQHFGLFQPDMSEVYHVDFTAGS

SEQ ID NO: 88837 - protein, 185 aa, Setaria italica
  Transcript Sequence Number=SeqID_22863
  Gene Ontology: Mol. function=hydrolase activity, hydrolyzing O -glycosyl compounds; Cellular component=cell wall; Biological process= carbohydrate metabolic process
  Homolog annotation: Hit_ID=Q10QC0; Match level="QueryCoverage=99%, HitCoverage=31%, E-value=1e-88, Identity=83%"; Hit description=1,4 -beta-xylanase, putative, expressed
  Pfam annotation: Domain name=Glyco_hydro_10; Domain location=24-185; Score=-91.6; E_value=3.6e-07; Accession=PF00331.12; Description =Glycosyl hydrolase family 10
SARKKTVRLRARDSAGKPVPGAQVRIEHVRSGFPLGSAMSAEILQSPAYQQWFTSRFTVTTFENEMKWYSTERVQGREDYSVPDAMLRFAKSHGIAVRGHNIFWDQPSQQPGWVQSLSYPQLRQATAKRIKSVMSRYAGQVIAWDVVNENLHFSFFEGKFGWDASAAFYRKAHQMDGNALMSMNE

SEQ ID NO: 88838 - protein, 44 aa, Setaria italica
  Transcript Sequence Number=SeqID_22864
TQCPQKLLQTKEPQLSFNEKHRDAKNAYDTSTMNIEVQPQEKLK

SEQ ID NO: 88839 - protein, 152 aa, Setaria italica
  misc_feature (34)..(34): Xaa can be any naturally occurring amino acid
  Transcript Sequence Number=SeqID_22865
  Gene Ontology: Mol. function=transferase activity, transferring groups other than amino-acyl groups
  Homolog annotation: Hit_ID=Q7XVK9; Match level="QueryCoverage=100%, HitCoverage=35%, E-value=8e-47, Identity=66%"; Hit description =OSJNBa0069D17.11 protein
PEPEIMHLTPWDLGVITVDHIQKGVLLPKPQTGXEAAHLVDSLASSFARALDRFYPLAGRLTVAEATDGGVPRPGIVVSLCCNGEGAEFVHAVAPEVTVRDITAPVYIPRVVWSLFPLNGALGTDVSLPVLAAQVTELADGVFVAMSLNHGV

SEQ ID NO: 88840 - protein, 102 aa, Setaria italica
  Transcript Sequence Number=SeqID_22866
  Gene Ontology: Mol. function=carbohydrate binding; Biological process= carbohydrate metabolic process
  Homolog annotation: Hit_ID=B6SUB8; Match level="QueryCoverage=100%, HitCoverage=28%, E-value=7e-37, Identity=72%"; Hit description =Aldose 1-epimerase
GMAGFDINYAVDGGGGFRKVARLWDPQSGRVLELWADQPGVQLYTSNWLGNVTGKGGEVYGQYGAVCLETQGFPDAVNHPNFPSQIVRPGQAYRHDMLFKFS

SEQ ID NO: 88841 - protein, 110 aa, Setaria italica
  Transcript Sequence Number=SeqID_22867
  Gene Ontology: Mol. function=carbohydrate binding; Biological process= carbohydrate metabolic process
  Homolog annotation: Hit_ID=B6SUB8; Match level="QueryCoverage=100%, HitCoverage=29%, E-value=4e-40, Identity=77%"; Hit description =Aldose 1-epimerase
GKAGIYGYDTNYAVDGGAGAAALRKVAVVRDGGGSGRAMELWANQPGVQFYTGNFLKDVKGKGGKVYGQYGALCLETQGFPDAVNHPNFPSQIVRPGQVYRHDMVFKFSF

SEQ ID NO: 88842 - protein, 122 aa, Setaria italica
  Transcript Sequence Number=SeqID_22868
  Gene Ontology: Mol. function=protein serine/threonine kinase activity; Cellular component=integral to membrane; Biological process=protein amino acid phosphorylation
  Homolog annotation: Hit_ID=Q7XRN6; Match level="QueryCoverage=98%, HitCoverage=11%, E-value=8e-28, Identity=50%"; Hit description =OSJNBa0024J22.12 protein
  Pfam annotation: Domain name=EGF_CA; Domain location=78-119; Score =21.5; E_value=0.0014; Accession=PF07645.7; Description=Calcium binding EGF domain
MTSESMHWTIDNLSCLQAQKNVSAYGCVSVNSMCLDFNDSTYKVYDVQEQWKYKNNGYRCQCMHGFHGNPYVPNGCQDIDECKTTPGICKELLCNNTVGSYHCTECPDKTKYDTATMQCIKV

SEQ ID NO: 88843 - protein, 96 aa, Setaria italica
  Transcript Sequence Number=SeqID_22869
  Subcellular localization annotation: CTP_CleavageSite=32; ConfidenceScore=5.37e-01
DIFEAFAFGGPSLSCVLRGAGGAVARLQWSHRCSSRRRSRFPLLRRKGREGNHPPYRRLGLGRCRRRCAASHPAQSARGRKAWLLRWRSRAFSLWK

SEQ ID NO: 88844 - protein, 131 aa, Setaria italica
  Transcript Sequence Number=SeqID_22870
  Gene Ontology: Mol. function=transferase activity, transferring glycosyl groups
  Homolog annotation: Hit_ID=B6UDC6; Match level="QueryCoverage=100%, HitCoverage=21%, E-value=2e-42, Identity=63%"; Hit description =Secondary cell wall-related glycosyltransferase family 8
MGPLEPRYRPSGAPEDATKRRTSKSKSFKDVESFEVLVLEKNCGCKFKSLKILIIAIISATVLTLITPTLYEHQLQSASRYVDVGWMWDKTNSDPRYASSVDVQWEDVYRALRNLKSGNQDLKVGLLNFNS

SEQ ID NO: 88845 - protein, 74 aa, Setaria italica
  Transcript Sequence Number=SeqID_22871
CVFVTLALWVFFLIANCVHVQTPSKQSRGCFGCCDKAVKQLGELSRNLITHDQIPIPEPFWSTTTIEVEPSDLR

SEQ ID NO: 88846 - protein, 96 aa, Setaria italica
  misc_feature (84)..(84): Xaa can be any naturally occurring amino acid
  Transcript Sequence Number=SeqID_22872
  Gene Ontology: Mol. function=protein serine/threonine kinase activity; Cellular component=integral to membrane; Biological process=protein amino acid phosphorylation
  Homolog annotation: Hit_ID=Q9ZPS9; Match level="QueryCoverage=93%, HitCoverage=7%, E-value=6e-35, Identity=75%"; Hit description =Serine/threonine-protein kinase BRI1-like 2
LGSTPLSGILSGNTLAFVRNVGNSCKGVGGLLEFAGIRPERLLQVPTLKSCDFTRLYSGAAVSGWTRYQTLEYLDLSYNALSGXLPEEFGDSGGAS

SEQ ID NO: 88847 - protein, 174 aa, Setaria italica
  misc_feature (20)..(20): Xaa can be any naturally occurring amino acid
  Transcript Sequence Number=SeqID_22873
  Gene Ontology: Mol. function=transferase activity, transferring groups other than amino-acyl groups
  Homolog annotation: Hit_ID=Q5VP59; Match level="QueryCoverage=90%, HitCoverage=36%, E-value=2e-17, Identity=34%"; Hit description =Putative anthocyanin 5-aromatic acyltransferase
AVGRAAVVAVALHHAVADGXTAWQFMRAWAALSRMEVSPSRAGADLAPPAFDRTPLRYPEADELARKILRTVVPALPVISSSSSCLPPDCLRRTFLIHAGEIQLVKQHIRAQSQTTGEQADKPPSTYLAVSSLVWTSVARAKFRDLAGGDANFLVPVDFRRRLGSPIDERYFGD

SEQ ID NO: 88848 - protein, 488 aa, Setaria italica
  misc_feature (29)..(29): Xaa can be any naturally occurring amino acid
  Transcript Sequence Number=SeqID_22874
  Homolog annotation: Hit_ID=Q67UP0; Match level="QueryCoverage=32%, HitCoverage=49%, E-value=5e-68, Identity=78%"; Hit description =Hydroxyproline-rich glycoprotein-like
VVSYKLVEEMKQQCDMKRDAYEAMRTSYXGKGKSRHSKIESYSAEQLQSSFAEYQEDAALFIFRLKSLRQGQFHSLLTQASRHHAAQLSFFRRGLKCLEALDPHVKAIAEKQHIDYQFSGLEDDASDNGDYSSEQDGCSDDEDLSFDYEINDKDQDFLASRGSMDLDKRDVTNSPQPIKESKQEEVKQNKGDIITPQVKPEFNTHSAPIFAGNLPDPSERFWQMKPSSAKHSYKLPTPVDDKTPRTVGAHRSHHSQQFESKPHVATNLWHSSPLFRPSGHVKMPSSTEGMSTFSQSVSDYKKMKRESWSGPIPSKPGLSKPSSLNDRRSPMAQHHVMPGNPQSHSRQTSSVSPKVPPKMLRHSTKSPKISELHELPRPPANVESLRPSGLVGYSGPLVSKRQTQIPAAPARASPTASQSPSPLPLPPATLTRSYSIPSNSQRIPIITVNRLLEARNSRDGSDISSPPLTPLSLTDLSQQQAAKQVAQG

SEQ ID NO: 88849 - protein, 92 aa, Setaria italica
  Transcript Sequence Number=SeqID_22875
  Pfam annotation: Domain name=Cmc1; Domain location=20-83; Score=78.7; E_value=2.1e-20; Accession=PF08583.2; Description=Cytochrome c oxidase biogenesis protein Cmc1
MGYLQEARENHVKKKVEEALRSKMKQKALKECDFYCSKYAECARGRTFSVVWQCRKQAKELNECLHQFTNDSVLEEMKKAYMVEQESKEMKQ

SEQ ID NO: 88850 - protein, 67 aa, Setaria italica
  Transcript Sequence Number=SeqID_22876
  Homolog annotation: Hit_ID=Q10PX9; Match level="QueryCoverage=83%, HitCoverage=21%, E-value=2e-09, Identity=55%"; Hit description=F-box domain containing protein, expressed
FDPAQVNQDVMKHDSVFGNASPMRQILGHKHDRLRKVQINGFCSAKSMVELTCHILENATSLESLTV

SEQ ID NO: 88851 - protein, 138 aa, Setaria italica
  misc_feature (15)..(15): Xaa can be any naturally occurring amino acid
  Transcript Sequence Number=SeqID_22877
  Homolog annotation: Hit_ID=Q10PX9; Match level="QueryCoverage=99%, HitCoverage=49%, E-value=4e-22, Identity=48%"; Hit description=F-box domain containing protein, expressed
LVSFLDASPALETFXILSVNQDVMKHDSVFGNASPMRQILGHKHDRLRKVQINGFCSAKSMVELTCHILENATSLESLTVDTIFAGFIGDDVRRCFLQKKSKCRSIPRDMILEAHNALRAVSSFIVGRVPPAIKLNVW

SEQ ID NO: 88852 - protein, 106 aa, Setaria italica
  Transcript Sequence Number=SeqID_22878
FHPSESQVQQLCFPNEKGFAVIILQQEVTCWLWAWMLWRCKGFLCAVLNLILCKEEKASRTGDIWILPKQQQQHIKREQFYLLRGLKEETVSIPTGNGFKITFDRK

SEQ ID NO: 88853 - protein, 204 aa, Setaria italica
  Transcript Sequence Number=SeqID_22879
  Gene Ontology: Mol. function=protein binding
  Homolog annotation: Hit_ID=B3TM33; Match level="QueryCoverage=89%, HitCoverage=88%, E-value=2e-29, Identity=39%"; Hit description =Holocarboxylase synthetase
MAANAAKKRRPEEEVEEEMHLAFRGAANALSQVYTHAVAHQKASFLAGERRAMENVYRWLSSQHEEASEVPVAAVLTYLQNEIEHRTEETLASPQHPGPQPACNFPAANDHCNPFSFGNIAAALDSRMDETDQTRNAGISNALPCPLQQNFHSNHLSQSSGYCPMNSLPNGNGPQNNHLSENQDFVHYNSIDAAVDMHYDGQWR

SEQ ID NO: 88854 - protein, 85 aa, Setaria italica
  Transcript Sequence Number=SeqID_22880
  Gene Ontology: Mol. function=structural constituent of ribosome; Cellular component=intracellular; Biological process=translation
  Homolog annotation: Hit_ID=A4G9S5; Match level="QueryCoverage=100%, HitCoverage=84%, E-value=1e-36, Identity=89%"; Hit description=30S ribosomal protein S14
  Pfam annotation: Domain name=Ribosomal_S14; Domain location=46-85; Score=38.1; E_value=3.6e-08; Accession=PF00253.13; Description =Ribosomal protein S14pS29e
MAKLALINREQKRADLVEKFAAKRAALKAIIDDQSKTEEERYEARLKLQALPRNSAPTRQRNRCAMTGRPRGTFRKFGLARTKLR

SEQ ID NO: 88855 - protein, 64 aa, Setaria italica
  Transcript Sequence Number=SeqID_22881
KQGIAMATVSKLLLLLFYSYCSLVAHAGDSPSYITGSIKTEAVCSEPKGSVYILSKHTLHTRLK

SEQ ID NO: 88856 - protein, 219 aa, Setaria italica
  Transcript Sequence Number=SeqID_22882
  Gene Ontology: Mol. function=aspartic-type endopeptidase activity; Biological process=proteolysis
  Homolog annotation: Hit_ID=B6TNN1; Match level="QueryCoverage=94%, HitCoverage=45%, E-value=1e-59, Identity=62%"; Hit description =Aspartic proteinase nepenthesin-2
MATVSKLLLLLFYSYCSLVAHAGDSPSYITGSIKTEAVCSEPKAAPSSSAGATVTLHHRHGPCSLTPTNQTLNVEKILLSDQLRASNIQRLLSAAANATGDAQKLEATLPTTLGAALDTLQYVINVSIGTPAVTQTVMIDTGSDISWVHCKPCSPCHAQVDPVFDPSESTTYSPFSCGSAACAQLGVDGGAAGCSGSQCQYIVRYLDGSNTTGTYSSDT

SEQ ID NO: 88857 - protein, 87 aa, Setaria italica
  Transcript Sequence Number=SeqID_22883
STQSWNSTMLCVCSFKSIQGCQAHQIFIFLDSFSEHVLLGGCRGFSRIFQPLKLLRLTHQLQLKHGGNPPFSWNKFKCQPWTTSRPT

SEQ ID NO: 88858 - protein, 154 aa, Setaria italica
  Transcript Sequence Number=SeqID_22884
FTGKQQHLLKREDNFPWNSRIRMKREATELKAFCMGGRGPGLIPDEHEHEQRPRLLMIAGGQRTPARSTERQSPPCLIAAAYGFPIKYYVLVKFVMYSFLPRLAGAVAFYSAQQDHDPTVTNVYQNNFRIPLTQWFKNKKEQRTALEFEFINMN

SEQ ID NO: 88859 - protein, 55 aa, Setaria italica
  Transcript Sequence Number=SeqID_22885
  Subcellular localization annotation: CTP_CleavageSite=32; ConfidenceScore=5.11e-01
VFFFFFGLGVGRETNLTPFNCFFRSATHFHRRCVLKSSGDAIPSSYNTNRRPVLS

SEQ ID NO: 88860 - protein, 62 aa, Setaria italica
  Transcript Sequence Number=SeqID_22886
MASRTSVPSLALLLALLLSCAAQMSSAARTLEEAAAPKEEEPEFPPHLPVPELPVPEHELPP

SEQ ID NO: 88861 - protein, 78 aa, Setaria italica
  Transcript Sequence Number=SeqID_22887
  Subcellular localization annotation: CTP_CleavageSite=19; ConfidenceScore=5.13e-01
DVQDGQGPSPPSAPPPATRPAAGACRGCAETANGAGASCGKRLSHSSLQIFLLIDPFFVKLITPWCIGPFYLCGVGCE

SEQ ID NO: 88862 - protein, 46 aa, Setaria italica
  Transcript Sequence Number=SeqID_22888
MWIKQEFFKAFHLNQFIYQIYPIYKYMIWGISPHIRWGDKKKVKFN

SEQ ID NO: 88863 - protein, 94 aa, Setaria italica
  Transcript Sequence Number=SeqID_22889
  Gene Ontology: Cellular component=anchored to membrane
  Homolog annotation: Hit_ID=Q06I84; Match level="QueryCoverage=73%, HitCoverage=16%, E-value=2e-29, Identity=94%"; Hit description =Fasciclin-like protein FLA22
  Subcellular localization annotation: CTP_CleavageSite=53; ConfidenceScore=5.36e-01
SIVNPVQPTLATEFSNAGRFTLNITRSNGSVAIDTGVVQATITRTVFDQNPVAVFAVSKVLLPKEMFTRTDGGDSSIVAATAAASSPPPAATAP

SEQ ID NO: 88864 - protein, 150 aa, Setaria italica
  misc_feature (57)..(57): Xaa can be any naturally occurring amino acid
  Transcript Sequence Number=SeqID_22890
  Gene Ontology: Mol. function=RNA binding; Cellular component =mitochondrion
  Homolog annotation: Hit_ID=B9R997; Match level="QueryCoverage=98%, HitCoverage=20%, E-value=3e-40, Identity=52%"; Hit description =Pentatricopeptide repeat-containing protein, putative
  Pfam annotation: Domain name=PPR; Domain location=26-60; Score=27.4; E_value=6e-05; Accession=PF01535.12; Description=PPR repeat
  Pfam annotation: Domain name=PPR; Domain location=61-95; Score=18.1; E_value=0.037; Accession=PF01535.12; Description=PPR repeat
  Pfam module annotation: Pfam domain module=PPR::PPR; Domain location =26-60::61-95
SSKLNMEMAENIFDEMISKSYKPDLYTYRVLIDGSCKAANVDRAYAHLTEMVNKGFXPSMVTFSNLSTTLAVNHRISEAVSVIHIMLRIGVVPEVVDTILSADKKEIAAPKILVEELMKKGHISYSTYEVLHEGVRDNRLTRKARKEKFI

SEQ ID NO: 88865 - protein, 156 aa, Setaria italica
  Transcript Sequence Number=SeqID_22891
  Gene Ontology: Mol. function=oxidoreductase activity; Cellular component=cytoplasm; Biological process=oxidation reduction
  Homolog annotation: Hit_ID=Q8LMT9; Match level="QueryCoverage=85%, HitCoverage=39%, E-value=6e-50, Identity=69%"; Hit description =Putative alcohol dehydrogenase
  Pfam annotation: Domain name=ADH_N; Domain location=54-156; Score =89.6; E_value=1.1e-23; Accession=PF08240.4; Description=Alcohol dehydrogenase GroES-like doma
MDGTMAAAAANGNGSLANGGSGTRGKPIKCKAAVAWGPGEPLSLEEVEVAPPGRLEVRVKVLFTSICHTDLSAWKGETEMHRKFPRIFGHEAAGVVESVGDGVEDLVPGDHVIPIFTGECRECVYCGSDKTNLCGTYRVNPFKSTMTSDGGTRFAV

SEQ ID NO: 88866 - protein, 39 aa, Setaria italica
  Transcript Sequence Number=SeqID_22892
EVEEEAEEGAGEHDGVGAECGELHGGRWAVARREEEDLP

SEQ ID NO: 88867 - protein, 43 aa, Setaria italica
  Transcript Sequence Number=SeqID_22893
YVPSMFVALAAAVDLSVKACRPFRRKPGKKAASPSPDPLELDT

SEQ ID NO: 88868 - protein, 514 aa, Setaria italica
  Transcript Sequence Number=SeqID_22894
  Gene Ontology: Cellular component=plasma membrane
  Homolog annotation: Hit_ID=Q6YYY6; Match level="QueryCoverage=75%, HitCoverage=77%, E-value=1e-160, Identity=76%"; Hit description =Putative auxin-regulated protein
  Pfam annotation: Domain name=DUF966; Domain location=1-392; Score =633.5; E_value=2e-187; Accession=PF06136.5; Description=Domain of unknown function (DUF966)
LRDVINRLNVLRGKGMASMYSWSCKRSYKNGFVWHDLSEDDLVLPAQGNEYILKGSELLDRSPPPDRQQNGASNPKVEGLKHPKEESPQSRGSQEGCSSSSSPSAVVKDISPPPATPRPQQQGQSTLLPSSSASTNHEDEQCRTTHSGSSGNQSPEPAGRNAPLSEASSPGPSEYRVCKPVGAQDAATQTDDSERYVPEKDTRVTGMSMEAGTSDAEIQECHERSSLVSPEGPEIVRESPGVCSSDASPGGRVETLESLIRAEASRRSSFRTLEEEHMFGPMGVKLKPANLLMQLITCGSISVKEHRGFGIIPTYRPRFTQVEFPSPVFSTPVALRHLDKIPCNARTIGMRAPESECFSGSLVETKKQDESGRGISALKRSSSYDEDRVYREAHSKSDTESSVESGSFRCLPQTIRIISCKQSRNGTILSPVSDVRNSSSRQEYSARSSPLGSSKSASNRMTDPSLGKLSSARIESFHEEKDLIKIEERLPSGARVIIQSVPLCEESDDSNESL

SEQ ID NO: 88869 - protein, 120 aa, Setaria italica
  Transcript Sequence Number=SeqID_22895
  Gene Ontology: Mol. function=hydrolase activity, hydrolyzing O -glycosyl compounds; Cellular component=plasma membrane; Biological process=carbohydrate metabolic process
  Homolog annotation: Hit_ID=Q53MQ1; Match level="QueryCoverage=100%, HitCoverage=15%, E-value=4e-43, Identity=67%"; Hit description =Glycosyl hydrolase family 3 C terminal domain containing protein, expressed
LTKTFRSSWGLNGYVAADCDAVAIMKASQFYRPTAEDTVAATLKAGLDIDCGPYIQQYVTSAIQKGKLTQQDVDKAVKNLFTTRMRLGHFDGDPKAGVYGSLGAAHICTAEHKNLALEAA

SEQ ID NO: 88870 - protein, 89 aa, Setaria italica
  Transcript Sequence Number=SeqID_22896
  Gene Ontology: Mol. function=hydrolase activity, hydrolyzing O -glycosyl compounds; Biological process=carbohydrate metabolic process
  Homolog annotation: Hit_ID=Q7XVG8; Match level="QueryCoverage=100%, HitCoverage=20%, E-value=5e-18, Identity=59%"; Hit description =OSJNBa0073L04.8 protein
  Subcellular localization annotation: CTP_CleavageSite=41; ConfidenceScore=5.16e-01
MAAAGRPSRTAQSLPAPSSKLTAACFFVLLLPFLLTEGVAVAEALSIGVNYGQIANNLPSPARVSWLLRSMRISKVKLYDADPNVLRAF

SEQ ID NO: 88871 - protein, 87 aa, Setaria italica
  misc_feature (58)..(58): Xaa can be any naturally occurring amino acid
  Transcript Sequence Number=SeqID_22897
  Subcellular localization annotation: CTP_CleavageSite=68; ConfidenceScore=5.28e-01
AGTGAGTGAGTGGMGAGTGAGTGAGAGAGAGITTPGSSTLSPPFGGTGAYGPSGAGTXPDYNDAASPVASGRHALAALVLAAAVLFR

SEQ ID NO: 88872 - protein, 237 aa, Setaria italica
  Transcript Sequence Number=SeqID_22898
  Gene Ontology: Mol. function=electron carrier activity; Biological process=oxidation reduction
  Homolog annotation: Hit_ID=A4D8H9; Match level="QueryCoverage=98%, HitCoverage=44%, E-value=1e-108, Identity=75%"; Hit description=P450 monooxygenase
  Pfam annotation: Domain name=p450; Domain location=1-233; Score= -155.7; E_value=0.00038; Accession=PF00067.14; Description=Cytochrome P450
EGEPPKNDLLGILLESNMRDTDENGQSSLGMTIEDVIEECKVFYLAGMETTSVLMTWTMVLLSMHREWQDRAREEVIGLFGRTKPEYEGLSRLKTVNMILYEVLRLYPPAVVFSRRTYKEMKIGNVTYPASAFIEIPILFIHHDPDIWGSDAHDFKPERFAEGISKASKDPSAFLPFGWGPRTCIGQNFALLEAKMALCMILQRFEFELAQSYTHAPHTVMTLRPMHGAQIKLIRVI

SEQ ID NO: 88873 - protein, 115 aa, Setaria italica
  Transcript Sequence Number=SeqID_22899
  Gene Ontology: Mol. function=protein serine/threonine kinase activity; Cellular component=integral to membrane; Biological process=protein amino acid phosphorylation
  Homolog annotation: Hit_ID=O23921; Match level="QueryCoverage=98%, HitCoverage=20%, E-value=3e-29, Identity=61%"; Hit description =Somatic embryogenesis receptor-like kinase
KGEDAMLLGRVKGLIKEKKLDLIPDPDLGNNYYEVEVESLVQIALLCTQRDPIERPKMSEVVTMLESGGGLVERWEEWLKVADDQDVEIGPHRTAELFVGLSFTTLNAVELSGPR

SEQ ID NO: 88874 - protein, 124 aa, Setaria italica
  Transcript Sequence Number=SeqID_22900
  Gene Ontology: Mol. function=electron carrier activity; Cellular component=cell wall; Biological process=DNA integration
  Homolog annotation: Hit_ID=Q56YQ4; Match level="QueryCoverage=89%, HitCoverage=85%, E-value=1e-30, Identity=54%"; Hit description =Berberine bridge enzyme-like protein
  Pfam annotation: Domain name=BBE; Domain location=51-108; Score =104.4; E_value=3.8e-28; Accession=PF08031.4; Description=Berberine and berberine like
YAHRRGYLYNVQYFVKWHGGAGGEEEEGHLGWVRGVHGFMAPYVSSGPRAAYVNFRDLDLGMNVEGETSYEKARAWGEVYFRGNFRRLAMVKAEVDPEQVFWSEQSIPPLFVERQSESGLVSDT

SEQ ID NO: 88875 - protein, 73 aa, Setaria italica
  Transcript Sequence Number=SeqID_22901
GRYVHCKEYYKTQQGMFTLDLHRDDLTTQTKTEAVNQVQQDRGIYHQHSVCNQRPSGELFEMYLIYVFNHAGA

SEQ ID NO: 88876 - protein, 124 aa, Setaria italica
  misc_feature (68)..(68): Xaa can be any naturally occurring amino acid
  misc_feature (79)..(79): Xaa can be any naturally occurring amino acid
  misc_feature (87)..(87): Xaa can be any naturally occurring amino acid
  Transcript Sequence Number=SeqID_22902
  Gene Ontology: Mol. function=RNA polymerase II transcription factor activity; Cellular component=transcription factor TFIID complex; Biological process=transcription initiation from RNA polymerase II promoter
  Homolog annotation: Hit_ID=A9RJY7; Match level="QueryCoverage=91%, HitCoverage=51%, E-value=1e-47, Identity=84%"; Hit description=TATA -box binding protein, component of TFIID and TFIIIB
  Pfam annotation: Domain name=TBP; Domain location=20-108; Score=99.1; E_value=1.5e-26; Accession=PF00352.13; Description=Transcription factor TFIID (or TATA-binding protein, TBP)
MAEPALEGSQPVDLTKHPSGIVPTLQNIVSTVNLECKLDLKAIALQARNAEYNPKRFAAVIMSVLSSXPKTTALIFASXGKMVCTGXKSEQQSKLAARKYARIIQKLGFPAKFKVHIPFLRRVV

SEQ ID NO: 88877 - protein, 192 aa, Setaria italica
  Transcript Sequence Number=SeqID_22903
  Gene Ontology: Mol. function=RNA polymerase II transcription factor activity; Cellular component=transcription factor TFIID complex; Biological process=transcription initiation from RNA polymerase II promoter
  Homolog annotation: Hit_ID=Q6JAE2; Match level="QueryCoverage=82%, HitCoverage=40%, E-value=9e-86, Identity=96%"; Hit description=TATA sequence-binding protein 2 (TBP-2)
  Pfam annotation: Domain name=TBP; Domain location=102-188; Score =149.0; E_value=1.5e-41; Accession=PF00352.13; Description =Transcription factor TFIID (or TATA-binding protein, TBP)
  Pfam annotation: Domain name=TBP; Domain location=23-97; Score=77.3; E_value=5.7e-20; Accession=PF00352.13; Description=Transcription factor TFIID (or TATA-binding protein, TBP)
  Pfam module annotation: Pfam domain module=TBP::TBP; Domain location =102-188::23-97
YGILDISSSSHSVLTYVISLSCFLFLCCICCFSNVLLQARNAEYNPKRFAAVIMRIREPKTTALIFASGKMVCTGAKSEQQSKLAARKYARIIQKLGFPAKFKDFKIQNIVGSCDVKFPIRLEGLAYSHGAFSSYEPELFPGLIYRMKQPKIVLLIFVSGKIVLTGAKVRDETYTSFENIYPVLTEFRKVQQ

SEQ ID NO: 88878 - protein, 137 aa, Setaria italica
  Transcript Sequence Number=SeqID_22904
DTEKAVEFSQRQMHDIENIAAKLIRSLKHMKSIVDESLSSEAYSLLPNSNIAEIRAASEDALEVEKTTRKWLSIMNKDCNRFCKILSLAKKSAVSHPEVPRKQRKITFADETGGTLCHVKVFKEGQTSLLSECQSDL

SEQ ID NO: 88879 - protein, 451 aa, Setaria italica
  Transcript Sequence Number=SeqID_22905
  Gene Ontology: Mol. function=ATPase activity, coupled to transmembrane movement of substances; Cellular component=integral to membrane; Biological process=transport
  Homolog annotation: Hit_ID=Q8GU65; Match level="QueryCoverage=100%, HitCoverage=59%, E-value=0.0, Identity=61%"; Hit description=MRP -like ABC transporter
  Pfam annotation: Domain name=ABC_tran; Domain location=87-258; Score =141.2; E_value=3.1e-39; Accession=PF00005.19; Description=ABC transporter
  Pfam annotation: Domain name=SMC_N; Domain location=72-261; Score= -119.9; E_value=0.0089; Accession=PF02463.11; Description=RecFRecNSMC N terminal domain
  Pfam module annotation: Pfam domain module=ABC_tran::SMC_N; Domain location=87-258::72-261
GRLDRYLLDAELDDSSVEHVEGTGIGTGALVVEVRDGIFAWDMRGNKQSKEGEDGDEGGEGEDQKDVEEIPVLETVLKGINMEVRRGELVAVVGTVGSGKSSLLSCIMGEMEKISGTVRVCGSTAYVAQTAWIQNGTIQENILFGQPMYAERYTEVIRSCCLEKDLEMMEFGDQTEIGERGINLSGGQKQRIQLARAVYQNCDIYLLDDVFSAVDAHTGSNIFKECLRGTLKGKTIILVTHQVDFLHNVDNIFVMRDGMIEQSGKYDELLEAGSDFASLVAAHDSSLELMEQSQQAEKTERSQPAAVVRIPSLRSTSIGKGEKVVVTPDIKAATSKIIEEEEREIGQVSWQVYKLYMTEAWGWWGVVGMFAFALVWQCSDLAGDYWLSYELSGSIPFDPSLFIGVYVAIAVFSMVLEVIKSLLETVFGLKTAQIFFTKMFDSILRAPMSFL

SEQ ID NO: 88880 - protein, 30 aa, Setaria italica
  Transcript Sequence Number=SeqID_22906
RFELCKRKLGRLMSARRRCTYDTYYSVAFD

SEQ ID NO: 88881 - protein, 59 aa, Setaria italica
  Transcript Sequence Number=SeqID_22907
RTPKLLGFSLSSNILVSQADHHHAHDSPAGTIGSPAAATPSLQGGPSWEMSLSLLNTER

SEQ ID NO: 88882 - protein, 88 aa, Setaria italica
  Transcript Sequence Number=SeqID_22908
MNNNSYMHLRRHVRKNNDNLVHGFARVRSPVNTCDDMQLGKSKRDVASSLECYMKEHGMAVEDAMAALAAMVEQAGRRINQACMELGR

SEQ ID NO: 88883 - protein, 83 aa, Setaria italica
  Transcript Sequence Number=SeqID_22909
SQQQHSSYRLLLGSRGRIGDWTGRVQPYLPPSSRAAGELEWRTGNAGKWNGRGRGRRGERMRRGEAARLSSLSSSPPHLGCSA

SEQ ID NO: 88884 - protein, 112 aa, Setaria italica
  Transcript Sequence Number=SeqID_22910
  Gene Ontology: Cellular component=integral to membrane; Biological process=transport
  Homolog annotation: Hit_ID=Q5JQD7; Match level="QueryCoverage=90%, HitCoverage=14%, E-value=1e-41, Identity=82%"; Hit description =Probable metal-nicotianamine transporter YSL12
VAYGGYVAVAAISIGTLPQVFPQLKWYYILVAYIFAPVLAFCNAYGTGLTDWSLASTYGKLAIFIFGAWAGASHGGVLVGLAACGVMMSIVSTAADLMQDFKTGYLTLASPR

SEQ ID NO: 88885 - protein, 45 aa, Setaria italica
  misc_feature (3)..(3): Xaa can be any naturally occurring amino acid
  misc_feature (17)..(17): Xaa can be any naturally occurring amino acid
  Transcript Sequence Number=SeqID_22911
  Gene Ontology: Mol. function=iron ion binding; Cellular component =integral to membrane; Biological process=iron ion transport
  Homolog annotation: Hit_ID=Q6H3Z3; Match level="QueryCoverage=100%, HitCoverage=6%, E-value=1e-11, Identity=82%"; Hit description=Iron -phytosiderophore transporter YSL15
AAXMVPAMASGLNTSRXDGIWTFPSSLLALAKIKPPICMKFTPGS

SEQ ID NO: 88886 - protein, 178 aa, Setaria italica
  Transcript Sequence Number=SeqID_22912
  Gene Ontology: Cellular component=nucleolus
  Homolog annotation: Hit_ID=Q67UF2; Match level="QueryCoverage=82%, HitCoverage=36%, E-value=5e-44, Identity=62%"; Hit description =Putative storekeeper protein
  Pfam annotation: Domain name=DUF573; Domain location=44-143; Score =69.4; E_value=1.3e-17; Accession=PF04504.6; Description=Protein of unknown function, DUF573
  Subcellular localization annotation: CTP_CleavageSite=32; ConfidenceScore=5.51e-01
RPIQRPLSSRPMDPPRHSMVPSFTEPRRKRPRSVAVPSSVEQLKRPSRLWSPADELVILRGLAACRAKRGVLPGSMHDIAKFHGHIESELSVQVTVTQVSDKVRRLKQKYNLFASRAKNGRDPDLPTPHDQSVYELGKRVWGTTDIAGGGSTAGDGYEISGGGGESEEEREIGESDED

SEQ ID NO: 88887 - protein, 63 aa, Setaria italica
  Transcript Sequence Number=SeqID_22913
GGEWSDAEDYQHHPSHQIYFRNYMRNHIFSVPFSKKATIFLNKKGKSCEGKHSKFAGTLLIGP

SEQ ID NO: 88888 - protein, 59 aa, Setaria italica
  Transcript Sequence Number=SeqID_22914
  Subcellular localization annotation: CTP_CleavageSite=34; ConfidenceScore=5.03e-01
MMVVGALSSLYLLYAPQVFWPFLVFWAGLVLFMSLRMTAGFMRLGWRAGPWWFFAPERT

SEQ ID NO: 88889 - protein, 103 aa, Setaria italica
  Transcript Sequence Number=SeqID_22915
  Gene Ontology: Mol. function=drug transporter activity; Cellular component=membrane; Biological process=multidrug transport
  Homolog annotation: Hit_ID=B9SIJ1; Match level="QueryCoverage=89%, HitCoverage=15%, E-value=6e-34, Identity=69%"; Hit description=DNA -damage-inducible protein f, putative
  Subcellular localization annotation: CTP_CleavageSite=50; ConfidenceScore=5.08e-01
RSGVLFVSASQPINALAFIFDGLHYGVSDFSYSAFSMMVVGALSSLYLLYAPQVFGLPGVWAGLVLFMSLRMTAGFMRLGWRAGPWWFLHQKEPRYKLHSRKC

SEQ ID NO: 88890 - protein, 399 aa, Setaria italica
  Transcript Sequence Number=SeqID_22916
  Gene Ontology: Mol. function=drug transporter activity; Cellular component=membrane; Biological process=multidrug transport
  Homolog annotation: Hit_ID=B9S6S4; Match level="QueryCoverage=96%, HitCoverage=86%, E-value=1e-106, Identity=51%"; Hit description=DNA -damage-inducible protein f, putative
  Pfam annotation: Domain name=MatE; Domain location=187-346; Score =53.8; E_value=6.8e-13; Accession=PF01554.10; Description=MatE
HTLLSITTSFVAEDVSKHDSSQPASGNISSEIGERKRLPSISSALLLAAAIGVIEASALILGSGILLNIMGVSQASSMHNPARLFLSVRALGAPAVVVSLAIQGVFRGLKDTKTPLLYSGLGNISAVVLLPFFVYSLKLGLTGAALATIASQYLGMFLLLWSLSRRAVLLPPKIEDLEFVGYIKSGGMLLGRTLSVLITMTLGTAMAARQGALAMAAHQICLQVWLAVSLLSDALAVSAQALIASSFAKLDYEKVKEVTSYVLKTGVIVGIALAVLLSASFGRLAEVFSKDPMVIQIVRSGVLFVSASQPINALAFIFDGLHYGVSDFSYSAFSMMVVGALSSLYLLYAPQVFGLPGVWAGLVLFMSLRMTAGFMRLGWRAGPWWLLHQKEPRYKYYSH

SEQ ID NO: 88891 - protein, 74 aa, Setaria italica
  Transcript Sequence Number=SeqID_22917
  Gene Ontology: Mol. function=sequence-specific DNA binding; Cellular component=nucleus; Biological process=regulation of transcription, DNA-dependent
  Homolog annotation: Hit_ID=Q6MWF2; Match level="QueryCoverage=100%, HitCoverage=74%, E-value=6e-34, Identity=95%"; Hit description =B1358B12.2 protein
  Pfam annotation: Domain name=SRF-TF; Domain location=9-59; Score =104.9; E_value=2.6e-28; Accession=PF00319.10; Description=SRF-type transcription factor (DNA-binding and dimerisation domain)
MGRGKIVIRRIDNSTSRQVTFSKRRNGIFKKAKELAILCDAEVGLMIFSSTGRLYEYSSTSMKSVIDRYGKAKE

SEQ ID NO: 88892 - protein, 185 aa, Setaria italica
  Transcript Sequence Number=SeqID_22918
  Gene Ontology: Mol. function=manganese ion binding; Cellular component=nucleus; Biological process=DNA repair
  Homolog annotation: Hit_ID=Q75LI2; Match level="QueryCoverage=99%, HitCoverage=44%, E-value=9e-89, Identity=82%"; Hit description=Flap endonuclease 1b
  Pfam annotation: Domain name=5_3_exonuc; Domain location=51-140; Score=-30.8; E_value=0.09; Accession=PF01367.12; Description=5'-3' exonuclease, C-terminal SAM fold
  Pfam annotation: Domain name=XPG_I; Domain location=1-70; Score=56.8; E_value=8.1e-14; Accession=PF00867.10; Description=XPG I-region
  Pfam module annotation: Pfam domain module=5_3_exonuc::XPG_I; Domain location=51-140::1-70
ETHQVYAVASEDMDSLTFGARRFLRHLTDLGYKKSPVTEFEVSKVLEELGLTMDQFIDLCILSGCDYCENIKGIGGQRALKLIRQHGCIEEVLQNLKQTRFSVPEDWPYQEVRTLFKEPNVCTGIPDFMWTSPDSKGLMDFLSTENSFSPDRVAKAVEKIKAARDRYSPGRLKLLTPVASLPGSH

SEQ ID NO: 88893 - protein, 66 aa, Setaria italica
  Transcript Sequence Number=SeqID_22919
GTIQVNKNNNTWLRDGMTLVLEPEATNDIVGQRMEGAIGCLVNSFPLMYILNKLIVNVFSDALSTD

SEQ ID NO: 88894 - protein, 455 aa, Setaria italica
  Transcript Sequence Number=SeqID_22920
  Gene Ontology: Mol. function=sugar:hydrogen symporter activity; Cellular component=integral to membrane; Biological process=transport
  Homolog annotation: Hit_ID=A1A5V3; Match level="QueryCoverage=83%, HitCoverage=81%, E-value=6e-54, Identity=32%"; Hit description =Si:dkey-218h11.4 protein
  Pfam annotation: Domain name=MFS_1; Domain location=27-392; Score= -4.4; E_value=0.04; Accession=PF07690.8; Description=Major Facilitator Superfamily
MVNMRDNESSYEAQMEEPLGRVRILSYGSGHMLNDITSSCWFTYLLVFLTEMGLSPRDAAVVMLSGQLADGFTTIFVGELMDRFGHFKLWHAGGSILVAISFSSVFGSCVPCKLMGTNSSTLETVGYSTFASIFNVGWAVTQVAHMSMVNCMTSSPTSRVSLVSCRNAFTMVANLSLYGIALLIFTLLHSVSVIVQYRWIAYVSISIGSCFVVIFLVGTKEPGSIQHPMDKNLSRISWAYWFKRVLYYQVALVYTLTRLVTNVSQAFLAFYVIYDLEMPQSSKALVPAIIYVCSLIVSVILQETRWSSWRLKLYFSAGAVLWILSGLGIVLLPSRLNNVMYAISIVIGAANALMTVTSISMEGVLVGEDLNGCAFVYGSLSFVDKISCGIALYILESYQGNTHITPNVGTAFGYSVTRLGLGLVPAACSLLSAIVAYTMDLPDTRRRPLVEPLLA

SEQ ID NO: 88895 - protein, 165 aa, Setaria italica
  Transcript Sequence Number=SeqID_22921
  Gene Ontology: Mol. function=substrate-specific transmembrane transporter activity; Cellular component=integral to membrane; Biological process=transmembrane transport
  Homolog annotation: Hit_ID=Q7XMZ2; Match level="QueryCoverage=93%, HitCoverage=92%, E-value=5e-55, Identity=73%"; Hit description =OSJNBa0027G07.3 protein
MAGGAIVPTDGPATDYGGSLTLSVFMTCLVAASGGLIFGYDIGISGGVSEMEPFLRRFFPHVLRRMAEAKGNEYCIYDSQTLTAFTSSLYVAGLFASLVASRVTKAMGRQAVMLMGGALFFAGGAMTGAAVNIAMLIVGRMLLGFGVGFTNQAAPLFLAEMAPSK

SEQ ID NO: 88896 - protein, 246 aa, Setaria italica
  Transcript Sequence Number=SeqID_22922
  Homolog annotation: Hit_ID=Q1H8M6; Match level="QueryCoverage=91%, HitCoverage=87%, E-value=3e-46, Identity=41%"; Hit description =Cytochrome B561-related protein
  Pfam annotation: Domain name=Cytochrom_B561; Domain location=19-224; Score=-57.4; E_value=0.014; Accession=PF03188.8; Description =Eukaryotic cytochrome b561
  Pfam annotation: Domain name=DUF2427; Domain location=38-151; Score= -21.4; E_value=0.025; Accession=PF10348.1; Description=Domain of unknown function (DUF2427)
  Pfam module annotation: Pfam domain module=Cytochrom_B561::DUF2427; Domain location=19-224::38-151
QMLASGRRLLLVRTSFVILSLLVPSDGASNSMETLNQSHNKTGNPLEMTPKVSFQLKLHALFHWTSFGFLMPLGIILVRMSSKSRNGGCIRLLFYCHVISQVAAVLLATGGAVLSLMNFENSFSNSHQRVGLALYGVMWLQPIIGFFRPERGVKVRSLWYFFHWFLGITICATGIVNVYIGLHTYHEKTTKSVRLLTGLLTVEVILLAFSYLMIDRWSYMMKQGHVSVEQLRPTDNRRTYPTTLRK

SEQ ID NO: 88897 - protein, 176 aa, Setaria italica
  Transcript Sequence Number=SeqID_22923
  Gene Ontology: Mol. function=protein serine/threonine kinase activity; Cellular component=integral to membrane; Biological process=protein amino acid phosphorylation
  Homolog annotation: Hit_ID=Q2L3C7; Match level="QueryCoverage=100%, HitCoverage=49%, E-value=4e-53, Identity=39%"; Hit description =Clavata-like kinase
  Pfam annotation: Domain name=LRR_1; Domain location=112-134; Score =9.7; E_value=4.2; Accession=PF00560.25; Description=Leucine Rich Repeat
  Pfam annotation: Domain name=LRR_1; Domain location=136-158; Score =16.3; E_value=0.13; Accession=PF00560.25; Description=Leucine Rich Repeat
  Pfam annotation: Domain name=LRR_1; Domain location=16-38; Score =16.2; E_value=0.14; Accession=PF00560.25; Description=Leucine Rich Repeat
  Pfam annotation: Domain name=LRR_1; Domain location=40-62; Score =10.5; E_value=3; Accession=PF00560.25; Description=Leucine Rich Repeat
  Pfam annotation: Domain name=LRR_1; Domain location=64-86; Score=6.5; E_value=17; Accession=PF00560.25; Description=Leucine Rich Repeat
  Pfam annotation: Domain name=LRR_1; Domain location=88-110; Score =16.6; E_value=0.11; Accession=PF00560.25; Description=Leucine Rich Repeat
  Pfam module annotation: Pfam domain module=LRR_1::LRR_1::LRR_1::LRR _1::LRR_1::LRR_1; Domain location=112-134::136-158::16-38::40-62::64 -86::88-110
  Subcellular localization annotation: CTP_CleavageSite=37; ConfidenceScore=5.04e-01
NSLTGPIPSSFGTLPNLQQLQLSTNKLTGVIPPELSNCTSLTDIEVDNNELSGEIGIDFPRLRNLTLFYAWQNRLTGPVPASLSQCEGLQSLDLSYNNFTGPVPRELFALQNLTKLLLLDNDLSGFIPPEIGNCTNLYRLRLNNNRLSGTIPAEIGRLKNLNFPRRWGSNRLRPLP

SEQ ID NO: 88898 - protein, 56 aa, Setaria italica
  Transcript Sequence Number=SeqID_22924
LFSPMRVEGSNAELKDPYLPCSSGVDPNAQLNGSDTGWFSPGKLFLARSQRSPLQF

SEQ ID NO: 88899 - protein, 42 aa, Setaria italica
  Transcript Sequence Number=SeqID_22925
PAAVECKPHLQYLITSNNLVKRSTCYFPRIKVHNSFPDTWHY

SEQ ID NO: 88900 - protein, 78 aa, Setaria italica
  Transcript Sequence Number=SeqID_22926
WTRWSLCYNLSFCSARSFGIIILSSGIGIGVGCFLLRESPLSVRRKSLMNFYVELRNSSWSTILPLHLWGNIMSTLDH

SEQ ID NO: 88901 - protein, 230 aa, Setaria italica
  misc_feature (146)..(146): Xaa can be any naturally occurring amino acid
  misc_feature (155)..(155): Xaa can be any naturally occurring amino acid
  Transcript Sequence Number=SeqID_22927
  Gene Ontology: Mol. function=nucleotide binding; Biological process =defense response
  Homolog annotation: Hit_ID=Q8RV64; Match level="QueryCoverage=92%, HitCoverage=23%, E-value=3e-35, Identity=41%"; Hit description =Disease-resistant protein DS3
AKCWMKEARELSYDIEDYIDRFVFSGHVQTIGPRCRRISHIKIARLVETNKKLIRRKRVAAMISDFRIYTQEAIERHKRYELDCSNFRRRFEPAGRLPTTYEEKADIIIHCGMTKFMDSLDNGRDEQLKVVSVVGSGGIGKTHLLXVLYKKLKGXFDCKTFVRLTRKPDIKTMLRDILTQVQRQQPHHDHGEDPDLIGKIREHLQHKRYTLLPLLSPTCVYYFYLWLVNP

SEQ ID NO: 88902 - protein, 173 aa, Setaria italica
  Transcript Sequence Number=SeqID_22928
  Gene Ontology: Mol. function=sequence-specific DNA binding; Cellular component=nucleus; Biological process=regulation of transcription, DNA-dependent
  Homolog annotation: Hit_ID=Q7XTS2; Match level="QueryCoverage=98%, HitCoverage=17%, E-value=1e-44, Identity=46%"; Hit description =OSJNBa0008M17.13 protein
  Pfam annotation: Domain name=MULE; Domain location=1-91; Score=70.5; E_value=6.2e-18; Accession=PF10551.1; Description=MULE transposase domain
TYKINSHGRPLMLFLGVNHHKQISIFGAALLYDESMESFNWLFDTFKVATGGKQPKTVLSDQSMAAAAAITAAWPGTTHCHCPWQVYQNAVNHLNHIFQGSKTFAKDFSKCVYEYEEEEDFLLGWSTMLEDYNLRNNEWVRKLFQDRDKWASVYNKHVFTADIKNSLQSESIS

SEQ ID NO: 88903 - protein, 290 aa, Setaria italica
  misc_feature (54)..(54): Xaa can be any naturally occurring amino acid
  misc_feature (192)..(192): Xaa can be any naturally occurring amino acid
  Transcript Sequence Number=SeqID_22929
  Gene Ontology: Mol. function=sequence-specific DNA binding; Cellular component=nucleus; Biological process=regulation of transcription, DNA-dependent
  Homolog annotation: Hit_ID=Q7XTS2; Match level="QueryCoverage=70%, HitCoverage=21%, E-value=3e-53, Identity=46%"; Hit description =OSJNBa0008M17.13 protein
  Pfam annotation: Domain name=SWIM; Domain location=138-185; Score =27.8; E_value=4.6e-05; Accession=PF04434.9; Description=SWIM zinc finger
FSLSRYYNLRNNEWVRKLFQDRDKWASVYNKHVFTADIKNSLQSESISSVLKKXLSPQFDLSSFFKHFEKVLDEHRYAELQADFHASQSFPRIPPSKMLRQAASMYTPVVFEIFRREFEMFVDSVIYSCGEAGTASDYRVAVTDKPGEHYVKFESSDFSVVCSCKKFESMGIQCCHVLKVLDFRNKKELPQXYFLGRWKKDAKSANTGNQEFLNDGSSQTPSSSLNGLGPFIDHQHMQTNNQPNHDSSVSSFHQQGLHGDSQGNQGYTPLVGMQPQEFIGDFHLNNGAGF

SEQ ID NO: 88904 - protein, 160 aa, Setaria italica
  Transcript Sequence Number=SeqID_22930
KSLTFFNRFEARDSQEQLKKPKFWAGLWRWRAKIPPFFVRRLGSGRRPQCSNREPEKLSPLFTSISPGSIFFSSAARKTKTLRSRTDQGAPLAHLRTVSMGFSQLLLLLPRSSRSSCLPLYAVDFGFHLPGSIPLRSPVPLPPLSPHCSSCELVVVLVVR

SEQ ID NO: 88905 - protein, 35 aa, Setaria italica
  Transcript Sequence Number=SeqID_22931
LVTCINQQYNYKPYAMYHTYLHGNFETNSKHLLFL

SEQ ID NO: 88906 - protein, 154 aa, Setaria italica
  misc_feature (10)..(10): Xaa can be any naturally occurring amino acid
  Transcript Sequence Number=SeqID_22932
  Gene Ontology: Mol. function=hydrolase activity, hydrolyzing O -glycosyl compounds; Biological process=carbohydrate metabolic process
  Homolog annotation: Hit_ID=B9SIA5; Match level="QueryCoverage=100%, HitCoverage=24%, E-value=2e-58, Identity=70%"; Hit description =Hydrolase, hydrolyzing O-glycosyl compounds, putative
  Pfam annotation: Domain name=Glyco_hydro_3; Domain location=1-153; Score=78.4; E_value=2.7e-20; Accession=PF00933.13; Description =Glycosyl hydrolase family 3 N terminal domain
RLGIPMLYGXIDAVHGHNNVYRATIFPHNIGLGCTRDPELVQKIGAAVALEVRATGIPYVFAPCIAVCRDPRWGRCYESFSEDPKLVQQMTSIISGFQGEIPANGRLGAPSVSGQRNVAACAKHYVGDGGTTNGINENNTVATFHELLSIHMPA

SEQ ID NO: 88907 - protein, 72 aa, Setaria italica
  Transcript Sequence Number=SeqID_22933
MPFSPRRRLRRLARSLRAMYPSAAAPDADATAGDERRAWEPPFDASAPAPPMSYSITDLAALASRAYLSAAA

SEQ ID NO: 88908 - protein, 57 aa, Setaria italica
  Transcript Sequence Number=SeqID_22934
STWIAIISYYPSLLSRSSKNGKGKGGAEAGTAPTTEQLHAVVSSILKEVDFNTVSKR

SEQ ID NO: 88909 - protein, 74 aa, Setaria italica
  misc_feature (1)..(25): Xaa can be any naturally occurring amino acid
  Transcript Sequence Number=SeqID_22935
XXXXXXXXXXXXXXXXXXXXXXXXXFFLGLKPHDHEGIKNCKKQEQFRRIQSFTRVILMKRSDAVDRMCIGCAV

SEQ ID NO: 88910 - protein, 139 aa, Setaria italica
  Transcript Sequence Number=SeqID_22936
  Gene Ontology: Mol. function=binding
  Homolog annotation: Hit_ID=B9RQE4; Match level="QueryCoverage=82%, HitCoverage=9%, E-value=1e-27, Identity=49%"; Hit description=DNA repair/transcription protein met18/mms19, putative
CSDETLATIPSHEEESYVNDSSNTSIATSAAGAFHVMMSDSEVCLNKKFHARIKPLYKQRFFSIMMPIFLSKIKEATSMTTKLALYRAFGHIISNAPVPAVITEAHQILLVMVDSLAKLSVDIQDKDLVYNLLLVLSGM

SEQ ID NO: 88911 - protein, 277 aa, Setaria italica
  Transcript Sequence Number=SeqID_22937
  Gene Ontology: Mol. function=binding
  Homolog annotation: Hit_ID=B9RQE4; Match level="QueryCoverage=98%, HitCoverage=25%, E-value=5e-26, Identity=28%"; Hit description=DNA repair/transcription protein met18/mms19, putative
ASYEIGTAGFNYMLRVARSLEGAVVTNISKTNGGMECTEHVAHLFECYSGQVLPWLFTSGGINELALSFAMHLLDEIKDLTMLDRIGSQGLLDSLMAGMKLLVGVCTVEQQTRIVQKAYSMVSSVIPLPLKSMTYHLLSADELVPSHTVQETALVGMLSSVIVGLRPQTPAPDMWMMINLFTVFLLNGKLPAAYALASVFNKYLHNPEFSHENQLDKILDGILERCFSTVLASNHSKIPHSSVDTSNDANFLDVLSGNVLSKIDILSGLAWIGKGLL

SEQ ID NO: 88912 - protein, 59 aa, Setaria italica
  Transcript Sequence Number=SeqID_22938
  Gene Ontology: Mol. function=hydrolase activity; Biological process =lipid catabolic process
  Homolog annotation: Hit_ID=Q2R2X0; Match level="QueryCoverage=98%, HitCoverage=15%, E-value=4e-22, Identity=84%"; Hit description =Patatin, putative, expressed
DCNPENRASPRQLFNWALEPAEDEILDKLYELGYRDAAVWAEQNSTELTSKNDQPLVVD

SEQ ID NO: 88913 - protein, 65 aa, Setaria italica
  Transcript Sequence Number=SeqID_22939
KNGSYVLNRQDASGYSFRNRYCRNISKETRRAFSPIDEDVTAIAKLLVACVARAHEATRHSRKAA

SEQ ID NO: 88914 - protein, 304 aa, Setaria italica
  misc_feature (39)..(39): Xaa can be any naturally occurring amino acid
  Transcript Sequence Number=SeqID_22940
  Homolog annotation: Hit_ID=Q8LGS1; Match level="QueryCoverage=74%, HitCoverage=76%, E-value=2e-23, Identity=35%"; Hit description =Senescence-associated protein SAG102
  Pfam annotation: Domain name=DUF581; Domain location=243-301; Score =81.9; E_value=2.3e-21; Accession=PF04570.6; Description=Protein of unknown function (DUF581)
  Subcellular localization annotation: CTP_CleavageSite=73; ConfidenceScore=5.57e-01
MLRSRSRGAVGGGAKQGGAGGLMAEPPRPRPPPPSRRGXPSSSSSAAPVFPAPRPFMAMALPQADGSSEGPSSAMSPTSILETKQFCCSALPPFLSERSLRRAHHADTPAAAPEPAGVGLADVLRDHGDAKPGGGKVVFGSQLRIQVPSGRAVELVSSPIEFGAKNRDAQLAVLSPARRFLPEVVSSPSARVFAGAVAPGEMAMSEDYTCVISRGPNPRTMHIFDDCIVESCGDVLVEKMDKGAGAGDGGFAAVASGFMSSCHACNKQLGYGSDIFIYRGDKAFCSSECRYQEMLFDETVDNLR

SEQ ID NO: 88915 - protein, 102 aa, Setaria italica
  Transcript Sequence Number=SeqID_22941
  Subcellular localization annotation: CTP_CleavageSite=62; ConfidenceScore=5.45e-01
AAAAEILAAAAITAPLDAGATRGRPRASCHSRLRARGASLRVQSLSWLPAQRSRAPGGAPPAAAAARQFKAFGRALLCSRSSGVPLESFRPGEDWFLRLGDR

SEQ ID NO: 88916 - protein, 86 aa, Setaria italica
  Transcript Sequence Number=SeqID_22942
DEDCFDDLCEEMSRMTVVDEEERKAGLPQFEGRHTRFIYNSDDEIEREEVADAAEARAELGALMLRDLPVPEGRHLRFQEDEEDEE

SEQ ID NO: 88917 - protein, 106 aa, Setaria italica
  Transcript Sequence Number=SeqID_22943
  Gene Ontology: Mol. function=protein binding; Biological process =proteolysis
  Homolog annotation: Hit_ID=Q84YE9; Match level="QueryCoverage=100%, HitCoverage=38%, E-value=2e-21, Identity=59%"; Hit description =Truncated Xa1-like protein
IDDCNMLLSRWSMLQAAKSINLFPPQVEELDLWNEPSTLSMALFSNLTSLTRLLLCGCNFTMDGFNPLITSTLERLQVFNSRDGETDPYSIAADLLAEVARTKTMP

SEQ ID NO: 88918 - protein, 184 aa, Setaria italica
  misc_feature (171)..(171): Xaa can be any naturally occurring amino acid
  Transcript Sequence Number=SeqID_22944
  Gene Ontology: Mol. function=metalloendopeptidase activity; Biological process=proteolysis
  Homolog annotation: Hit_ID=B6SU43; Match level="QueryCoverage=92%, HitCoverage=36%, E-value=2e-88, Identity=95%"; Hit description=O -sialoglycoprotein endopeptidase
  Pfam annotation: Domain name=Peptidase_M22; Domain location=14-182; Score=101.3; E_value=3.4e-27; Accession=PF00814.17; Description =Glycoprotease family
CDDTAAAVVRGDGEILSQVVSSQADLLARYGGVAPKMAEEAHALVIDQVVQKALDDAKLSGSDLSAVAVTVGPGLSLCLRVGVHKARQVAKSFGLPIVGVHHREAHALVSRLVNKDLDFPFLALLISGGHNLLVLAHSLGQYVQLGTTIDDAIGEAYDKSARWLGLDMRKXGGGPALVLLALDG

SEQ ID NO: 88919 - protein, 272 aa, Setaria italica
  Transcript Sequence Number=SeqID_22945
  Gene Ontology: Mol. function=metalloendopeptidase activity; Biological process=proteolysis
  Homolog annotation: Hit_ID=B6SU43; Match level="QueryCoverage=95%, HitCoverage=56%, E-value=1e-136, Identity=88%"; Hit description=O -sialoglycoprotein endopeptidase
  Pfam annotation: Domain name=Peptidase_M22; Domain location=4-206; Score=-6.6; E_value=1.1e-05; Accession=PF00814.17; Description =Glycoprotease family
ILSYCFKVSNKLICSGGHNLLVLAHSLGQYVQLGTTIDDAIGEAYDKSARWLGLDMRKGGGPALEELALDGDPNAVNFRVPMRQHKDCNFSYAGLKTQVRLAIESKNLCTDDIPISSASEEDRQTRADIAASFQRVAVLHLEERCQRAVEWALKIEPSIKYFVVSGGVASNKYVRTRLNQVAENNGLQLVTPPPSLCTDNGVMIAWTGIEHFVAGRFEDPPAADEPDDMQYELRPRWPLGEEYSEGRSVARSLKTARVHPSLTSMIQGSLQK

SEQ ID NO: 88920 - protein, 59 aa, Setaria italica
  Transcript Sequence Number=SeqID_22946
GSRVGGKEERPRESRATRTNWSTASSSYEGAMGSVAACSVPLYLSPSLSSLTCLAHAGR

SEQ ID NO: 88921 - protein, 194 aa, Setaria italica
  Transcript Sequence Number=SeqID_22947
  Gene Ontology: Mol. function=transcription factor activity; Cellular component=nucleus; Biological process=regulation of transcription, DNA-dependent
  Homolog annotation: Hit_ID=Q69Y47; Match level="QueryCoverage=86%, HitCoverage=49%, E-value=3e-24, Identity=37%"; Hit description=EREBP transcription factor
  Pfam annotation: Domain name=AP2; Domain location=100-151; Score =76.3; E_value=1.1e-19; Accession=PF00847.12; Description=AP2 domain
MCGGAILSDLYSPVRRTVTAGDLWAESGSRRSGKNQKRSSWEFDEADDDDFEADFEDFEDCSSVEEVDFGHEEKDFQINSSIFMKFNDHTAKVARRKRKTQYRGIRRRPWGKWAAEIRDPCKGVRVWLGTYNTAEEAARAYNVAARRIRGKKAKVNFPDTITASAKRLPGRVPRPEKKVMSQESLKFSSASEHA

SEQ ID NO: 88922 - protein, 85 aa, Setaria italica
  Transcript Sequence Number=SeqID_22948
  Gene Ontology: Mol. function=metal ion binding
  Homolog annotation: Hit_ID=B9SAP8; Match level="QueryCoverage=100%, HitCoverage=27%, E-value=2e-16, Identity=50%"; Hit description =Ubiquitin-protein ligase, putative
MKFAKKYATYMKGMEAELPAVGLKRLKKMLKKCRSHDGAAAGSPAAADRCPGHCSVCDGSFFPSLLNEMSAVVGCFNEKAKKLLE

SEQ ID NO: 88923 - protein, 103 aa, Setaria italica
  Transcript Sequence Number=SeqID_22949
TVFPLSQIISVFLHPKVHNFYYTPRKLMNLKKAKRLIIWNRGSTRERSCRHDHSSISAAVICDVMITSPAFRHSGRRPEPTIWLPQKSGRDGRMHYAIDIYNS

SEQ ID NO: 88924 - protein, 214 aa, Setaria italica
  Transcript Sequence Number=SeqID_22950
  Gene Ontology: Mol. function=hydrolase activity, hydrolyzing O -glycosyl compounds; Cellular component=extracellular region; Biological process=carbohydrate metabolic process
  Homolog annotation: Hit_ID=B6TNS1; Match level="QueryCoverage=70%, HitCoverage=60%, E-value=2e-54, Identity=71%"; Hit description =Xyloglucan endotransglucosylase/hydrolase protein 5
  Pfam annotation: Domain name=Glyco_hydro_16; Domain location=1-123; Score=36.3; E_value=2.7e-09; Accession=PF00722.13; Description =Glycosyl hydrolases family 16
IRAPAGDASGLNYNLYLSSLEGCREMDEIDFEFLGNDKRALQTNYHVGGGGGREQIHRLPFDPSDGFHHYAIAWDAKAIEWRVDGELIRREERREGEPWPEKPMRLYASVWDASDIDEGRWTGTYHGSDAPYVCSYKDVVVPPVEFWVEDDEQCQDADARDAPAAVVEEETDAVAIAPAMNDEGKCQDADPRDAPTDDDPAAGAAAAVEDVGKD

SEQ ID NO: 88925 - protein, 222 aa, Setaria italica
  misc_feature (24)..(24): Xaa can be any naturally occurring amino acid
  Transcript Sequence Number=SeqID_22951
  Gene Ontology: Cellular component=chloroplast envelope
  Homolog annotation: Hit_ID=Q9SX62; Match level="QueryCoverage=96%, HitCoverage=38%, E-value=7e-56, Identity=51%"; Hit description =F11A17.16
RPRHLLAIKADSRTKAELIEDLIXKIHTSTYTDVEQVLTFVDWLDQQLSTLSGARPVLKHFNWPERKADALREAASEYRHLKCLLTDISSLNDDAGSPSPCDATLRKISMLLDKLEKSMSRLVNLRSSAMPSYKELRIPTYWMLDSGVAAKMRLASVNLAKMYTKRVLKELDGRDTAGNEAALVAQSVRFIYRVHQFAGGLDCEAMHAFEELRRRARPVSSS

SEQ ID NO: 88926 - protein, 81 aa, Setaria italica
  Transcript Sequence Number=SeqID_22952
  Gene Ontology: Mol. function=protein serine/threonine kinase activity; Cellular component=integral to membrane; Biological process=protein amino acid phosphorylation
  Homolog annotation: Hit_ID=B9RAX9; Match level="QueryCoverage=100%, HitCoverage=7%, E-value=4e-32, Identity=74%"; Hit description =Receptor protein kinase, putative
EWEVRLAIAVGVAEGLAYLHHDCVPGIIHRDVKAENILLGERYEACLADFGLARFADEGANSSPPPFAGSYGYIAPEYGCM

SEQ ID NO: 88927 - protein, 210 aa, Setaria italica
  Transcript Sequence Number=SeqID_22953
  Gene Ontology: Mol. function=calcium ion binding; Cellular component =flagellin-based flagellum; Biological process=ciliary or flagellar motility
  Homolog annotation: Hit_ID=Q5ZCK5; Match level="QueryCoverage=70%, HitCoverage=82%, E-value=8e-54, Identity=74%"; Hit description =Probable calcium-binding protein CML16
  Pfam annotation: Domain name=Dockerin_1; Domain location=152-172; Score=9.9; E_value=0.53; Accession=PF00404.10; Description=Dockerin type I repeat
  Pfam annotation: Domain name=Dockerin_1; Domain location=72-92; Score= 10.0; E_value=0.52; Accession=PF00404.10; Description=Dockerin type I repeat
  Pfam annotation: Domain name=efhand; Domain location=103-131; Score =23.2; E_value=0.0011; Accession=PF00036.24; Description=EF hand
  Pfam annotation: Domain name=efhand; Domain location=143-171; Score =33.5; E_value=8.3e-07; Accession=PF00036.24; Description=EF hand
  Pfam annotation: Domain name=efhand; Domain location=179-207; Score =32.9; E_value=1.3e-06; Accession=PF00036.24; Description=EF hand
  Pfam annotation: Domain name=efhand; Domain location=63-91; Score =30.9; E_value=5.1e-06; Accession=PF00036.24; Description=EF hand
  Pfam module annotation: Pfam domain module=Dockerin_1::Dockerin _1::efhand::efhand::efhand::efhand; Domain location=152-172::72 -92::103-131::143-171::179-207::63-91
  Subcellular localization annotation: CTP_CleavageSite=47; ConfidenceScore=5.82e-01
LHLSPHKLSQVTSPPLDTTSSPLDRSSFFVSVAMSNASTEKQAQATSAAAAAQSQRPPAVSAEMQKVFSRFDADGDGRISPSELAAVNRAISPPPTSSHGGREVAAMMDELDTDRDGYVDLGEFAAFHARACARGDDGELEAELRAAFDVYDVNGDGRITAAELGRVLAQIGEGCSAEECERMIAGVDVDGDGCVGFEEFKKMMAPKGGA

SEQ ID NO: 88928 - protein, 197 aa, Setaria italica
  Transcript Sequence Number=SeqID_22954
  Subcellular localization annotation: CTP_CleavageSite=45; ConfidenceScore=5.01e-01
MAVLWLRLLLAVGLPIAALVAVAFLVYRRRSSPRNAPPELPEVAPAAGVEPTASPGLAKLNMRYSTASARVGLRFQQLHQHHHRVDVRHRGPGGAQQGPFQWADHPRLVTEAAENGWAQFVFAVAPPRSKSASSSPLWGTCPICDADTSRDMAEAAAWELPAGSSERMQAVRLNPAAAAAAASSTKRWLPGSIPSPL

SEQ ID NO: 88929 - protein, 90 aa, Setaria italica
  Transcript Sequence Number=SeqID_22955
TAGLGGAGTGAADVAEGRGTRVSPVAPTQPGSESERESRARTLTTTAAEPLMTPPHRQIFGYVPCSVALLNCILVQLTVFHFLDPTRHIK

SEQ ID NO: 88930 - protein, 76 aa, Setaria italica
  Transcript Sequence Number=SeqID_22956
QPAPASDAVAAALDDVFLPDLVGGGEQLFPYGDFFGGLQDRAALELSACYFPNMAEMWGAAAASDAKPQGLCNTLT

SEQ ID NO: 88931 - protein, 50 aa, Setaria italica
  Transcript Sequence Number=SeqID_22957
YVYLDIGWITRRLPAADFQSIHSCEASNRCRLSSALAVAAKWFQDFFAQF

SEQ ID NO: 88932 - protein, 157 aa, Setaria italica
  Transcript Sequence Number=SeqID_22958
  Gene Ontology: Mol. function=endonuclease activity; Cellular component=nucleus; Biological process=response to DNA damage stimulus
  Homolog annotation: Hit_ID=Q60GC1; Match level="QueryCoverage=100%, HitCoverage=18%, E-value=2e-80, Identity=87%"; Hit description =Exonuclease 1
  Pfam annotation: Domain name=XPG_I; Domain location=1-61; Score=-0.1; E_value=0.00097; Accession=PF00867.10; Description=XPG I-region
EDSDLIPFGCSRIIFKMDKFGQGVEFQITRLQRNRELDFNGFTRQMLLEMCILSGCDYLPSLPGMGVKRAHALIQKLKCHEKVIKHLRYSVVSVPPQYEENFKKAIWAFKFQRVYDPATEDIIHLSSVPHDLTEDLEFLGPWLPQDIAKGIALGNID

SEQ ID NO: 88933 - protein, 158 aa, Setaria italica
  Transcript Sequence Number=SeqID_22959
  Gene Ontology: Mol. function=aspartic-type endopeptidase activity; Cellular component=chromatin; Biological process=RNA-dependent DNA replication
  Homolog annotation: Hit_ID=Q8SA93; Match level="QueryCoverage=96%, HitCoverage=5%, E-value=9e-40, Identity=48%"; Hit description =Putative polyprotein
DIQGSLCLEGLVQYLQIWDLLEYFTLVQDTDKHIWRHERNGVFSSKSTYRAFFNGAITFEPWRRLWKSWAPPKCKMFLWLAIWNKCWTADRLARRGLPHPDQCVLCDQEEEMVWHILTNCVFAHQWWYNLLALLGLESIVPRRNEKSFADWWRKSYKK

SEQ ID NO: 88934 - protein, 101 aa, Setaria italica
  misc_feature (40)..(40): Xaa can be any naturally occurring amino acid
  Transcript Sequence Number=SeqID_22960
  Gene Ontology: Mol. function=aspartic-type endopeptidase activity; Cellular component=chromatin; Biological process=chromatin assembly or disassembly
  Homolog annotation: Hit_ID=Q688L2; Match level="QueryCoverage=99%, HitCoverage=5%, E-value=2e-32, Identity=66%"; Hit description =Putative polyprotein
SLWHQCLGHPGHKALSKLASMLPICNKDTSPSLCLACQLXRHVRLPFHASTSRVVHNFDLIHCDLWTSQVVSISEFKYYLVILDDCSHHLWTFPLRLKSNT

SEQ ID NO: 88935 - protein, 210 aa, Setaria italica
  Transcript Sequence Number=SeqID_22961
  Gene Ontology: Mol. function=inositol or phosphatidylinositol phosphatase activity
  Homolog annotation: Hit_ID=B9S378; Match level="QueryCoverage=99%, HitCoverage=47%, E-value=1e-85, Identity=72%"; Hit description=Type I inositol polyphosphate 5-phosphatase, putative
  Pfam annotation: Domain name=Exo_endo_phos; Domain location=1-180; Score=24.9; E_value=5.2e-05; Accession=PF03372.15; Description =EndonucleaseExonucleasephosphatase family
SVSMSLHQTSLCFVCSHLASGEKEGDELRRNSDVVEILKNTQFRRLCKRSGRRIPERILDHDRVIWLGDLNYRIGLSYSEAKKLVEANDWGALFEKDQLKTEREGGVFRGWNEGKIFFAPTYKYSWNSDNYAGEDVTSKKKRRTPAWCDRILWYGEGIVQLSYVRGESKFSDHRPVCSVFIVEVAVPNNKLIKFASGPNMKVGVEELLFA

SEQ ID NO: 88936 - protein, 119 aa, Setaria italica
  Transcript Sequence Number=SeqID_22962
  Gene Ontology: Mol. function=hydrolase activity, hydrolyzing O -glycosyl compounds; Cellular component=extracellular region; Biological process=cell wall organization and biogenesis
  Homolog annotation: Hit_ID=B6U0J0; Match level="QueryCoverage=88%, HitCoverage=19%, E-value=6e-49, Identity=86%"; Hit description =Endoglucanase 1
GVSYLVGYGPKYPNRVHHRAASIVPYKHSKEFIGCTQGFDHWFGRRSSNPNVLVGAIVGGPDRRDRFRDNRENYMQTEACTYNTAPMVGMFAKLHRMARQEPERGPTPAAPVTSAASEV

SEQ ID NO: 88937 - protein, 126 aa, Setaria italica
  Transcript Sequence Number=SeqID_22963
  Gene Ontology: Mol. function=metal ion binding; Cellular component =cytoplasm; Biological process=ubiquitin-dependent protein catabolic process
  Homolog annotation: Hit_ID=B6TQ30; Match level="QueryCoverage=100%, HitCoverage=42%, E-value=2e-40, Identity=67%"; Hit description=Zinc finger, C3HC4 type family protein
  Pfam annotation: Domain name=zf-C3HC4; Domain location=54-94; Score =33.6; E_value=7.8e-07; Accession=PF00097.17; Description=Zinc finger, C3HC4 type (RING finger)
  Pfam annotation: Domain name=zf-RING-like; Domain location=54-94; Score=4.2; E_value=0.052; Accession=PF08746.3; Description=RING-like domain
  Pfam module annotation: Pfam domain module=zf-C3HC4::zf-RING-like; Domain location=54-94::54-94
GWELLPVPLDEDEFEVLPGHLADAAVGGAPPAARAAVERLQVVAVRGEEAAQGCAVCKDGIAQGELATRLPCAHFYHGACIGPWLAIRNSCPVCRYELPTDDPEYERRRARRRSISTAQLGGLMQM

SEQ ID NO: 88938 - protein, 475 aa, Setaria italica
  Transcript Sequence Number=SeqID_22964
  Gene Ontology: Mol. function=heat shock protein binding; Biological process=protein folding
  Homolog annotation: Hit_ID=UPI0000196CE9; Match level="QueryCoverage =99%, HitCoverage=40%, E-value=1e-124, Identity=48%"; Hit description= DNAJ heat shock N-terminal domain-containing protein
  Pfam annotation: Domain name=DnaJ; Domain location=395-475; Score =59.9; E_value=9.4e-15; Accession=PF00226.23; Description=DnaJ domain
  Pfam annotation: Domain name=TPR_1; Domain location=139-172; Score =12.3; E_value=0.2; Accession=PF00515.20; Description=Tetratricopeptid e repeat
  Pfam annotation: Domain name=TPR_1; Domain location=15-48; Score =21.6; E_value=0.0032; Accession=PF00515.20; Description =Tetratricopeptide repeat
  Pfam annotation: Domain name=TPR_1; Domain location=250-283; Score =8.7; E_value=0.53; Accession=PF00515.20; Description=Tetratricopeptid e repeat
  Pfam annotation: Domain name=TPR_1; Domain location=288-321; Score =29.3; E_value=1.5e-05; Accession=PF00515.20; Description =Tetratricopeptide repeat
  Pfam annotation: Domain name=TPR_1; Domain location=322-355; Score =9.7; E_value=0.4; Accession=PF00515.20; Description=Tetratricopeptide repeat
  Pfam annotation: Domain name=TPR_1; Domain location=49-82; Score=9.6; E_value=0.42; Accession=PF00515.20; Description=Tetratricopeptide repeat
  Pfam annotation: Domain name=TPR_2; Domain location=139-172; Score =8.8; E_value=2.7; Accession=PF07719.9; Description=Tetratricopeptide repeat
  Pfam annotation: Domain name=TPR_2; Domain location=15-48; Score =14.3; E_value=0.51; Accession=PF07719.9; Description=Tetratricopeptid e repeat
  Pfam annotation: Domain name=TPR_2; Domain location=250-283; Score =14.8; E_value=0.36; Accession=PF07719.9; Description=Tetratricopeptid e repeat
  Pfam annotation: Domain name=TPR_2; Domain location=288-321; Score =17.1; E_value=0.074; Accession=PF07719.9; Description=Tetratricopepti de repeat
  Pfam annotation: Domain name=TPR_2; Domain location=322-355; Score =13.5; E_value=0.71; Accession=PF07719.9; Description=Tetratricopeptid e repeat
  Pfam annotation: Domain name=TPR_2; Domain location=49-82; Score =15.3; E_value=0.26; Accession=PF07719.9; Description=Tetratricopeptid e repeat
  Pfam module annotation: Pfam domain module=DnaJ::TPR_1::TPR_1::TPR _1::TPR_1::TPR_1::TPR_1::TPR_2::TPR_2::TPR_2::TPR_2::TPR_2::TPR_2; Domain location=395-475::139-172::15-48::250-283::288-321::322 -355::49-82::139-172::...
  Pfam module annotation: Domain location=15-48::250-283::288-321::322 -355::49-82
IDSFSPNEASRKALMLCYSNRAATRMSLGKMREALSDCREAIVIDSSFLKAQVRAANCLLALGDVEEAQKAFEMCLKSSHLSSLDHKILEEASDGLQKAQKISGFIHQSKEYLMKKAFDKIPSALQMISDALSISIYSDNLMAMKAEALLLLQRYEEVIQFCEETLYVAENNSLCLCPEKHSESNSLDNNTCFVKLWRYHLIAKSYFFLGKLEEAHLFLKKYDQIKVMECRCGKQSQESISSFSMAISELLQLKAAGNEAFQSGKYLEAVEHYTAALLSNSESLRFLAVCFCNRAAAYQAMGQILDAIADCSLAIALDADYAKAISRRSSLYELIRDYEQAENDLRRLITLLEKQLQENMSMPSEKVESIRSNLNRANLRFSSLERDARKGAPLNVYMILGIEPSSSTVDIKKAYRKAALRHHPDKAGKFLVRSENISDAIWREITNEIRRDADYLFKIIGKAYSMLSDPTMRRE

SEQ ID NO: 88939 - protein, 109 aa, Setaria italica
  misc_feature (10)..(10): Xaa can be any naturally occurring amino acid
  Transcript Sequence Number=SeqID_22965
VYFIGTFACXFLAFLFVHATRCNRNHETLHLMITHFIGWDICISNTRAHQFIIGCQTLGPFSHFKSCRKVGDLVLLCGSRIECFIDSMSSNINPIFVAKSNATSSRTKA

SEQ ID NO: 88940 - protein, 155 aa, Setaria italica
  Transcript Sequence Number=SeqID_22966
  Gene Ontology: Mol. function=methyltransferase activity; Cellular component=intracellular; Biological process=metabolic process
  Homolog annotation: Hit_ID=A3BMN9; Match level="QueryCoverage=85%, HitCoverage=21%, E-value=5e-53, Identity=72%"; Hit description =Probable protein arginine N-methyltransferase 3
TTDGDDAGGGLLCLFCSSRFDADSSLFAHCSAEHRFDFHRIVKELRLDFYGCIRLINFVRSKVAENKCWSCGQAFSSNTELCSHLHALENYLIEGKVPWEDDVYLKPFMEDDSLLHSLFMDDDEEDEECGTSMERGQCSAGDRVLAEPLGNKLST

SEQ ID NO: 88941 - protein, 89 aa, Setaria italica
  Transcript Sequence Number=SeqID_22967
  Gene Ontology: Mol. function=binding
  Homolog annotation: Hit_ID=B6SU39; Match level="QueryCoverage=84%, HitCoverage=19%, E-value=8e-19, Identity=70%"; Hit description =Ubiquitin-protein ligase
  Pfam annotation: Domain name=Arm; Domain location=3-43; Score=10.1; E_ value=0.64; Accession=PF00514.15; Description=Armadillobeta-catenin -like repeat
  Pfam annotation: Domain name=Arm; Domain location=45-85; Score=33.5; E_value=8.6e-07; Accession=PF00514.15; Description=Armadillobeta -catenin-like repeat
  Pfam module annotation: Pfam domain module=Arm::Arm; Domain location =3-43::45-85
RASARHRRKLAAAVEPLVAMLRAGAAPTEAGEAALLALLNLAVRDERNKTKIVDAGALEPLLGYLQSSDLNLQEYATAAVLTLSASSTN

SEQ ID NO: 88942 - protein, 262 aa, Setaria italica
  misc_feature (20)..(20): Xaa can be any naturally occurring amino acid
  Transcript Sequence Number=SeqID_22968
  Gene Ontology: Mol. function=binding; Cellular component=ubiquitin ligase complex; Biological process=ubiquitin-dependent protein catabolic process
  Homolog annotation: Hit_ID=B6SU39; Match level="QueryCoverage=96%, HitCoverage=69%, E-value=1e-118, Identity=84%"; Hit description =Ubiquitin-protein ligase
  Pfam annotation: Domain name=Arm; Domain location=137-178; Score=9.6; E_value=0.74; Accession=PF00514.15; Description=Armadillobeta-catenin- like repeat
  Pfam annotation: Domain name=Arm; Domain location=14-52; Score=13.9; E_value=0.21; Accession=PF00514.15; Description=Armadillobeta -catenin-like repeat
  Pfam annotation: Domain name=Arm; Domain location=53-93; Score=30.3; E_value=7.7e-06; Accession=PF00514.15; Description=Armadillobeta -catenin-like repeat
  Pfam annotation: Domain name=Arm; Domain location=96-136; Score=12.9; E_value=0.28; Accession=PF00514.15; Description=Armadillobeta-catenin- like repeat
  Pfam annotation: Domain name=DUF634; Domain location=17-194; Score= -132.7; E_value=0.094; Accession=PF04826.5; Description=Protein of unknown function (DUF634)
  Pfam module annotation: Pfam domain module=Arm::Arm::Arm::Arm::DUF634; Domain location=137-178::14-52::53-93::96-136::17-194
ALLALLNLAVRDERNGNSYXVTGALEPLLGYLQSSDLNLQEYATAAVLTLSASSTNKPIISSSGAIPLLVKVLKEGNPQAKNDAVMALYNLSTITDNLQAILAVQPIPPLIELLKGGKRSSKTADKCCALLESLLAFDQCRVALTSEEGGVLTIVEVLEEGSLQGREHAVGALLTMCESDRSKYRDLILNEGAIPGLLELTVHGTPKSRMKAHVLLDLLRNSPYSRSKLQPDTLENIVTNIASQIDGEDRGGKAKKMLAEMV

SEQ ID NO: 88943 - protein, 94 aa, Setaria italica
  misc_feature (35)..(35): Xaa can be any naturally occurring amino acid
  Transcript Sequence Number=SeqID_22969
SASIHRPWEGKGREEQRASQASAPPPPRPPPPPPXGPPPPHPPIQSPIADPRIASPRGNIWNPCHRSPHAVPLTDPAPGPPPPPPPFAQSPPPF

SEQ ID NO: 88944 - protein, 163 aa, Setaria italica
  Transcript Sequence Number=SeqID_22970
  Gene Ontology: Mol. function=helicase activity; Cellular component =chloroplast
  Homolog annotation: Hit_ID=Q9AY61; Match level="QueryCoverage=95%, HitCoverage=25%, E-value=2e-69, Identity=78%"; Hit description =Pentatricopeptide, putative, expressed
  Pfam annotation: Domain name=PPR; Domain location=10-44; Score=23.4; E_value=0.00092; Accession=PF01535.12; Description=PPR repeat
  Pfam annotation: Domain name=PPR; Domain location=115-149; Score =14.4; E_value=0.18; Accession=PF01535.12; Description=PPR repeat
  Pfam annotation: Domain name=PPR; Domain location=45-79; Score=35.6; E_value=1.9e-07; Accession=PF01535.12; Description=PPR repeat
  Pfam annotation: Domain name=PPR; Domain location=80-114; Score=31.6; E_value=3.3e-06; Accession=PF01535.12; Description=PPR repeat
  Pfam module annotation: Pfam domain module=PPR::PPR::PPR::PPR; Domain location=10-44::115-149::45-79::80-114
EERVNCKNARDYHLVVSFLGKAGKVREAYDVLKEVKRKRLDPDVLSYNALMEALCRNDLLRPAKKLWDEMFTSGCSPNLHTYNILITKFTEMGESEEVQQLFDHMFQKGVAPDGATYTSFITMLCQKNKYEQALEIFRRSLMQDAEVASSVLSMFIPALCKLR

SEQ ID NO: 88945 - protein, 712 aa, Setaria italica
  Transcript Sequence Number=SeqID_22971
  Gene Ontology: Mol. function=microtubule-severing ATPase activity; Cellular component=microtubule; Biological process=cell division
  Homolog annotation: Hit_ID=Q5ZCG1; Match level="QueryCoverage=100%, HitCoverage=95%, E-value=0.0, Identity=62%"; Hit description=Katanin p80 (WD40-containing) subunit B 1-like protein
  Pfam annotation: Domain name=WD40; Domain location=13-51; Score=46.1; E_value=1.4e-10; Accession=PF00400.24; Description=WD domain, G-beta repeat
  Pfam annotation: Domain name=WD40; Domain location=55-93; Score=49.7; E_value=1.1e-11; Accession=PF00400.24; Description=WD domain, G-beta repeat
  Pfam annotation: Domain name=WD40; Domain location=97-134; Score=9.3; E_value=3.2; Accession=PF00400.24; Description=WD domain, G-beta repeat
  Pfam module annotation: Pfam domain module=WD40::WD40::WD40; Domain location=13-51::55-93::97-134
SDTDLKIWDIKKKGCIHTYKGHRGAIKKIRFTPDGRWVVTGGEDSIVKVWDLTAGKLLHDFKFHSGQINCIDFHPQEFLLATGSADRTVKFWDLETFELIGSAGPEGTGVRSMVFHPDGKTLFCGLDQSLKVFSWEPVRCHDVVDMGWSNLADLSIYEGKLLGCSYHERRVGLWAADISLIGPYALGVLPKANFFAELVQSMDDNPVKPIDSTANSSPALAMTQPKNSYKVKEAGSAESRVRGSHLTPASTDKIKKDRSSIPRRPDSSFRSSIQSSNPMRRMKLADSPFTNPKTSDRNFGQKDISLASRTRIPNNSSTTKKGNLTESASVKDIYTTPQAVSAPVVVPRDILEDKAVSSVRRGTGGTTAAPDAVRVPVHRRKPSLSGTAADSDSSVGSTITDPDVCSEGLSSLKFSFGLSPYYKKEENSEVDREDIAHIAKEMDRTVLLEHPLQSNDDKSFESPCSTTETARVKYVRGVAVPLGKTKSLVERWEKRESSSNDYSPQTDSCGDRALKNDSPPAHSAEPSETYEKDLSTVDEVMTPVNLVLNHDEFINAVKLRLTKLEMMRHVFEQSGIKGAIAAVGKLPDNAVQADVVSALKGKLDLFNLEIFSSFLPILAGLLCSKTERHATVSLEMLLDLIKIFGPVIHSTLSANSGVGVDLQAEQRLQRCTRCFNHLQKIQQVLHPLIMRGGQSAQLAQELSLSLQDLVVI

SEQ ID NO: 88946 - protein, 158 aa, Setaria italica
  misc_feature (150)..(150): Xaa can be any naturally occurring amino acid
  Transcript Sequence Number=SeqID_22972
  Gene Ontology: Mol. function=nucleoside-triphosphatase activity; Biological process=proteolysis
  Homolog annotation: Hit_ID=Q8H6B2; Match level="QueryCoverage=94%, HitCoverage=12%, E-value=1e-78, Identity=92%"; Hit description =Bromodomain protein 103
  Pfam annotation: Domain name=Bromodomain; Domain location=81-157; Score=53.4; E_value=8.9e-13; Accession=PF00439.17; Description =Bromodomain
YLFDRYQVDQPSYDDRLRYFNILFESLLSFQTEESRNKSKKQKSAIDLPKAPKEVEGPKISELKAKAEAEQHAVRRMRMCLRDICNRILYNKRFNVFHFPVSEEEVPDYRSVIHKPMDMATVLQRVDSGQYLTRAAFMKDIDLIVLNAKXYNGDTTMD

SEQ ID NO: 88947 - protein, 818 aa, Setaria italica
  Transcript Sequence Number=SeqID_22973
  Gene Ontology: Mol. function=nucleoside-triphosphatase activity
  Homolog annotation: Hit_ID=Q8H6B2; Match level="QueryCoverage=99%, HitCoverage=67%, E-value=0.0, Identity=87%"; Hit description =Bromodomain protein 103
  Pfam annotation: Domain name=AAA; Domain location=20-210; Score =263.4; E_value=5.3e-76; Accession=PF00004.21; Description=ATPase family associated with various cellular activities (AAA)
  Pfam annotation: Domain name=AAA_2; Domain location=16-150; Score= -49.4; E_value=0.072; Accession=PF07724.6; Description=ATPase family associated with various
  Pfam annotation: Domain name=AAA_5; Domain location=20-156; Score =9.8; E_value=0.00015; Accession=PF07728.6; Description=ATPase family associated with various
  Pfam annotation: Domain name=Bromodomain; Domain location=507-593; Score=70.8; E_value=5.1e-18; Accession=PF00439.17; Description =Bromodomain
  Pfam module annotation: Pfam domain module=AAA::AAA_2::AAA _5::Bromodomain; Domain location=20-210::16-150::20-156::507-593
LSFVCILDFLSNYHITPPRGVLLCGRPGTGKTLIARALACAASKAGQKVSFYMRKGADVLSKWVGEAERQLKLLFEEAQKNQPSIIFFDEIDGLAPVRSSKQEQIHNSIVSTLLALMDGLDSRGQVVLIGATNRIDAIDGALRRPGRFDREFYFPLPGYEARAEILDIHTRKWKDPPPKELKMELAASCVGYCGADLKALCTEAAIRAFREKYPQVYTSDDKFVIDVDSVSVEKYHFLEAMSTITPAAHRGSIVHSRPLSSVIAPCLKRHLDKIMERISDIFPFLSSVDVSKFSALSYGSSIPLVYRPRLLICGGESVGLDHVGPAVLHELEKFSVHSLGLPSLLSDPSAKTPEEALVHIFGEAKRTTPSILYLPQFHLWWDTAHEQLRAVLLTLLNELPSNLPVLLLGTSSVAFTDLEEECASIFTSRNVYQVDQPSYDDRLRYFNILFESLLSFQTEESRNKSKKQKSAIDLPKAPKEVEGPKISELKAKAEAEQHAVRRMRMCLRDICNRILYNKRFNVFHFPVSEEEVPDYRSVIHKPMDMATVLQRVDSGQYLTRAAFMKDIDLIVLNAKTYNGDDYNGSRIVSRACELRDVVQGMLSQMDPSLVSFCDKIASQGGPLQVVDDEDSSILQAAPVAQLVSGTRISARLRNVQPEVNLSQSYEVLKRQKKSSENDQGMTKDAAARDERSPEDVDLSKPISPEEAPKEPDSNGTLKETDNSPAEAPEVPAPPEPMETDSSEVATTLTTGDDLLGQLEALKQRFMELTAGYGVPQLERLYSRIMKGAIELTSKESNEDHRGLVVRYLLTFVENSDNF

SEQ ID NO: 88948 - protein, 39 aa, Setaria italica
  Transcript Sequence Number=SeqID_22974
AGSCCLDCMNLHHPTQANQTHPVKTGQLKVSFVNHTKQP

SEQ ID NO: 88949 - protein, 153 aa, Setaria italica
  Transcript Sequence Number=SeqID_22975
  Homolog annotation: Hit_ID=B9RHU2; Match level="QueryCoverage=47%, HitCoverage=3%, E-value=2e-10, Identity=47%"; Hit description =Splicing endonuclease positive effector sen1, putative
WEKDLILVLVDNNDDVRQVGRAILEHVSQARGLTSGLQFLCSSASSLSAVFLGLRYAVQLVGTRSVLADFHTFHHLFFVMCKLLKEVVAQKPPVAQPGKPSEGGFLRQPYSSVLGSPPEHVVDVTNWEKFCTLLSATLWPFISTCLREGKELI

SEQ ID NO: 88950 - protein, 297 aa, Setaria italica
  Transcript Sequence Number=SeqID_22976
  Gene Ontology: Mol. function=protein binding; Biological process =ubiquitin-dependent protein catabolic process
  Homolog annotation: Hit_ID=B6TG60; Match level="QueryCoverage=92%, HitCoverage=92%, E-value=1e-128, Identity=80%"; Hit description =ATPP2-A13
  Pfam annotation: Domain name=F-box; Domain location=17-64; Score =35.7; E_value=1.8e-07; Accession=PF00646.25; Description=F-box domain
MGGVASSARGGRGGDGTVLGDLPESCVAEVLLRLDPPEICRMARLSRTFRGAASGDGVWESKLPRNYARLLAAAAAGVGGERQAAAATALEAETLPKKDVYARLCRRNRFDGGKKEFWLDKGGGGVCMSISSMALSITGIEDRRYWNFIPNDESRFHTVAYLSQIWWFEVRGEVEFCFPEGTYSLFYRVHLGRPFKRLGRRVYSSEHIHGWDIKPVRFQMSTSDGQQAQSKCYFTDPGVWINHHVGDFVVKDSNKPTNIRFAMIQIDCTHTKGGLCVDSVVVKPQYLTQQKAPRRFV

SEQ ID NO: 88951 - protein, 169 aa, Setaria italica
  misc_feature (83)..(83): Xaa can be any naturally occurring amino acid
  Transcript Sequence Number=SeqID_22977
  Gene Ontology: Mol. function=DNA binding; Cellular component=nucleus; Biological process=regulation of transcription
  Homolog annotation: Hit_ID=B9S8Y5; Match level="QueryCoverage=75%, HitCoverage=24%, E-value=5e-48, Identity=69%"; Hit description=R2r3 -myb transcription factor, putative
  Pfam annotation: Domain name=Myb_DNA-binding; Domain location=36-82; Score=54.9; E_value=3.1e-13; Accession=PF00249.23; Description=Myb -like DNA-binding domain
  Pfam annotation: Domain name=Myb_DNA-binding; Domain location=88-133; Score=51.2; E_value=4e-12; Accession=PF00249.23; Description=Myb-like DNA-binding domain
  Pfam module annotation: Pfam domain module=Myb_DNA-binding::Myb_DNA -binding; Domain location=36-82::88-133
KKEQRTVRLRRKVYHGHVEDPEEISCGRGQGKLCARGHWRPAEDAKLKELVAQHGPQNWNLIAEKLDGRSRKSCRLRWFNQLXPRINRRAFSEEEEERLLAAHRAYGNKWALIARLFPGRTDNAVKNHWHVLAARRQREQSGTLRRRKLSSSPAQPHVVAPAAAAVHSP

SEQ ID NO: 88952 - protein, 57 aa, Setaria italica
  Transcript Sequence Number=SeqID_22978
VLNVPRTIIWNKDTYVLLSMCIILHLTQWHVPCNLIVHDVLIINAIPSLFPELARKS

SEQ ID NO: 88953 - protein, 341 aa, Setaria italica
  Transcript Sequence Number=SeqID_22979
DSSVLDFLPLVYFGSLFDVKQQGDFVATMVARTHERNCCITYDYVTDDAADLLAETDLDAVSALASLAASRPASAAGVSHRDALQACAHHARLWLRRADEPIHPDSTVTYAGVREKLEKIMSLDYYTAQPDIRAAEAVAAAVGNYGAGGVQAQESMVVSPQASEEAEESLAVEGHKGEKEEPQATEIYIDHQAPAVDAQHVDDDALVNPTDEAPSAEAEQERFDADVEDQEQKDQQFIQRRSYQNQRGGGRGGRRGYPNGRGGRGGRGGGYQNGRGGGGGYQNGGGGGGYYYEQGYYPPRNYSNNNRGRGGRAGGGNSYYNNHGGSGQGGGHGRVELGANA

SEQ ID NO: 88954 - protein, 620 aa, Setaria italica
  Transcript Sequence Number=SeqID_22980
  Homolog annotation: Hit_ID=B4FW69; Match level="QueryCoverage=100%, HitCoverage=100%, E-value=0.0, Identity=89%"; Hit description =Methyltransferase
  Pfam annotation: Domain name=DUF248; Domain location=98-609; Score =1217.6; E_value=0; Accession=PF03141.8; Description=Putative methyltransferase
  Pfam annotation: Domain name=Methyltransf_11; Domain location=215 -310; Score=20.7; E_value=0.0011; Accession=PF08241.4; Description =Methyltransferase domain
  Pfam module annotation: Pfam domain module=DUF248::Methyltransf_11; Domain location=98-609::215-310
MAKEQDGSSKLRHPEFQRMRVTLTIGVIGLCVTSYILGAWQGTSNSIKPSFISTKTRCHDLARSSGARLDFQAHHQVVFNESSLVLEKFPSCQLKYSEYTPCQDPRRARKFPKKMMQYRERHCPKKEDLLRCLIPAPQGYKNPFEWPKSRDYAWYNNIPHRELSIEKAVQNWIQVEGDLLRFPGGGTMFPHGADAYIDDINALIPLNDGNIRTALDTGCGVASWGAYLMKRNIITMSFAPRDSHEAQVQFALERGVPSMIGVMGTERIPYPARAFDMAHCSRCLIPWNKLDGVYLIEVDRVLRPGGYWILSGPPIHWKRHFKGWERTEEDLKQEQDEIEDLAKRLCWKKVVEKGDLSIWQKPTNHIECVDSRKVYDTPKICKGNDVDSAWYKKMETCISPLPDVKSEDEVAGGALEQWPKRASAVPPRISRGTVPGLTPEKFQEDSKLWSERVDHYKKLIPPLGKRRYRNVMDMNAGMGGFAAALMKYPLWVMNVVPSGSPRDTLGVIYERGFIGTYQDWCEAFSTYPRTYDLIHADNVFSSYQDRCDITYILLEMDRILRPEGTVIIRDTVEVLGKVQAIAEGMRWKSQIMDHESGPFNPEKILVAVKTYWTGKPAQKQ

SEQ ID NO: 88955 - protein, 275 aa, Setaria italica
  Transcript Sequence Number=SeqID_22981
  Gene Ontology: Mol. function=oxidoreductase activity; Biological process=oxidation reduction
  Homolog annotation: Hit_ID=B9SNS2; Match level="QueryCoverage=98%, HitCoverage=75%, E-value=1e-79, Identity=48%"; Hit description =Flavonol synthase/flavanone 3-hydroxylase, putative
  Pfam annotation: Domain name=2OG-FeII_Oxy; Domain location=125-225; Score=147.7; E_value=3.7e-41; Accession=PF03171.12; Description=2OG -Fe(II) oxygenase superfamily
DSQLVNHGFNGELLQQIKADITEFFNLPLEEKLAVAIPPNGIQGFGHHFVFSKEQKLDWVDLLFLATRPVEERSLAFWPTKPSTFRDTLDRYSLGLANVSAQLFKFMANNLGVNHEALLGTFKGLPQSMRINYYPPCSQADKVLGLSPHTDGVGMTFLLQVNDVEGLQIRKDGKWFPVKAIPGALVVNIGDVLEILTNGKYKSIEHRAVINPVKERITIATFHSVHLGCTIGPLQELLKTDEAHYKVLDSVEFTKGYFAAKLEGRRYLESLKLGI

SEQ ID NO: 88956 - protein, 196 aa, Setaria italica
  misc_feature (84)..(84): Xaa can be any naturally occurring amino acid
  Transcript Sequence Number=SeqID_22982
  Gene Ontology: Mol. function=RNA-directed DNA polymerase activity; Cellular component=chromatin; Biological process=RNA-dependent DNA replication
  Homolog annotation: Hit_ID=Q7XUD8; Match level="QueryCoverage=100%, HitCoverage=14%, E-value=4e-74, Identity=68%"; Hit description =OSJNBa0088A01.7 protein
KDGAETISDFRPISLIHAIAKIITKVLATRLQPYMDKLISPSQSAFIKGRSIHDNFLYVRNMARRFHRNRTPTLLMKLDISKAXFDSVRWDYLLELLQHRGFPARWRNWITALMATSTSKVLLNGIPTDKIVHGRGLRQGDPLSPFLFILAIDPLYQLMQMATGMGLLKTLGGRTPRTSISMYADDAAIFIKPTKD

SEQ ID NO: 88957 - protein, 104 aa, Setaria italica
  Transcript Sequence Number=SeqID_22983
  Gene Ontology: Cellular component=microtubule organizing center; Biological process=microtubule cytoskeleton organization and biogenesis
  Homolog annotation: Hit_ID=B9I9Q8; Match level="QueryCoverage=100%, HitCoverage=13%, E-value=7e-32, Identity=67%"; Hit description =Tubulin gamma complex-associated protein (Fragment)
NRFATESRDLSWIQSSVGVSSPHADKTQKGKVRKGSVYRRAIANGITEILSVYRSAVLQVEQNLLSDPLPILATVTHGLNKFEVLLPPLYELVMEIEQKDIRGG

SEQ ID NO: 88958 - protein, 94 aa, Setaria italica
  Transcript Sequence Number=SeqID_22984
  Gene Ontology: Mol. function=transferase activity, transferring groups other than amino-acyl groups
  Homolog annotation: Hit_ID=B6SXN9; Match level="QueryCoverage=94%, HitCoverage=18%, E-value=3e-23, Identity=61%"; Hit description =Transferase
THCRMAWLVDGRPRLDPARYDAGTVRRYLGNVLTYASREAAVEAVSSATLADVAAMAGAAIAEVFRSERFEELVDWMEARKGVFREGGKLDGRS

SEQ ID NO: 88959 - protein, 379 aa, Setaria italica
  Transcript Sequence Number=SeqID_22985
  Gene Ontology: Mol. function=DNA binding; Cellular component =endoplasmic reticulum; Biological process=ubiquitin-dependent protein catabolic process
  Homolog annotation: Hit_ID=B4FHK5; Match level="QueryCoverage=92%, HitCoverage=83%, E-value=1e-168, Identity=83%"; Hit description=NPL4 family protein
  Pfam annotation: Domain name=NPL4; Domain location=118-376; Score =491.2; E_value=1.4e-144; Accession=PF05021.7; Description=NPL4 family
PVTLQRLSLEPALLLPSPSAVPLLADPAAQLASLRLANGAFVYLAYPPDARSARPPPPKALSSAGSFGKKMTMDDLIARQIRVTRQENALCAAASFDRDAANAFQLYVAESLAFGVKRAGFLYGRVDAETKEVFVDFIYEPPQQGSEDVVHLMRDADEEARVDAIAEGLGMRRVGLVFTQAVGRKASDTGEYTMSNREVVQAAQLQAEGGIPEWITAIVKLEVGDDGTGDVHFEAFQMSEICVKLFKDGVLETEVGDTDDPRLSKMRKEVVAGGKDTMEVDNDFFLVPVKISDHQGPLSVGFPIENRGSPVGMSALRSHLDRTKHLTFVRRISDFHLLLKIATFLDVKADVPTLAACVKTQSRVPEGYQLLIESLASQG

SEQ ID NO: 88960 - protein, 105 aa, Setaria italica
  Transcript Sequence Number=SeqID_22986
  Gene Ontology: Mol. function=protein binding; Cellular component =vacuole
  Homolog annotation: Hit_ID=B6TXW1; Match level="QueryCoverage=62%, HitCoverage=21%, E-value=5e-19, Identity=69%"; Hit description =BES1/BZR1 protein
  Pfam annotation: Domain name=DUF822; Domain location=14-105; Score =189.3; E_value=1e-53; Accession=PF05687.5; Description=Plant protein of unknown function (DUF822)
MPAASMTSGAAAAGGLGRTPTWKERENNKRRERRRRAIAAKIFTGLRALGNYKLPKHCDNNEVLKALCREAGWVVEDDGTTYRKGCKPPPGMMSPCSSSQLLSAP

SEQ ID NO: 88961 - protein, 64 aa, Setaria italica
  misc_feature (15)..(15): Xaa can be any naturally occurring amino acid
  Transcript Sequence Number=SeqID_22987
IHHDVQMVDGTPIDXAIAAAPNGNNQSPGLVKAWEGERIHEECASDEHELELTLGSSKTRADPS

SEQ ID NO: 88962 - protein, 347 aa, Setaria italica
  misc_feature (339)..(339): Xaa can be any naturally occurring amino acid
  Transcript Sequence Number=SeqID_22988
  Gene Ontology: Mol. function=protein binding; Cellular component =nucleus; Biological process=polysaccharide catabolic process
  Homolog annotation: Hit_ID=B6TV83; Match level="QueryCoverage=95%, HitCoverage=95%, E-value=3e-67, Identity=45%"; Hit description =Brassinazole-resistant 1 protein
  Pfam annotation: Domain name=DUF822; Domain location=2-154; Score =328.8; E_value=1.1e-95; Accession=PF05687.5; Description=Plant protein of unknown function (DUF822)
RARGTRVPTWRERENNRRRERRRRAIAAKIFAGLRAYGNYNLPKHCDNNEVLKALCNEAGWTVEPDGTTYRKGCKPTAAERHDPIGRSASPSPCSSYQPSPRASYNPSPASSSFPSSGSSSHITLGGNNFIGGVEGSSLIPWLKNLSSSSSIASSSKFPQLHHLYFNGGSISAPVTPPSSSPTRTPRIKTDWENPSVQPPWAGCGSNYASLPNSQPPSPGHQVAPDPTWLSGFRISSAGPSSPTYSLVAPNPFGIFKETVASTSRMCTPGQSGTCSPVMGGVPIHHDVQMVDGTPDDFAFGSSSNGNNQSPGLVKAWEGERIHEECASDEHELELTLGXSKTRADPS

SEQ ID NO: 88963 - protein, 341 aa, Setaria italica
  Transcript Sequence Number=SeqID_22989
  Gene Ontology: Mol. function=protein binding; Cellular component =vacuole
  Homolog annotation: Hit_ID=B6TV83; Match level="QueryCoverage=95%, HitCoverage=95%, E-value=1e-125, Identity=74%"; Hit description =Brassinazole-resistant 1 protein
  Pfam annotation: Domain name=DUF822; Domain location=11-160; Score =318.6; E_value=1.2e-92; Accession=PF05687.5; Description=Plant protein of unknown function (DUF822)
  Pfam annotation: Domain name=Drf_FH1; Domain location=84-256; Score= -12.8; E_value=0.099; Accession=PF06346.4; Description=Formin Homology Region 1
  Pfam module annotation: Pfam domain module=DUF822::Drf_FH1; Domain location=11-160::84-256
MTSGAGGGGGLGGTRVPTWRERENNKRRERRRRAIAAKIFAGLRAHGGYKLPKHCDNNEVLKALCNEAGWVVEPDGTTYRKGSKPQERMDAIGCSVSPSPCSSYQLSPRASYNASPTSSSFPSGASSPFLPPNEMANGIDGNPILPWLKTLSNGTPSKKHPLLPPLLIHGGSISAPVTPPLSSPSARTPRMKTDWDESAVQPPWHGANSPSIVNSTPPSPGRSMAPDPAWLASIQISSTSPNSPTFSLVSTNPFSVFKESISVGGNSSRMCTPGQSGTCSPAIPGMPRPSDVHMMDAVSDEFAFGSSTNGAQQAAGLVRAWEGERIHEDSGSDDLELTLKL

SEQ ID NO: 88964 - protein, 66 aa, Setaria italica
  Transcript Sequence Number=SeqID_22990
ADAVQHRHLGGRRGSPAGSPATAAAAQPRDASDCRLLEVQWLGLKAHVGSDLKFVLLSPAIFLWAH

SEQ ID NO: 88965 - protein, 81 aa, Setaria italica
  misc_feature (14)..(14): Xaa can be any naturally occurring amino acid
  Transcript Sequence Number=SeqID_22991
  Gene Ontology: Mol. function=protein serine/threonine kinase activity; Biological process=protein amino acid phosphorylation
  Homolog annotation: Hit_ID=B6TFF8; Match level="QueryCoverage=92%, HitCoverage=21%, E-value=2e-27, Identity=82%"; Hit description =Protein kinase APK1A
PARRRGGPTLTEGXVADVVDRRLGDEYDTHEAATVAALALRCVSDGHGLRPSMAEVVRELQEKTTALIAAAGSKPAGKMAA

SEQ ID NO: 88966 - protein, 258 aa, Setaria italica
  Transcript Sequence Number=SeqID_22992
  Homolog annotation: Hit_ID=A5YBP9; Match level="QueryCoverage=49%, HitCoverage=23%, E-value=2e-16, Identity=42%"; Hit description=ALMT3
PAHVKKHLAGACVALGRHCAAVLREASGSIASMTRSGRLALVVGDMNRAAEELRDELRCLAALLEEDDSSNADAEHEQSTDAPEPAPPLIEVLPLFTTASLLLEICTRAEGVVSAVDNLATTARFKKAGHDEGNTLDVEAAVPAAMSTTLTAEVPQETHAKVAVDNEKAETAIDLSSDQTPRDKVGELIKALTRRRSTKKWARGDTKVSPKPPLDFAVHAPSPRSSRSMELTGHAQVVPSPRHHHHRSAELAGHPLVA

SEQ ID NO: 88967 - protein, 104 aa, Setaria italica
  Transcript Sequence Number=SeqID_22993
  Gene Ontology: Mol. function=hydrolase activity; Biological process =lipid catabolic process
  Homolog annotation: Hit_ID=Q29VI1; Match level="QueryCoverage=65%, HitCoverage=16%, E-value=3e-23, Identity=71%"; Hit description =Patatin-like protein
MAPVYAAEAGTNGSGGLILDPAAQRSALSRGASALSTPKSPPPAYGSIVTVLSIDGGGVRGIIPGTILAFLEEKLQELDGPDARIADYFDVIAGTSTGGLVTAM

SEQ ID NO: 88968 - protein, 232 aa, Setaria italica
  Transcript Sequence Number=SeqID_22994
  Gene Ontology: Mol. function=nucleotide binding; Cellular component =chromatin; Biological process=defense response
  Homolog annotation: Hit_ID=Q8LH94; Match level="QueryCoverage=93%, HitCoverage=22%, E-value=3e-18, Identity=35%"; Hit description =Putative NBS-LRR disease resistance protein homologue
PECLHTLRSFDPSKQSVANTWALGELLNLRVLDLLIAGGSFANKGAHMDALMSSLEKLISCNLKTLSIIARDNVGRHGRWSSLCFSCSHLEQLHLLYFKIQRMPAWVCQLRALSSLKIKVGELCEDDVAVLAGLPVLARLVLDAEVVPAEGVVFSGGTAFRVLGYLRAPYVAEAGVTFQAGSTPQVEVLRLLVRASDVQRRGVKLAGIEHLTNLKQVLVNLRNGDCDESEVP

SEQ ID NO: 88969 - protein, 258 aa, Setaria italica
  Transcript Sequence Number=SeqID_22995
MQNPSSNSDSTFELESALPILVHDPGTQQVDSQTLYSISKQSLFAHAIDGVKDYRCFETPQGWVLALDRASLQTFLWRPQDSERIQLPAVEEDFPSRCKCLLSDVPTASSCAVLVLDLDDTQMWVCQIGASKWDSCSYTLTMFDARDNPRERHIARRHGVAAVNGKVYFQLTGYELGIIEFNPDPSLATIEVDMVDLPLSMPMCSTYLVGSYGELFLVVIFFDGDNVHKIAEFAVYKMDFSVPAWCKVDRIGDDRVFL

SEQ ID NO: 88970 - protein, 36 aa, Setaria italica
  Transcript Sequence Number=SeqID_22996
YTTTTLMFLDPSLRIFNFLTSCSYSLMDFNRIEIQQ

SEQ ID NO: 88971 - protein, 52 aa, Setaria italica
  Transcript Sequence Number=SeqID_22997
  Homolog annotation: Hit_ID=B9RJE4; Match level="QueryCoverage=98%, HitCoverage=2%, E-value=2e-18, Identity=80%"; Hit description=ATP binding protein, putative
MSRVPKWKIEKTKVKVVFRLQFHATNIPSTGWDKLFLSFISADTGKVTAKTN

SEQ ID NO: 88972 - protein, 183 aa, Setaria italica
  misc_feature (174)..(174): Xaa can be any naturally occurring amino acid
  Transcript Sequence Number=SeqID_22998
  Gene Ontology: Mol. function=binding; Cellular component=plasma membrane
  Homolog annotation: Hit_ID=B6TE00; Match level="QueryCoverage=87%, HitCoverage=29%, E-value=5e-64, Identity=78%"; Hit description =Nodulin-like protein
  Pfam annotation: Domain name=Nodulin-like; Domain location=28-183; Score=30.0; E_value=2.6e-12; Accession=PF06813.5; Description =Nodulin-like
QKKRGDRTNHPIRQVRPPAMATPRARTRWSALAASALIQCCAGSSYCFGVYSPALKASQRYDQSALDAVAFFKDIGANAGVLSGFLAAWAPAGRRRPWLVLLAGALLCAAGYIPMWLAVAGIAHAPLPLMCAYMLLAAQAQTFFNTADVVCAVENFPDRRGTVIGIMKGFLGLXGAILVQIYR

SEQ ID NO: 88973 - protein, 56 aa, Setaria italica
  Transcript Sequence Number=SeqID_22999
YALQNSRPHKFICTGALLHLHSLPTDYFHLISGCSTPSLTMFRHKPCYTMVLESTP

SEQ ID NO: 88974 - protein, 93 aa, Setaria italica
  misc_feature (28)..(28): Xaa can be any naturally occurring amino acid
  misc_feature (63)..(63): Xaa can be any naturally occurring amino acid
  Transcript Sequence Number=SeqID_23000
HCDSCEHLMHPMPEARGTEQYLELNDLXPFSLADGPDSCGMLSSHDISIEHPFDLEPRSEQDXLDCISNTGNTSTSTTGGSFPSVPAVDERRT

SEQ ID NO: 88975 - protein, 151 aa, Setaria italica
  Transcript Sequence Number=SeqID_23001
VVIIRCSSTNLLCTAAEDGLLPDSTAGYGNEDGVSLDDTETIFCGVDEVASQPVVNNSNHCDSCEHLMHPMPEARGTEQYLELNDLSFSLADGPDSCGMLSSHDISIEHPFDLEPRSEQDSLDCISNTGNTSTSTTGGSFPSVPAVDERRT

SEQ ID NO: 88976 - protein, 478 aa, Setaria italica
  Transcript Sequence Number=SeqID_23002
  Gene Ontology: Mol. function=nucleic acid binding; Cellular component= intracellular; Biological process=transport
  Homolog annotation: Hit_ID=B4FXN6; Match level="QueryCoverage=100%, HitCoverage=100%, E-value=0.0, Identity=77%"; Hit description =UPF0737 protein 7
  Pfam annotation: Domain name=DUF1675; Domain location=351-452; Score=- 83.3; E_value=0.056; Accession=PF07897.3; Description=Protein of unknown function (DUF1675)
MDEENGLELSLGLSLGGSSGKAKARDAPLEPKAEPQVEESSSKGGSQTPDAPFGKYYQTNPENQEHNSKQRHSPVAPQFGNFWGQPGSSSAPVVDGSAEPVSHQPQLPRYQDGRMPNNNGNNSEEQKPVSSNCNLLSEEMSFQKKHQTAGDQPDAFSKSSDGGAKNAPISISTDDGSTGENEDVAESEAEGSNSWLVAQREDSAKGSVVNKASDRKRSADDAAVGFQGKRQPSFSGSESSSGKLPPGNPLSMQASNVVAVPYQVQAQVSGPPTITNAPNFHPVCPVQLRPPTNGGLAVQTMNSASQVAFGYPAVQLPTLETSCSWAFGAPPQALSSFTVKDKAEQTGSKQADDGKRPQEAGASSSAHVEDEKKAERVLPLMGSAIRPGIAPNVKFGGSGSYPDLPWVSTTGTGPNGRTISGVTYKFGRNEVKIVCACHGTHMSPEEFMRHANADAPAQENSETLPAFPVGNQAASAEN

SEQ ID NO: 88977 - protein, 293 aa, Setaria italica
  Transcript Sequence Number=SeqID_23003
  Gene Ontology: Mol. function=cysteine-type peptidase activity; Biological process=proteolysis
VIGTDSFYIQKSISSTSKANDLVSAGCEQLLLCSLSEEYNTEKHIVEADSISEVNSLFKCRMEEVLVQSISESGIDQPLTGKLEHELNGTLCTESAMPAIEARSVEELNSQFVQLSGEALECATSDSSCDDEHIQDRSSEALPVENGHTSELPKKDCHSYPTPDNPVAVNVKCKSKELLTEGSELPVLEARSVEEMNSLFRQLEDEASAQVPHSPDLMVGEHNGDIDSGVLVPDANSSEGISSAFVHLSNDDEKIKIPGDGEVILGSVELNSGLHVMETNALNGDDTSGFDST

SEQ ID NO: 88978 - protein, 51 aa, Setaria italica
  Transcript Sequence Number=SeqID_23004
  Gene Ontology: Mol. function=protein transporter activity; Cellular component=nuclear pore; Biological process=protein import into nucleus, docking
  Homolog annotation: Hit_ID=Q8GZ46; Match level="QueryCoverage=100%, HitCoverage=6%, E-value=1e-14, Identity=74%"; Hit description =Putative importin beta
MSLDVTQVLLSAQSADGAIRKHAEESLKQFQEQNLPGFLLSLSTELANEEK

SEQ ID NO: 88979 - protein, 872 aa, Setaria italica
  Transcript Sequence Number=SeqID_23005
  Gene Ontology: Mol. function=protein transporter activity; Cellular component=nuclear pore; Biological process=protein import into nucleus, docking
  Homolog annotation: Hit_ID=Q9FJD4; Match level="QueryCoverage=99%, HitCoverage=99%, E-value=0.0, Identity=78%"; Hit description =Importin beta
  Pfam annotation: Domain name=HEAT; Domain location=127-162; Score =11.2; E_value=2.1; Accession=PF02985.14; Description=HEAT repeat
  Pfam annotation: Domain name=HEAT; Domain location=170-207; Score =6.8; E_value=7.3; Accession=PF02985.14; Description=HEAT repeat
  Pfam annotation: Domain name=HEAT; Domain location=214-250; Score =22.9; E_value=0.0013; Accession=PF02985.14; Description=HEAT repeat
  Pfam annotation: Domain name=HEAT; Domain location=362-398; Score =12.4; E_value=1.5; Accession=PF02985.14; Description=HEAT repeat
  Pfam annotation: Domain name=HEAT; Domain location=404-441; Score =20.1; E_value=0.0092; Accession=PF02985.14; Description=HEAT repeat
  Pfam annotation: Domain name=HEAT; Domain location=455-489; Score =5.2; E_value=11; Accession=PF02985.14; Description=HEAT repeat
  Pfam annotation: Domain name=HEAT; Domain location=499-538; Score =5.8; E_value=9.6; Accession=PF02985.14; Description=HEAT repeat
  Pfam annotation: Domain name=HEAT; Domain location=603-639; Score =1.6; E_value=31; Accession=PF02985.14; Description=HEAT repeat
  Pfam annotation: Domain name=HEAT; Domain location=788-826; Score =3.8; E_value=17; Accession=PF02985.14; Description=HEAT repeat
  Pfam annotation: Domain name=HEAT; Domain location=838-870; Score =2.7; E_value=23; Accession=PF02985.14; Description=HEAT repeat
  Pfam annotation: Domain name=HEAT; Domain location=87-123; Score=5.6; E_value=10; Accession=PF02985.14; Description=HEAT repeat
  Pfam annotation: Domain name=IBN_N; Domain location=23-103; Score =99.5; E_value=1.2e-26; Accession=PF03810.11; Description=Importin -beta N-terminal domain
  Pfam module annotation: Pfam domain module=HEAT::HEAT::HEAT::HEAT::HEA T::HEAT::HEAT::HEAT::HEAT::HEAT::HEAT::IBN_N; Domain location=127 -162::170-207::214-250::362-398::404-441::455-489::499-538::603 -639::788-826::838-870::87-123::23-103
MSLDVTQVLLSAQSADGSIRKHAEESLKQFQEQNLPGFLLSLSTELANEEKPEESRRLAGLILKNALDAKEQHRKSELFQRWLALDAGAKAQIKGLLLQTLTSPVASARSTASQVIAKVAGIEIPQKQWPELIGSLLSNIHQVQPNVKQATLETLGYLCEEVSPEAVDQDQVNKILTAVVQGMNASEANSDVRLAATRALYNALGFAQVNFSNDMERDYIMRVVCEATQSPEVKIRQAAFECLVAISSTYYDKLATYMQDIFNITAKAVRGDEESVALQAIEFWSSICDEEIDILDEYSSEFTADSDVPCYYFIKQALPALVPMLLETLLKQEEDQDLDEGAWNLAMAGGTCLGLVARTVGDDIVPLVMPFVEENITKAEWRQREAATYAFGSILEGPSADKLAPLVNVALNFMLSALMKDPSNHVKDTTAWTLGRIFEFLHGSALETPPIITAENCQQILTVLLHSMKDVPNVAEKACGALYFLAQGYVDAGSASPLSPFFQDIVQNLLMVTHREDAGESRLRTAAYETLNEVVRCSTEETAPIVMQLVPVIMMELHQTLEAEKLSTDEREKRSELQGLLCGCLQVIIQKLGGMESTKYSFLQYADQMMDLFLRVFACRNATVHEEAMLAIGALAYAAGANFAKYMPQFYQYLEMGLQNFEEYQVCAITVGVVGDLCRALEDKILPFCDGIMTQLLKDLSSNQLHRSVKPPIFSCFGDIALAIGENFEKYLIYAMPMLQSAADLSAHTTATDDEMLDYTNQLRNGILEAYSGILQGFKSSPKTQLLMPYAPHILQFLDALYNGKDMDDTVMKTAIGVLGDLADTLGVHAGPLINQSSSSKAFLEECLASDDPQVKESADWASIAITRAVSG

SEQ ID NO: 88980 - protein, 112 aa, Setaria italica
  Transcript Sequence Number=SeqID_23006
  Gene Ontology: Mol. function=transcription regulator activity; Cellular component=nucleus; Biological process=regulation of transcription
  Homolog annotation: Hit_ID=Q9FYJ6; Match level="QueryCoverage=100%, HitCoverage=35%, E-value=8e-35, Identity=66%"; Hit description =Transcription factor bHLH111
PKVKLGDKITALQQIVSPFGKTDTASVLYEAINYIKWLHEQVQLLSDPYMKTSSSKDYNAWGGLDRKEKSEAEMDLRSRGLCLVPVSCTPQVYRDNNGPDYWTPPYRSCLYR

SEQ ID NO: 88981 - protein, 89 aa, Setaria italica
  Transcript Sequence Number=SeqID_23007
  Gene Ontology: Mol. function=mismatched DNA binding; Biological process=mismatch repair
  Homolog annotation: Hit_ID=Q9XGD0; Match level="QueryCoverage=98%, HitCoverage=7%, E-value=2e-35, Identity=80%"; Hit description=MUS2 protein
DSSAALGALLVQVSPREIIYETSGLSKETHKAIRKYASAGSVKMQLTPLPGIDFSDVSQIRMLIHSKEYFTASAESWLSALDCALNRDA

SEQ ID NO: 88982 - protein, 81 aa, Setaria italica
  Transcript Sequence Number=SeqID_23008
  Gene Ontology: Mol. function=oxidoreductase activity
  Homolog annotation: Hit_ID=B6TIM2; Match level="QueryCoverage=100%, HitCoverage=21%, E-value=3e-38, Identity=92%"; Hit description =Deoxyribodipyrimidine photolyase
  Subcellular localization annotation: CTP_CleavageSite=62; ConfidenceScore=5.17e-01
PLAMVPVHGFSFNNSDSLSWAYCDSSKPGRACVPPNRQSWVLHSTTEYASKVINTIGPRKPSADALAKVAEELFREFQATG

SEQ ID NO: 88983 - protein, 377 aa, Setaria italica
  Transcript Sequence Number=SeqID_23009
  Gene Ontology: Mol. function=oxidoreductase activity; Cellular component=integral to membrane; Biological process=metabolic process
  Homolog annotation: Hit_ID=B6TIM2; Match level="QueryCoverage=93%, HitCoverage=93%, E-value=0.0, Identity=88%"; Hit description =Deoxyribodipyrimidine photolyase
  Pfam annotation: Domain name=Amino_oxidase; Domain location=17-368; Score=-54.2; E_value=0.016; Accession=PF01593.16; Description=Flavin containing amine oxidoreductase
  Pfam annotation: Domain name=DAO; Domain location=9-371; Score=-31.2; E_value=0.0012; Accession=PF01266.16; Description=FAD dependent oxidoreductase
  Pfam annotation: Domain name=Pyr_redox; Domain location=9-103; Score=- 12.6; E_value=0.077; Accession=PF00070.19; Description=Pyridine nucleotide-disulphide oxidore
  Pfam module annotation: Pfam domain module=Amino_oxidase::DAO::Pyr _redox; Domain location=17-368::9-371::9-103
  Subcellular localization annotation: CTP_CleavageSite=50; ConfidenceScore=5.37e-01
MSSAAVAANVAVIGGGITGAVSASLLAARGVAVTLFDSGRGAGGRMSQRRAAMEDGTELRFDHGAPYFTVTNDEVARVVSGWEARGIVAEWKATFACFDLATGKFTDFEKEGSTKKYVGVPAMNSICKSLCLEDGVEAKFGCTVGKMDWLQDRSSWSLASLDGKDLGHFDYVVATDKNVASPRFSGLTGRPPPLDLSLFPRLSVMVQDIPVRPCFALMVAFSEPLAMVPVHGFSFNNSDSLSWAYCDSSKPLRSCVSPNRQSWVLHSTTEYASKVINTIGPRKPSADALAKVAEELFREFQATGLSIPQPIFMKAHRWGGAFPAIAVGGDDKCIWDKSTKLAICGDFCASPSVEGAVLSAMRGASKILGCLNCPSGL

SEQ ID NO: 88984 - protein, 81 aa, Setaria italica
  Transcript Sequence Number=SeqID_23010
  Gene Ontology: Mol. function=protein binding
  Homolog annotation: Hit_ID=Q7XXK8; Match level="QueryCoverage=95%, HitCoverage=6%, E-value=1e-09, Identity=41%"; Hit description =OSJNBa0073L13.12 protein
HDSASITGIPFPAILSWAKLLWCRVERCQRLDTVFCTPEGEGVGGGSRQAMFWYIQTLWVSQLPVARHVWSWSVAAQPDER

SEQ ID NO: 88985 - protein, 127 aa, Setaria italica
  Transcript Sequence Number=SeqID_23011
  Gene Ontology: Mol. function=3'-5'-exoribonuclease activity; Biological process=RNA processing
  Homolog annotation: Hit_ID=B4FDY3; Match level="QueryCoverage=100%, HitCoverage=41%, E-value=2e-50, Identity=77%"; Hit description =Exosome complex exonuclease RRP43
  Pfam annotation: Domain name=RNase_PH_C; Domain location=40-106; Score=26.1; E_value=0.00014; Accession=PF03725.7; Description=3' exoribonuclease family, domain 2
LEIPLVSIGDDGRLFTVGGNEGKTKFELVNREKRKLTLGNIPFSLTCALHKDSILADPTSEEESVIETYVTVVVDSSDRIVSIQKLGGAVTSMEAIKECISLAKERRRKLREILTDSVEAMEVDQTE

SEQ ID NO: 88986 - protein, 139 aa, Setaria italica
  misc_feature (10)..(10): Xaa can be any naturally occurring amino acid
  misc_feature (88)..(88): Xaa can be any naturally occurring amino acid
  Transcript Sequence Number=SeqID_23012
  Gene Ontology: Mol. function=oxidoreductase activity; Biological process=oxidation reduction
  Homolog annotation: Hit_ID=Q2LGK1; Match level="QueryCoverage=89%, HitCoverage=47%, E-value=2e-26, Identity=51%"; Hit description =Putative oxidoreductase (Fragment)
MGAEARQLEXPRIDFSGVDPSAPGAGQWAAVRAQVVDALATFGCFDAHYPALTPDLRAAFFDGAVKKLFALPDDAKRRNTCSPDRPLXGYLGSMAGFTNAYESLAISDRVEPERVRAFADLMWPGGDNAAFCEAVHGAA

SEQ ID NO: 88987 - protein, 38 aa, Setaria italica
  Transcript Sequence Number=SeqID_23013
VPVPGKCGTKGQINALSKLLPQVLGCNRSLTSIYLSFG

SEQ ID NO: 88988 - protein, 75 aa, Setaria italica
  Transcript Sequence Number=SeqID_23014
  Homolog annotation: Hit_ID=Q00RL5; Match level="QueryCoverage=92%, HitCoverage=13%, E-value=3e-10, Identity=52%"; Hit description =OSIGBa0117N13.2 protein
LQVIEIRAPKLSTFDCGDNLMQISLGAEVKHIRMIGSKPNTLCHARAEIPCFMPAVERLTVESICEVCAMFMPFS

SEQ ID NO: 88989 - protein, 516 aa, Setaria italica
  Transcript Sequence Number=SeqID_23015
  Gene Ontology: Mol. function=nucleic acid binding
  Homolog annotation: Hit_ID=Q00RL5; Match level="QueryCoverage=98%, HitCoverage=96%, E-value=1e-124, Identity=47%"; Hit description =OSIGBa0117N13.2 protein
  Pfam annotation: Domain name=F-box; Domain location=37-84; Score =30.1; E_value=8.8e-06; Accession=PF00646.25; Description=F-box domain
  Pfam annotation: Domain name=FBD; Domain location=410-459; Score =18.0; E_value=0.0011; Accession=PF08387.2; Description=FBD
  Pfam module annotation: Pfam domain module=F-box::FBD; Domain location=37-84::410-459
MYTGTCRKRELQPEPSSASLQGHTSQDEQCLQVMGHFMLDRLPEDIVDNLFSYLPIEDAARAACVSRRYLRSWRRYPRLLFNNKTVGYDKLSMHLDEDTRALEDEQYRQDKIESHFVNKINHVLENHSGFGMKVLILQLYPCANIDASYFDKWLRIAVKPGIEELALEMAVFNKRADYNFPIFLLSNEIGGATLESLRLTSCAFHPTASLGCNRSLTSIYLSFVRITGEELGQFVSNCFALARLSIYKCNDLICFKAPCVLHHLNHFHVTQCKMLQVIEIRAPKLSTFDCGDNLMQISLGAEVKHIRMIGSKPNTLCHARAEIPCFMPAVERLTVESICEKVKTPIMSSKFLLLKYLDIFLVDVQLYRQDYFSLVSFLEASPALETFMLRVETGYVLRSDSVLKDLDKDQLHLRQMPECLHYNLKNVMMTGFSSAKSLIELTSHIVRNASALVCMTLDTAWGCGRRTTKTDKCEHMSKEGLMEAQRALEAVNRCIEGIVPSSTNFKALEPCCQCGG

SEQ ID NO: 88990 - protein, 98 aa, Setaria italica
  Transcript Sequence Number=SeqID_23016
  Subcellular localization annotation: CTP_CleavageSite=45; ConfidenceScore=5.04e-01
RPPAVTIFSSLLSSPCPLFQMSYYFQPLHNNSNGLRYVDGADNVRVASGRVLHFDAICFKIEFILVKMSTARSPRRFTLQDHPIFSLTSCFCYYLLMW

SEQ ID NO: 88991 - protein, 67 aa, Setaria italica
  Transcript Sequence Number=SeqID_23017
QHTAILLLSFITQASYIVHTGSKEDQERKGGTLITLYELNWHLEWKRRRPRIRDAAAPRGTIDCLST

SEQ ID NO: 88992 - protein, 74 aa, Setaria italica
  misc_feature (68)..(68): Xaa can be any naturally occurring amino acid
  Transcript Sequence Number=SeqID_23018
EAVYSTTRSSRIADSRSPPLPLQVPIQFIQVEHAMRDVKTTDPKMSEATKVECNTPTMFVEAKVRIRXIKKRMG

SEQ ID NO: 88993 - protein, 258 aa, Setaria italica
  misc_feature (67)..(67): Xaa can be any naturally occurring amino acid
  Transcript Sequence Number=SeqID_23019
  Subcellular localization annotation: CTP_CleavageSite=79; ConfidenceScore=5.43e-01
HQSPKRPTANVPRIAARKGVDRMPQTKIRAPVSTSQGVGGVKQRSQVNSKESAAARVNLPGATEAKXHPQKPPRALPRVAMMRSSTNTAIASATSDKRSSTGGAVNRQAAGKTANTSASVRPSGGTKSSSILKSGAFTSTTASSHGVSTDTGPEAKTRTTLSNKNRTAQRVPVRSSSKSDISKTVPSRSSGNRIAARGHTDRASPIISPSSSVDSMSSVISGASTASTVGKMSHTSESLNTLSPSLRKSNDCPPDPKA

SEQ ID NO: 88994 - protein, 51 aa, Setaria italica
  Transcript Sequence Number=SeqID_23020
MAQQQKNAHVPKFGNWDNDGNVPYTLYFENARKGKGAGGKMINPKTPREPG

SEQ ID NO: 88995 - protein, 132 aa, Setaria italica
  Transcript Sequence Number=SeqID_23021
  Gene Ontology: Mol. function=protein serine/threonine kinase activity; Cellular component=plasma membrane; Biological process =protein amino acid phosphorylation
  Homolog annotation: Hit_ID=Q9FN92; Match level="QueryCoverage=97%, HitCoverage=15%, E-value=4e-25, Identity=47%"; Hit description =Receptor-like protein kinase
GPTVREFSVNVAGGTLAIAFTPTGKVAFVNAIEVLSHPDDLFAGPAQTVSPLGQYTGLSTQALETIHRINMGSPKITPSNDTLWRTWLPDDTSLLNPSLAVHKDVSPKNLQRMAGLASPEAAPDMVYATATE

SEQ ID NO: 88996 - protein, 104 aa, Setaria italica
  Transcript Sequence Number=SeqID_23022
MHRRTVQCIIMAWMTKRSCCCCLVRSGAHYEPGVVGSAHRGPRSDGRDRWWCRGSTLVSVVSSGGILRNSRWYRPSWLCNRPFPTMSPVLWSLTWHRPPPNTTR

SEQ ID NO: 88997 - protein, 95 aa, Setaria italica
  Transcript Sequence Number=SeqID_23023
  Subcellular localization annotation: CTP_CleavageSite=53; ConfidenceScore=5.08e-01
APAIERPPWTVSNSSVTVAPRAAAGAGADYHRRARGPALTSPLPRGSCSCKVEASAHGPGEGGDDSGGGAAVLMLARRNGAASRRLMPCLVSCVV

SEQ ID NO: 88998 - protein, 62 aa, Setaria italica
  Transcript Sequence Number=SeqID_23024
  Subcellular localization annotation: CTP_CleavageSite=47; ConfidenceScore=5.57e-01
KKFSLHWSSATQRRSSNTVLSSSTDCTPARSNCHASRCSDSERRNIRMMNKSEVIIPEVTGI

SEQ ID NO: 88999 - protein, 64 aa, Setaria italica
  Transcript Sequence Number=SeqID_23025
KMRLLQIDNILNWVSILGNLNDGSMPRGIVTSENVSKPGISLSSIQCVKAWNLFLFICNQEQIL

SEQ ID NO: 89000 - protein, 60 aa, Setaria italica
  Transcript Sequence Number=SeqID_23026
  Subcellular localization annotation: CTP_CleavageSite=23; ConfidenceScore=5.64e-01
LATLEAARPLASTMLSKNSLSVSCMARTSSRVATPSPKHMRTEIVYSAVWTASRRRTPPP

SEQ ID NO: 89001 - protein, 168 aa, Setaria italica
  Transcript Sequence Number=SeqID_23027
  Gene Ontology: Mol. function=RNA-directed RNA polymerase activity
  Homolog annotation: Hit_ID=B6DZR9; Match level="QueryCoverage=100%, HitCoverage=16%, E-value=2e-84, Identity=90%"; Hit description=RNA -directed RNA polymerase 6a (Fragment)
  Pfam annotation: Domain name=RdRP; Domain location=1-168; Score= -64.1; E_value=1.7e-09; Accession=PF05183.4; Description=RNA dependent RNA polymerase
SDGIGKITPDLAMEVAKTLQLTDNPPSAYQIRYAGFKGVIAVWQGENDGIRLSLRPSMHKFESTHTVLEVVSWTKFQPGFLNRQIITLLSSLNVPDAIFSQMQEAMLSNLNNILSDTDVAFDVVTTSCAEQGNTAALMLSAGFSPGTEPHLKAMLLAIRSLQLLGLLE

SEQ ID NO: 89002 - protein, 93 aa, Setaria italica
  Transcript Sequence Number=SeqID_23028
  Subcellular localization annotation: CTP_CleavageSite=52; ConfidenceScore=5.73e-01
APHPPCSELPRSKCQVPTHVPVRARAPVASSCTVLLQCGAPPLRSSAGPRVRATRRARGCAIRAAGVEWSGVACPGSSWRFGLGRGAGRGGRA

SEQ ID NO: 89003 - protein, 52 aa, Setaria italica
  Transcript Sequence Number=SeqID_23029
IDIKFAFKFIPVNDVLLRGINSQNPLSKTFTYRSSMTYMDGSREYNFYLQHY

SEQ ID NO: 89004 - protein, 31 aa, Setaria italica
  Transcript Sequence Number=SeqID_23030
HIYFQEKCQMNFIGEPAYFLTSMQQLGMFLN

SEQ ID NO: 89005 - protein, 345 aa, Setaria italica
  misc_feature (193)..(193): Xaa can be any naturally occurring amino acid
  Transcript Sequence Number=SeqID_23031
  Gene Ontology: Mol. function=transferase activity; Cellular component= membrane
  Homolog annotation: Hit_ID=B6U626; Match level="QueryCoverage=91%, HitCoverage=65%, E-value=1e-124, Identity=65%"; Hit description =Secondary cell wall-related glycosyltransferase family 47
  Pfam annotation: Domain name=Exostosin; Domain location=1-266; Score =230.5; E_value=4.1e-66; Accession=PF03016.7; Description=Exostosin family
YWLTLDLLASEQGAPTPCAAVRVPRAADADVVFVPFFASLSFNRHSRVVPPARDSEDRALQRRLLEFLAARPEWRRAGGRDHVVLAHHPNGMLDARYRLWPCVFVLCDFGRYPRSVANLDKDVIAPYRHVVANFANDTAGYDDRPTLLYFQGAIYRKDGGSIRQELYYLLKDEKDVHFSFGSVAGNGIEQATXGMRASRFCLNIAGDTPSSNRLFDSIVSHCVPVIISDEIELPFEDVLDYSKFSVIVRGTDAVKKGFLMNLITGISREEWTRMWNRLKEVEKHFEYQYPSQTDDAVQMIWKTIARKVPSIRLKINRLRRFSRFETNKTDEGPSHSSSWLQNQAP

SEQ ID NO: 89006 - protein, 458 aa, Setaria italica
  Transcript Sequence Number=SeqID_23032
  Gene Ontology: Mol. function=phosphoprotein phosphatase activity; Cellular component=chloroplast
  Homolog annotation: Hit_ID=B9R7R1; Match level="QueryCoverage=74%, HitCoverage=68%, E-value=1e-118, Identity=61%"; Hit description =Protein phosphatase 2c, putative
  Pfam annotation: Domain name=PP2C; Domain location=222-425; Score= -61.1; E_value=0.025; Accession=PF00481.13; Description=Protein phosphatase 2C
  Pfam annotation: Domain name=SpoIIE; Domain location=239-456; Score= -22.0; E_value=0.028; Accession=PF07228.4; Description=Stage II sporulation protein E (SpoIIE)
  Pfam module annotation: Pfam domain module=PP2C::SpoIIE; Domain location=222-425::239-456
GGRGVHLSSQKEPPLGRGGRSFLFGNTWFLLSTYPARLLHTTDRRAPSAFFAAIHRAPCVRSPCAGQGLLQRGGIVMAACGYALRRAELGATKRQPDKDPSAGTRSTRTAAMGSVGSAPRPDVSFRYRGLESCKKFGASLKCCEPWGNRSFWTNAVGPSWKLSFAVEPWARDFSSSCVAPYSTGATEHQLSLDEKMDDSTVTSDGKAPTSESLKLVSGSCYLPHPAKEATGGEDAHFISTDEHVIGVADGVGGWADLGVDAGLYAKELMRNSMSAIKDEPEGTIDPSRVLEKAYTSTKARGSSTACIITLKDQGIHAVNLGDSGFVVVRDGRTVLRSPSQQHDFNFTYQLESGGGSDLPSSAQVFHFPVAPGDVIVAGTDGLFDNLYNNEISGVIVEALRVGLEPQIAAQKIAALARQRATDKNRQSPFASAAQEAGYRYYGGKLDDITVVVSYVKSA

SEQ ID NO: 89007 - protein, 241 aa, Setaria italica
  Transcript Sequence Number=SeqID_23033
  Gene Ontology: Cellular component=integral to membrane
  Homolog annotation: Hit_ID=O24564; Match level="QueryCoverage=93%, HitCoverage=82%, E-value=4e-90, Identity=43%"; Hit description =Embryogenesis transmembrane protein
LVVGLVSLLIAYSAGSCRKARESIYLIIIAVAVLIALVAQVLLLSSAQDGLRGPTGRIYRTCASAAFGKESSWHGTTSKQQESSGHPEKNVRKRHKYLMLLAILAASITYQAGLNPPGGFWSDDDEGHVEGNPGLKPPGVLWSDNKGHLAGNPVLLDINPQRYEIFFCFNSISFMASIVVIMFLLNKSARKKSVPLEVLHLIMILDLLALMTAFAAGSCRKFRTSVYVYALVVGVVVYLVI

SEQ ID NO: 89008 - protein, 80 aa, Setaria italica
  Transcript Sequence Number=SeqID_23034
  Subcellular localization annotation: CTP_CleavageSite=50; ConfidenceScore=5.64e-01
VGCISWSSPTLALPTATTVAGPALVPPPCSPPALRPCLPALATNLCCPVVSSTSAAIAIACECATAHASPTASRRAVDAL

SEQ ID NO: 89009 - protein, 67 aa, Setaria italica
  misc_feature (15)..(15): Xaa can be any naturally occurring amino acid
  Transcript Sequence Number=SeqID_23035
  Gene Ontology: Mol. function=ligase activity; Biological process =response to auxin stimulus
  Homolog annotation: Hit_ID=Q6I581; Match level="QueryCoverage=76%, HitCoverage=8%, E-value=6e-17, Identity=78%"; Hit description =Probable indole-3-acetic acid-amido synthetase GH3.5
  Subcellular localization annotation: CTP_CleavageSite=57; ConfidenceScore=5.13e-01
VTYLVVLRSLRVLRXGTFGQVMNHYLSLGGAVSQFKTPRFVSQSNSKLLQILNRNVTQSYFSSAYGI

SEQ ID NO: 89010 - protein, 70 aa, Setaria italica
  Transcript Sequence Number=SeqID_23036
LEIYLRFFFPSPCSDFQANGTSDLATIDQAFDRFIQASRKVSQIIRQVRENAASPNQQVPCLVPSRRCLS

SEQ ID NO: 89011 - protein, 106 aa, Setaria italica
  Transcript Sequence Number=SeqID_23037
  Gene Ontology: Mol. function=binding
  Homolog annotation: Hit_ID=Q9SA64; Match level="QueryCoverage=96%, HitCoverage=2%, E-value=9e-40, Identity=73%"; Hit description =F10O3.12 protein
MTIVVIHIMKALSSHQSAAPSLIEDDALQVLFHMVANGSLSVFSQFRDGIVPLHTIQLHRHAMQVLGLLLANDNGTSAKYIRKHQLIKVLLMAVKDFNPQSGDAAY

SEQ ID NO: 89012 - protein, 119 aa, Setaria italica
  Transcript Sequence Number=SeqID_23038
  Subcellular localization annotation: CTP_CleavageSite=40; ConfidenceScore=5.07e-01
LGNLPCHMILARLAAYRCRLPSLPPLLFSSVSAHTTATASAARRGEPLHRPSIELPGGFLPLDAPLPARAPYHGTGGLALPPTSESAQLLPYPSEMASVAGAAKFALAVALGCAYILTP

SEQ ID NO: 89013 - protein, 158 aa, Setaria italica
  Transcript Sequence Number=SeqID_23039
  Gene Ontology: Mol. function=binding
  Homolog annotation: Hit_ID=B9R731; Match level="QueryCoverage=95%, HitCoverage=25%, E-value=9e-35, Identity=49%"; Hit description=Heat shock protein 70 (HSP70)-interacting protein, putative
EDRKAEEWASQLQCWSLYFLSCLASRDLSSHAMICQDAVFLRELSRMWGGLANGDSPAGVGLLRLLCRSPVGRAAIAACRDALSSLCDLARSSDDWQYMAVDCLLLLLDDRDTWNAVADATAPCLVDLVDLRHLGPRRRLGDAIATALLLDDSREVGI

SEQ ID NO: 89014 - protein, 62 aa, Setaria italica
  Transcript Sequence Number=SeqID_23040
  Homolog annotation: Hit_ID=B6UBU1; Match level="QueryCoverage=58%, HitCoverage=6%, E-value=5e-10, Identity=94%"; Hit description=Glucan endo-1,3-beta-glucosidase 3
MGSRSRGGSGSGLLIPFLLLSLHCSPVLVSAAGSGEPYVGVTIGTAVTNLLSPSDLADFLRA

SEQ ID NO: 89015 - protein, 138 aa, Setaria italica
  Transcript Sequence Number=SeqID_23041
STASCTDVVSLIIRIIITVQIEHVCVPRLHLSRANDAVNFFPRFLAPYYFTSPLPTSASREICYKAQTSKIRAAGCSHWFQAAVNLLRAGVDLLTTCWRTTRRHHPRLPWKFLVLAVRPSSRSPKPLFLLAACLRKPL

SEQ ID NO: 89016 - protein, 51 aa, Setaria italica
  Transcript Sequence Number=SeqID_23042
SLRGLCGVMFSIVKSHTPVSTCLQRKLVLLYVELFYGTQYYHLVIYSIEKI

SEQ ID NO: 89017 - protein, 256 aa, Setaria italica
  misc_feature (87)..(87): Xaa can be any naturally occurring amino acid
  Transcript Sequence Number=SeqID_23043
  Homolog annotation: Hit_ID=Q2R1T3; Match level="QueryCoverage=94%, HitCoverage=54%, E-value=5e-47, Identity=45%"; Hit description=F-box domain containing protein, expressed
  Pfam annotation: Domain name=DUF295; Domain location=200-246; Score =49.2; E_value=1.6e-11; Accession=PF03478.10; Description=Protein of unknown function (DUF295)
NVYENLPEFNYRKGKFEVDYEPTILEIDWAHEFMYHRVVLSASPSAGRACIVLLLHMLHGEVSFARLGDDRWTLVARGEGTGLQWRXGYRDAMYSAADGLFYLLGCDASLCSLDLNGSSPVACKIINDVPKSGTPTKYNLVQTPAGDILQVWRLRDYVDSLTPAGIPPEYMEDEGDLGNPLELNTFHLQVYKVDLHGLRVELIKSLPDYALFLDFNGSMCLPVKDFPGLKPNCVYITDDLMEYVNCRKNNRRQVGI

SEQ ID NO: 89018 - protein, 406 aa, Setaria italica
  misc_feature (401)..(401): Xaa can be any naturally occurring amino acid
  Transcript Sequence Number=SeqID_23044
  Gene Ontology: Mol. function=protein serine/threonine kinase activity; Cellular component=integral to membrane; Biological process=protein amino acid phosphorylation
  Homolog annotation: Hit_ID=C0LGM5; Match level="QueryCoverage=97%, HitCoverage=40%, E-value=1e-160, Identity=68%"; Hit description =Leucine-rich repeat receptor-like protein kinase (Fragment)
  Pfam annotation: Domain name=Pkinase; Domain location=124-395; Score =121.8; E_value=2.2e-33; Accession=PF00069.17; Description=Protein kinase domain
  Pfam annotation: Domain name=Pkinase_Tyr; Domain location=124-395; Score=71.0; E_value=1.9e-18; Accession=PF07714.9; Description =Protein tyrosine kinase
  Pfam module annotation: Pfam domain module=Pkinase::Pkinase_Tyr; Domain location=124-395::124-395
  Subcellular localization annotation: CTP_CleavageSite=67; ConfidenceScore=5.03e-01
TVKNSRNSVIGNPLLQSCHVYTLAVPSAAQQGRGLNSNGSNDTTPTDAQNEGGNNAFNAIEIASITSATAIVSVLLALIVLFIYTRKCAPRMSARSSGRKEVTIFQDIGVPITYETVVRATGSFNASNCIGSGGFGATYKAEIAPGVLVAIKRLSVGRFQGAQQFHAEIKTLGRLRHQNLVTLVGYHLGESEMFLIYNYLSGGNLERFIQERSKRPVDWKMLHKIALDVAKALAYLHDTCVPRILHRDVKPSNILLDTNNNAYLSDFGLARLLGNSETHATTGVAGTFGYVAPEYAMTCRVSDKADVYSYGVVLMELISDKKALDPSFSPYGNGFNIVAWACMLLRQGRAREFFIDGLWDVGPHDDLVETLHLAVMCTVDSLSIRPTMKQVVQRLKQLQPXIREHR

SEQ ID NO: 89019 - protein, 36 aa, Setaria italica
  Transcript Sequence Number=SeqID_23045
CKREPDGRALPPSPLTVVAKLLCTCNYTAVLNTPTS

SEQ ID NO: 89020 - protein, 134 aa, Setaria italica
  Transcript Sequence Number=SeqID_23046
  Gene Ontology: Mol. function=steroid binding; Cellular component =plasma membrane; Biological process=transport
  Homolog annotation: Hit_ID=B4FXD7; Match level="QueryCoverage=98%, HitCoverage=37%, E-value=4e-64, Identity=89%"; Hit description =Transthyretin
TAPEVLAELKRRYVNRPIVELEAAAQEELKITELRLAKLFSSEPTVPSTTTKAPNIQSDKAADRIRIIGAHLGALPQPCANKAPDITGSSNRSRPPITTHVLDVARGSPASGIEVHLEMWKDVSAPPSFSNKIS

SEQ ID NO: 89021 - protein, 219 aa, Setaria italica
  Transcript Sequence Number=SeqID_23047
  Gene Ontology: Mol. function=steroid binding; Cellular component =plasma membrane; Biological process=transport
  Homolog annotation: Hit_ID=B6TR41; Match level="QueryCoverage=100%, HitCoverage=65%, E-value=4e-91, Identity=82%"; Hit description =Carrier/ steroid binding protein
  Pfam annotation: Domain name=OHCU_decarbox; Domain location=1-154; Score=161.6; E_value=2.3e-45; Accession=PF09349.2; Description=OHCU decarboxylase
MATPTPLTVEDVLRVNGSRRFAAAMAAASPFTSLADALLAARRIWLNEVDVNGWLEAFAAHPAIGTTSPSVSKWSKEEQSAAISTATDSTSQELAEWNAKYREKFGFVFMICASGRTAPEVLAELKRRYVNRPIVELEAAAQEELKITELRLAKLFSSEPTVPSTTTKAPNIQSDKAAGSSNRSRPPITTHVLDVARGSPASGIEVHLEMWKDVSAPPS

SEQ ID NO: 89022 - protein, 159 aa, Setaria italica
  Transcript Sequence Number=SeqID_23048
  Gene Ontology: Mol. function=steroid binding; Biological process =transport
  Homolog annotation: Hit_ID=B6TR41; Match level="QueryCoverage=35%, HitCoverage=17%, E-value=7e-19, Identity=82%"; Hit description =Carrier/ steroid binding protein
SPSYCPAAFQRRYVNRPIVELEAAAQEELKITELRLAKLFSSEPTVPSTTTKAPNIQSDKAAGINSILSVSRFYRKSAFSRYLFVQYCCIYHISVILYASHLMLTGPHLAYSGILETPLNLFDSSLSGKICYFIHINIMYPVLEQLNLAFVLPLQMLGH

SEQ ID NO: 89023 - protein, 216 aa, Setaria italica
  Transcript Sequence Number=SeqID_23049
  Gene Ontology: Mol. function=steroid binding; Cellular component =plasma membrane; Biological process=transport
  Homolog annotation: Hit_ID=B4FXD7; Match level="QueryCoverage=89%, HitCoverage=61%, E-value=5e-98, Identity=81%"; Hit description =Transthyretin
  Pfam annotation: Domain name=Transthyretin; Domain location=95-215; Score=135.3; E_value=1.9e-37; Accession=PF00576.13; Description =Transthyretin precursor (formerly prealbumin)
QDFRCSPPRRANHEHEAPIHITSGRTAPEVLAELKRRYVNRPIVELEAAAQEELKITELRLAKLFSSEPTVPSTTTKAPNIQSDKAAGSSNRSRPPITTHVLDVARGSPASGIEVHLEMWKDVSAPPSFSNKDFSGWATLGTSVTNNDGRSGQLMDIVDNAAPGFYRISFNTGKYAPAGFFPYVSIIFEIKENQTAEHFHVPLLHSPFSFTTYRGS

SEQ ID NO: 89024 - protein, 209 aa, Setaria italica
  Transcript Sequence Number=SeqID_23050
  Gene Ontology: Mol. function=transposase activity; Biological process= transposition, DNA-mediated
ELDAACMRDPIMDDDSHEELETQIAMNIIAQGADTRDQDGANLDIIELEGEDNHHEVAASSGGVPCEVMSDTSAPSVQPSGSFAESTMAALKPSAKKMKIISKTKPNPKLQALVPRDGRNMDALNSTLVGIRDSAPKLVRTQPTTSDPNAPLWDMLKEIPLSHPDRLSVGMYLCKPESEVHRSFFMSMGKEYLESWARKFLAGEESGAL

SEQ ID NO: 89025 - protein, 156 aa, Setaria italica
  misc_feature (120)..(120): Xaa can be any naturally occurring amino acid
  misc_feature (140)..(140): Xaa can be any naturally occurring amino acid
  misc_feature (151)..(151): Xaa can be any naturally occurring amino acid
  Transcript Sequence Number=SeqID_23051
  Gene Ontology: Mol. function=protein serine/threonine kinase activity; Biological process=protein amino acid phosphorylation
  Homolog annotation: Hit_ID=Q6Z8Z3; Match level="QueryCoverage=100%, HitCoverage=28%, E-value=1e-42, Identity=59%"; Hit description =Putative receptor protein kinase PERK1
WTCICAAHPLGESNSNSSLLSNCSSSCHCQQDEDGGTGSWNCTCASDKTLLKEEHAVLRDRSCFTSCNCTSGSSEEGKRHVSSKTVIITLLVCVVLTTTAFLVTTVYYFRRKDALSSRSXIYSFDKYTSWSSRSYLVSHXRSSPLPQLKPXPRLSV

SEQ ID NO: 89026 - protein, 475 aa, Setaria italica
  Transcript Sequence Number=SeqID_23052
  Gene Ontology: Mol. function=protein serine/threonine kinase activity; Cellular component=plasma membrane; Biological process =protein amino acid phosphorylation
  Homolog annotation: Hit_ID=Q1EPK4; Match level="QueryCoverage=99%, HitCoverage=93%, E-value=1e-175, Identity=63%"; Hit description =Protein kinase family protein
  Pfam annotation: Domain name=Pkinase; Domain location=168-438; Score =148.0; E_value=2.8e-41; Accession=PF00069.17; Description=Protein kinase domain
  Pfam annotation: Domain name=Pkinase_Tyr; Domain location=168-438; Score=108.7; E_value=2e-29; Accession=PF07714.9; Description=Protein tyrosine kinase
  Pfam module annotation: Pfam domain module=Pkinase::Pkinase_Tyr; Domain location=168-438::168-438
VFQLKVWELIAIGVAIFMAVLFVIVLCLSLRKKKKAVKGFDNTSLAEIPIVSKEINVDRVDAQSLHDSEVTFKPVHDKYTQMKGAGNLVESRSVDVDTFSQCSSVYNIEKAGSSYSEDYSYSSSGPARKGSSPYAYSASPLVGLPELSHLGWGHWFTLRDLELATNRFAKSNVLGEGGYGVVYKGRLVNGTEIAVKKILNNVGQAEKEFRVEVEAIGHVRHKNLVRLLGYCVEGIHRMLVYEYVNNGNLEQWLHGVNQRGVLSWENRMKILLGTAKALAYLHEAIDPKVVHRDIKSSNILIDDEFNSKVSDFGLAKLLNSDKSHINTRVMGTYGYVAPEYANSGMLNEKSDIYSFGVVLLECVTARDPVDYSKPADEVNLIEWLKMMVTNKRAEEVVDPNLEVKPPKRALKRAILVGFKCVDPDADKRPKMSHVVQMLEAVQNAYYQDQRKLSQVGSMDIESQQSLEETSNNADA

SEQ ID NO: 89027 - protein, 90 aa, Setaria italica
  Transcript Sequence Number=SeqID_23053
  Gene Ontology: Mol. function=protein serine/threonine kinase activity; Biological process=protein amino acid phosphorylation
  Homolog annotation: Hit_ID=B6UIQ8; Match level="QueryCoverage=60%, HitCoverage=8%, E-value=1e-09, Identity=58%"; Hit description =Receptor-like protein kinase RK20-1
SHKFFHPRRAGCCARGRRAMPRVPVVDLAALALVMVIPYAAAQPWAVCDGQSGNYSAGSTYADNLLRLVSVLRANASTSPALFATGSTTA

SEQ ID NO: 89028 - protein, 662 aa, Setaria italica
  Transcript Sequence Number=SeqID_23054
  Gene Ontology: Mol. function=protein tyrosine kinase activity; Cellular component=integral to membrane; Biological process=protein amino acid phosphorylation
  Homolog annotation: Hit_ID=Q01IH7; Match level="QueryCoverage=94%, HitCoverage=95%, E-value=0.0, Identity=69%"; Hit description =OSIGBa0159I10.8 protein
  Pfam annotation: Domain name=LRRNT_2; Domain location=23-64; Score =57.1; E_value=6.7e-14; Accession=PF08263.4; Description=Leucine rich repeat N-terminal domain
  Pfam annotation: Domain name=LRR_1; Domain location=117-139; Score =13.6; E_value=0.76; Accession=PF00560.25; Description=Leucine Rich Repeat
  Pfam annotation: Domain name=LRR_1; Domain location=141-163; Score =6.6; E_value=16; Accession=PF00560.25; Description=Leucine Rich Repeat
  Pfam annotation: Domain name=LRR_1; Domain location=165-188; Score =15.0; E_value=0.32; Accession=PF00560.25; Description=Leucine Rich Repeat
  Pfam annotation: Domain name=LRR_1; Domain location=204-223; Score =9.2; E_value=5.2; Accession=PF00560.25; Description=Leucine Rich Repeat
  Pfam annotation: Domain name=LRR_1; Domain location=69-91; Score=9.0; E_value=5.7; Accession=PF00560.25; Description=Leucine Rich Repeat
  Pfam annotation: Domain name=LRR_1; Domain location=93-115; Score =13.0; E_value=1; Accession=PF00560.25; Description=Leucine Rich Repeat
  Pfam annotation: Domain name=Pkinase; Domain location=350-624; Score=- 37.2; E_value=2.8e-06; Accession=PF00069.17; Description=Protein kinase domain
  Pfam annotation: Domain name=Pkinase_Tyr; Domain location=351-621; Score=-69.5; E_value=4.2e-09; Accession=PF07714.9; Description =Protein tyrosine kinase
  Pfam module annotation: Pfam domain module=LRRNT_2::LRR_1::LRR_1::LRR_ 1::LRR_1::LRR_1::LRR_1::Pkinase::Pkinase_Tyr; Domain location=23 -64::117-139::141-163::165-188::204-223::69-91::93-115::350-624::351 -621
MSTARLLGISILCLLLVRNSESVSDDVSALLAFKRAIYDDPLSKLSDWNSRDKDPCTWSGVGCSAFNRQVVTLELSNSSLQGFLAPEIGSLKSLQKLVLDHNTFMGSIPKDIGKLKNLMELNLSTNQLAGPIPSEIGDMTKITKIDLHANRLDGAIPPEVGKLGNLLELRLSNNRLTGIIPASNDSNMESANSNDQIGLCQLSQLTDIDLSYNFLVGDIPTCLNQIQRSSLAWNCFQNNDTSNRPLQQCENAINQDTGKDSHTDKNENGLPEPLWLLILEVIAAVSFLCLLTLCTITGLRRCRARSSESRNSSPWTRAVSWKENTVISIDDDLLVNVPKISRQELSEACEDFSNIIGSSQETVVYKGTLKDGREIAVVSLSVSVPYWNDYVELYFQKEVIEMARLSHENVAKMVGYCKESEPFSRMLVFQYPPNGTLYEHLHDGEGWQLSWPRRMKLALAIARALRYLHTELQPPFAVAALTSSSIYLTEDYSPKIIDLERWRYLVTKPGLASVNGGSVNSVTDSRHKRFMDVQANTFAFGVILLELISGRASASKDTGDLVDWARKHLEQPEEFSKLVDPKLQRQSVNQEGLGIVCNVVNLCIDPEPSRRPSMSMIAAILEEGIEASAATLMRDSSLAWAEARAGHPPRCPRLMPPALVIR

SEQ ID NO: 89029 - protein, 364 aa, Setaria italica
  Transcript Sequence Number=SeqID_23055
  Gene Ontology: Mol. function=receptor binding; Cellular component =membrane
  Homolog annotation: Hit_ID=B9S0U2; Match level="QueryCoverage=88%, HitCoverage=85%, E-value=1e-105, Identity=59%"; Hit description =Stomatin-1, putative
  Pfam annotation: Domain name=Band_7; Domain location=59-231; Score =170.5; E_value=4.7e-48; Accession=PF01145.17; Description=SPFH domain  Band 7 family
MASLLRRSASPARQILLLPRHLAAAGSAPASSRAFSGYYSRDDSARYDPPGTPVNWGVAIVPEKKAFVVERFGKYIRTLGSGIHLLIPAVDRISYVHSLKEEAIPIPNQSAITKDNVLIQIDGVIYLKIVDSYLASYGAENPIFAVIQLAQTTMRSELGKMTLDKTFEERDALNENIVRAINEAATDWGLKCLRYEIRDISPPHGVKVAMEMQVEAERKKRAQILEAEGKKRAQILESEGEAGAVLALSEASARGIRMVSEAMTTKGSTKAANLRVAEQYVRAFSQVAKKGTTVLLPSDGGNPSSFVAQAIRIFQHLQANTPQIEDLEESEGETGPAETSEMPPLIPDADPGANFSLQRHKNKI

SEQ ID NO: 89030 - protein, 65 aa, Setaria italica
  Transcript Sequence Number=SeqID_23056
  Gene Ontology: Cellular component=integral to membrane; Biological process=photosynthesis, light reaction
  Homolog annotation: Hit_ID=P62109; Match level="QueryCoverage=52%, HitCoverage=100%, E-value=1e-09, Identity=97%"; Hit description =Photosystem II reaction center protein M
  Pfam annotation: Domain name=PsbM; Domain location=32-62; Score=69.8; E_value=1e-17; Accession=PF05151.4; Description=Photosystem II reaction centre M protein (PsbM)
MQVLPLNLQDTPFSSLWDYIPSYCEKKNKEVMEVNILAFIATALFILVPTAFLLIIYVKTASQND

SEQ ID NO: 89031 - protein, 100 aa, Setaria italica
  Transcript Sequence Number=SeqID_23057
TSQEGPITNLQVILPYIPRWCCGALCVATRCLWMLLHTSIQWLHHISACCLAIEALFVLSDLNLEGCFLQSHVCSVGFLRLFRLCSHNCPECLHFSATTG

SEQ ID NO: 89032 - protein, 110 aa, Setaria italica
  misc_feature (46)..(46): Xaa can be any naturally occurring amino acid
  Transcript Sequence Number=SeqID_23058
  Gene Ontology: Mol. function=3'-5' exonuclease activity; Cellular component=intracellular; Biological process=nucleobase, nucleoside, nucleotide and nucleic acid metabolic process
  Homolog annotation: Hit_ID=B9SDW9; Match level="QueryCoverage=98%, HitCoverage=11%, E-value=6e-48, Identity=78%"; Hit description=3'-5' exonuclease, putative
  Pfam annotation: Domain name=3_5_exonuc; Domain location=1-110; Score= 51.4; E_value=3.4e-12; Accession=PF01612.12; Description=3'-5' exonuclease
MSHISTQKEDYLIDTIALHDVMGILRPVFANPSICKIFHGADNDVXWLQRDFHIYVVNMFDTAKACEILSKPQKSLAYLLELYCEVTTDKTMQREDWRLRPLTPEMIEYA

SEQ ID NO: 89033 - protein, 89 aa, Setaria italica
  Transcript Sequence Number=SeqID_23059
  Gene Ontology: Mol. function=3'-5' exonuclease activity; Cellular component=intracellular; Biological process=nucleobase, nucleoside, nucleotide and nucleic acid metabolic process
  Homolog annotation: Hit_ID=B9SDW9; Match level="QueryCoverage=76%, HitCoverage=6%, E-value=6e-23, Identity=72%"; Hit description=3'-5' exonuclease, putative
MHATFLKQLCLLLILFQACEILSKPQKSLAYLLELYCEVTTDKTMQREDWRLRPLTPEMIEYARTDAHYLLYIANCLASELHAKARGTF

SEQ ID NO: 89034 - protein, 84 aa, Setaria italica
  Transcript Sequence Number=SeqID_23060
MVKEEMNARTKFVAIILVFAMVAHGLVSPGMGMLANNGAGETKGVKPTLGVGGGTTVDNHHAIPRDQYSNHGGDEGGSGSDSNN

SEQ ID NO: 89035 - protein, 104 aa, Setaria italica
  Transcript Sequence Number=SeqID_23061
  Gene Ontology: Mol. function=protein binding
FRLLGSLSKLEELDLSGTPVKILDLKKEIQVQNLQRIFLIGCKQLRSIIWPEKRMEQLRLVCIDTRQELVLTETSRDSLVCPEQEKYCHARVSVTDMRFFQSLV

SEQ ID NO: 89036 - protein, 91 aa, Setaria italica
  Transcript Sequence Number=SeqID_23062
  Gene Ontology: Mol. function=DNA binding; Cellular component=nucleus; Biological process=regulation of transcription, DNA-dependent
  Homolog annotation: Hit_ID=Q8S8I2; Match level="QueryCoverage=100%, HitCoverage=39%, E-value=6e-29, Identity=63%"; Hit description =Protein ULTRAPETALA 2
KERRFRLRSKEECRVYHDALAKINWTCTDLTTDRVTCDDEEERASRKVLRGCSRATSCSGCMKCVCFGCETCRFKDCDCQTCVDFYRNSKE

SEQ ID NO: 89037 - protein, 297 aa, Setaria italica
  misc_feature (200)..(200): Xaa can be any naturally occurring amino acid
  Transcript Sequence Number=SeqID_23063
  Gene Ontology: Mol. function=metalloendopeptidase activity; Cellular component=membrane; Biological process=proteolysis
  Homolog annotation: Hit_ID=B6T554; Match level="QueryCoverage=100%, HitCoverage=67%, E-value=1e-137, Identity=83%"; Hit description =Peptidase family M48 containing protein
  Pfam annotation: Domain name=PUA; Domain location=122-189; Score= -0.6; E_value=0.05; Accession=PF01472.12; Description=PUA domain
  Pfam annotation: Domain name=Peptidase_M48; Domain location=110-279; Score=129.9; E_value=8e-36; Accession=PF01435.10; Description =Peptidase family M48
  Pfam module annotation: Pfam domain module=PUA::Peptidase_M48; Domain location=122-189::110-279
KFGPKTLMRTAAVSFRVRLIASEIVRAVHRGLTGHQRYDASYGEDASYGYGDISDDQTIKNRDADATAAMLGGSPRKNARAAAAAQRDDEVLDDRWVTESRCRGKARGAQPQTGHLDGLNWEVIVVRDNIVNAMCLPGGKIVVFTGLLDKFRADAEVATVIGHEVGHAIARHAAEQITKNMWVAILQIVILQFIYMPDLXNAMSTLLLRLPFSRRMEIEADHIGLLLLGAAGYDPRVAPSVYEKLGKIGGDSALSNYLSTHPSSKKRAELLSRAHVMNEALELYREVSAGQGTEGFL

SEQ ID NO: 89038 - protein, 79 aa, Setaria italica
  Transcript Sequence Number=SeqID_23064
KIDAVAHNKEKTKLRMQIRWLEPQLEAHRGQLKEAVDEMRIMDAKYQEASTMLKKELSQSCREVLRLREMLKESQGTRN

SEQ ID NO: 89039 - protein, 736 aa, Setaria italica
  Transcript Sequence Number=SeqID_23065
  Gene Ontology: Mol. function=nucleotide binding; Biological process =defense response
  Homolog annotation: Hit_ID=B9GKX2; Match level="QueryCoverage=98%, HitCoverage=69%, E-value=0.0, Identity=50%"; Hit description=NBS resistance protein
DRKQIITKIAEAERVEISKDDIKEISKEILLYHSLLSVGELPPVAEVLLDRCGHHPLTVAVMGKALRKETRVENWEKAISNLSTYATCAPGPVSYVNEKDVESTLTIFGSFEYSLEAMPENSRRFFMVLAAISWEEPVPEACLESIWSALLQDSLFSLVVSKLVEGSLIIKLEDQLLYHMHDMVSLYLENKTNDAVRTLLSESISDCAALVAPWIFVFGKECVKGTAEQKMRSFFSLLEFMEIEILLGNTTQALMACRSISDFEASRLGFSKILAPRIPEIISVGSPDLIFAITKAITVIFFQADYANLAQSLETAGSIDKLIDLLGACKDTSTLANLSSVLAKISEHVDATIADEILSRIPIDRMTDLLSPENEHWHEIVFTTLASLTKVGKLKAVETMIESGVDKKLLVLLGNGSEISQHHSIVMLKTFCELGAPLQGCMGPGVLIHLPWHARISLERFVLFDQSVPPPPKPQQSFEVILHKILQKDNKDIIEAIQGLLPLAERANDSRVQDLLLGSNLFDRLALLLQRREVESNQVRTQTAFLVMKLACNGGEAYVHRFLELKIVHGLIDMMQCNIDELQDSAYYALHQIVFAKGGSLVLQRFLQLGTIEKLVSLLDRKSLKTKEIAMQLLVDIAVVGTKPCIERMLASQVVEKLVALEKAGEPFGGAVSRYIQGLNMCKNVQSAERAVMKQHILRKVRSAVRGHQLEASLVASVEASIAEGSKGASSSRKKK

SEQ ID NO: 89040 - protein, 153 aa, Setaria italica
  misc_feature (49)..(49): Xaa can be any naturally occurring amino acid
  misc_feature (85)..(85): Xaa can be any naturally occurring amino acid
  Transcript Sequence Number=SeqID_23066
  Gene Ontology: Mol. function=nucleotide binding; Biological process =defense response
  Homolog annotation: Hit_ID=Q5NBI3; Match level="QueryCoverage=89%, HitCoverage=16%, E-value=3e-17, Identity=39%"; Hit description=NBS -LRR disease resistance protein-like
  Subcellular localization annotation: CTP_CleavageSite=51; ConfidenceScore=5.03e-01
HSSPLNILASVDSPPLLISNFWPHGKLKNLPPWISLLQSVSRLTLRNTXLHAEAIKVLADLPNLLCLKFYHKSYTDDCIIFPHAXLLERLTLSFLREPKDGIFGLNNLKKLMEIEFFGKIIPSVVNKVVACVKTHPNPPRVIGDEWNRVTEYA

SEQ ID NO: 89041 - protein, 127 aa, Setaria italica
  misc_feature (57)..(57): Xaa can be any naturally occurring amino acid
  Transcript Sequence Number=SeqID_23067
  Gene Ontology: Mol. function=nucleotide binding; Biological process =defense response
  Homolog annotation: Hit_ID=Q2R1B5; Match level="QueryCoverage=84%, HitCoverage=12%, E-value=1e-09, Identity=34%"; Hit description=NB -ARC domain containing protein
RNVEVNWKAFVNSLGKLASSLRSLSIHILDEKEHSSPLNILASVDSPPLLISNFGLXGKLKNLPPWISLLQSVSRLTLRNTGLHAEAIKVLADLPNLLCLKFYHKSYTDDCIIFPHGKICKTQTILS

SEQ ID NO: 89042 - protein, 218 aa, Setaria italica
  Transcript Sequence Number=SeqID_23068
  Gene Ontology: Mol. function=inorganic phosphate transmembrane transporter activity; Cellular component=membrane; Biological process=phosphate transport
  Homolog annotation: Hit_ID=Q7YME0; Match level="QueryCoverage=92%, HitCoverage=35%, E-value=6e-92, Identity=86%"; Hit description =Phosphate transporter 2-1
  Pfam annotation: Domain name=PHO4; Domain location=6-218; Score=18.1; E_value=2.9e-12; Accession=PF01384.12; Description=Phosphate transporter family
  Subcellular localization annotation: CTP_CleavageSite=45; ConfidenceScore=5.20e-01
YSAPNPGQAAAAAAPIAVFTGVTAISFAAFPLSKVFPIALLQALSCGAIGAIIVTRVIQKQLGELLSSEAEKIASADKSNVQQVGFLSDIAGPTGAQLQIVYGVFGYLQVLSACFMSFAHGGNDVSNAIGPLAAALSILQGVASSAEIVIPTEVLAWGGFGIVAGLTMWGYRVIATIGKKITELTPTRGFAAEFAAASVVLFASKLGLPISATHTLVG

SEQ ID NO: 89043 - protein, 81 aa, Setaria italica
  Transcript Sequence Number=SeqID_23069
  Gene Ontology: Mol. function=transferase activity, transferring glycosyl groups; Biological process=metabolic process
  Homolog annotation: Hit_ID=C4MF59; Match level="QueryCoverage=98%, HitCoverage=17%, E-value=7e-23, Identity=67%"; Hit description=UDP -glycosyltransferase UGT710F3
ACAVVDGQCYAAMDAAGELGVPVLALRTDSAAALRNMLAIPRLRDAGYLPFKEEQLDEPAPGLEPLRVRDLIRVDGCDTDE

SEQ ID NO: 89044 - protein, 88 aa, Setaria italica
  Transcript Sequence Number=SeqID_23070
  Subcellular localization annotation: CTP_CleavageSite=17; ConfidenceScore=5.46e-01
VAVPPLPPSISSRCPPTASVASDPGYTRPLDVDQRQRKRGRLRRDRESSSSGAGFAAAANSPCSFTQRFLRARPAPVLPSLARLRQMR

SEQ ID NO: 89045 - protein, 218 aa, Setaria italica
  Transcript Sequence Number=SeqID_23071
SSVVTVASDMSVGSSTATAYRTGLILVDEENYTLVLTIHKHHADGFTGKFIVYFGGEKYQTEAYLLSRIVENDLAILIVQTDKRHEVVKFSCDPLSYEVIFTVCATSGTKLNDKANAPLVKELNGSLGIYKGTVGTPCCDALDACYEHIVGSEKYFQFGLSRHDDIITLKNIDAERHTAEIAVSAPVFRLNGEAAGLLFSEGGWTDSKIGAACKKYHL

SEQ ID NO: 89046 - protein, 262 aa, Setaria italica
  Transcript Sequence Number=SeqID_23072
  Gene Ontology: Mol. function=heat shock protein binding
  Homolog annotation: Hit_ID=Q259H7; Match level="QueryCoverage=99%, HitCoverage=22%, E-value=1e-110, Identity=75%"; Hit description =H0103C06.10 protein
GSGTTSVPLKRNPGSHPLRTLELWGLTGDVIGKLAYSALLGFVVFGTLKLFRFQLGHMKYANPSRESASMSSLNEASAPEGSFITSSVRKHFENLSKLLWLSDRVHSSSEERERYPVPKDTTAAVCKQKMDIQEAEALVKQWQDIYSEALGPDYQIDMLLEILDGSMLSKWQDLALSAKDQSCYWRFVLLNLDVVRAEIILDEVGAGEAAEIDAVLEEAAELVDDSQPKKPSYYSTYEVQYILRRQNDGSWKICEAAVQDLT

SEQ ID NO: 89047 - protein, 184 aa, Setaria italica
  Transcript Sequence Number=SeqID_23073
  Gene Ontology: Mol. function=sequence-specific DNA binding; Cellular component=integral to membrane; Biological process=lipid biosynthetic process
  Homolog annotation: Hit_ID=B6UA21; Match level="QueryCoverage=100%, HitCoverage=60%, E-value=2e-86, Identity=85%"; Hit description=ASC1 -like protein 2
  Pfam annotation: Domain name=TRAM_LAG1_CLN8; Domain location=25-184; Score=107.7; E_value=3.9e-29; Accession=PF03798.8; Description=TLC domain
RKLIFKNEDEKLDPTTYAGKRKIRKFKESAWKCVYFLSGELLALSVTYNEPWFTTTRNFWVGPGDQVWPDQKIKFKLKAVYMYVTGFYTYSIFALLIWETRRSDFGISMTHHVATVCLIALSYIFRFARVGSVVLAIHDATDVFLELGKISKYSGHELLADVSFLVFVSSWVLLRLIYYPFWIL

SEQ ID NO: 89048 - protein, 88 aa, Setaria italica
  Transcript Sequence Number=SeqID_23074
QVRSLLRCLHSPITPSSSSATRPAPSVDLDHPDPAKPSCPSGCLVPNPLLPVWPRRGSCGILGIYYIYPWWHGFFRELFRSLVTARIA

SEQ ID NO: 89049 - protein, 43 aa, Setaria italica
  Transcript Sequence Number=SeqID_23075
VVCCSVHDMGSSRSIWKFSIVMFCRTTHILTNQIKENLLNNWL

SEQ ID NO: 89050 - protein, 75 aa, Setaria italica
  Transcript Sequence Number=SeqID_23076
MDGGDTHAARGRRLSQAAPGGKDMSLQLSSRDTHGFRSIFCSRFDPFRSGCCRGATTEEEDEDAPADAADTDGTA

SEQ ID NO: 89051 - protein, 255 aa, Setaria italica
  Transcript Sequence Number=SeqID_23077
  Gene Ontology: Mol. function=protein serine/threonine kinase activity; Cellular component=plasma membrane; Biological process =protein amino acid phosphorylation
  Homolog annotation: Hit_ID=B6SVR9; Match level="QueryCoverage=100%, HitCoverage=42%, E-value=1e-145, Identity=94%"; Hit description =Protein kinase
  Pfam annotation: Domain name=Pkinase; Domain location=2-201; Score =122.1; E_value=1.8e-33; Accession=PF00069.17; Description=Protein kinase domain
  Pfam annotation: Domain name=Pkinase_Tyr; Domain location=1-201; Score=125.3; E_value=1.9e-34; Accession=PF07714.9; Description =Protein tyrosine kinase
  Pfam module annotation: Pfam domain module=Pkinase::Pkinase_Tyr; Domain location=2-201::1-201
SRLHHPNVIKLVGACSSPPVFCVITEFLSGGSLRAFLHKQDHKALPLDKIISISLDIAHGMAYIHSQGVVHRDVKPENIIFDEEFCAKIVDFGIACEEEYCDPLANDTGTFRWMAPEMMKHKAYGRKVDVYSFGLILWEMFSGSIPYEELNPFQAAFAVFDKNVRPAIPASCPAPVRLLIEQCWASHPEKRPDFCQIVQILEKFKTVLDRDGTLDNMPSSICQETHDHKNWLAHWVQKLKHSQPDLSGPPPPKLL

SEQ ID NO: 89052 - protein, 153 aa, Setaria italica
  Transcript Sequence Number=SeqID_23078
  Gene Ontology: Mol. function=cholestenol delta-isomerase activity; Cellular component=microtubule associated complex; Biological process=microtubule-based movement
  Homolog annotation: Hit_ID=B9R8I6; Match level="QueryCoverage=95%, HitCoverage=66%, E-value=8e-55, Identity=58%"; Hit description =Guanine nucleotide exchange factor P532, putative
  Pfam annotation: Domain name=RCC1; Domain location=36-85; Score=25.2; E_value=0.00028; Accession=PF00415.10; Description=Regulator of chromosome condensation (RCC1)
  Pfam annotation: Domain name=RCC1; Domain location=88-145; Score =10.8; E_value=0.055; Accession=PF00415.10; Description=Regulator of chromosome condensation (RCC1)
  Pfam module annotation: Pfam domain module=RCC1::RCC1; Domain location=36-85::88-145
GSNSSDWKPQLVPSLKNIRVIQVACGGYHSLALTDEGEVLSWGHGGHGQLGHPTLQNHRVPLSIKALSEERIVYIACGGSTSAAISEKGDLYMWGNARDCQLGVPGLPEVQPLPVKVNFLRDGDEDLGPPHVISVAIGASHAMCLVSTQQIEK

SEQ ID NO: 89053 - protein, 82 aa, Setaria italica
  Transcript Sequence Number=SeqID_23079
HCVSELREAGIRCRRRNTDRFWDIKFENGELQIPRILIHDGTKSLFLNLIAFEQCHITDIDAPGGNNITSYAIFMDNLINSA

SEQ ID NO: 89054 - protein, 81 aa, Setaria italica
  misc_feature (81)..(81): Xaa can be any naturally occurring amino acid
  Transcript Sequence Number=SeqID_23080
RFHDQDPASKIDSYVASSSRKGIFTPPTMLSVVKYISHISVTSLIMIIQQLYTSKLYRIVVSPCFRHDWKRMGLCIEYILX

SEQ ID NO: 89055 - protein, 250 aa, Setaria italica
  Transcript Sequence Number=SeqID_23081
  Gene Ontology: Mol. function=mannosyl-oligosaccharide 1,2-alpha -mannosidase activity; Cellular component=membrane; Biological process=protein amino acid N-linked glycosylation
  Homolog annotation: Hit_ID=B6T729; Match level="QueryCoverage=100%, HitCoverage=38%, E-value=1e-131, Identity=90%"; Hit description =Alpha-mannosidase/ calcium ion binding protein
  Pfam annotation: Domain name=Glyco_hydro_47; Domain location=1-239; Score=-55.2; E_value=3e-12; Accession=PF01532.12; Description =Glycosyl hydrolase family 47
FEMYTEAMRGVKHLLVRKTVPNELVFVGELPFGRNGDFSPKMDHLVCFLPGTLALGATKGITKKKALESNLLTDEDIENLQLAEDLAKTCVEMYFVTSTGLAPEIAYFHIEGNPEGGPDGGNKSNKYVNDIIIKPLDRHNLLRPETVESLFVLHRITEDPKYREWGWQIFQAFEKYTKVDSGGYSSLDDVTSLPPHRRDKMETFFLGETLKYLYLLFDESNTLPLDKYVFNTEAHPLPVMRSAEQASHSV

SEQ ID NO: 89056 - protein, 81 aa, Setaria italica
  Transcript Sequence Number=SeqID_23082
  Gene Ontology: Cellular component=extracellular region; Biological process=response to biotic stimulus
  Homolog annotation: Hit_ID=B9S8S2; Match level="QueryCoverage=100%, HitCoverage=47%, E-value=2e-10, Identity=42%"; Hit description=STS14 protein, putative
QGWASYRAAPGEVVASWVATGQYYTHANNTCAPGRQCGTYTQVVWRRTAEVGCAQATCATGATLTVCLYNPHGNVQGQSPY

SEQ ID NO: 89057 - protein, 105 aa, Setaria italica
  Transcript Sequence Number=SeqID_23083
  Homolog annotation: Hit_ID=B6TD02; Match level="QueryCoverage=67%, HitCoverage=24%, E-value=7e-33, Identity=92%"; Hit description=RNA -binding protein containing a PIN domain
  Subcellular localization annotation: CTP_CleavageSite=27; ConfidenceScore=5.58e-01
MVGSAAYSASATVVAMAKGNGNGKGVRGGASAGANKVTRPPRITSNVKQSLRILKFWKEYERRQTSGPQPATRYRKKKVMKEVLPDDTDIYEDPSSTLQLTNEGL

SEQ ID NO: 89058 - protein, 103 aa, Setaria italica
  Transcript Sequence Number=SeqID_23084
SRCSGGRGKNIFFVFGKRKGKASEGHSLERLDMALSELEFALERSAKLPITDVSLLCRRKVLKHAYVEGRNLLNKHKGRLQQEGQEIGRVCRGLNLSLSLIGL

SEQ ID NO: 89059 - protein, 92 aa, Setaria italica
  Transcript Sequence Number=SeqID_23085
MNFKLQDNKWLKKLYKLKQKWCSALNKGTFDGGVEYEPQCDSMSSIFNSVADKLTSLSAIAVTVDKQSEDWKGKRIGGGVGRYYYASACIIK

SEQ ID NO: 89060 - protein, 45 aa, Setaria italica
  Transcript Sequence Number=SeqID_23086
HTYVYMHIRMYLASHLINKLDPVYVVRKTTYVARYIDRSVTVFSL

SEQ ID NO: 89061 - protein, 169 aa, Setaria italica
  misc_feature (132)..(132): Xaa can be any naturally occurring amino acid
  Transcript Sequence Number=SeqID_23087
  Pfam annotation: Domain name=DUF740; Domain location=1-169; Score= -271.7; E_value=0.005; Accession=PF05340.4; Description=Protein of unknown function (DUF740)
AYAAVRDVRAMKDHIDLESSQSQQPKKPPPKDLKEIAGSFWLAASVFSKKWQKWRRKQKIKKQEAAGSKAAAAAMPPPEKPSKPSFLRRSRFHRGGAGSEFAGGRRSCDTDPRFSVDAGRMSVDDVGFSWDXPRASWDGYLFGAGTGIGLGRAPPPVSRPTSPSSPRWR

SEQ ID NO: 89062 - protein, 82 aa, Setaria italica
  Transcript Sequence Number=SeqID_23088
LLVAASLCAHVSAAASDTAVLAAERTRRKDPLDGLRYYTGGWNISNRHYLASAGFSAAPVFVIAALWFVAVAAAALVSCCCR

SEQ ID NO: 89063 - protein, 357 aa, Setaria italica
  misc_feature (89)..(89): Xaa can be any naturally occurring amino acid
  Transcript Sequence Number=SeqID_23089
  Gene Ontology: Mol. function=nucleic acid binding; Cellular component= nucleosome; Biological process=methylation-dependent chromatin silencing
  Homolog annotation: Hit_ID=Q8W121; Match level="QueryCoverage=99%, HitCoverage=45%, E-value=1e-172, Identity=82%"; Hit description =Chromatin complex subunit A101
  Pfam annotation: Domain name=Helicase_C; Domain location=185-264; Score=99.4; E_value=1.2e-26; Accession=PF00271.23; Description =Helicase conserved C-terminal domain
FILPDIFSSHQEFESWFDFSGKGNEEHQEETEEKRRVHVVSKLHAILRPFLLRRMKEDVEQMLPRKKEIIIYANMTEHQKQIQDHLVEXTFDDYLHEESDIVLKRPGIRSKLHNLLIQLRKNCNHPDLLESPFDSTTLYPPVEKILEQCGKFQLFVRLLNFLLSQKHKVLIFSQWTKVLDIIEYYLDSKGLDVCRIDGSVKLEERRRQIAEFNDLNSSMDIFLLSTRAGGLGINLTSADTCILYDSDWNPQMDLQAMDRCHRIGQTRPVHVYRLATSHSVEGRIIKRAFGKLKLEHVVIGKGQFEQDRSKPNALDEAELLALLRDEQADEDKLIQTDITDEDLLKLMDRSDLCGPPG

SEQ ID NO: 89064 - protein, 354 aa, Setaria italica
  misc_feature (47)..(47): Xaa can be any naturally occurring amino acid
  Transcript Sequence Number=SeqID_23090
  Gene Ontology: Mol. function=polynucleotide adenylyltransferase activity; Cellular component=nucleus; Biological process=RNA 3'-end processing
  Homolog annotation: Hit_ID=B6UBW8; Match level="QueryCoverage=97%, HitCoverage=64%, E-value=1e-178, Identity=87%"; Hit description=Poly
  Pfam annotation: Domain name=PAP_RNA-bind; Domain location=207-337; Score=34.6; E_value=7.3e-10; Accession=PF04926.7; Description =Poly(A) polymerase predicted RNA binding domain
  Pfam annotation: Domain name=PAP_central; Domain location=2-206; Score=99.5; E_value=1.1e-26; Accession=PF04928.9; Description =Poly(A) polymerase central domain
  Pfam module annotation: Pfam domain module=PAP_RNA-bind::PAP_central; Domain location=207-337::2-206
GLPNLVIVVFKFNGILVDFPYVQLPVINAAEAIHAFDPRVLENVDGXSRKCLSGVRVNRQIIQLVPNMKKFQYLLRCLKLWARKRGLHCHLLGFFAGIHLAILAAYVCRRHPNASINSLLSLFFEIFVHWPWPLPVSLLEPPALCRGADGCSLMPIMLPCIPQEFCSSSTTESTFSKIKEELRRGYALTKDTRTTDFDWSWLFAPFPYGARYKCFLRIVLSAPMAEELRDWVGWVKSRFRNLILKLESLGVFCDPDPSEQVDHTINEPNVVFFWGLMYRRSIQICSSSLKEDFMKSVFNNIYGKEKCAHSDITMSIVGPPQLPKSVFDHSVYSEKLPPHMMAHQLMKQSYNAVS

SEQ ID NO: 89065 - protein, 43 aa, Setaria italica
  Transcript Sequence Number=SeqID_23091
SINYRVCFFKKRKCSAQRLSKTVGIIGPAKSTKPGDTSPLSPP

SEQ ID NO: 89066 - protein, 83 aa, Setaria italica
  Transcript Sequence Number=SeqID_23092
  Gene Ontology: Mol. function=magnesium ion binding; Biological process=metabolic process
  Homolog annotation: Hit_ID=Q41771; Match level="QueryCoverage=93%, HitCoverage=9%, E-value=2e-27, Identity=74%"; Hit description =Kaurene synthase A
MIHDRQTYLLLVQSIEICAGRIGEAVSVINNKESDRFIQLACTISDSLNHKVLLFQDTEKNEVTIDCIDKEIQLNMQEELKEN

SEQ ID NO: 89067 - protein, 171 aa, Setaria italica
  Transcript Sequence Number=SeqID_23093
  Gene Ontology: Mol. function=phosphoenolpyruvate carboxylase activity; Cellular component=cytoplasm; Biological process=carbon utilization by fixation of carbon dioxide
  Homolog annotation: Hit_ID=Q8S2Z8; Match level="QueryCoverage=100%, HitCoverage=17%, E-value=4e-94, Identity=100%"; Hit description =Putative C4 phosphoenolpyruvate carboxylase
MASKPVEKHHSIDAQLRLLAPGKVSEDDKLVEYDALLIDRFLDIFQDLHGPNIREFVQECYEVAAEYERDRDAAKLSELGSRLTKLSPNDAIVVASSFSNMLNLTNLAEEVQLAHLRRNKLKRGDFADEGFAATESDIEETLKRLVTELGKSKEEVFDALKNQTVDLVFTA

SEQ ID NO: 89068 - protein, 60 aa, Setaria italica
  Transcript Sequence Number=SeqID_23094
YTMQLVCLFSPTKLHYSLYVLNLFLRIRNNIALIVQAHHLWNTTSRMMELIQICLGSNNL

SEQ ID NO: 89069 - protein, 98 aa, Setaria italica
  Transcript Sequence Number=SeqID_23095
WYKLEAACAQTFFTCWLRVYTDLNVKSGFQCCIILPQSLASDCFTVISVPTSSKYHHHCRLLDQLAAVQTSASLLLGELRVTHRAHLTSPRLKVSCPF

SEQ ID NO: 89070 - protein, 122 aa, Setaria italica
  Transcript Sequence Number=SeqID_23096
  Homolog annotation: Hit_ID=B6T2L1; Match level="QueryCoverage=77%, HitCoverage=32%, E-value=3e-37, Identity=76%"; Hit description =Membrane protein
FINDLLQPVFSVCSDLFSICSDLSKNNSGFYVLAKVEEAADKPIYKWTHQIVSGHTLKHLCAAMVPVFLALMLAKRTIEPERVSLLQKWKIKLITVRESRSEDGKTIGVDCNYAVVSTTPEQ

SEQ ID NO: 89071 - protein, 295 aa, Setaria italica
  Transcript Sequence Number=SeqID_23097
  Homolog annotation: Hit_ID=B6T2L1; Match level="QueryCoverage=94%, HitCoverage=94%, E-value=1e-132, Identity=81%"; Hit description =Membrane protein
  Pfam annotation: Domain name=aPHC; Domain location=34-275; Score= -141.5; E_value=0.092; Accession=PF05875.4; Description=Alkaline phytoceramidase (aPHC)
MDGSRRKKWVAWAVAAAIFVVLMLVTPAIPQNQEYHDFADQRTLFLGIPNTLNVISNIPFFFVGVTGLILCHYKDYFRLSSQGELWSWSLFFAGVTAVAFGSSYYHLNPNDATLVWDRLPMTIAFTSIMAIFIIERVDDRAGAKSLAPLVIAGALSILYWSYFDDLRPYAIVQFVPCIAIPVMAIVIPPMYTHSSYWLWAAGFYVLAKVEEAADKPIYKWTHQIVSGHTLKHLCAAMVPVFLALMLAKRTIEPERVSLLQKWKIKLITVRESRSEDGKTIGVDCNYAVVSTTPEQ

SEQ ID NO: 89072 - protein, 150 aa, Setaria italica
  misc_feature (70)..(70): Xaa can be any naturally occurring amino acid
  Transcript Sequence Number=SeqID_23098
  Homolog annotation: Hit_ID=Q2R928; Match level="QueryCoverage=94%, HitCoverage=34%, E-value=5e-09, Identity=30%"; Hit description=F-box domain containing protein, expressed
ALSAHSGEVLLMRESKLCPDFKNLKTLSLGEWCITPDFDILARVLQSSPNLENLFVHLDMVNKSRVDFDXRASLFVSTNLKKVEITCCKHNKMVDILAELFRVNIVTNKKVFVHHTACTCDVNRGTGSQAKRKAQTEAKKRPVKQIRPGN

SEQ ID NO: 89073 - protein, 164 aa, Setaria italica
  misc_feature (121)..(121): Xaa can be any naturally occurring amino acid
  Transcript Sequence Number=SeqID_23099
  Homolog annotation: Hit_ID=B9SRP7; Match level="QueryCoverage=67%, HitCoverage=15%, E-value=7e-15, Identity=41%"; Hit description =Protein CPR-5, putative
  Subcellular localization annotation: CTP_CleavageSite=53; ConfidenceScore=5.20e-01
WSASSASSYGVSESRFRLNKGVHLRRRRRRLADRGSNKGSAGDGVVQELALPLGMSFAAVLAQVLNRCSGSGGSLQPHVLSKMCTSAVKESLTNVRAGQFLFTSPFPLPVSFLYLTSVVLXIYGDRFEIFIRNFEKSFGSTLRTLHLISETPAYEQDMPQCFTR

SEQ ID NO: 89074 - protein, 323 aa, Setaria italica
  Transcript Sequence Number=SeqID_23100
  Gene Ontology: Cellular component=integral to membrane
  Homolog annotation: Hit_ID=B9SRP7; Match level="QueryCoverage=81%, HitCoverage=50%, E-value=1e-51, Identity=41%"; Hit description =Protein CPR-5, putative
  Subcellular localization annotation: CTP_CleavageSite=75; ConfidenceScore=5.53e-01
MDGGAHAAAVSGGSSEAGGASSSSASSASSYGVSESRFRLNKGVHLRRRRRRLADRGSNKGSAGDGVVQELALPLGMSFAAVLAQVLNRCSGSGGSLQPHVLSKMCTSAVKESLTNIYGDRFEIFIRNFEKSFGSTLRTLHLISETPAYEQDMPQCFYKGGNSVPEIKLSGGDSQSWIHDVQKDTPLSSMDNQIILHAGVNHQLAHLTHTRSAPGIDQCVLSVFERSVNEQARSNELKELDIGLKLRELELRKSQLALSSDANELKKVEIRLGFQKVSFKVEKLETQMEDTRQAELLRKLIDMLLTAVVRMSVCFGYGTYIYS

SEQ ID NO: 89075 - protein, 115 aa, Setaria italica
  misc_feature (107)..(107): Xaa can be any naturally occurring amino acid
  Transcript Sequence Number=SeqID_23101
  Gene Ontology: Mol. function=acid-amino acid ligase activity; Cellular component=intracellular; Biological process=ubiquitin -dependent protein catabolic process
  Homolog annotation: Hit_ID=B9SXV1; Match level="QueryCoverage=95%, HitCoverage=5%, E-value=3e-21, Identity=49%"; Hit description=Hect ubiquitin-protein ligase, putative
NSIRDIASSESNNWISYMEFQAIACRRKYAESNLTRDCQIMSDLTYRGCRIEDLAIDFALPGYPDYMLSSGSSSDSLNVENLEEYVHHVVEATVKSGIARQMEAFKXSGFNEVFP

SEQ ID NO: 89076 - protein, 607 aa, Setaria italica
  Transcript Sequence Number=SeqID_23102
  Gene Ontology: Mol. function=acid-amino acid ligase activity; Cellular component=intracellular; Biological process=ubiquitin -dependent protein catabolic process
  Homolog annotation: Hit_ID=B9SGR6; Match level="QueryCoverage=99%, HitCoverage=38%, E-value=0.0, Identity=54%"; Hit description =Ubiquitin protein ligase E3a, putative
  Pfam annotation: Domain name=HECT; Domain location=261-607; Score =332.6; E_value=7.9e-97; Accession=PF00632.17; Description=HECT -domain (ubiquitin-transferase)
IYLGNNCTSFWRNVHDIIFRTAANPEANRTAINPEADSLKGTTAISSENDSTTGFKWKMLPFFSSMLLGKLPCKLDRSNPLYDILFMLHILEGLNRYSFHLVSDERTHSFAHGKITNLDDLKAVVFSIPHQEFVSAKLTDKLEQQMHDPLVSRSSCLPLWCTELMSACPFLFSFEARWKYFQLTAFGSLKNHHGHIMDAIVNTVTERGPSHSRKKFKVDRDDILVSAAKMMKSYAKSNALLEVEYKEEVGTGLGPTMEFYTLISHEFQKSGLGMWRGELPCEAGTDDAHVSRFVVAPKGLFPRPWSTSADCASFQEVSKQFHLLGQVVAKAIKDGRILDIPFSKAFYKLILGQELNIYDIQLFDSELAISLMEFQAIACRRKYAESNLTRDCQIMSDLTYRGCRIEDLAIDFALPGYPDYMLSSGSSSDSLNVENLEEYVHHVVEATVKSGIARQMEAFKSGFNEVFPLNKLEVFSEDELERLLCGEQDTWDFGKLVDHIKFDHGYTSSSPPVINLLEIVQEFGSHQRRAFLQFITGSPRLPPGGLAALNPKFTVVRKHNSNDADNDLPSVMTCANYLKLPPYSSKEKMREKLIYAITEGQGSFHLS

SEQ ID NO: 89077 - protein, 66 aa, Setaria italica
  Transcript Sequence Number=SeqID_23103
MEGLIPFIYRAIKERRTRSYSRCSSTGSAHAGRFGARVEDSEQWEAAAPRGGGGGKVSAESGMAHR

SEQ ID NO: 89078 - protein, 74 aa, Setaria italica
  Transcript Sequence Number=SeqID_23104
  Gene Ontology: Biological process=response to biotic stimulus
  Homolog annotation: Hit_ID=Q6H5Z4; Match level="QueryCoverage=93%, HitCoverage=32%, E-value=8e-15, Identity=65%"; Hit description=Bet v I allergen-like
HRLRNYRSVTSVTEFQRQHPAGGPPYCVVVESYVVDVPEGNTEEDTRMFTDTVVRLNLQRLAAVAEESAGGGRS

SEQ ID NO: 89079 - protein, 201 aa, Setaria italica
  Transcript Sequence Number=SeqID_23105
  Gene Ontology: Biological process=response to biotic stimulus
  Homolog annotation: Hit_ID=Q6H5Z4; Match level="QueryCoverage=91%, HitCoverage=94%, E-value=1e-77, Identity=78%"; Hit description=Bet v I allergen-like
  Pfam annotation: Domain name=Bet_v_I; Domain location=37-180; Score= -19.3; E_value=0.00011; Accession=PF00407.11; Description =Pathogenesis-related protein Bet v I family
  Pfam annotation: Domain name=Polyketide_cyc; Domain location=47-179; Score=12.9; E_value=0.0035; Accession=PF03364.12; Description =Streptomyces cyclasedehydrase
  Pfam annotation: Domain name=Polyketide_cyc2; Domain location=38-183; Score=42.8; E_value=1.4e-09; Accession=PF10604.1; Description =Polyketide cyclase  dehydrase and li
  Pfam module annotation: Pfam domain module=Bet_v_I::Polyketide _cyc::Polyketide_cyc2; Domain location=37-180::47-179::38-183
MEPHMEGALRQGLSEAEQRELESVVRAHHTFPGRAPGTCTSLVTQRVDAPLAAVWPIVRGFASPQRYKHFIKSCDLRSGDGATVGSVREVTVVSGLPASTSTERLEILDDDRHILSFRVVGGDHRLRNYRSVTSVTEFQPGPYCVVVESYVVDVPEGNTEEDTRMFTDTVVKLNLQKLAAIATSSSSSPRPSGGGGGGTDH

SEQ ID NO: 89080 - protein, 60 aa, Setaria italica
  Transcript Sequence Number=SeqID_23106
ISYQLKIILETKSKGLEYKCLPLAGRSEESFCFSILTNFTSLCICNLMLLKRVAASYCGK

SEQ ID NO: 89081 - protein, 87 aa, Setaria italica
  Transcript Sequence Number=SeqID_23107
  Subcellular localization annotation: CTP_CleavageSite=32; ConfidenceScore=5.18e-01
MGSRRHFLDDPFFPFPPSSCPFLDYDSPSPFSTSPFPELDLFLPPAPPLNPFPAPSPYPFLLRDLTDRVAALELAVAARRPEPTTRE

SEQ ID NO: 89082 - protein, 70 aa, Setaria italica
  Transcript Sequence Number=SeqID_23108
LKRKRENHYDHEPKVIRVHQHMLGRTQVRVHISNGTAPPWYSATNLLKDPSSKEYSYQSPAVSSVMESPR

SEQ ID NO: 89083 - protein, 105 aa, Setaria italica
  misc_feature (93)..(93): Xaa can be any naturally occurring amino acid
  Transcript Sequence Number=SeqID_23109
  Gene Ontology: Mol. function=DNA binding; Cellular component=plasma membrane
  Homolog annotation: Hit_ID=B9RY40; Match level="QueryCoverage=71%, HitCoverage=14%, E-value=2e-17, Identity=57%"; Hit description=DNA binding protein, putative
  Pfam annotation: Domain name=Remorin_C; Domain location=16-105; Score= 53.2; E_value=1e-12; Accession=PF03763.5; Description=Remorin, C -terminal region
EESFLHIFRSTTTDKVVDIDREARATDWQEAEKAKYLARFQREEVKIQAWENHQKAKIEAEMKRIEAKIERKRAREQDRLTDKLAAVSQPSRXARREAAEARRNQ

SEQ ID NO: 89084 - protein, 180 aa, Setaria italica
  Transcript Sequence Number=SeqID_23110
  Gene Ontology: Mol. function=protein dimerization activity
  Pfam annotation: Domain name=DUF295; Domain location=81-141; Score =63.8; E_value=6.5e-16; Accession=PF03478.10; Description=Protein of unknown function (DUF295)
MSSFGPKVNKLCRCERLVHLVREVLMVSCDGELLLVVLRGATGSRGGRQPPSSPSRVSSACSSFAEVYKLDWTPKGTPKIGERVTDLGEYSLFLGLSESFALSAKEFPAVRRNHIYCVARRWIYYQNPEHKLSDWAFVFDLGSDTLKGIPYPEELRDDGAKWWPYSWLCLRSPLTKKQQN

SEQ ID NO: 89085 - protein, 72 aa, Setaria italica
  Transcript Sequence Number=SeqID_23111
GDGDREAEAPRSYIAAAGAEAMGMLCSHLSSPSSLLSLSTHTQHKLSAFLLISGWASPSLLYSSISLPPFLC

SEQ ID NO: 89086 - protein, 46 aa, Setaria italica
  Transcript Sequence Number=SeqID_23112
GEDVIEGNCLFSLVDYIMPQGLSQLCPLPHLSSTAGKQRIPSDRIK

SEQ ID NO: 89087 - protein, 101 aa, Setaria italica
  Transcript Sequence Number=SeqID_23113
  Gene Ontology: Mol. function=DNA binding; Cellular component =intracellular; Biological process=translation
  Homolog annotation: Hit_ID=B9S0I6; Match level="QueryCoverage=67%, HitCoverage=9%, E-value=3e-13, Identity=53%"; Hit description=DNA binding protein, putative
TSADNPCNDDGKDREEFCAKSPPRNDDTNDLKDQSLADIYWPDSLGPLDLDIPSSRYQADDLIIGDSQNSWNRMMANSLDAFRNLSFFSSVDKNDSIPSIM

SEQ ID NO: 89088 - protein, 52 aa, Setaria italica
  Transcript Sequence Number=SeqID_23114
HCRKGAGQERSYQALVGVVFSESDSSAAPRPMCICVCTTSCCLCILRCTSHQ

SEQ ID NO: 89089 - protein, 231 aa, Setaria italica
  Transcript Sequence Number=SeqID_23115
  Gene Ontology: Mol. function=nucleotide binding; Cellular component =ribonucleoprotein complex
  Homolog annotation: Hit_ID=B6T8M0; Match level="QueryCoverage=98%, HitCoverage=98%, E-value=7e-73, Identity=67%"; Hit description=RNA binding protein
  Pfam annotation: Domain name=Ribosomal_L23; Domain location=7-99; Score=33.7; E_value=7.6e-07; Accession=PF00276.12; Description =Ribosomal protein L23
  Subcellular localization annotation: CTP_CleavageSite=38; ConfidenceScore=5.14e-01
MGSRLGRRVIHFANLPLKLMLPPAPLSSVQEFAVRTVPSASKVDIRRCLESMYGFSVAEVRTLNMEGKKLRRGPYLAAKPDYKKAYVTLRAPLTVSPDLFPIGVILGERERKASAAAARRKAVEGAEAEGQREGKGKHWMEDDREGFSRAGCGKVVYGNPGRLDQRRRGRAKAKEGAGEEGSKFPWSGMQLATEKPRRVRHSPPKKKVGITLKQKSRKVSLQRRSKKKLEA

SEQ ID NO: 89090 - protein, 83 aa, Setaria italica
  Transcript Sequence Number=SeqID_23116
FLYETKQSHSMPTINITIPKYINPRTKISHHFKYKRHIGSMSVFGYMPQHARPNIGRAQLFWPMLGSVTKFGMQKNFGRDLRI

SEQ ID NO: 89091 - protein, 100 aa, Setaria italica
  Transcript Sequence Number=SeqID_23117
  Gene Ontology: Mol. function=zinc ion binding; Cellular component =nucleus; Biological process=regulation of transcription
  Homolog annotation: Hit_ID=A5HWF5; Match level="QueryCoverage=53%, HitCoverage=14%, E-value=4e-27, Identity=98%"; Hit description=Dof zinc finger protein 6
  Pfam annotation: Domain name=zf-Dof; Domain location=9-71; Score =138.9; E_value=1.6e-38; Accession=PF02701.7; Description=Dof domain, zinc finger
GAAGAPLPEPGAALRCPRCDSTNTKFCYYNNYSLSQPRHFCKACKRYWTRGGTLRNVPVGGGCRKNKRSRSSSGAAGAAGRSGSSAAAAAAAAATSSSAA

SEQ ID NO: 89092 - protein, 301 aa, Setaria italica
  misc_feature (257)..(257): Xaa can be any naturally occurring amino acid
  Transcript Sequence Number=SeqID_23118
  Gene Ontology: Mol. function=pyridoxal phosphate binding; Cellular component=cytoplasm; Biological process=cysteine biosynthetic process from serine
  Homolog annotation: Hit_ID=B6TEX7; Match level="QueryCoverage=92%, HitCoverage=79%, E-value=1e-108, Identity=71%"; Hit description =Cysteine synthase
  Pfam annotation: Domain name=PALP; Domain location=41-299; Score =238.5; E_value=1.7e-68; Accession=PF00291.17; Description=Pyridoxal -phosphate dependent enzyme
RRAASTETEEVGRRGIPSLLKPSSSSSDGVAGREEHIASDVTQLIGWTPLIELKRIASKDGVDARIVGKMEAYQPLCSVKDRCALRMIEDAEERGLISPGVTTLIEPTSGNMGLGLVLIAIHKGYRFIAVVPAKYSLDKQILLRYMGAELYLTDPALGFQGMWDKVEQLQKELPNVHVLDQTTNKANSEAHFRLTGPEIWKDTAGKVDIFVAASGSGGTVSGVGKYLKMQNPGVQIVCVEPVESPVISGGAPGKHKXQGIGPGFLPEVLDMSAIDETVTVTTEEAMNALKCDVFTLVNSFV

SEQ ID NO: 89093 - protein, 103 aa, Setaria italica
  misc_feature (26)..(26): Xaa can be any naturally occurring amino acid
  Transcript Sequence Number=SeqID_23119
  Subcellular localization annotation: CTP_CleavageSite=54; ConfidenceScore=5.59e-01
RPPLLTTVSAATTTTVAAKARRTSRXGDRPAAEAPSSFSSSSFYADTTTDDGPSSMESTPSLSALLRQLGDLERSVRFLHAGTGAAPGHGAEAGSGAGAKQNG

SEQ ID NO: 89094 - protein, 116 aa, Setaria italica
  misc_feature (40)..(40): Xaa can be any naturally occurring amino acid
  Transcript Sequence Number=SeqID_23120
  Homolog annotation: Hit_ID=B6TNE4; Match level="QueryCoverage=84%, HitCoverage=57%, E-value=1e-16, Identity=59%"; Hit description=GDU1
ACSYWKLSGYLEGGAGRGDEDGSGADGAKPAASDLPPPIXGRKKILVIMAGDVKPTYLATPMSSRASSFGDRSNKGDDEAEKKVQEVAMASIKDAEQNGEHSESRREREEHHIPEV

SEQ ID NO: 89095 - protein, 84 aa, Setaria italica
  Transcript Sequence Number=SeqID_23121
  Gene Ontology: Mol. function=nucleotide binding; Biological process =defense response
  Homolog annotation: Hit_ID=Q2R4S9; Match level="QueryCoverage=97%, HitCoverage=8%, E-value=1e-21, Identity=61%"; Hit description=NB-ARC domain containing protein
RTEYWNTIKNAFPKDMGVSSRVIVTTAIHSIANACSADGGHVYVMRTLNDKQSRELFFKQTSLEDYAPAEQVMKKCDGLPLLLL

SEQ ID NO: 89096 - protein, 207 aa, Setaria italica
  misc_feature (150)..(150): Xaa can be any naturally occurring amino acid
  misc_feature (163)..(163): Xaa can be any naturally occurring amino acid
  misc_feature (202)..(202): Xaa can be any naturally occurring amino acid
  Transcript Sequence Number=SeqID_23122
  Homolog annotation: Hit_ID=B6SL47; Match level="QueryCoverage=98%, HitCoverage=38%, E-value=1e-92, Identity=84%"; Hit description =Carboxyl-terminal proteinase
  Pfam annotation: Domain name=DUF239; Domain location=86-207; Score =129.5; E_value=1e-35; Accession=PF03080.7; Description=Arabidopsis proteins of unknown function
VTYRGGAWQTWHHGGHCPRGTVAIRRTTAEDMLRARSVARFGRKKKKNSKRSVDAARAANAPDVVSGNGHEHAIAYTAPSSQQQPVYGAKATINVWDPAIQSWERLKLSQLWILSGSFNGSDLNSIEAGWQVSPELYGDSRPRLFTYWTXSDAYEATGCYNAXCPGFVQTSSRIAIGASISPVSSPGGAQYDMTLLVWKDPXLGNWW

SEQ ID NO: 89097 - protein, 241 aa, Setaria italica
  Transcript Sequence Number=SeqID_23123
  Homolog annotation: Hit_ID=B6SL47; Match level="QueryCoverage=66%, HitCoverage=28%, E-value=3e-40, Identity=56%"; Hit description =Carboxyl-terminal proteinase
MQQHTADSSRKKKRRRRNWLLLSTRSAAQEEGQGEGQCCCSQSQSQSQGHKLMIMSPLLVLALLILAAPPLAFAASPRRMARIQSHLDRINKPAVRSIRSADGDTIDCVAAQSQHGLEHPLLEGHAIQTEPPEVPRRGAFRFPAAAAAAAGGGATNLTKTTTNSNNNNERLGAWQTWHHGGHCPRGTVAIRLTTAEDMLRARSVARFGRKKKKNSKRSVDAARAANAPDVVSGNGHESGQP

SEQ ID NO: 89098 - protein, 37 aa, Setaria italica
  Transcript Sequence Number=SeqID_23124
TSSIWGRPPGTRSGTTTLTTMSGWPSYMSSTQLSGPR

SEQ ID NO: 89099 - protein, 70 aa, Setaria italica
  Transcript Sequence Number=SeqID_23125
PVIDPLVSLDVIGFIEGKGTIFISSDVGVFAVMPKSGQVKKVEERGSYIYCTIAPYVSFYTPGSSPFAYL

SEQ ID NO: 89100 - protein, 138 aa, Setaria italica
  misc_feature (16)..(16): Xaa can be any naturally occurring amino acid
  misc_feature (53)..(53): Xaa can be any naturally occurring amino acid
  misc_feature (69)..(69): Xaa can be any naturally occurring amino acid
  Transcript Sequence Number=SeqID_23126
  Gene Ontology: Mol. function=binding; Cellular component=chloroplast; Biological process=nuclear mRNA splicing, via spliceosome
  Homolog annotation: Hit_ID=Q9FMF9; Match level="QueryCoverage=100%, HitCoverage=10%, E-value=3e-59, Identity=81%"; Hit description =Nuclear protein-like
LLEDALMDRDLVHRQXTARLTRLVKATMALGVAGLGCEDALVHLLNYVWPNIXFETSPHVINAVMEAIXGMRVALGAAVILNYCLQGLFLAARKVREVYWKIYNSLYIGAQDALVAAYPALEDDGDNIFSRPELAMFV

SEQ ID NO: 89101 - protein, 105 aa, Setaria italica
  Transcript Sequence Number=SeqID_23127
  Subcellular localization annotation: CTP_CleavageSite=12; ConfidenceScore=5.21e-01
HASQEVTPSNLSTSSNSNTTHSSSFICIWMTTHGHVHPACQCVCISDPSFAERHTGKRRCRKGTGYRPNTDCYCTAQMQTRLSCQICCHQVSRYLSQSTEQQKMS

SEQ ID NO: 89102 - protein, 96 aa, Setaria italica
  Transcript Sequence Number=SeqID_23128
FLNIATPSEGTISSSFICIWMTTHGHVHPACQCVCISDPSFAERHTGKRRCRKGTGYRPNTDCYCTAQMQTRLSCQICCHQVSRYLSQSTEQQKMS

SEQ ID NO: 89103 - protein, 824 aa, Setaria italica
  Transcript Sequence Number=SeqID_23129
  Gene Ontology: Mol. function=binding; Cellular component=chloroplast; Biological process=nuclear mRNA splicing, via spliceosome
  Homolog annotation: Hit_ID=B9SIK7; Match level="QueryCoverage=98%, HitCoverage=66%, E-value=0.0, Identity=94%"; Hit description =Splicing factor 3B subunit, putative
  Pfam annotation: Domain name=HEAT; Domain location=158-194; Score =4.9; E_value=12; Accession=PF02985.14; Description=HEAT repeat
  Pfam annotation: Domain name=HEAT; Domain location=199-235; Score =26.0; E_value=0.00015; Accession=PF02985.14; Description=HEAT repeat
  Pfam annotation: Domain name=HEAT; Domain location=241-276; Score =5.0; E_value=12; Accession=PF02985.14; Description=HEAT repeat
  Pfam annotation: Domain name=HEAT; Domain location=282-318; Score =4.5; E_value=14; Accession=PF02985.14; Description=HEAT repeat
  Pfam annotation: Domain name=HEAT; Domain location=363-398; Score =4.0; E_value=16; Accession=PF02985.14; Description=HEAT repeat
  Pfam annotation: Domain name=HEAT; Domain location=446-482; Score =20.6; E_value=0.0064; Accession=PF02985.14; Description=HEAT repeat
  Pfam annotation: Domain name=HEAT; Domain location=488-524; Score =2.5; E_value=24; Accession=PF02985.14; Description=HEAT repeat
  Pfam annotation: Domain name=HEAT; Domain location=531-566; Score =12.3; E_value=1.5; Accession=PF02985.14; Description=HEAT repeat
  Pfam annotation: Domain name=HEAT; Domain location=577-608; Score =0.6; E_value=41; Accession=PF02985.14; Description=HEAT repeat
  Pfam annotation: Domain name=HEAT; Domain location=684-719; Score =14.7; E_value=0.39; Accession=PF02985.14; Description=HEAT repeat
  Pfam annotation: Domain name=HEAT; Domain location=87-123; Score=5.2; E_value=11; Accession=PF02985.14; Description=HEAT repeat
  Pfam module annotation: Pfam domain module=HEAT::HEAT::HEAT::HEAT::HEA T::HEAT::HEAT::HEAT::HEAT::HEAT::HEAT; Domain location=158-194::199 -235::241-276::282-318::363-398::446-482::488-524::531-566::577 -608::684-719::87-123
EEEEQLSPEEQKERKIMKLLLKVKNGTPPQRKTALRQLTDKAREFGAGPLFNKILPLLMQPTLEDQERHLLVKVIDRVLYKLDELVRPFVHKILVVIEPLLIDEDYYARVEGREIISNLSKAAGLATMIAAMRPDIDNIDEYVRNTTARAFSVVASALGIPALLPFLKAVCQSKKSWQARHTGIKIVQQIAILMGCAVLPHLKSLVEIIEHGLSDENQKVRTITALSLAALAEAAAPYGIESFDTVLKPLWKGIRSHRGKVLAAFLKAIGFIIPLMDALYASYYTKEVMQVLIREFQSPDEEMKKIVLKVVKQCVSTEGVEADYIRNDILPDFFKHFWVRRMALDRRNYKQLVETTVEMANKVGVADIVGRVVEDLKDESEPYRRMVMETIEKVVANLGASDIDARLEELLIDGILYAFQEQTSDDANVMLNGFGAVVNALGQRVKPYLPQICGTIKWRLNNKSAKVRQQAADLISRIAIVMKQCQEEQLMGHLGVVLYEYLGEEYPEVLGSILGALKAIVNVIGMTKMTPPIKDLLPRLTPILKNRHEKVQENCIDLVGRIADRGAEFVPAREWMRICFELLEMLKAHKKGIRRATVNTFGYIAKAIGPQDVLATLLNNLKVQERQNRVCTTVAIAIVAETCSPFTVLPALMNEYRVPELNVQNGVLKSLSFLFEYIGEMGKDYIYAVTPLLEDALMDRDLVHRQTAASAVKHMALGVAGLGCEDALVHLLNYVWPNIFETSPHVINAVMEAIEGMRVALGAAVILNYCLQGLFHPARKVREVYWKIYNSLYIGAQDALVAAYPALEDDGDNIFSRPELAMFV

SEQ ID NO: 89104 - protein, 112 aa, Setaria italica
  Transcript Sequence Number=SeqID_23130
  Subcellular localization annotation: CTP_CleavageSite=61; ConfidenceScore=5.84e-01
LPATSGRAAAPSATSSPGPLPAVSTHQACPPLVFPSSTAAPSFRYRLRGPPFAASWPSPLRRAAGAPSPSPYPGLAFQTLRGGGLRLLAAARCVRNNSSGGARVMRTGRTSG

SEQ ID NO: 89105 - protein, 173 aa, Setaria italica
  Transcript Sequence Number=SeqID_23131
  Gene Ontology: Cellular component=viral envelope
  Homolog annotation: Hit_ID=B6TN26; Match level="QueryCoverage=100%, HitCoverage=46%, E-value=2e-66, Identity=73%"; Hit description=Outer envelope protein
VFANKVSCLLAGGLAKLRLSFQSDPQGQWQGGGEEGDPLQHLFARPFLGLITKHFSVLYDVEERNALLSGDAALPGGAVRLRGSHDVKLQKGEISVITRLGDPLYKLELSSLVPYGGLPRATFHFPIGQVSVEERRNEEEEKLLSVYGIAKSDFLDGVLTAQYDGNNVNLRYC

SEQ ID NO: 89106 - protein, 89 aa, Setaria italica
  Transcript Sequence Number=SeqID_23132
  Pfam annotation: Domain name=EGF_CA; Domain location=12-55; Score =26.1; E_value=0.00014; Accession=PF07645.7; Description=Calcium binding EGF domain
LIITIFQFLSTDINECKLGDFNACGSGSICHDLDGGFECKCKFWYRRDGRSGTSCQRIFSTTTIWTIIGDHSSPLTSSSTYSSQYNHQY

SEQ ID NO: 89107 - protein, 318 aa, Setaria italica
  Transcript Sequence Number=SeqID_23133
  Gene Ontology: Mol. function=protein serine/threonine kinase activity; Biological process=protein amino acid phosphorylation
  Homolog annotation: Hit_ID=Q53J40; Match level="QueryCoverage=95%, HitCoverage=45%, E-value=2e-88, Identity=59%"; Hit description =Protein kinase domain containing protein
  Pfam annotation: Domain name=Pkinase; Domain location=30-302; Score =110.2; E_value=7.1e-30; Accession=PF00069.17; Description=Protein kinase domain
  Pfam annotation: Domain name=Pkinase_Tyr; Domain location=30-302; Score=95.2; E_value=2.3e-25; Accession=PF07714.9; Description =Protein tyrosine kinase
  Pfam module annotation: Pfam domain module=Pkinase::Pkinase_Tyr; Domain location=30-302::30-302
FSTKNGGEILKDMGINIFTECELKKVTDGYKKVIGEGAFGKVYKGTIKGAEQVAVKCSFTRSKAPCHDEFRNEIIFQFRINHANVVRLIGCCLETDVPKLVFEFVPNGSLYELLHVRRDQGLSLPTRLHIAIGSAEALFYMHSQGGHNNHVHGDFKSGNILLDNDLTPKVSDFGSSKLVSIVSGYAKWYVSGDMNYIDPTYLKTGRFTEKSDVYSFGVVLLELITRKTAKYDGSNSLTINFVKSCKEEGHGREMYDPEMLMSDDAKDHHYMECLYRIGTLAVQCLKEDVDERPAMAQVLKQLKQVQEIACGGLCSGAS

SEQ ID NO: 89108 - protein, 373 aa, Setaria italica
  Transcript Sequence Number=SeqID_23134
  Gene Ontology: Mol. function=protein serine/threonine kinase activity; Biological process=protein amino acid phosphorylation
  Homolog annotation: Hit_ID=Q53QC7; Match level="QueryCoverage=83%, HitCoverage=45%, E-value=4e-79, Identity=49%"; Hit description =Protein kinase domain containing protein, expressed
  Pfam annotation: Domain name=EGF_CA; Domain location=301-343; Score =18.1; E_value=0.0029; Accession=PF07645.7; Description=Calcium binding EGF domain
MPQVLWLLLLVLVDSHLVPMPLIAADTALPGTSMCGHVEIPYPFGLSDHASRQGKFNITCNQSFNPPRPYLARNLEVIDISLETGEMRVFSPVSYTCHNPSSNTRGSLQTWTFRLPKPFLISTTRNVFTAIGCSTQALLQGGANWSYFTGCTTTCTSLDSAARDGDRCTGRGCCQADISVNLATMKVGWNDPNDRPDNRAWLFNPCSYAFVAEKGWYNFSRQDLVDKGGQNFSSRTGYRTIPLVLDWAIVNGSCTSSDANYACLSAHSNCANSTHRDSGYLCGCSKGYEGNPYVTGGCKNINECKLGDFNACGSGSICHDLDGGFECKCKFWYRRDGRSGTSCQRIFSTTTIWTIIAILAVCLLTYWAIGGVE

SEQ ID NO: 89109 - protein, 532 aa, Setaria italica
  Transcript Sequence Number=SeqID_23135
  Gene Ontology: Mol. function=heat shock protein binding; Biological process=response to stress
  Homolog annotation: Hit_ID=Q2R254; Match level="QueryCoverage=100%, HitCoverage=51%, E-value=0.0, Identity=51%"; Hit description=DnaJ domain containing protein, expressed
LPDHPNIIDFEKFRDVNMFSVGQIWALYDNLDGMPRFYARIMQLDASDFKVHLAWLEHDPMNEEENKWTDKELPVACGKFCLRKTRDISQNMSMFSHIVPCADGNKRNSYVIHPVKGEVWALYKGWSMEWSSDADNHRSYEYEVVEVLSDISADGGFTVTPLVRIKGFVSLFATARDKSSFTITSSELLQFSHRIPFYRTTGNEKVGVPGGFLELDSASLPTDLDAAFPSVALDSYKSTNSMSVGLRTDSMNVGMDPGTEHIVLEKNHCEAHLPMENHKYTSFEQDTFSQENAHGANDFGDSYQQNCLSPKTFTYPDSAFHNFEELRSHEKFECGQIWALYSDVDEFPKFYGWVREVEMEPFKVHLTWLEVCPQQEQEEQWLEQGIATSCGTFQVRDWKAIYDTNGAFSHVVHARKTSNKWQFEIHPQVGEIWAIYMNWSPDWAPSGNRAEYAIGKIKRRTRSGIVFDFLTKVDGYVAVFKLDNQRGALKVRAKENMRFSHRIPSFCLTEENGGELRGFYELDPASVPNDFL

SEQ ID NO: 89110 - protein, 68 aa, Setaria italica
  Transcript Sequence Number=SeqID_23136
  Gene Ontology: Mol. function=copper chaperone activity; Cellular component=mitochondrial intermembrane space; Biological process =copper ion transport
  Homolog annotation: Hit_ID=B6STD7; Match level="QueryCoverage=100%, HitCoverage=100%, E-value=1e-16, Identity=61%"; Hit description =Cytochrome c oxidase copper chaperone
  Pfam annotation: Domain name=COX17; Domain location=6-68; Score =112.2; E_value=1.8e-30; Accession=PF05051.5; Description=Cytochrome C oxidase copper chaperone (COX17)
MGNTASVKTEEQPATAPAPETKPKKKICCACPDTKKLRDDCIVQNGEDACGKFIEAHLQCLRAEGFNV

SEQ ID NO: 89111 - protein, 110 aa, Setaria italica
  Transcript Sequence Number=SeqID_23137
  Gene Ontology: Mol. function=transcription factor activity; Cellular component=nuclear matrix; Biological process=positive regulation of transcription, DNA-dependent
  Homolog annotation: Hit_ID=Q7RTV0; Match level="QueryCoverage=100%, HitCoverage=100%, E-value=4e-53, Identity=91%"; Hit description=PHD finger-like domain-containing protein 5A
  Pfam annotation: Domain name=PHD; Domain location=29-78; Score=-4.0; E_value=0.073; Accession=PF00628.21; Description=PHD-finger
  Pfam annotation: Domain name=PHF5; Domain location=1-106; Score =298.5; E_value=1.5e-86; Accession=PF03660.6; Description=PHF5-like protein
  Pfam module annotation: Pfam domain module=PHD::PHF5; Domain location= 29-78::1-106
MAKHHPDLIMCRKQPGIAIGRLCEKCDGKCVICDSYVRPCTLVRVCDECNYGSFQGRCVICGGVGISDAYYCKECTQQEKDRDGCPKIVNLGSAKTDLFYERKKYGFKKR

SEQ ID NO: 89112 - protein, 878 aa, Setaria italica
  Transcript Sequence Number=SeqID_23138
  Gene Ontology: Mol. function=protein binding; Cellular component =cytoplasm
  Homolog annotation: Hit_ID=Q7XZU0; Match level="QueryCoverage=94%, HitCoverage=50%, E-value=0.0, Identity=64%"; Hit description=SAC domain protein 9
  Pfam annotation: Domain name=Syja_N; Domain location=53-363; Score= -29.6; E_value=2.9e-09; Accession=PF02383.10; Description=SacI homology domain
  Pfam annotation: Domain name=WW; Domain location=476-506; Score=58.3; E_value=2.9e-14; Accession=PF00397.18; Description=WW domain
  Pfam module annotation: Pfam domain module=Syja_N::WW; Domain location=53-363::476-506
TQVIYVDPTTGALRYLGKHGEDVFDSEAAALNYITDGSRILSKSTTYGKAVLGYAVLGSYALLLVATQLSATVPNLPGGGCIHTVAESQWIKIQLQNPQPQGNGEQKNIRELADLDIDGKYYFCETRDVTRPFPSRMTVWEPDEEFVWNEWLSKPFKDIGLPGHCVILLQGFAECRNFGGAGQQGGLVALIARRSRLHPGTRYLARGLNACSGTGNEVECEQLVWVPQKGGGRIPFSSYIWRRGTIPIWWGAEIKNAVSVEAEIYVADDPYNGSLQYYQRLSRRYGNKSSEENVSRQKKSGMVPIVCVNLLRYAEGKTESVLVDCFKESLQYMKSTGKLGSTWIQLINYDWHATVKLKGQQQTVEGLWRHLKAPTMAIGFSEGNYYDVRQQLKECKGSIICNDDINGGFCMESTQNGVIRFNCADSLDRTNAASYFGALQVFVEQCSRLSISLDVDAMFGLSSRYSEYDSRNARSLPPGWEERFDSVTGKSFYIDHNTRTTTWEHPCQEAPQKPWKRFDMTFDQFKGSTMLAPVNHLAELFLLAGDIHATLYTGSKAMHSEILNIFKEETGKFSKFSAVQNVKITVQRRFHNYVNDRSRQKQLEMFLGLRLYKHLLSIPIFPLKVLSRPSGCMLKPVPSITPVADGGSSLLSFKKKDLIWVCQQGADYVELFIYLGEPCQVCQLLLTVSHGAEDSSYPASVDVRIGSSIDALKLVVEGACIPQCSNGTNLLIPLTGRIDPEDLAVTGKSARPNVQESTYLPLLYDFEELEGELNFLNRVVALSFHPSAISRTPITLGEIEVLGISLPWADMLNNSGRAPEFMELLHKKSSAHCDIGSKSFANSSGPVNDSRGSEGSYTKSSSSAQPGGSENLLDFPHR

SEQ ID NO: 89113 - protein, 47 aa, Setaria italica
  Transcript Sequence Number=SeqID_23139
KRYDDGGRRRHGGSPPPRRARSPVRENSEERRAKIEQWNREREEKQG

SEQ ID NO: 89114 - protein, 245 aa, Setaria italica
  misc_feature (21)..(21): Xaa can be any naturally occurring amino acid
  misc_feature (75)..(75): Xaa can be any naturally occurring amino acid
  misc_feature (88)..(88): Xaa can be any naturally occurring amino acid
  misc_feature (154)..(154): Xaa can be any naturally occurring amino acid
  misc_feature (162)..(162): Xaa can be any naturally occurring amino acid
  misc_feature (217)..(217): Xaa can be any naturally occurring amino acid
  Transcript Sequence Number=SeqID_23140
  Gene Ontology: Mol. function=nucleic acid binding; Cellular component= chromatin; Biological process=DNA integration
  Homolog annotation: Hit_ID=Q01JL4; Match level="QueryCoverage=93%, HitCoverage=30%, E-value=5e-85, Identity=66%"; Hit description =H0112G12.6 protein
  Pfam annotation: Domain name=RVT_2; Domain location=1-178; Score =183.0; E_value=8.6e-52; Accession=PF07727.6; Description=Reverse transcriptase (RNA-dependent DNA pol
ETFSPIVKPATVRTVLSLALXNWPIHQLDVKNAFLCGTLLETVYCAQPAGFEDPARPYHVFWLNRSLYGLKQAPXAWYNRFATHLLQXGFVEAKIDTSLFVDDIVLTASWTPLLCSTIDALHQEFSMKDLGELHHFLGMHVQHSGDGLLLSQRXFMLEILDXAGMTDYKPCSTPVDTNPKLSAAEGAPLVNGTDFRSLAGALQYLTFTRPDIAYSVXQVCLHMHDLQEPHLAALKRILRLLLLQY

SEQ ID NO: 89115 - protein, 319 aa, Setaria italica
  Transcript Sequence Number=SeqID_23141
  Gene Ontology: Mol. function=signal transducer activity; Biological process=response to light stimulus
  Homolog annotation: Hit_ID=B9T6J7; Match level="QueryCoverage=99%, HitCoverage=46%, E-value=1e-65, Identity=42%"; Hit description =Protein binding protein, putative
  Pfam annotation: Domain name=NPH3; Domain location=2-239; Score=37.9; E_value=6.4e-13; Accession=PF03000.6; Description=NPH3 family
CDFFGRIVRALRRQGMKEKYVSPVVLFYANKWVLSKKTHKFWASTDDEAVDGETDANRRAAAIMEGVIALLPVEAAAVAASGAIPVAFYFALLSRSLALELSDESQMRLREQVASNLQFARVDDLPLPEQETGRPIADSREVRAVESIVSSHVSAQRKGAEVVAELWDRYLLQIASDPKLRPERLSELIGVIPAGDRKNHNHLYEAINTYLVEHRGLSGEEKATLCGHLDCRKLSHDACIQAVQNDRMPLRLIVQALFVQQLHTHRAFTECSDSFRCMHSGELVPGAGAYTPSPGCPAIPTSQSQPLSSGSPYESHRAP

SEQ ID NO: 89116 - protein, 78 aa, Setaria italica
  Transcript Sequence Number=SeqID_23142
FANATYERLPLDEEVDEEAMEAGRPGGGGVPPMMGGGLPDPLAMPMYGAVPPNLLLPGGGQLGHGAEGSAWPHARPPY

SEQ ID NO: 89117 - protein, 633 aa, Setaria italica
  Transcript Sequence Number=SeqID_23143
  Gene Ontology: Mol. function=nucleic acid binding
  Homolog annotation: Hit_ID=Q9M9L2; Match level="QueryCoverage=90%, HitCoverage=74%, E-value=1e-125, Identity=40%"; Hit description =F10A16.15 protein
  Pfam annotation: Domain name=MULE; Domain location=258-358; Score =87.2; E_value=5.9e-23; Accession=PF10551.1; Description=MULE transposase domain
  Pfam annotation: Domain name=MuDR; Domain location=62-138; Score =122.4; E_value=1.4e-33; Accession=PF03108.7; Description=MuDR family transposase
  Pfam annotation: Domain name=SWIM; Domain location=514-546; Score =48.0; E_value=3.6e-11; Accession=PF04434.9; Description=SWIM zinc finger
  Pfam annotation: Domain name=zf-CCHC; Domain location=614-631; Score =10.9; E_value=0.01; Accession=PF00098.15; Description=Zinc knuckle
  Pfam module annotation: Pfam domain module=MULE::MuDR::SWIM::zf-CCHC; Domain location=258-358::62-138::514-546::614-631
SPPPGGASTAPGILDQQNLALVDATPRDAGGLFDDSGDPYVGSEITAEPQHGLDSPIVFWDDIIKGVGQEFDNVKDFRAQLCKYAIGKGFAYRFIKNETTRVTVKCVAEGCTWRLHASESSRNKKFVIKKMTDEHTCGGGNGEGQRRATRQWLTNIIKEKLHDNPMLKPKELVKEIYEQYGVTLTYSQVWRGKEVAQKELYHAIRETYSHLPWYSDRLIESNPGSIALLSPMVDTKFRRFFVAFHASLHGFASGCRPLLFLDKVPLKATNDYKLLVAAAVDADDGVFPVAFSVVENENYDSWIWFLMQLKYALQIHNYPCKAMTFLSSGQKGLDAAVSQAFEDSHHAFCLHHIMEEFKGELRKGPWSQQIRDGMIEDFTRAAQACSIEDFNASIESIRNISTEAADWIIASKPEHWSDAIFRGCRYDHFSSNIVDAFNNWIPTKKEGSIVLMIDSLRTKIMEIIESRREACKAWSGPLTPSMEYKAKEEMMKAGKMTVLCSSETVFEVRGNAIFVVNLANWECTCRRWQLSGLPCVHAVAVFNRIGRSYYDYCSKFFRLESYHLTYSGTIFPIPDMDTVDFSAGANLIPPPKPRSSDKPRRKRFNPNKVPTVIRLCSRCKQAGHNKATCEAIL

SEQ ID NO: 89118 - protein, 110 aa, Setaria italica
  misc_feature (71)..(71): Xaa can be any naturally occurring amino acid
  Transcript Sequence Number=SeqID_23144
LKICISRIRGEFYSTCILFNEIDEVEKAFEALDGQMTKDSGGRLQKHVLMKRDNGDVVNFYVRKMVYSSQXNQFEVPKKRPQPTEDAEPKKEHADGDQQKKKRKSKKHVN

SEQ ID NO: 89119 - protein, 457 aa, Setaria italica
  Transcript Sequence Number=SeqID_23145
  Gene Ontology: Mol. function=exonuclease activity; Cellular component= intracellular
  Homolog annotation: Hit_ID=B9SFZ8; Match level="QueryCoverage=91%, HitCoverage=82%, E-value=1e-97, Identity=46%"; Hit description =Exonuclease, putative
  Pfam annotation: Domain name=Exonuc_X-T; Domain location=144-295; Score=60.2; E_value=7.5e-15; Accession=PF00929.16; Description =Exonuclease
VGLRPSVRSKVGCLVEVVRFTQKNGLKGSDGAWKDFLARNDRKFGASVSDPRKRSRDVLLAFLQTFSKDFQKYFGKLVKRQKERSDVQQHMNDFPDQVSPEQKLVQLTAEHPEYRKNYCFPSYQEGWKVLRIGDVSSLVSSSAMLAIDCEMVLCHDGTEAVVRVCVVDNNLEVKLDTLVNPSKAITDYRTHITGVSKKDLEGVTSSLVDVQKSLKRILSKGKILIGHSLYRDLCALKIDCSQVIDTAYIFKYANLPTTASASLNSLCKSVLGYSVREEGEPHNCLKDAEAAMNLVLAKLKHGFNDPIEVAVSGVITESDSLKLLAHRIPVHLPCQELCKVFSGNPSIDDKIDSRIRGEFYSTCILFNEIDEVEKAFEALDGQMTKDSGGRLQKHVLMKRDNGDVVNFYVRKMVYSSQPNQFEVPKKRPQPTEDAEPKKEHADGDQQKKKRKSKKHVN

SEQ ID NO: 89120 - protein, 55 aa, Setaria italica
  Transcript Sequence Number=SeqID_23146
KGGDNKTPAEICIQIKENYGSHNKKIRSSIVCTRPNRWLITLCSPMQKSIPCSIG

SEQ ID NO: 89121 - protein, 88 aa, Setaria italica
  Transcript Sequence Number=SeqID_23147
RSDFYIYASLGPWLCPVSQIEQLAHCSARDLPPAVCGHGLGSCGARGTSNRFGSASPVAVDMAAQRATGPASCRNRVPEPEAGRAAVS

SEQ ID NO: 89122 - protein, 291 aa, Setaria italica
  misc_feature (57)..(57): Xaa can be any naturally occurring amino acid
  misc_feature (74)..(74): Xaa can be any naturally occurring amino acid
  Transcript Sequence Number=SeqID_23148
  Gene Ontology: Mol. function=protein dimerization activity; Cellular component=nucleus; Biological process=regulation of transcription, DNA-dependent
  Homolog annotation: Hit_ID=A3B9A0; Match level="QueryCoverage=100%, HitCoverage=27%, E-value=1e-138, Identity=85%"; Hit description =Auxin response factor 16
  Pfam annotation: Domain name=AUX_IAA; Domain location=98-274; Score= -99.8; E_value=0.029; Accession=PF02309.8; Description=AUXIAA family
RNLPEIPSTPHIEHLLQEIQSKSDNRIKNDIQGSKETVHAPNRHPASDQLDASSATXPFCLDESPQRGSSFPPXCLDSTAQVDPRDNFLIAENVDTLMPDALLSRGMSSGKGICNLPTGQRDHRDVENELSSAAFSSQSFGVPDMSFKPGCSSDVAVADGGMASQGLWNSQTQRMRTFTKVQKRGSVGRSIDITRYRGYEDLRHDLACMFGIQGQLEDPYRTDWKLVYVDHENDILLVGDDPWEEFVSCVKSIKILSSAEVQQMSLDGDLGCIPPQGQACSASDDANAWRG

SEQ ID NO: 89123 - protein, 69 aa, Setaria italica
  Transcript Sequence Number=SeqID_23149
CCHPLRRIITNSCHHGITTALEPFSDYPASSCSHLLFGDHYFWVPSTGIIKAYCSPYSKECSVISGLYI

SEQ ID NO: 89124 - protein, 79 aa, Setaria italica
  Transcript Sequence Number=SeqID_23150
PAADGNTSGRGAAMESGELVHRPGPSVSSRLADGRGGWRAACFLLGNLLNTIAQIVTKLIGSALPLQRSRSWSLSGSAA

SEQ ID NO: 89125 - protein, 108 aa, Setaria italica
  Transcript Sequence Number=SeqID_23151
WREGWAKFLYGSHLTATVCHCHLDKQKLRPSVALATVQSASNTIFFLKLRHPNFKLKKRQPIITINHLQSKMRPECLMQKLHISDQRVNSAKRANRGTSSEKHSQSKI

SEQ ID NO: 89126 - protein, 116 aa, Setaria italica
  Transcript Sequence Number=SeqID_23152
  Gene Ontology: Mol. function=cyclin-dependent protein kinase activity; Cellular component=nuclear speck; Biological process =protein amino acid phosphorylation
  Homolog annotation: Hit_ID=Q6I5Y0; Match level="QueryCoverage=100%, HitCoverage=22%, E-value=3e-56, Identity=87%"; Hit description =Cyclin-dependent kinase C-1
FMAKETETKEIVALKKIRMDNEREGFPITAIREIKILKKLHHDNVINLKEIVTSPGPERDEQGNQIEGNMYKGSIYMVFEYMDHDLTGLSDRPGMQFTIPQIKCYMRQLLFGLHYC

SEQ ID NO: 89127 - protein, 148 aa, Setaria italica
  Transcript Sequence Number=SeqID_23153
  Gene Ontology: Mol. function=hydrolase activity; Biological process =lipid catabolic process
  Homolog annotation: Hit_ID=Q653V2; Match level="QueryCoverage=33%, HitCoverage=10%, E-value=2e-12, Identity=65%"; Hit description =Patatin-like phospholipase domain containing protein-like
  Pfam annotation: Domain name=Patatin; Domain location=5-144; Score =5.4; E_value=0.00013; Accession=PF01734.14; Description=Patatin-like phospholipase
GDDGARLADFFDVAAGSGAGGVLAAMLVARGPEGRPLFSAEDALAFLLRSLRRGWSDGGGGGGGLRALFRRPGAAAFRKLFGDLTLRDTVRPVLVPCYDLATGGPFLFSRADAVETRAYDFRLRDVCAATCAGSGGSAAAVEARSCDG

SEQ ID NO: 89128 - protein, 90 aa, Setaria italica
  misc_feature (16)..(16): Xaa can be any naturally occurring amino acid
  Transcript Sequence Number=SeqID_23154
  Gene Ontology: Mol. function=hydrolase activity; Biological process =lipid catabolic process
  Homolog annotation: Hit_ID=Q9XE79; Match level="QueryCoverage=98%, HitCoverage=20%, E-value=6e-30, Identity=71%"; Hit description =Patatin-like protein
ALHCEKNYLRIQDDSXTGDTSSVDITTKENMEALIRIGHELLKKPVSRVNIDTGMYEPVNGEGTNEEALARFAKILSDERRLRQSKLSSN

SEQ ID NO: 89129 - protein, 406 aa, Setaria italica
  Transcript Sequence Number=SeqID_23155
  Gene Ontology: Mol. function=RNA-directed DNA polymerase activity; Cellular component=exocyst; Biological process=exocytosis
  Homolog annotation: Hit_ID=B9RNN3; Match level="QueryCoverage=99%, HitCoverage=58%, E-value=1e-154, Identity=62%"; Hit description =Protein binding protein, putative
  Pfam annotation: Domain name=Exo70; Domain location=9-368; Score =410.4; E_value=3e-120; Accession=PF03081.7; Description=Exo70 exocyst complex subunit
VVQVLSPSVERWGRHLEFAVHHLLEAERKLCVAVFERRPEAMPSCFAEVAARAGILDFLKFGRALADTRKDPIKLLRLLDVFDALNKLRLDFNRLFGGKACAEIQTRTRELVKMVVDGAVEIFEELLVQVELQRNMPPPVDGGVPRLVSFVAKYCNQLLGEPYRSVLTQVVTIHRSWRKEVFNDKMLVDAVLNIVKTLEINFETWSKAYGDTTLSCLFMMNIHWHFFKHLKGTKLGELLGDAWLREHEQYKDYYSAVFLRESWGTLAPLLSREGLIMFSKGQATARDLVKQRLKSFNAKFDEMFQKQSTWVISDRDLQQKTCHLVVQAIVPIYRSFMQNYGPLVEQDISASKYVKYSAEDLDKMLNTLFLPKPGRPRRTGSFQIRHSGDKITSAMTGLYRSASTLK

SEQ ID NO: 89130 - protein, 48 aa, Setaria italica
  misc_feature (35)..(35): Xaa can be any naturally occurring amino acid
  Transcript Sequence Number=SeqID_23156
  Subcellular localization annotation: CTP_CleavageSite=15; ConfidenceScore=5.01e-01
SSWFPWLSWAWLLPLGSTPSRSLLSFATLAPSGLXELKNLSNKLARVL

SEQ ID NO: 89131 - protein, 107 aa, Setaria italica
  Transcript Sequence Number=SeqID_23157
  Gene Ontology: Mol. function=transition metal ion binding; Cellular component=endoplasmic reticulum membrane; Biological process =electron transport chain
  Homolog annotation: Hit_ID=P49100; Match level="QueryCoverage=100%, HitCoverage=78%, E-value=1e-51, Identity=91%"; Hit description =Cytochrome b5
  Pfam annotation: Domain name=Cyt-b5; Domain location=1-52; Score=3.9; E_value=0.056; Accession=PF00173.20; Description=Cytochrome b5-like HemeSteroid binding doma
VYYVTKFLEDHPGGDDVLLSSTAKDATDDFEDVGHSTTARAMMDEYLLGEIDSSTIPARTKYVAPKQPHYNQDKTPEFIIKILQFLVPLAILGLAVAVRIYTKSESA

SEQ ID NO: 89132 - protein, 190 aa, Setaria italica
  Transcript Sequence Number=SeqID_23158
  Gene Ontology: Mol. function=transition metal ion binding; Cellular component=endoplasmic reticulum membrane; Biological process =electron transport chain
  Homolog annotation: Hit_ID=B6TTI9; Match level="QueryCoverage=88%, HitCoverage=85%, E-value=3e-71, Identity=78%"; Hit description =Cytochrome b5
  Pfam annotation: Domain name=Cyt-b5; Domain location=61-135; Score =96.5; E_value=9.5e-26; Accession=PF00173.20; Description=Cytochrome b5-like HemeSteroid binding doma
  Subcellular localization annotation: CTP_CleavageSite=28; ConfidenceScore=5.16e-01
GTQSLRCASSRLVLVGSKAPPNESPPPRASTISRLPAPDDEEERPRVPNLQTSTTMSSSKVFTLEEVAKHNTKDDCWLIIGGKVYNVTKFLEDHPGGDDVLLSSTAKDATDDFEDVGHSTTARAMMDEYLVGEIDATTIPTKVKYMPPKQPHYNQDKTPEFIIKILQFLVPLAILGLAVAVRIYTKSEST

SEQ ID NO: 89133 - protein, 155 aa, Setaria italica
  Transcript Sequence Number=SeqID_23159
  Gene Ontology: Mol. function=RNA binding; Biological process=transport
  Homolog annotation: Hit_ID=B6T411; Match level="QueryCoverage=100%, HitCoverage=100%, E-value=2e-65, Identity=78%"; Hit description =Elicitor-responsive protein 1
  Pfam annotation: Domain name=C2; Domain location=6-91; Score=89.6; E _value=1.1e-23; Accession=PF00168.22; Description=C2 domain
MGKGVLEVHLVDAKGLYGNDFLGKLDPFVIVQYRSQERKSSVARDQGRNPRWNEVFKFQINSAASNAQHKLILRILDHDHFSSDDSLGEATIDVTGIISLGAERGTYTQSAAKHSVVLADNTFHGEIKVGFTFTATQVQEDGEEIGGWRYSSFNQ

SEQ ID NO: 89134 - protein, 145 aa, Setaria italica
  misc_feature (77)..(77): Xaa can be any naturally occurring amino acid
  Transcript Sequence Number=SeqID_23160
  Homolog annotation: Hit_ID=B6T411; Match level="QueryCoverage=95%, HitCoverage=60%, E-value=1e-27, Identity=49%"; Hit description =Elicitor-responsive protein 1
TACNCIADQGRNPRWNEVFKFQINSAASNAQHKLILRILDHDHFPATTRSGKRRECPPARQPCPTASPNWSALRNSXTAQPPALTVGFPINLRKICRIDVTGIISLGAERGTYTQSAAKHSVVLADNTFHGEIKVGFTFTATQVR

SEQ ID NO: 89135 - protein, 205 aa, Setaria italica
  misc_feature (133)..(133): Xaa can be any naturally occurring amino acid
  Transcript Sequence Number=SeqID_23161
VLSLEAYIQYKNSAMEGSESSRSCKRDVEDSIDAMGSWKEDEREDADGRKSQSSKVRKHGCADRVEDPDDARRGSSTNRYEPRRKSVSGSGQAYSDDEEDYNVRKDSRVSKVPRRSPEEKSEISSDVYKDRGXDSSRRRREDENDSDSSRRSGSRTSGHDVSHSEGGSKAEGPYNHGRHEEKDVRHSEGIDGSREKQWHRDLEEK

SEQ ID NO: 89136 - protein, 82 aa, Setaria italica
  Transcript Sequence Number=SeqID_23162
  Gene Ontology: Mol. function=protein serine/threonine kinase activity; Biological process=protein amino acid phosphorylation
  Homolog annotation: Hit_ID=B6TDR7; Match level="QueryCoverage=100%, HitCoverage=19%, E-value=4e-39, Identity=92%"; Hit description =Serine/threonine-protein kinase receptor
  Pfam annotation: Domain name=Pkinase_Tyr; Domain location=1-82; Score= -180.8; E_value=0.1; Accession=PF07714.9; Description=Protein tyrosine kinase
FGPVYRGVLSGGAEIAVKRLSARSRQGAAEFRNEVELIAKLQHRNLVRLLGCCVEREEKMLIYEYLPNRSLDAFLFDTRKSG

SEQ ID NO: 89137 - protein, 161 aa, Setaria italica
  Transcript Sequence Number=SeqID_23163
  Gene Ontology: Mol. function=nucleoside-triphosphatase activity; Cellular component=membrane
  Homolog annotation: Hit_ID=B9P510; Match level="QueryCoverage=98%, HitCoverage=25%, E-value=8e-66, Identity=73%"; Hit description=White- brown-complex ABC transporter family (Fragment)
  Pfam annotation: Domain name=ABC2_membrane; Domain location=1-135; Score=-19.8; E_value=0.027; Accession=PF01061.16; Description=ABC-2 type transporter
ILTDVERLNGHYGVASFAIANTVSAAPYLALISVVPGAMAYYMVSLQSSFGHFAYFALVLFAAMMVVEGLMMIVASTVPDFLMGIITGAGIQGVMMLNGGFFRLPNDLPKPFWRYPMYYVAFHKYANQGFYKNEFLGLTFPSNQAAAGAGATISGREILRD

SEQ ID NO: 89138 - protein, 95 aa, Setaria italica
  Transcript Sequence Number=SeqID_23164
  Gene Ontology: Mol. function=peptidase activity; Biological process =lipid transport
  Homolog annotation: Hit_ID=Q7G2C3; Match level="QueryCoverage=72%, HitCoverage=67%, E-value=3e-10, Identity=44%"; Hit description =Nonspecific lipid-transfer protein 2, putative
  Pfam annotation: Domain name=Tryp_alpha_amyl; Domain location=28-95; Score=33.4; E_value=9.2e-07; Accession=PF00234.14; Description =Protease inhibitorseed storageLTP f
MAKAVAVLAAALLLVAAMGSGGASAQDCDSSRLADCAPAFLFGVTPSQSCCDKLRLEEQRGCLCVYAHDPQYSGFLNSTKARDALAYCQVAYPSC

SEQ ID NO: 89139 - protein, 69 aa, Setaria italica
  Transcript Sequence Number=SeqID_23165
  Gene Ontology: Mol. function=peptidase activity; Biological process =lipid transport
  Pfam annotation: Domain name=Tryp_alpha_amyl; Domain location=1-69; Score=14.2; E_value=0.014; Accession=PF00234.14; Description =Protease inhibitorseed storageLTP f
LSTQRGWRTARSRSCFGTTPLKSCCDSLREEQKGCLCVYARDPQYSGFLTTSTTVRNALAYCKVAYPSC

SEQ ID NO: 89140 - protein, 91 aa, Setaria italica
  Transcript Sequence Number=SeqID_23166
  Gene Ontology: Mol. function=peptidase activity; Biological process =lipid transport
  Pfam annotation: Domain name=Tryp_alpha_amyl; Domain location=24-91; Score=23.8; E_value=0.00072; Accession=PF00234.14; Description =Protease inhibitorseed storageLTP f
RKRKLVASMGVADAAPAPAPAQQCDATRLADCAFAFLFGTTPLKSCCDSLREEQKGCLCVYARDPQYSGFLTTSTTVRNALAYCKVAYPSC

SEQ ID NO: 89141 - protein, 473 aa, Setaria italica
  Transcript Sequence Number=SeqID_23167
  Gene Ontology: Mol. function=catalytic activity; Biological process =guanosine tetraphosphate metabolic process
  Homolog annotation: Hit_ID=Q7XAP3; Match level="QueryCoverage=99%, HitCoverage=64%, E-value=0.0, Identity=82%"; Hit description=Plastid (P)ppGpp synthase
  Pfam annotation: Domain name=HD; Domain location=4-105; Score=17.1; E_ value=0.00049; Accession=PF01966.14; Description=HD domain
  Pfam annotation: Domain name=RelA_SpoT; Domain location=195-305; Score=166.4; E_value=8.5e-47; Accession=PF04607.9; Description =Region found in RelA  SpoT proteins
  Pfam module annotation: Pfam domain module=HD::RelA_SpoT; Domain location=4-105::195-305
MLQVWITTSPLLTKIGATATVVSAGLLHDTIDDSFMDYDHIFRMFGAGVADLVEGVSKLSHLSKLARDNNTASRTVEADRLHTMFLAMADARAVLIKLADRLHNMKTIEALPLVKQQRFAKETMEIFVPLANRLGIASWKDQLENICFKHLNPEEHKELSSKLVMSFDEALLTSTLDKLDKGLRDEGISYHNLSGRHKSLYSIYSKMIKKNLTMDDVHDIHGLRLVVETEQDCYRALDIVHKLWPRVTGRFKDYISHPKLNGYRSLHTVIMCEGVHPFEIQIRTKEMHLQAEYGFAAHWRYKEGGFRHSFVLQMVEWARWVLTWQCEAMSKERPSALASSVGIRPPCPFPLHSEDCPYSYSQQCNHEGPIFVIMLKHDKMSVQELPPNSTVVDLMERVGASSPRWSPYSFPLKEELRPRVNHKPISDPNRKLSMGDVVELTPALPHKSLTEYREEIQRMYERGGFALATTPRS

SEQ ID NO: 89142 - protein, 43 aa, Setaria italica
  Transcript Sequence Number=SeqID_23168
YGILRFETVECSQIPSRSNGTCTMTAPPTRIPPPSSLTRAPTL

SEQ ID NO: 89143 - protein, 172 aa, Setaria italica
  Transcript Sequence Number=SeqID_23169
  Gene Ontology: Mol. function=transferase activity, transferring glycosyl groups; Biological process=metabolic process
  Homolog annotation: Hit_ID=B6SZW3; Match level="QueryCoverage=98%, HitCoverage=35%, E-value=4e-75, Identity=85%"; Hit description =Hydroquinone glucosyltransferase
VGPFVRSSTGEKADESAFLEWLDHQPKDSVVYVSFGTGGALSVEQTAELAAGLEASGHRFLWVVRMGCRRGNPCALGTVPGDKDDPLAWLPEGFLERTSGRGLAVAAWAPQVRVLSHPATAAFVSHCGWNSTLESVAAGVPMVAWPLYAEQKTNATILTEVIGVALRPAAAR

SEQ ID NO: 89144 - protein, 80 aa, Setaria italica
  Transcript Sequence Number=SeqID_23170
MTSMGFSYAQIHVRQERCRMKSLQAEEKEKKAKEAAGGGDDEVGNKRPTGEDDKASVGGCAWASGKVHPCAGTAAPPPPN

SEQ ID NO: 89145 - protein, 113 aa, Setaria italica
  misc_feature (99)..(99): Xaa can be any naturally occurring amino acid
  Transcript Sequence Number=SeqID_23171
  Gene Ontology: Mol. function=diacylglycerol kinase activity; Biological process=activation of protein kinase C activity
  Homolog annotation: Hit_ID=B6TDW8; Match level="QueryCoverage=86%, HitCoverage=27%, E-value=1e-46, Identity=93%"; Hit description=D -erythro-sphingosine kinase/ diacylglycerol kinase
  Subcellular localization annotation: CTP_CleavageSite=35; ConfidenceScore=5.56e-01
MAAPATPRASLILPRASSHSHSQPSAGGLTSDRVAASHRRRGDFVFVVNPSGANGRTGKQWKQLLPHLRTRLADQCNICECITSGPSHAIDVTREANKXSGADAVIAVGGDGT

SEQ ID NO: 89146 - protein, 100 aa, Setaria italica
  misc_feature (18)..(18): Xaa can be any naturally occurring amino acid
  Transcript Sequence Number=SeqID_23172
  Subcellular localization annotation: CTP_CleavageSite=62; ConfidenceScore=5.61e-01
LSSIHIKNAPRSYNTSYXPPSLVTDTQRPSFGPSSNPQRRSTIGTTTTIWHAMWPGVGPWPPASVVGSVTPALLAAAVIARHFIPRLWSSSGIIKPRRGT

SEQ ID NO: 89147 - protein, 286 aa, Setaria italica
  Transcript Sequence Number=SeqID_23173
  Gene Ontology: Mol. function=hydrolase activity, acting on glycosyl bonds; Cellular component=extracellular region; Biological process =carbohydrate metabolic process
  Homolog annotation: Hit_ID=P00693; Match level="QueryCoverage=99%, HitCoverage=65%, E-value=1e-137, Identity=81%"; Hit description =Alpha-amylase type A isozyme
  Pfam annotation: Domain name=Alpha-amyl_C2; Domain location=217-277; Score=134.2; E_value=4.1e-37; Accession=PF07821.4; Description=Alpha- amylase C-terminal beta-sheet dom
  Pfam annotation: Domain name=Alpha-amylase; Domain location=1-216; Score=-7.1; E_value=4.3e-09; Accession=PF00128.16; Description=Alpha amylase, catalytic domain
  Pfam module annotation: Pfam domain module=Alpha-amyl_C2::Alpha -amylase; Domain location=217-277::1-216
DTQYSDGTGNLDTGASFAAAPDIDHLNDRVQRELAEWLLWLRSDLGFDAWRLDFAKGYSAEVARAYIDATAPSFAVAEIWSDMAYGGDGKPEYDQDPHRQALVDWVDKVGGAASPATVFDFTTKGILNAAVEGELWRLIDPRGKAPGVIGWWPAKAVTFVDNHDTGSTQAVWPFPSDKVMQGYAYILTHPGNPCIFYDHFFDWGFKDEIAALMAVRKRNGITATSELTILVYDGDAYVAEIDGKVIMKIGSRYDVSAFIPAGYQVVAHGNDYAVWEKGAKEEVAQA

SEQ ID NO: 89148 - protein, 79 aa, Setaria italica
  Transcript Sequence Number=SeqID_23174
  Gene Ontology: Cellular component=keratin filament
  Homolog annotation: Hit_ID=B9VI84; Match level="QueryCoverage=100%, HitCoverage=41%, E-value=8e-21, Identity=62%"; Hit description =Truncated keratin associated protein
PDLCGRRRLQLEVQILNREVGFLEQEIQGLERTQPVSRCCKDVNEYVSAKADPMIPSKDKRKHGSCSFFRWIRSKLCTC

SEQ ID NO: 89149 - protein, 106 aa, Setaria italica
  misc_feature (98)..(98): Xaa can be any naturally occurring amino acid
  Transcript Sequence Number=SeqID_23175
  Gene Ontology: Cellular component=nucleus; Biological process =regulation of transcription, DNA-dependent
  Homolog annotation: Hit_ID=B9SGY5; Match level="QueryCoverage=92%, HitCoverage=25%, E-value=2e-29, Identity=53%"; Hit description =Transcription factor, putative
SRVAAAGLDGTEALVVNCHMLLHAVPDETAGSVMSLAQPVSLRTMLLKSLRTLDPNLVVVVEEDADFTADDVVGRLRAAFNFLWIPYDAVDTFLPKGXEQRRWYEA

SEQ ID NO: 89150 - protein, 163 aa, Setaria italica
  misc_feature (20)..(20): Xaa can be any naturally occurring amino acid
  misc_feature (73)..(73): Xaa can be any naturally occurring amino acid
  Transcript Sequence Number=SeqID_23176
  Gene Ontology: Mol. function=substrate-specific transmembrane transporter activity; Cellular component=integral to membrane; Biological process=transmembrane transport
  Homolog annotation: Hit_ID=B6T6Z1; Match level="QueryCoverage=96%, HitCoverage=31%, E-value=3e-74, Identity=88%"; Hit description =Solute carrier family 2, facilitated glucose transporter member 8
WNQRYTVFYASNIFKAAGVXNSDLATCSLGAIQVLATGVTTWLLDRAGRRILLIISTSGMTLCLLAVSIVFFXKDNVSHDSDTYYLLSMISLVALVAFVIAFSFGMGAIPWLMMSEILPVSIKSLGGSIATLAAWLTSFAITMTANLMLTWSVGGTFLSYMIV

SEQ ID NO: 89151 - protein, 78 aa, Setaria italica
  Transcript Sequence Number=SeqID_23177
  Gene Ontology: Mol. function=protein serine/threonine kinase activity; Biological process=protein amino acid phosphorylation
  Homolog annotation: Hit_ID=Q01K00; Match level="QueryCoverage=96%, HitCoverage=9%, E-value=3e-22, Identity=62%"; Hit description =H0525E10.8 protein
SNDNADPICSCMKGFSIRSLKDWDLGDRRDGCMRNTPLDCARDGNKTGLTDKFYPMRSVRLPHDANKAQAATSGDDCS

SEQ ID NO: 89152 - protein, 59 aa, Setaria italica
  Transcript Sequence Number=SeqID_23178
  Gene Ontology: Mol. function=pyridoxal phosphate binding; Cellular component=chromoplast; Biological process=cysteine biosynthetic process from serine
  Homolog annotation: Hit_ID=B6TEX7; Match level="QueryCoverage=100%, HitCoverage=17%, E-value=2e-23, Identity=89%"; Hit description =Cysteine synthase
EGLLVGISSGANLAACLKVASREENQDKMIVTVFPSGGERYTTSDLFAAVREECIAMTF

SEQ ID NO: 89153 - protein, 92 aa, Setaria italica
  misc_feature (79)..(79): Xaa can be any naturally occurring amino acid
  Transcript Sequence Number=SeqID_23179
  Gene Ontology: Mol. function=protein transporter activity; Cellular component=nuclear pore; Biological process=protein import into nucleus, docking
  Homolog annotation: Hit_ID=Q84NP8; Match level="QueryCoverage=100%, HitCoverage=9%, E-value=1e-36, Identity=83%"; Hit description =Putative Ran binding protein 11-like
SNEEKDHLRKNLLLNIREENSQIALQLAVLISKIARLDYPKEWPDLLSVLAQQLQSADVLASHRVFMVLFRTLKELSTXRLAVDQKNYAEIT

SEQ ID NO: 89154 - protein, 293 aa, Setaria italica
  Transcript Sequence Number=SeqID_23180
  Gene Ontology: Mol. function=4-coumarate-CoA ligase activity; Biological process=phenylpropanoid metabolic process
  Homolog annotation: Hit_ID=Q6ZAC1; Match level="QueryCoverage=98%, HitCoverage=53%, E-value=1e-149, Identity=87%"; Hit description =Probable 4-coumarate--CoA ligase 5
  Pfam annotation: Domain name=AMP-binding; Domain location=1-292; Score=149.9; E_value=7.8e-42; Accession=PF00501.20; Description=AMP -binding enzyme
RRHGRGAEGCVSFSDLAAADGSALPEAAIDVANDVVALPYSSGTTGLPKGVMLSHRGLVTSVAQVVDGDNPNLHLREDDVVLCVLPMFHVYALHSILLCGMRAGAALVIMKRFDTVRMFELVERHGITIVPLVLPIAVEIAKTDAIDRHNLSSVRMVISGAAPMGKELQDILRAKLPRAVLGQGYGMTEAGPVLSMCMAFAKEPSPVKSGACGTVVRNAELKIIDPETGLSLHRNQPGEICIRGEQIMKGYLNNPEATAKTIDAEGWLHTGDIGYVDDDDEIFIVDRLKELIK

SEQ ID NO: 89155 - protein, 100 aa, Setaria italica
  Transcript Sequence Number=SeqID_23181
TRQVSSGGNSHIIHVPPGEYLLSDAIISSPILAQGNESGFGSVASGVSGFEFGVDPELALALQSIGQRQSSTSNDDTVMVEAESEPNLCTDDKRICRRYV

SEQ ID NO: 89156 - protein, 257 aa, Setaria italica
  misc_feature (245)..(245): Xaa can be any naturally occurring amino acid
  Transcript Sequence Number=SeqID_23182
  Gene Ontology: Mol. function=transferase activity, transferring glycosyl groups; Biological process=metabolic process
  Homolog annotation: Hit_ID=B6TRF2; Match level="QueryCoverage=97%, HitCoverage=54%, E-value=2e-74, Identity=60%"; Hit description =Transferase, transferring glycosyl groups
AAALVRNPAAVVPRFESEQGNKQYNSDHGGMSMSQRFFSTLERCTLAALRSCVEWEPEFFPQVAPRLRKPVVPLGLLPPSPRANGAEDAVTVRWLDVQPPSSVVYVALGSEAPLPVEQVHELALGLELAGTRFLWALRKPSGVPDDGDLLPPGFQERTQGQGLVTTGWVPQVNILGHGAVGAFLTHCGQSSFVEGLLFGRPLVLLPIFGDQGSNARLLEGKKVGLQVARDEDDGSFDRHAVASAXRAVMVEEETRGV

SEQ ID NO: 89157 - protein, 270 aa, Setaria italica
  misc_feature (5)..(5): Xaa can be any naturally occurring amino acid
  misc_feature (9)..(9): Xaa can be any naturally occurring amino acid
  misc_feature (13)..(13): Xaa can be any naturally occurring amino acid
  misc_feature (16)..(16): Xaa can be any naturally occurring amino acid
  misc_feature (20)..(20): Xaa can be any naturally occurring amino acid
  misc_feature (106)..(106): Xaa can be any naturally occurring amino acid
  Transcript Sequence Number=SeqID_23183
  Gene Ontology: Mol. function=oxidoreductase activity, acting on the CH-CH group of donors, iron-sulfur protein as acceptor; Cellular component=chloroplast; Biological process=phytochromobilin biosynthetic process
  Homolog annotation: Hit_ID=Q6E5A3; Match level="QueryCoverage=96%, HitCoverage=86%, E-value=1e-126, Identity=83%"; Hit description =Phycoerythrobilin ferredoxin oxidoreductase
  Pfam annotation: Domain name=Fe_bilin_red; Domain location=1-211; Score=200.7; E_value=4e-57; Accession=PF05996.4; Description =Ferredoxin-dependent bilin reductase
KVQVXKTNXDNTXFNXLSFXAPKIRLLRSLTIEQKNSVQVLDFAAFSEPEYDLPIFCANAFTSPARSIVVLDLNPLYDTTEHKDYRGKYYRNLMPLIHKYSEMKCXLLPWGGKITSESLRFFSPIVIWTILEPTEANHQVLYSAFMDYFKVWLELMDEAVQGTSVEKIDRNREAQHKYLTWRAEKDPGYPLLKKLIGECAAKELVREFLFEGVDSLGTKSFLEYFPEYAQEDGTVNKKRSMVGKSFETRPWDAHGQFVGDAGRIGIRQDY

SEQ ID NO: 89158 - protein, 390 aa, Setaria italica
  Transcript Sequence Number=SeqID_23184
  Gene Ontology: Mol. function=nucleoside-triphosphatase activity; Cellular component=chloroplast; Biological process=proteolysis
  Homolog annotation: Hit_ID=Q7XI12; Match level="QueryCoverage=100%, HitCoverage=55%, E-value=0.0, Identity=85%"; Hit description=ATPase -like protein
AHGVTIESILKNPCLQMLVGGIESVTLGDEEAKKRKVQKTILERKGPPTFSCAVEIISKTECRVHHKLETTVDAILAGKPPKFEARKMHNKSTEPQMPLLIPDREYEIEPLPLYQEHMVAKTMSSEDTIRDDFAPSRQTKSKSMPSDGNFGDDFVYTRKTKGKKSAPGKSLVRVYTYQISEADILQVATVMGFDDELDVTDDIGAADVILASSSEMKQNPWIHNVAKYHKLPIFVVKSNTMAQIVKAVRMIVGRDNSPSNKQPTVMEGEIEIEDDAPKRKPSLEEIDALEEARLAIEYIVIPGGEPVELLPRCSEIVARQLELVESYQLLAETFGTDSNSRLQILPVKITKKSSSKDNRGSKPTKQTGSDLIVSENGGGSSFSRLPFLPK

SEQ ID NO: 89159 - protein, 301 aa, Setaria italica
  Transcript Sequence Number=SeqID_23185
  Gene Ontology: Mol. function=nucleoside-triphosphatase activity; Cellular component=chloroplast; Biological process=proteolysis
  Homolog annotation: Hit_ID=Q7XI12; Match level="QueryCoverage=100%, HitCoverage=43%, E-value=1e-161, Identity=92%"; Hit description =ATPase-like protein
  Pfam annotation: Domain name=AAA; Domain location=119-299; Score= -30.5; E_value=0.012; Accession=PF00004.21; Description=ATPase family associated with various cellular activities (AAA)
  Pfam annotation: Domain name=AAA_5; Domain location=119-254; Score= -21.6; E_value=0.059; Accession=PF07728.6; Description=ATPase family associated with various
  Pfam module annotation: Pfam domain module=AAA::AAA_5; Domain location=119-299::119-254
LEAFLEVVPARMRSGLAQHPEVRELVEVVMDLGRRPIARFPAGDWVISDQPVTADDLRQAVSKVGDFSEDNRSGINHSLHRISAIRNRKAQIIGLTCRVGRAISGSAEMIRDLVVSGGSILVIGPPGVGKTTLIREIARILADEGKKRVVIVDTSNEIGGDGDVPHSGIGRARRMQVPKVTMQHNVMIEAVENHMPEVIVIDEIGTELEAMAASTIAQRGVQLVGTAHGVTIESIIKNPCLQMLVGGIESVTLGDEEAKKRKVQKTILERKGPPTFSCAVEIISKTECRVHHKLETTVDAI

SEQ ID NO: 89160 - protein, 207 aa, Setaria italica
  Transcript Sequence Number=SeqID_23186
  Gene Ontology: Mol. function=transporter activity; Cellular component= integral to membrane; Biological process=transport
  Homolog annotation: Hit_ID=B6TU79; Match level="QueryCoverage=100%, HitCoverage=45%, E-value=1e-91, Identity=84%"; Hit description =Sulfate transporter
MASAAGDPLLPPEGSGRRLGFLPSSVHLKTSVWSELGGAVGDLGTYIPIVLALSLASHLDLGTTLIFTALYNFSTGLLFGIPMPVQPMKSIAAVALSSAHLTIPQIMSAGLSVAAVLLFLGATGLMTCLYRLLPLPVVRGIQLSQGLSFAFTAVKYIRYVQDFSHSSSASTAVARPLLGLDGLVLALAALLFIILATGSGDDEEVSS

SEQ ID NO: 89161 - protein, 75 aa, Setaria italica
  Transcript Sequence Number=SeqID_23187
ASVVEEHPSEGTSSASSDDSGSPINHSAMPFNHSGQHQHPHQHQHQHQHMPPAYASGGWSLSAHQQNRHCTLVLL

SEQ ID NO: 89162 - protein, 345 aa, Setaria italica
  Transcript Sequence Number=SeqID_23188
  Gene Ontology: Mol. function=DNA binding; Cellular component=nucleus
  Homolog annotation: Hit_ID=B4FWG7; Match level="QueryCoverage=89%, HitCoverage=74%, E-value=1e-122, Identity=74%"; Hit description=AT -hook protein 1
  Pfam annotation: Domain name=AT_hook; Domain location=45-57; Score =13.8; E_value=0.11; Accession=PF02178.11; Description=AT hook motif
  Pfam annotation: Domain name=AT_hook; Domain location=97-109; Score =6.5; E_value=2; Accession=PF02178.11; Description=AT hook motif
  Pfam annotation: Domain name=DUF296; Domain location=122-242; Score =237.3; E_value=3.9e-68; Accession=PF03479.7; Description=Domain of unknown function (DUF296)
  Pfam module annotation: Pfam domain module=AT_hook::AT_hook::DUF296; Domain location=45-57::97-109::122-242
APKPEHHHHAAPMLYAPPPQSTAGAGGGAAGSPGGNVLGMGELMRKKRGRPRKYAPDGSMALALAPISSASAGGAAAPGQQQHGGFSISSPPSDPNAKRRGRPPGSGKKKQFEALGSWGIAFTPHILTVKAGEDVASKIMTFSQQGPRTVCILSANGAISNVTLRQPATSGGLVTYEGRFEIISLSGSFLLAEDGDTRSRTGGLSVALAGSDGRVLGGCVAGMLMAATPVQVVVASFIAEGKKSKPAEARKVEPMSAPPPQMPTFVPPPVATSPPSEGTSSASSDDSGSPINHSAMPFNHSGQHQHPHQHQHQHQHMPPAYASGGWSLSAHQQNRHDSDMKMMSN

SEQ ID NO: 89163 - protein, 190 aa, Setaria italica
  misc_feature (44)..(44): Xaa can be any naturally occurring amino acid
  Transcript Sequence Number=SeqID_23189
  Gene Ontology: Mol. function=lyase activity
  Homolog annotation: Hit_ID=Q6ETM5; Match level="QueryCoverage=93%, HitCoverage=35%, E-value=5e-55, Identity=58%"; Hit description =Putative ribosomal RNA apurinic site specific lyase
  Pfam annotation: Domain name=FBD; Domain location=78-127; Score=57.7; E_value=4.5e-14; Accession=PF08387.2; Description=FBD
  Subcellular localization annotation: CTP_CleavageSite=39; ConfidenceScore=5.02e-01
RDGASWICCFCVLQSGTRPSPKTTVPSVQMLALHLHFKLCNEVXKMLPSFLRCFPNVETLCIQSEETSEPSDKRNLKYWQETGPINCVQSQLKRLVFREFHGEENEFAFLIFIAENARVLENMVLVMELRTPSAPEDLAAKMKALETARWASGSNKAGYLLSRPGVGGGSAWCLKAGSDFKCNDPFLCLV

SEQ ID NO: 89164 - protein, 61 aa, Setaria italica
  Transcript Sequence Number=SeqID_23190
RLRMRWLAVLYRRTLRRLRAYYATAINDLLEGAAVISSIRGPAGADCSFGTAFAPVVTVGY

SEQ ID NO: 89165 - protein, 85 aa, Setaria italica
  Transcript Sequence Number=SeqID_23191
  Gene Ontology: Mol. function=DNA binding; Cellular component=nucleus
  Homolog annotation: Hit_ID=B4FRV0; Match level="QueryCoverage=100%, HitCoverage=20%, E-value=5e-11, Identity=45%"; Hit description=DNA -binding protein
  Subcellular localization annotation: CTP_CleavageSite=28; ConfidenceScore=5.35e-01
AVGAVMKRGRGRPVGFVSRATPISVAVTAAAPTAAVVVSAPAPQTLFGPLGELVACASGANFTPHIINVAAGEDVNMKVISFSQQ

SEQ ID NO: 89166 - protein, 226 aa, Setaria italica
  Transcript Sequence Number=SeqID_23192
  Gene Ontology: Mol. function=nucleoside-triphosphatase activity; Cellular component=intracellular; Biological process=regulation of transcription, DNA-dependent
  Homolog annotation: Hit_ID=Q9FNQ1; Match level="QueryCoverage=99%, HitCoverage=48%, E-value=1e-108, Identity=54%"; Hit description=RNA helicase
KSGEGIIITTHDKLAYYLRLLTSQLPIESQFLGSLKDNLNAEVALGTVTNVREACAWLGYTYLFIRMKTNPLVYGITWEEVLGDPSMGAKQRAFIIDAARALDKAKMMRYDEKSGNFYCTELGRIASHFYLQYSSVEIYNEMLRRHMSESEVITMVAHSSEFENIVVREEEQDELEALARKACPLEIKGGPTDKHGKISILIQVYISRAPIDSSSLHSDAQYISQA

SEQ ID NO: 89167 - protein, 614 aa, Setaria italica
  Transcript Sequence Number=SeqID_23193
  Gene Ontology: Mol. function=transposase activity; Cellular component= membrane; Biological process=transposition, DNA-mediated
  Homolog annotation: Hit_ID=Q7FA01; Match level="QueryCoverage=49%, HitCoverage=41%, E-value=1e-130, Identity=70%"; Hit description =OSJNBa0079C19.15 protein
  Pfam annotation: Domain name=Transposase_11; Domain location=384-553; Score=34.9; E_value=3.3e-07; Accession=PF01609.13; Description =Transposase DDE domain
MKSQGDLDDDEFFSQPPSFPLAAFPSGGRGAGRRHVPGGLEGLDLNSEAMDFNDNMSYLDLLRSSPARLVGDGDLLGGARHGAGRAPGRGVGRGRASSRATGRSGSCGRRAAEQDVGIPSRSAGGGRGHARATPNRRPTTTASRQFLPPRPAGGQSSGATPSGADDAFDVGLQNPSTSTWSLNPSNEEADDLQDIDASMTYSSSDDDDESASKSSSTDEDEVNRNALGQLELVHQFGAVACIFGMYYESAFMNKTKKVKTGLSGYEWVMTTLSNPTACYDMFRMSRELFWRLHDVLVSSYGLNSSKRMSSIESLAMFLWIIGAPQSLRQAENRFERSIETVSRKFEQVLDSVFRLSADVIKPRDPHFRTVHPRLRNPRFSPHFDNCIGAIDGTHIPVVVPLSRTSQHVGRHGYSSQNVLAICDFDMRFTFAVAGWPGSVHDMRVFNDAINKYGDKFPHPPQGKFYLVDSGYPNRPGYLAPYKGTKYHLPEFQQGPRPRGKKEVFNYLHSSLRNVIERSFGVLKMKWRMLLDLPSYPLNKQSKIILASMALHNFIRESNMRDQDFDMCDQDEEYMPMPTTAASQASGATNLLGDEDIDMNAFRDAIANALFHNEE

SEQ ID NO: 89168 - protein, 104 aa, Setaria italica
  misc_feature (7)..(7): Xaa can be any naturally occurring amino acid
  misc_feature (10)..(10): Xaa can be any naturally occurring amino acid
  Transcript Sequence Number=SeqID_23194
  Gene Ontology: Mol. function=extracellular-glutamate-gated ion channel activity; Cellular component=integral to membrane; Biological process=G-protein coupled receptor protein signaling pathway
  Homolog annotation: Hit_ID=Q69L05; Match level="QueryCoverage=98%, HitCoverage=11%, E-value=7e-48, Identity=86%"; Hit description =Putative Avr9/Cf-9 rapidly elicited protein 141
LTVQQLXPTXTDIHELIKKGEYVGYHNGSYVGDLLEELGFDRRKIRAYETSDDFADALSKGSKMGGITAVVHEVPYIKIFLAKHCKGYTMVGPIYKSEGFGFVS

SEQ ID NO: 89169 - protein, 185 aa, Setaria italica
  Transcript Sequence Number=SeqID_23195
  Gene Ontology: Mol. function=voltage-gated potassium channel activity; Cellular component=integral to membrane; Biological process=potassium ion transport
  Homolog annotation: Hit_ID=O65816; Match level="QueryCoverage=94%, HitCoverage=24%, E-value=4e-65, Identity=68%"; Hit description =Putative calmodulin binding transporter protein
SENIVVPCRKTKSATGTLHPQGPFLQKWNRIFVISCILAVSVDPLFLYIPIINDEKPCWYLDRKLEKAASVLRFFTDIFYILHIIFQFRTGFIASSPTTFGRGVLIKDRYAIMKRYISTYFFIDVFAILPIPQVIILVVLPKLPDAEVMKAKNVLMIIIICQYVPRLIRIRPLYQQITRSAGVIT

SEQ ID NO: 89170 - protein, 100 aa, Setaria italica
  misc_feature (42)..(42): Xaa can be any naturally occurring amino acid
  misc_feature (59)..(59): Xaa can be any naturally occurring amino acid
  misc_feature (71)..(71): Xaa can be any naturally occurring amino acid
  Transcript Sequence Number=SeqID_23196
  Gene Ontology: Mol. function=voltage-gated potassium channel activity; Cellular component=integral to membrane; Biological process=potassium ion transport
  Homolog annotation: Hit_ID=Q4VDM3; Match level="QueryCoverage=91%, HitCoverage=45%, E-value=9e-26, Identity=62%"; Hit description =Cyclic nucleotide-gated ion channel 1 (Fragment)
MKTMSEFEAFALRAEDLRFVATQFRGLHSKQLHHTFRFYLQXFIQAALHRYCRNKIEDXEKRLMFVIANDXLSFMAALYASRFAGNRIQILSVIPQPNIS

SEQ ID NO: 89171 - protein, 97 aa, Setaria italica
  misc_feature (26)..(26): Xaa can be any naturally occurring amino acid
  Transcript Sequence Number=SeqID_23197
  Gene Ontology: Mol. function=voltage-gated potassium channel activity; Cellular component=integral to membrane; Biological process=potassium ion transport
  Homolog annotation: Hit_ID=Q9LM04; Match level="QueryCoverage=79%, HitCoverage=10%, E-value=3e-29, Identity=77%"; Hit description =Cyclic nucleotide-gated calmodulin-binding ion channel
GEESASLRIEEMRVKRHDTDQWMSYXHLPENLKERIRCYEQYRWQETSGVDEEQLLVNLPKDLRRDIKLHLCLSLLMRVCSYMVLFSQSNLLTITYQ

SEQ ID NO: 89172 - protein, 518 aa, Setaria italica
  misc_feature (460)..(460): Xaa can be any naturally occurring amino acid
  Transcript Sequence Number=SeqID_23198
  Gene Ontology: Mol. function=voltage-gated potassium channel activity; Cellular component=integral to membrane; Biological process=potassium ion transport
  Homolog annotation: Hit_ID=O65816; Match level="QueryCoverage=95%, HitCoverage=71%, E-value=0.0, Identity=75%"; Hit description =Putative calmodulin binding transporter protein
  Pfam annotation: Domain name=Ion_trans; Domain location=1-216; Score =18.7; E_value=0.0029; Accession=PF00520.23; Description=Ion transport protein
  Pfam annotation: Domain name=cNMP_binding; Domain location=317-417; Score=15.2; E_value=0.016; Accession=PF00027.21; Description=Cyclic nucleotide-binding domain
  Pfam module annotation: Pfam domain module=Ion_trans::cNMP_binding; Domain location=1-216::317-417
FCYQVIIILPIPQVIILVVLPKLPDAEVMKAKNVLMIIIICQYVPRLIRIRPLYQQITRSAGVITETARAGAAFNLLLYMLASHVLGAIWYLLSIQRQESCWRQECRNNATCDAKYIYCGAVNNNEKNAFLKTVCSLSPPNSLPDPFFGIYAPAIENITQSRSFFVKLFFCVWWGLQNLSSLGQNLKTSTYAWENIFAVFVSISGLVLFALLIGNMQTYLQSASLRIEEMRVKSRDTDQWMSYRHLPENLKERIRRYEQYRWQETSGVDEEQLLVNLPKDLRRDIKRHLCLSLLMRVPMFENMDDQLLDAMCDCLKPILYTEGSCIICEGDPVTEMLFIMRGNLMSMTTNGGRTGFFNSDILKGGDFCSEELLTWALDPTSTSSLPNSTRMMKTISKVEAFALRVDDLRFVATQFRRLHSKQLQHQEQWRTWAACFIQAAWHRYCRKKTEYSLYEKEEVXFAIVIEGSTSLSFMAALYASRFARNMVRILRRKATRKARLPARLLWKPAETNFSAEEQ

SEQ ID NO: 89173 - protein, 241 aa, Setaria italica
  Transcript Sequence Number=SeqID_23199
  Gene Ontology: Mol. function=voltage-gated potassium channel activity; Cellular component=integral to membrane; Biological process=potassium ion transport
  Homolog annotation: Hit_ID=O65816; Match level="QueryCoverage=100%, HitCoverage=34%, E-value=1e-110, Identity=78%"; Hit description =Putative calmodulin binding transporter protein
  Pfam annotation: Domain name=cNMP_binding; Domain location=30-130; Score=31.9; E_value=2.6e-06; Accession=PF00027.21; Description =Cyclic nucleotide-binding domain
YLIQPIAMRVPMFENMDDQLLDAMCDCLKPILYTEGSCIIREGDPVTEMLFIMRGNLMSMTTNGGRTGFFNSDVLEGGDFCGEELLTWALDPTSTSSLPSSTRTVKTMSEVEAFALRAEDLRFVAIQFRRLHSKQLQHTFRFYSQQWRTWAACFIQAAWHRYCRKKIEDSLREKEKRLKFAIATEGSTSLSFMAALYASRFAGNMVRILRRNATRKARLQERVPARMLQKPAEPNFSAEEQ

SEQ ID NO: 89174 - protein, 131 aa, Setaria italica
  Transcript Sequence Number=SeqID_23200
  Gene Ontology: Mol. function=transferase activity, transferring glycosyl groups; Cellular component=integral to membrane
  Homolog annotation: Hit_ID=B6SS28; Match level="QueryCoverage=98%, HitCoverage=21%, E-value=1e-71, Identity=96%"; Hit description =Xyloglucan galactosyltransferase KATAMARI 1
  Pfam annotation: Domain name=Exostosin; Domain location=1-130; Score=- 15.9; E_value=1.2e-05; Accession=PF03016.7; Description=Exostosin family
RRNSNDFGIPYPTYFHPAKDADVFLWQDRMRSLERPWLFSFAGAPRPGDPMSIRGQLIDQCRSSSVCKLLECDLGESKCHSPSTVMKMFQSSLFCLQPQGDSYTRRSAFDSMLAGCIPVFFHPGSAYVQYT

SEQ ID NO: 89175 - protein, 508 aa, Setaria italica
  Transcript Sequence Number=SeqID_23201
  Gene Ontology: Mol. function=transferase activity, transferring glycosyl groups; Cellular component=integral to membrane
  Homolog annotation: Hit_ID=B6SS28; Match level="QueryCoverage=92%, HitCoverage=78%, E-value=0.0, Identity=85%"; Hit description =Xyloglucan galactosyltransferase KATAMARI 1
  Pfam annotation: Domain name=Exostosin; Domain location=47-389; Score= 436.8; E_value=3.3e-128; Accession=PF03016.7; Description=Exostosin family
PPSVAPPEEEEEEVKPPPEPPGGAAAQGGVVGVRRATLKTAENKSDPCGGRYIYVHELPPRFNEDMLRDCEKLSVWTNMCRFMSNDGLGPPLSDEEGVFSSTGWYGTNQFSVDVIFGNRMKQYECLTKDSSIAAAVFVPFYAGFDIARYLWGYNISTRDAASLDLVDWLMKKPEWNVMGGRDHFLVAGRITWDFRRLTEEESDWGSKLLFLPAAKNMSMLVVESSPWNSNDFGIPYPTYFHPAKDADVFLWQDRMRSLERPWLFSFAGAPRPALIYELSPDGLDQCRSSSVCKLLECDLGESKCHSPSTVMKMFQSSLFCLQPQGDSYTRRSAFDSMLAGCIPVFFHPGSAYVQYTWHLPKNYTRYSVFIPEDDIRTRNASIEERLKSFHPDVVKNMREEVINLIPRVIYADPRSKLETLKDAFDVSIEAIINKVTKLRRDIIAGHEDKDFIEENSWKYSLLEDGQHTIGPHEWDPFFSKPKEKGGDSSSSSAEAAKNSWKSEQRGQN

SEQ ID NO: 89176 - protein, 382 aa, Setaria italica
  Transcript Sequence Number=SeqID_23202
  Gene Ontology: Mol. function=hydrolase activity, acting on ester bonds; Biological process=lipid metabolic process
  Homolog annotation: Hit_ID=B6T2M4; Match level="QueryCoverage=87%, HitCoverage=89%, E-value=1e-166, Identity=84%"; Hit description =Anther-specific proline-rich protein APG
  Pfam annotation: Domain name=Lipase_GDSL; Domain location=53-365; Score=175.1; E_value=2e-49; Accession=PF00657.14; Description=GDSL -like LipaseAcylhydrolase
MIISRSSQLLLLLLLILLAPASTCAAAANATRSAKQQQHRPNADDKPHQAAALIVFGDSIVDPGNNNGINTIIKADFPPYGDDFLNHRPTGRFCNGRIPTDFIASRLGLKDYLPPYLSPQPLDTHDLITGVSFASGGTGFDPLTPKLASVISLPDQLTMFHEYLGKVRAAAGDDKASEILSRGVFAICAGSDDIANTYFTMRARSEYDHASYANLLVQHASSFVEDLIRAGGRRVAFIGIPPIGCVPSQRTMSGGLERGCSQGHNEVAVAYNAGMVRELAALRAKYPGTLLVFMDIYGFLYDMMMHPRSYGFKQSTKGCCGTGLLEVSVLCNRVTSAVCDPVGDYLFWDSYHPTEKAYKILADFVYENSSSSSSDLISSDDA

SEQ ID NO: 89177 - protein, 141 aa, Setaria italica
  misc_feature (136)..(136): Xaa can be any naturally occurring amino acid
  Transcript Sequence Number=SeqID_23203
  Gene Ontology: Mol. function=phosphoprotein phosphatase activity; Cellular component=nucleus
  Homolog annotation: Hit_ID=Q60EX6; Match level="QueryCoverage=97%, HitCoverage=15%, E-value=3e-72, Identity=94%"; Hit description =Serine/threonine protein phosphatase BSL1 homolog
WTSRHSTDDLYVLDLTNDKFKWHRVVVQGAGPGPRYGHCMDLVAQRYLVTVSGNDGKRVLSDAWALDTAQKPYRWQKLSPEGDRPSARMYATASSRSDGMLLLCGGRDASGTPLSDAYGLLMHTNGQWEWTLAPGXVSPSP

SEQ ID NO: 89178 - protein, 758 aa, Setaria italica
  misc_feature (55)..(55): Xaa can be any naturally occurring amino acid
  Transcript Sequence Number=SeqID_23204
  Gene Ontology: Mol. function=phosphoprotein phosphatase activity; Cellular component=nucleus
  Homolog annotation: Hit_ID=Q60EX6; Match level="QueryCoverage=100%, HitCoverage=85%, E-value=0.0, Identity=84%"; Hit description =Serine/threonine protein phosphatase BSL1 homolog
  Pfam annotation: Domain name=Kelch_2; Domain location=132-181; Score =13.0; E_value=0.81; Accession=PF07646.7; Description=Kelch motif
  Pfam annotation: Domain name=Kelch_2; Domain location=200-245; Score =13.1; E_value=0.78; Accession=PF07646.7; Description=Kelch motif
  Pfam annotation: Domain name=Kelch_2; Domain location=80-129; Score =12.7; E_value=0.9; Accession=PF07646.7; Description=Kelch motif
  Pfam annotation: Domain name=Metallophos; Domain location=455-664; Score=122.4; E_value=1.4e-33; Accession=PF00149.20; Description =Calcineurin-like phosphoesterase
  Pfam module annotation: Pfam domain module=Kelch_2::Kelch_2::Kelch _2::Metallophos; Domain location=132-181::200-245::80-129::455-664
DLYVLDLTNDKFKWHRVVVQGAGPGPRYGHCMDLVAQRYLVTVSGMMEVNTRIDXWALDTAQKPYRWQKLSPEGDRPSARMYATASSRSDGMLLLCGGRDASGTPLSDAYGLLMHTNGQWEWTLAPGVSPSPRYQHAAVFVGARLHVTGGVLRGGRAIEGEGAIAVLDTAAGVWLDRNGIVTSRTLKSSNEHDASSDLLRRCRHAAASVGSQIYIYGGLRGDILLDDFLVAENAPFQSEITSSMYGADRVPRGETQNRNHNYYSDSPVQQSSNNSTDKKSIDMLIEASTAEAEAVSAVWRAAKEASAASSEDSLSEGIGSESPLSETSPMPEDFDDGGSLEPDVKLHSRAVVVAKEAVGDLGCLVRQLSLDQFENESRRMHPSSNDQSYPGRRALNRQRSPQGLHKKIISFLLKPRNWRAPADRTFFLDSYEVGELCYAAEQIFMQEPTVLQLKAPIKVFGDLHGQFGDLMRLFDEYGFPSTAGDITYIDYLFLGDYVDRGQHSLETITLLLALKIEYPENVHLIRGNHEAADINALFGFRLECIERMGESDGIWAWTRFNQLFNYLPLAAMIEKKIICMHGGIGRSINTVEQIEKLERPITMDVGSIILMDLLWSDPTENDSVEGLRPNARGPGLVTFGPDRVTEFCKRNKLQLIIRAHECVMDGFERFAHGQLITLFSATNYCGTANNAGAILVVGRGLVVVPKLIHPLPPPVNSPESSPERGDATWMQELNIQRPPTPTRGRPQAAGDRNSLAYI

SEQ ID NO: 89179 - protein, 96 aa, Setaria italica
  misc_feature (91)..(91): Xaa can be any naturally occurring amino acid
  Transcript Sequence Number=SeqID_23205
  Subcellular localization annotation: CTP_CleavageSite=47; ConfidenceScore=5.02e-01
HSTPSLYTCYTVSVGYMASAVVFSATILLLAVAVVFASVSCASHPLTAAEATDHAITKEKSNLLQVHSDYDKEMEEAKATRGQRGSATEKXTNLVS

SEQ ID NO: 89180 - protein, 48 aa, Setaria italica
  Transcript Sequence Number=SeqID_23206
LSETQNYVLVWRHMEHGSKHLCSYSATITYIQCRCRYNYDFFYYSFGA

SEQ ID NO: 89181 - protein, 47 aa, Setaria italica
  Transcript Sequence Number=SeqID_23207
ALDYGSHLSASKALRASYYCFSHYIDDHRFVAKSSYGPQMLKSNRVL

SEQ ID NO: 89182 - protein, 85 aa, Setaria italica
  Transcript Sequence Number=SeqID_23208
  Gene Ontology: Mol. function=nucleotide binding; Biological process =defense response
TINGNSSEALRHVWIRNNTPTTAVEEMGTVASLKTIILYKIPLGNRSLDKLFKGLKYLQLLDLGGTEITYVPRTLESLYHLRLLN

SEQ ID NO: 89183 - protein, 58 aa, Setaria italica
  Transcript Sequence Number=SeqID_23209
ELSLDQFDDGVNVCPHHPGSSPCQDEFGCLFFLNKATYFFLGRSNCFLTVLKDGNYNF

SEQ ID NO: 89184 - protein, 175 aa, Setaria italica
  Transcript Sequence Number=SeqID_23210
  Gene Ontology: Mol. function=transcription factor activity; Cellular component=nucleus; Biological process=regulation of transcription, DNA-dependent
  Homolog annotation: Hit_ID=A7XA61; Match level="QueryCoverage=100%, HitCoverage=48%, E-value=2e-45, Identity=57%"; Hit description=DRF -like transcription factor DRFL2a
  Pfam annotation: Domain name=AP2; Domain location=1-51; Score=70.4; E_ value=6.5e-18; Accession=PF00847.12; Description=AP2 domain
LYRGVRQRHWGKWVAEIRLPRNRTRLWLGTFGSAEDAALAYDKAAFRLRGDAARLNFPSLRRGGSHLAGPLDASVDAKLTAICQGLAAAPDSKSAAAAPESPKASASTTTTEGDESVHSAGSPPPLPAFQQQQQQVAPVPEMASLDFTEAPWDESAALHLNKYPSWEIDWDSILS

SEQ ID NO: 89185 - protein, 58 aa, Setaria italica
  Transcript Sequence Number=SeqID_23211
  Subcellular localization annotation: CTP_CleavageSite=41; ConfidenceScore=5.41e-01
SPMAAGGANAVAAAATLGYAGSNTCMKRPMTAMPMLPLTPMAAANCSTGFIAKRQRLH

SEQ ID NO: 89186 - protein, 207 aa, Setaria italica
  misc_feature (175)..(175): Xaa can be any naturally occurring amino acid
  Transcript Sequence Number=SeqID_23212
  Gene Ontology: Mol. function=oxidoreductase activity, acting on CH-OH group of donors; Biological process=cellular alcohol metabolic process
  Homolog annotation: Hit_ID=B6THN3; Match level="QueryCoverage=90%, HitCoverage=32%, E-value=1e-68, Identity=69%"; Hit description =Protein HOTHEAD
  Pfam annotation: Domain name=GMC_oxred_N; Domain location=4-207; Score=-93.7; E_value=0.036; Accession=PF00732.11; Description=GMC oxidoreductase
TKGLSGGTAGYPLAATLSERSRVLLLERGGSPYDDERIGDMTRFADTLSDTSPGSPAQRFVSEDGVINSRPRVLGGGSCINAGFYTRAGDNYVRDVGWDLDAAKAAYRWVEDVVAFQPELGPWQAALQSGLLESGIAPDNGFTFDHIDGTKVGGSIFDADGRRHTAADLLRYARXDGIDVLLRARVAKILFNVRGRRPVARGVVFHD

SEQ ID NO: 89187 - protein, 87 aa, Setaria italica
  Transcript Sequence Number=SeqID_23213
  Gene Ontology: Mol. function=hydrolase activity, hydrolyzing O -glycosyl compounds; Cellular component=cell wall; Biological process= carbohydrate metabolic process
  Homolog annotation: Hit_ID=Q8W012; Match level="QueryCoverage=73%, HitCoverage=8%, E-value=1e-29, Identity=93%"; Hit description=Alpha -L-arabinofuranosidase/beta-D-xylosidase isoenzyme ARA-I
ILTRFICPPAQVVSNEARAMHNVGLAGLTFWSPNINIFRDPRWGRGQETPGEDPLLTSKYAVGYVTGLQDAGSGAGGRTSPSKVRPS

SEQ ID NO: 89188 - protein, 770 aa, Setaria italica
  Transcript Sequence Number=SeqID_23214
  Gene Ontology: Mol. function=hydrolase activity, hydrolyzing O -glycosyl compounds; Cellular component=cell wall; Biological process= carbohydrate metabolic process
  Homolog annotation: Hit_ID=Q8W012; Match level="QueryCoverage=95%, HitCoverage=95%, E-value=0.0, Identity=85%"; Hit description=Alpha-L- arabinofuranosidase/beta-D-xylosidase isoenzyme ARA-I
  Pfam annotation: Domain name=Glyco_hydro_3; Domain location=80-333; Score=219.5; E_value=8.7e-63; Accession=PF00933.13; Description =Glycosyl hydrolase family 3 N terminal domain
  Pfam annotation: Domain name=Glyco_hydro_3_C; Domain location=405 -636; Score=269.2; E_value=9.2e-78; Accession=PF01915.14; Description= Glycosyl hydrolase family 3 C terminal domain
  Pfam module annotation: Pfam domain module=Glyco_hydro_3::Glyco_hydro_ 3_C; Domain location=80-333::405-636
  Subcellular localization annotation: CTP_CleavageSite=59; ConfidenceScore=5.60e-01
MAAAAPPFSAPAAAAVAAALLLCFFSGCNAQTPVFACDASNATLAAYGFCNRSATPAARAADLVSRLKLAEKVGFLVDKQAALPRLGIPAYEWWSEALHGVSYVGPGTRFSPLVPGATSFPQPILTAASFNVTLFRAIGEVVSNEARAMHNVGLAGLTFWSPNINIFRDPRWGRGQETPGEDPLLTSKYAVGYVTGLQDAGSGAGGDSLKVAACCKHYTAYDVDNWKGVERYTFNAVVSQQDLDDTFQPPFKSCVIDGNVASVMCSYNQVNGIPTCADKDLLSGVIRGDWKLNGYISSDCDSVDVLYNNQHYTKTPEDAAAISIKAGLDLNCGNFLAQHTVAAVQAGKLSESDVDRAITNNFITLMRLGFFDGDPRKLPFGSLGPSDVCTSSNQELAREAARQGIVLLKNSGALPLSAKNIKSMAIIGPNANASFTMIGNYEGTPCKYTTPLQGLGANVATVYQPGCTNVACSGNSLQLDAATKAAASADVTVLVVGADQSIERESLDRTSLLLPGQQPQLVSAVANASSGPCILVIMSGGPFDISFAKSSDKIAAILWVGYPGEAGGAAIADVLFGYHNPSGRLPVTWYPESFTKIPMTDMRMRPDKSTGYPGRTYRFYTGDTVYAFGDGLSYTSFAHHLVSAPTHVAVVLAEGHACLTEHCLSVEAEGGHCDKLAFDVHLRVRNAGEVAGRHTVFLFSSPPAVHNAPAKHLLGFEKVSLEPGQAGVVAFKVDVCRDLSVVDELGNRKVALGSHTLHVGDLKHTINLRV

SEQ ID NO: 89189 - protein, 161 aa, Setaria italica
  Transcript Sequence Number=SeqID_23215
  Gene Ontology: Mol. function=catalytic activity; Biological process =metabolic process
  Homolog annotation: Hit_ID=Q9C8A3; Match level="QueryCoverage=91%, HitCoverage=6%, E-value=5e-51, Identity=57%"; Hit description=Acetyl- CoA synthetase, putative; 45051-31547
MWTNIFKIVDLQTVSWFQFLPIEPDASTTKERSSKAEQKDALNNVVLSAYLHLQSEGFLSTWTNSFVGPWDPSQGEHNPDEKIKLWLFLPGRHSSVSEMAQTAVNKLRVASNGLWVAPGNSEEVAAALSQALRNSLERSLRGLSYARFGDVFTKYNPPTKN

SEQ ID NO: 89190 - protein, 222 aa, Setaria italica
  misc_feature (217)..(217): Xaa can be any naturally occurring amino acid
  Transcript Sequence Number=SeqID_23216
  Gene Ontology: Mol. function=catalytic activity; Biological process =metabolic process
  Homolog annotation: Hit_ID=Q9C8A3; Match level="QueryCoverage=95%, HitCoverage=10%, E-value=9e-41, Identity=37%"; Hit description =Acetyl-CoA synthetase, putative; 45051-31547
MAQTAVNKLRVASNGLWVAPGNSEEVAAALSQALRNSLERSLRGLSYARFGDVFTKYNPPTRNQNSFRRAQPTVEFVFAATEEAIFVHVLISARYMRNLCSDDIEKVLTHSPRSVGEGLPVVVAPSGMLGRLVGCCPSDLVRQVYPSKSSAPNLPGFTQPTIQMKKEMDSVKDSQLGADGQRKVESPDSLPVLERTFIYPPEAVLVPMVHQAFVRFXSKRMC

SEQ ID NO: 89191 - protein, 523 aa, Setaria italica
  misc_feature (153)..(153): Xaa can be any naturally occurring amino acid
  misc_feature (176)..(176): Xaa can be any naturally occurring amino acid
  Transcript Sequence Number=SeqID_23217
  Gene Ontology: Mol. function=DNA binding; Cellular component=nucleus; Biological process=cell cycle
AYFSHVAMICKSEGVDVTVPELKHVVDICLGDIRRTVMLLQFWYQGKQQFTERPNECLCGPFSLDLDAVHSTVPKMLPWEFPSKLSETVYMEVDKTILVAEEKKKQMEASYLEGLQLQVIAPSVKGRSAATTRKAKKSKLKRGQAAERNDISXGVSCVPESSFIVEGTSASISDDXILSRAVSNDLSTFHDSGTYTMFRTVLEDNDNAKNVMAERQKDVEDVVGETSEAYVESFGRNEQASCSTAGFQLMDECSRAESIWLLSGKKSNDSCKVEQVQDTWNRLRSCCPELSHEADHNRAASGALKLASGVSDLISELDLMLSCCYPLTKDMLDPSSTPCAEPDDFSWYNNQVEMGSVYAQHALCMFSRESQDIDDGSVALSQELLFASTAAISLGKIISSGLMKSCGSANVSHMKNPTTCISKRREHQVHLFGTMSQVVPSKLSQSLRGPVFVDYLSSIGQIARLENLRLSESKGINKQRRSRQPRHYLSSLPLSPADVVLLSESSCFSGRREKVLEQAPCST

SEQ ID NO: 89192 - protein, 144 aa, Setaria italica
  Transcript Sequence Number=SeqID_23218
MELIASKVGILPRKLSKKHDPFCDSLRSMAKQLLELKYDGTQDSDLYDFEANGEGCNVKYLEMYDPPVEIKESAVHKIPSDSPHDDVGSRKCQQEELNHESEHDIPPTDSPHDSVPDDRNLFQDSNIVTSPSSPRGRRMCKYCT

SEQ ID NO: 89193 - protein, 258 aa, Setaria italica
  Transcript Sequence Number=SeqID_23219
  Gene Ontology: Mol. function=DNA binding; Cellular component=nucleus
  Pfam annotation: Domain name=DUF296; Domain location=28-141; Score =74.9; E_value=2.9e-19; Accession=PF03479.7; Description=Domain of unknown function (DUF296)
FAEFHFKKSNLLNFGVSLWTGHGQLGGLQPHVLKIDVGEDIISKIVGASKIIGKAVCVLSVLGVVQEANLLHSSVILNHKGPLEIIRMFGSICTSDSPGFGCLSVTLACADCSVVGGVVAGPLVAATPIQAIVGSFYNDAFRANKTPGINAGYPNSQFATGYWVTHYPNSQVGTGFGVMRYPNSHAATGSGCTPSYPSSQVAVGTGSMRCLNSEVATGSWSKHDPNSHVPIGDGSTYHSNSQVTAGDGSAHAHHPSSH

SEQ ID NO: 89194 - protein, 198 aa, Setaria italica
  misc_feature (42)..(42): Xaa can be any naturally occurring amino acid
  Transcript Sequence Number=SeqID_23220
  Gene Ontology: Mol. function=protein dimerization activity; Cellular component=endoplasmic reticulum lumen; Biological process=proteolysis
  Homolog annotation: Hit_ID=Q8H3C8; Match level="QueryCoverage=100%, HitCoverage=44%, E-value=1e-86, Identity=77%"; Hit description=IAA -amino acid hydrolase ILR1-like 8
  Pfam annotation: Domain name=M20_dimer; Domain location=1-95; Score =4.6; E_value=0.08; Accession=PF07687.6; Description=Peptidase dimerisation domain
  Pfam annotation: Domain name=Peptidase_M20; Domain location=5-198; Score=-5.9; E_value=0.0015; Accession=PF01546.20; Description =Peptidase family M20M25M40
  Pfam module annotation: Pfam domain module=M20_dimer::Peptidase_M20; Domain location=1-95::5-198
GKGGHAGGPHDTIDPVIAASSAILSLQQLVSRETDPLEAAFXVVSVTLLKGGEAYNVIPESVTIGGTFRSMTDQGLSYLMKRVKEIIEAQATVNRCAATVDFLEEDLRPYPTTVNDELMYAHAKEVAEGMLGEANVKIRPQTMGGEDFAFYAQRAAGAFFMIGVGNETTMEKVRPVHSPYFVMDEEALPVGAAFHAAV

SEQ ID NO: 89195 - protein, 116 aa, Setaria italica
  Transcript Sequence Number=SeqID_23221
  Gene Ontology: Mol. function=cytidine deaminase activity; Biological process=cytidine metabolic process
  Homolog annotation: Hit_ID=B6U9X1; Match level="QueryCoverage=70%, HitCoverage=26%, E-value=8e-22, Identity=67%"; Hit description=CDA1
  Pfam annotation: Domain name=dCMP_cyt_deam_2; Domain location=1-100; Score=115.9; E_value=1.3e-31; Accession=PF08211.3; Description =Cytidine and deoxycytidylate deaminas
GFAAGDLEARLREAAEAAARAAHAPYSECPSGFAVADGDGRIYAGGCLESAAYNPTLGPVQAAIIAMVAAGGGPAGDVVAAALVEKERAAVAQEATARIFLDAVSPPPQVVQTGLI

SEQ ID NO: 89196 - protein, 253 aa, Setaria italica
  Transcript Sequence Number=SeqID_23222
LTKQSAGEPDVQTKIKTLTSIAEEHNIKWEPKAFEEKLQKPNEDRLHGSATYSGGNISTMGSSTSSMSTPQPTYSGVPAATVSATSHVPAGPYSPVDVSANRNSNAFSQENLRNGSSASVPPSSQHGASAYYSTQIPGSNSISHGNTEAPPYTQYGTAVPDTVSRNEEMNQYRERKPSVSGANWNVEFKDATSAAQAAAESAEMASIAARAAAELASRGNYSGDQSTGAYEAAAYSHENTPRKQPAKHLVKDE

SEQ ID NO: 89197 - protein, 67 aa, Setaria italica
  Transcript Sequence Number=SeqID_23223
SSSPSDCSLQTVPSKPNDSAHADLMEKKLSRSIEQIEKMVNQRLKETPKAAQPSKVSVQRRTLMSMR

SEQ ID NO: 89198 - protein, 139 aa, Setaria italica
  Transcript Sequence Number=SeqID_23224
  Gene Ontology: Mol. function=structural constituent of cell wall
  Homolog annotation: Hit_ID=B6UHE3; Match level="QueryCoverage=94%, HitCoverage=54%, E-value=9e-67, Identity=91%"; Hit description =Pistil-specific extensin-like protein
  Pfam annotation: Domain name=Pollen_Ole_e_I; Domain location=12-139; Score=21.6; E_value=1.2e-06; Accession=PF01190.9; Description=Pollen proteins Ole e I family
VPPPKPLPFVIVEGVIYCKSCKGKGYNTGIDASPLPGATAMMVCYGRKVVNATGTVTDGNGYFLIMFYDMQNFNARTCKMYLVSSPTPQCNKPYYPPNQWIGLSLVRETRTIPPAGLQGIYTPTSVLFYAPGAKGQCPY

SEQ ID NO: 89199 - protein, 86 aa, Setaria italica
  Transcript Sequence Number=SeqID_23225
VPAVVLHSGSSSRAPTKDANLHDKIGDFTFEGTTPSSAWRMISCAMMEACEKMYKEHGHLALSCTHNIEKSSFDYGSGSQNTDGPC

SEQ ID NO: 89200 - protein, 60 aa, Setaria italica
  misc_feature (10)..(10): Xaa can be any naturally occurring amino acid
  Transcript Sequence Number=SeqID_23226
QTEYKLFSIXEKLCKCRSSGRVLLTLVLECRLQRLTVKIRAQIISARGVYSNTKPLCRNS

SEQ ID NO: 89201 - protein, 139 aa, Setaria italica
  misc_feature (119)..(119): Xaa can be any naturally occurring amino acid
  Transcript Sequence Number=SeqID_23227
  Gene Ontology: Mol. function=protein binding; Biological process=cell adhesion
  Homolog annotation: Hit_ID=B9R8N1; Match level="QueryCoverage=96%, HitCoverage=17%, E-value=5e-56, Identity=71%"; Hit description =Protein binding protein, putative
RSYECERFQHRRSSYKELQYISDGDSNGVIYYAGTSFGKHQWMNPVLAKNITVVASSPNSRHTDPKALVSKNYQGTCFAGPCIEDGKKISWWMVDIGQDHQLMCNYYTVRQDGSTTFMXGSMDGRNWTSLRVHEEDATI

SEQ ID NO: 89202 - protein, 206 aa, Setaria italica
  misc_feature (136)..(136): Xaa can be any naturally occurring amino acid
  Transcript Sequence Number=SeqID_23228
  Gene Ontology: Mol. function=protein binding; Biological process=cell adhesion
  Homolog annotation: Hit_ID=B9R8N1; Match level="QueryCoverage=86%, HitCoverage=21%, E-value=8e-55, Identity=58%"; Hit description =Protein binding protein, putative
ICVEVQPNTANSSEAFLLALVILVVILQHGDMTVTSEERVLDAILTWCMGTCETFYWTSVDKLLRTSTPEQLFGERLSAIDTLLPFVRFPLMQLSMLKRMEISNLANHIQVFRQLVAEAIEFSHAGQWTPTSICSXERFQHRRSSYKELQYISDGDSNGVIYYAGTSFGKHQWMNPVLAKNITVVASSPNSRHTDPKALVSKNYQV

SEQ ID NO: 89203 - protein, 464 aa, Setaria italica
  misc_feature (212)..(212): Xaa can be any naturally occurring amino acid
  misc_feature (449)..(449): Xaa can be any naturally occurring amino acid
  Transcript Sequence Number=SeqID_23229
  Gene Ontology: Mol. function=protein binding; Biological process=cell adhesion
  Homolog annotation: Hit_ID=B9R8N1; Match level="QueryCoverage=97%, HitCoverage=56%, E-value=1e-134, Identity=51%"; Hit description =Protein binding protein, putative
  Pfam annotation: Domain name=BTB; Domain location=191-294; Score =57.0; E_value=7.3e-14; Accession=PF00651.23; Description=BTBPOZ domain
  Pfam annotation: Domain name=BTB; Domain location=333-446; Score =69.7; E_value=1.1e-17; Accession=PF00651.23; Description=BTBPOZ domain
  Pfam module annotation: Pfam domain module=BTB::BTB; Domain location =191-294::333-446
MEFVEETKKRSLTVAPFECAWGEELRFREPGRGCVSFEASAHNDVTLVFRHHPGSHHYHYKMDTSRHYTVILGSHRNKRLRIQVDGATVADVAAPGLCCSNSFQAFWITICDGLITIGQGRHPNTNLLFQWLDPDPNPDVQYVGLSSWDKHVGYRNISILPAAPQYSILWTQKLLCCGKPGTADDSDQRLLADFLESWDLSDAVFVVGTERXLVPAHRIVLCASGDFPFQIADHGATIQLPSVSYPLLHSLLEYIYTGSTQIAECLLSSLLELSSHFKVKPLIKCCEEIIDCSGVDKKLSESGKILKLSSSGFQQDHKFGSFPLKDPVDAQKIGQFLANGKHSDINIYVNGHGLVAKAHKLILSLWSVPFAKMFTNGMKESSASDVFFKDVPPEAFFLLLQFMYNGELKVDTQDITSVLVQLLLLSDQFAITVLQFECCKRIMECLSEXLACPTGRSSSNKTSF

SEQ ID NO: 89204 - protein, 263 aa, Setaria italica
  misc_feature (22)..(22): Xaa can be any naturally occurring amino acid
  misc_feature (88)..(88): Xaa can be any naturally occurring amino acid
  misc_feature (101)..(101): Xaa can be any naturally occurring amino acid
  Transcript Sequence Number=SeqID_23230
  Homolog annotation: Hit_ID=Q8L4A0; Match level="QueryCoverage=84%, HitCoverage=43%, E-value=2e-80, Identity=69%"; Hit description =P0696G06.24 protein
SSGPAIATADKDALVAGCRQEXEGLFQYYKEVSDRKMRFDGGNLSGNALVGCLLEESSLGLTKLVDEIYEKMKGLDGVSTASVRSSVXLLVGQRMMYGNSXPDADVLEDESESALWCWEIRDLKLMPVKARSILSTRRSVRKKIHERITAIYSTLSVLENPGVETQVNDLRKASLKLNKSLNLEGIRSMVERAIQKNNTERGVRDAGSTVKGLMQDTEKNDQNASRHDDASVSEPQNGNLPANEKDIQKVQKEVEKEMKRQEK

SEQ ID NO: 89205 - protein, 90 aa, Setaria italica
  Transcript Sequence Number=SeqID_23231
WQQACKEAWLKKQNLEPPLDKRKLRSFIRRMEAEQRKNQEKPSLSDYDRQITKQAAHKRKKSRNLFLNSESKPPNQLPRLWCFLTLTKPG

SEQ ID NO: 89206 - protein, 106 aa, Setaria italica
  Transcript Sequence Number=SeqID_23232
  Gene Ontology: Mol. function=DNA binding; Cellular component=nucleus; Biological process=regulation of transcription
  Homolog annotation: Hit_ID=B9SZU8; Match level="QueryCoverage=100%, HitCoverage=30%, E-value=3e-55, Identity=93%"; Hit description=NAC domain-containing protein, putative
  Pfam annotation: Domain name=NAM; Domain location=4-106; Score=188.7; E_value=1.6e-53; Accession=PF02365.7; Description=No apical meristem (NAM) protein
ESCVPPGFRFHPTDEELVGYYLRKKVASQKIDLDVIRDIDLYRIEPWDLQEHCGIGYEEQNEWYFFSYKDRKYPTGTRTNRATMAGFWKATGRDKAVHDKSRLIGM

SEQ ID NO: 89207 - protein, 88 aa, Setaria italica
  Transcript Sequence Number=SeqID_23233
  Subcellular localization annotation: CTP_CleavageSite=78; ConfidenceScore=5.39e-01
GLIKQSYQKDIVAQLPTFSSSPCSTPCEQHGASPSPFLQASTPCFPPVLPTQQAALYQMPVYQCSFCQISIARVHLLLVALSWEQYLS

SEQ ID NO: 89208 - protein, 92 aa, Setaria italica
  Transcript Sequence Number=SeqID_23234
  Subcellular localization annotation: CTP_CleavageSite=72; ConfidenceScore=5.71e-01
SSNYIRKLSLPSFPRFPRLPARRRAYSTAPPRRPSFKPRPPVSHRYFLRNRERSTNLVLEMPSAESLDSAVAAAAVTAASTSAQPEGSDSIL

SEQ ID NO: 89209 - protein, 285 aa, Setaria italica
  misc_feature (274)..(274): Xaa can be any naturally occurring amino acid
  Transcript Sequence Number=SeqID_23235
  Gene Ontology: Mol. function=aspartic-type endopeptidase activity; Biological process=DNA integration
  Homolog annotation: Hit_ID=Q10JD1; Match level="QueryCoverage=99%, HitCoverage=18%, E-value=1e-140, Identity=83%"; Hit description =Retrotransposon protein, putative, Ty1-copia subclass
  Pfam annotation: Domain name=rve; Domain location=166-285; Score =81.8; E_value=2.4e-21; Accession=PF00665.18; Description=Integrase core domain
  Subcellular localization annotation: CTP_CleavageSite=46; ConfidenceScore=5.03e-01
WVARDSSVLMGNGSHASVHDVGTVDLKFTSGKIVQLKNVQHVPSIRKNLVSGSLLCRDGFKVVLESNKIVVSKSRQFIGKGYECGGLFRFSLSDYCNKSVNYICDGINESDASVWHSRLCHLNFGSMSRLSSLCLISNFSIVKGFKCHSCVQSKQPRKPHKVAEERHLAPLELIHTDICEMNGVLTKGGKRYFMTLIDDASRYCYVYLLKMKDEALNYFKIYKAEVENQLKKNIKRIRSDRGDEYFSYDFDLFCEEHGIIHERTPPYSPQSNGXAERKNRTLTDL

SEQ ID NO: 89210 - protein, 81 aa, Setaria italica
  Transcript Sequence Number=SeqID_23236
VGREREREEQNSTMPMEQVFRHCDKDTLKLAMLKHEETFRQQVHELHRLYRIQKLLMRDLKRELKSQSNLSTSPNGGYMEH

SEQ ID NO: 89211 - protein, 249 aa, Setaria italica
  Transcript Sequence Number=SeqID_23237
  Gene Ontology: Mol. function=peptidase activity; Cellular component =integral to membrane; Biological process=protein import into mitochondrial intermembrane space
  Homolog annotation: Hit_ID=Q9FZ81; Match level="QueryCoverage=88%, HitCoverage=66%, E-value=2e-48, Identity=47%"; Hit description =F25I16.6 protein
  Pfam annotation: Domain name=Rhomboid; Domain location=86-249; Score =70.9; E_value=4.6e-18; Accession=PF01694.14; Description=Rhomboid family
  Subcellular localization annotation: CTP_CleavageSite=50; ConfidenceScore=5.13e-01
PSRWLAAARGAGSLDLFSLQRRRRARGSGWQFASSSFLHSAPWAYWMNTPDGMVWTLIGVNVAVFMLWRVADPGFMRRHFMISLDNFKSGRLHTLLTNAFSHADSNHLFSNMIGFYFFGTSIASTFGPAFLLKLYVAGALGGSALFLLEKALLAPRKQAYAGWDTSRAPALGASAAVNATILLQIFLNPKGLVYFYFVIPIPAALMGAALIGADLYRVKKGQGDVSGSAHLGGALVAALVWARIAKGWI

SEQ ID NO: 89212 - protein, 78 aa, Setaria italica
  Transcript Sequence Number=SeqID_23238
  Gene Ontology: Cellular component=plasma membrane
  Homolog annotation: Hit_ID=Q9XI89; Match level="QueryCoverage=93%, HitCoverage=14%, E-value=4e-28, Identity=76%"; Hit description =F7A19.6 protein
GSNYLEIDLDVHRFSFISRKGLEAFRERLKHGVIDLGLTIQAQKQEELPEHVLCSVRLNKVDFVDNGQIPTLLPCDDD

SEQ ID NO: 89213 - protein, 89 aa, Setaria italica
  Transcript Sequence Number=SeqID_23239
RGFFGASNIENHAAALHHGRGRVWILMLLLQEQTAHYSIRYLFWSTPPADPRSPGAGGGRESWCRRKAGAAAAALASGGGRRRRWIWIG

SEQ ID NO: 89214 - protein, 78 aa, Setaria italica
  Transcript Sequence Number=SeqID_23240
  Subcellular localization annotation: CTP_CleavageSite=65; ConfidenceScore=5.68e-01
DGRDGAARRFYIQRRASQPATTPPTSSHRTRREPPSPSPSPSPSPASPSSPTSSRHIAPHRPRWRADARQQEPEPPDT

SEQ ID NO: 89215 - protein, 93 aa, Setaria italica
  Transcript Sequence Number=SeqID_23241
  Gene Ontology: Mol. function=transcription factor activity; Cellular component=nucleus; Biological process=regulation of transcription, DNA-dependent
  Homolog annotation: Hit_ID=B6SM21; Match level="QueryCoverage=100%, HitCoverage=28%, E-value=1e-30, Identity=73%"; Hit description =Nuclear transcription factor Y subunit A-2
  Pfam annotation: Domain name=CBFB_NFYA; Domain location=1-57; Score =133.4; E_value=7e-37; Accession=PF02045.7; Description=CCAAT-binding transcription factor (CBF-BNF-YA) subunit B
EAPIYVNAKQYEGIIRRRRARAKAERENRLVKARKPYLHESRHLHALRRARGSGGRFLNTKKESNGKDAGGDGKAMISKPLMRQVASPSSEIQ

SEQ ID NO: 89216 - protein, 117 aa, Setaria italica
  Transcript Sequence Number=SeqID_23242
  Gene Ontology: Mol. function=transcription factor activity; Cellular component=nucleus; Biological process=regulation of transcription, DNA-dependent
  Homolog annotation: Hit_ID=B6SM21; Match level="QueryCoverage=89%, HitCoverage=31%, E-value=1e-33, Identity=67%"; Hit description =Nuclear transcription factor Y subunit A-2
  Pfam annotation: Domain name=CBFB_NFYA; Domain location=74-117; Score= 35.6; E_value=2e-07; Accession=PF02045.7; Description=CCAAT-binding transcription factor (CBF-BNF-YA) subunit B
SVSGKGEKGAEYSATVALPSPFAIYNGRFELGLGQSMVSANNPYADQHYGLLSPYPVGATNGGCTRIPLNMPTEAPIYVNAKQYEGIIRRRRARAKAERENRLVKARKVSRTSQIIN

SEQ ID NO: 89217 - protein, 109 aa, Setaria italica
  misc_feature (94)..(94): Xaa can be any naturally occurring amino acid
  Transcript Sequence Number=SeqID_23243
  Homolog annotation: Hit_ID=Q7XVZ2; Match level="QueryCoverage=98%, HitCoverage=15%, E-value=3e-23, Identity=52%"; Hit description =OSJNBa0020I02.8 protein
  Subcellular localization annotation: CTP_CleavageSite=41; ConfidenceScore=5.27e-01
SSGAVPSQKHVLHRALGLLASVSASGLLQRGPALLWNCNFQAQLASALTVDGDPTSALSALSTGAAAAAELGNPQLELFFAASSIHVHLLCWEXSAAVENSVNRATQLW

SEQ ID NO: 89218 - protein, 180 aa, Setaria italica
  Transcript Sequence Number=SeqID_23244
DQHFWHEECLQREEKQPQKAITVRCCMVETCWKRIGFSTTVQAFPSELQSSSASRKIKKRPPPTPPSRVLRRKIRPPAGTTRGRRRFESRGRGSARSAPGEGQHCAEAPRRAPGGSPRRRPPPPSCSLAGDPGARRDCELFLVPVRLCCCPSVRSVWVCGLWRGGEWSGVGRGLGAVREL

SEQ ID NO: 89219 - protein, 79 aa, Setaria italica
  misc_feature (24)..(24): Xaa can be any naturally occurring amino acid
  Transcript Sequence Number=SeqID_23245
  Gene Ontology: Mol. function=protein kinase activity; Cellular component=integral to membrane; Biological process=protein amino acid phosphorylation
  Homolog annotation: Hit_ID=B9T6G8; Match level="QueryCoverage=68%, HitCoverage=8%, E-value=1e-13, Identity=59%"; Hit description =Nodulation receptor kinase, putative
  Pfam annotation: Domain name=LRRNT_2; Domain location=28-66; Score =48.4; E_value=2.8e-11; Accession=PF08263.4; Description=Leucine rich repeat N-terminal domain
  Subcellular localization annotation: CTP_CleavageSite=64; ConfidenceScore=5.05e-01
MQHLTVIAFVAASLLFASIPHAKXSADLNSDKQALLAFAASLPHGKKLNWSSTTPVCTTWVGVTCTPDKSRVHTLRLPA

SEQ ID NO: 89220 - protein, 267 aa, Setaria italica
  Transcript Sequence Number=SeqID_23246
  Gene Ontology: Mol. function=protein kinase activity; Cellular component=integral to membrane; Biological process=protein amino acid phosphorylation
  Homolog annotation: Hit_ID=B9T6G8; Match level="QueryCoverage=99%, HitCoverage=41%, E-value=1e-109, Identity=70%"; Hit description =Nodulation receptor kinase, putative
  Pfam annotation: Domain name=Pkinase; Domain location=3-242; Score =33.5; E_value=1.7e-10; Accession=PF00069.17; Description=Protein kinase domain
  Pfam annotation: Domain name=Pkinase_Tyr; Domain location=1-242; Score=13.0; E_value=1.4e-14; Accession=PF07714.9; Description =Protein tyrosine kinase
  Pfam module annotation: Pfam domain module=Pkinase::Pkinase_Tyr; Domain location=3-242::1-242
KRLKEVVVSKKDFEQQMEIIGRVGQHQNVVPLRAYYYSKDEKLLVFDYVPSGSLAAVLHGNKSAGRAPLDWETRVKISLDVARGIAHLHAEGGGKFIHGNIKASNVLLSQNQDGCVSEFGLAQLMTTPQAAPRLVGYRAPEVLETKKSTQKSDVYSFGVLLLEMLTGKAPLRSPGREDSIEHLPRWVQSVVREEWTAEVFDVDLLRHPNVEDEMVQMLQIAMACVAAVPDQRPKMEEVIRRITEIRNSYSSGTRTPLEDKPETAQAP

SEQ ID NO: 89221 - protein, 172 aa, Setaria italica
  misc_feature (40)..(40): Xaa can be any naturally occurring amino acid
  Transcript Sequence Number=SeqID_23247
  Gene Ontology: Mol. function=protein kinase activity; Cellular component=integral to membrane; Biological process=protein amino acid phosphorylation
  Homolog annotation: Hit_ID=B9T6G8; Match level="QueryCoverage=50%, HitCoverage=13%, E-value=1e-26, Identity=69%"; Hit description =Nodulation receptor kinase, putative
  Pfam annotation: Domain name=SKG6; Domain location=31-73; Score=11.6; E_value=0.035; Accession=PF08693.2; Description=Transmembrane alpha -helix domain
  Subcellular localization annotation: CTP_CleavageSite=30; ConfidenceScore=5.10e-01
FLGNAFLCGFPLDPCPGTAPSPSPVSPLAPSKTKKSLWKXIKTIVIIVIAAVGGVLLLILILMLLICIFKRKKHTEPTTASSKGKAVAGGRAENPKEDYSSGVQEAERNKLVFFEGSSYNFDLEDLLRASAEVLGKGSYGTTYKAVLEDGTTVVVKRLKEVVVSKKEYLLSS

SEQ ID NO: 89222 - protein, 632 aa, Setaria italica
  Transcript Sequence Number=SeqID_23248
  Gene Ontology: Mol. function=protein kinase activity; Cellular component=integral to membrane; Biological process=protein amino acid phosphorylation
  Homolog annotation: Hit_ID=B9T6G8; Match level="QueryCoverage=93%, HitCoverage=91%, E-value=0.0, Identity=55%"; Hit description =Nodulation receptor kinase, putative
  Pfam annotation: Domain name=LRRNT_2; Domain location=27-65; Score =45.9; E_value=1.6e-10; Accession=PF08263.4; Description=Leucine rich repeat N-terminal domain
  Pfam annotation: Domain name=LRR_1; Domain location=119-138; Score =9.6; E_value=4.4; Accession=PF00560.25; Description=Leucine Rich Repeat
  Pfam annotation: Domain name=LRR_1; Domain location=141-163; Score =11.2; E_value=2.2; Accession=PF00560.25; Description=Leucine Rich Repeat
  Pfam annotation: Domain name=LRR_1; Domain location=165-186; Score =9.9; E_value=3.9; Accession=PF00560.25; Description=Leucine Rich Repeat
  Pfam annotation: Domain name=LRR_1; Domain location=187-209; Score =22.4; E_value=0.0018; Accession=PF00560.25; Description=Leucine Rich Repeat
  Pfam annotation: Domain name=LRR_1; Domain location=70-93; Score=0.1; E_value=2.9e+02; Accession=PF00560.25; Description=Leucine Rich Repeat
  Pfam annotation: Domain name=LRR_1; Domain location=95-117; Score =8.7; E_value=6.5; Accession=PF00560.25; Description=Leucine Rich Repeat
  Pfam annotation: Domain name=Pkinase; Domain location=340-609; Score =95.5; E_value=1.8e-25; Accession=PF00069.17; Description=Protein kinase domain
  Pfam annotation: Domain name=Pkinase_Tyr; Domain location=339-609; Score=67.3; E_value=3.3e-18; Accession=PF07714.9; Description =Protein tyrosine kinase
  Pfam annotation: Domain name=SKG6; Domain location=249-282; Score =11.1; E_value=0.039; Accession=PF08693.2; Description=Transmembrane alpha-helix domain
  Pfam module annotation: Pfam domain module=LRRNT_2::LRR_1::LRR_1::LRR_ 1::LRR_1::LRR_1::LRR_1::Pkinase::Pkinase_Tyr::SKG6; Domain location =27-65::119-138::141-163::165-186::187-209::70-93::95-117::340 -609::339-609::249-282
  Subcellular localization annotation: CTP_CleavageSite=63; ConfidenceScore=5.00e-01
MWHLRLIAIFSAALFFTHLPCAKGADLNSDKQALLAFAASLPHGRKLNWTSTTQVCTSWVGITCTPNGKRVREVRLPAIGLFGPIPSDTLGNLDALEVLSLRSNRLTVNLPPDVASIPALHSLYLQHNNLSGIIPTSLSSSLTFLDLSYNTFNGEIPLKVQDITELTALLLQNNSLSGPIPDLQLPKLRHLNLSNNNLSGPIPPSLQKFPASSFLGNTFLCGFPLEPCPGTAPSPISPSPQNGRRSIWKKLSRGVIIAIAAGVGAIVLLLIIILLVCIFKRKKDAEPGAASSSSKGKAIAGGRAEKSKAEYSSGIQEAERNKLFFFEGCSYNFDLEDLLRASAEVLGKGSYGTTYKAVLEDGTTVVVKRLKEVVASKREFEQQMELIGKVCQHQNTVPLRAYYYSKDEKLLVYDYVPLGSLSAALHGNKAVGRNPLDWETRVKIALGTARGMAYLHGEVGGKFIHGNIKSSNILISQELSACVTEFGLAQLMAPPHVHPRLIGYRSPEVLETKKPTQKSDVYSFGVLLLEMLTGKAPLRSPGREDSIEHLPRWVQSVVREEWTSEVFDVDLLRHPNVEDEMVQMLQIAMACVAVVPDERPRMEEVVRRIEEIRNSYSETKTSPEDKPREGSF

SEQ ID NO: 89223 - protein, 78 aa, Setaria italica
  Transcript Sequence Number=SeqID_23249
  Gene Ontology: Mol. function=hydrolase activity, acting on glycosyl bonds; Biological process=cell wall organization and biogenesis
DEEQPKGYLFNRPPPPPGESRMWEDWELPCYVTSFLTVVILGVGLNAKPDLTIETWAHQKALERLQQQELAAAEAHAE

SEQ ID NO: 89224 - protein, 157 aa, Setaria italica
  Transcript Sequence Number=SeqID_23250
  Gene Ontology: Mol. function=nucleotide binding; Biological process =defense response
  Homolog annotation: Hit_ID=Q84YF1; Match level="QueryCoverage=100%, HitCoverage=12%, E-value=1e-47, Identity=61%"; Hit description =Putative Xa1-like protein
MPELVEWIGGGNTHLFSRLERIECSNCPKLTALPFSRCSSSSTQDNTIWFPNLCYLSTKECPKLSLPPLPHTRMLSSFRTDSLRYEKRHLSIYKMPGELAFHNLGEVEGLTNWDASLISFTDLQKLHPLRSIQVRSCEDTFLRGLDDDIVLYSVQSL

SEQ ID NO: 89225 - protein, 127 aa, Setaria italica
  misc_feature (100)..(100): Xaa can be any naturally occurring amino acid
  Transcript Sequence Number=SeqID_23251
GRAANRERDVEEETRNQMMQNLFGDQSEDEEDADDDDDDDVVEVVDDDHRQQPPPQQRHQELDDDVDDDEEDDARSHAHARSGGYHSEEVDGEAENGGEXKAKVRDKVGMEEESEGEAHRADLIKEK

SEQ ID NO: 89226 - protein, 85 aa, Setaria italica
  Transcript Sequence Number=SeqID_23252
  Gene Ontology: Mol. function=protein kinase activity; Cellular component=integral to membrane; Biological process=protein amino acid phosphorylation
  Homolog annotation: Hit_ID=B6SY66; Match level="QueryCoverage=98%, HitCoverage=9%, E-value=6e-36, Identity=89%"; Hit description =Receptor protein kinase CLAVATA1
RAQNNRFTGRLPEFSGGQSRLEQVQLDNNSFSGVIPGSIGLVRTLYRFSASLNGLNGSLPDNVCDSPAMSIVNISRNALSGTIPE

SEQ ID NO: 89227 - protein, 70 aa, Setaria italica
  Transcript Sequence Number=SeqID_23253
ILQQPQLIIWAIKFTETAELIFRLNISKSLLIELMNMLIGLLIQSIHIKNIETANLTATCICMIVYFPVQ

SEQ ID NO: 89228 - protein, 137 aa, Setaria italica
  Transcript Sequence Number=SeqID_23254
  Gene Ontology: Mol. function=calcium ion binding; Cellular component =late endosome membrane; Biological process=protein transport
  Homolog annotation: Hit_ID=Q7X6L7; Match level="QueryCoverage=81%, HitCoverage=17%, E-value=1e-36, Identity=69%"; Hit description =OSJNBa0070C17.4 protein
  Pfam annotation: Domain name=PA; Domain location=58-135; Score=22.6; E_value=0.0016; Accession=PF02225.14; Description=PA domain
HGHERTRLAAAAWAWLAVSMASLASARFIVEKNSVTVLSPRSLRGHHEAAIANYGVPEYGGTLTGVVMYPEDPKLATGCGPFGDKKFRSPSGRPVVLLVDRGGCYFALKTWNAQLAGAAAVLVADAADEPLLTMDSP

SEQ ID NO: 89229 - protein, 148 aa, Setaria italica
  misc_feature (125)..(125): Xaa can be any naturally occurring amino acid
  misc_feature (135)..(135): Xaa can be any naturally occurring amino acid
  Transcript Sequence Number=SeqID_23255
  Homolog annotation: Hit_ID=B9STW6; Match level="QueryCoverage=90%, HitCoverage=23%, E-value=6e-34, Identity=52%"; Hit description =Electron transporter, putative
  Pfam annotation: Domain name=DUF547; Domain location=63-140; Score =57.7; E_value=4.3e-14; Accession=PF04784.6; Description=Protein of unknown function, DUF547
DKDKDRGQQDHYGIFAIQDAIVRDIGPYKNLVRFTSSSSLDFRGFSSSPLLTKLRGMLEALQQVDLRFLNHQQKLAFWLNAYNTCIMHGILQHGLPSNSEKLLALKNKATINVSGQKFNALVIEXFILRQPSSVXKEEFWKCDVDVEE

SEQ ID NO: 89230 - protein, 31 aa, Setaria italica
  Transcript Sequence Number=SeqID_23256
QRGNAVVNDVPAAHPTTGDNVLSTATIDFSD

SEQ ID NO: 89231 - protein, 131 aa, Setaria italica
  Transcript Sequence Number=SeqID_23257
  Gene Ontology: Mol. function=catalytic activity; Biological process =metabolic process
  Homolog annotation: Hit_ID=B9S6T0; Match level="QueryCoverage=100%, HitCoverage=25%, E-value=2e-35, Identity=55%"; Hit description=AMP dependent ligase, putative
RHDAAMVSVLLKHSGAKVFLVESNLLDVGRAALKRLADAESSAALPVLLTISDDAESDDYEDLVTNAPARFDIRWPANELDPISLNYTSGTTSRPKGVVYNHRGAYLNTIATVLAYDITAMPTYLWTVPMF

SEQ ID NO: 89232 - protein, 155 aa, Setaria italica
  misc_feature (147)..(147): Xaa can be any naturally occurring amino acid
  Transcript Sequence Number=SeqID_23258
  Gene Ontology: Mol. function=actin binding; Cellular component =cytoskeleton; Biological process=actin filament bundle formation
  Homolog annotation: Hit_ID=B9RQ50; Match level="QueryCoverage=100%, HitCoverage=22%, E-value=4e-59, Identity=67%"; Hit description =Fimbrin, putative
  Pfam annotation: Domain name=CH; Domain location=1-89; Score=34.7; E _value=3.6e-07; Accession=PF00307.23; Description=Calponin homology (CH) domain
KGGFQRTVTNFSSDIKDSEAYACLLNVLAPECSAKPSAMSVKDLLHRARLVLEHADRMGCKRYLTPKDIVDGLPNLNLAFVAHIFQKRNGLSKQMKQVSFVDGLSDDAQVSREERSFRLWINSLGISTYINNVFEDLRNGWVLLEVXDKVAPGSV

SEQ ID NO: 89233 - protein, 84 aa, Setaria italica
  Transcript Sequence Number=SeqID_23259
  Subcellular localization annotation: CTP_CleavageSite=64; ConfidenceScore=5.71e-01
SSSFLGGALFPSNKQAAGDPPPPPAFPRQHAARHSSGSARPPICSRPPTAVPPPASGRPRLNPSAPAVNYSITPPPPAIPFASP

SEQ ID NO: 89234 - protein, 220 aa, Setaria italica
  misc_feature (73)..(73): Xaa can be any naturally occurring amino acid
  Transcript Sequence Number=SeqID_23260
  Gene Ontology: Mol. function=histone-lysine N-methyltransferase activity; Cellular component=nucleus; Biological process=chromatin modification
  Homolog annotation: Hit_ID=B9S7M5; Match level="QueryCoverage=99%, HitCoverage=35%, E-value=2e-80, Identity=64%"; Hit description=Set domain protein, putative
  Pfam annotation: Domain name=SET; Domain location=56-202; Score =118.4; E_value=2.3e-32; Accession=PF00856.20; Description=SET domain
SMNLFPEKHHKFFCKPLERPRNEALPEPSRRHLVRKVIRECWSKCGCNMQCGNRVVQRGIACNLQVFSHKKGXGWGLRTLDELPKGAFVCEYVGELLTNTELREKTSQKACKAGYTYPVDLDADCDSEGVLKDKEALCLDATFYGNVGRFINHRCYDANLVEIPVEVETPHHHYYHLALFTNKKVEAFEELTWDYGIDFDGDKHRGGTFQCLCGSRYCRG

SEQ ID NO: 89235 - protein, 146 aa, Setaria italica
  Transcript Sequence Number=SeqID_23261
  Gene Ontology: Mol. function=kinase activity
  Homolog annotation: Hit_ID=O49309; Match level="QueryCoverage=100%, HitCoverage=35%, E-value=2e-52, Identity=67%"; Hit description =T26J12.15 protein
  Pfam annotation: Domain name=DUF300; Domain location=1-143; Score =103.6; E_value=6.9e-28; Accession=PF03619.8; Description=Domain of unknown function
MILKTLCAFLALILELFGAYGDGEFKWNYGYPYIAVVINFSQTWALYCLVKFYNATHEKLQAIRPLAKFISFKAIVFATWWQGFGIAILCQTGLLPKEGKVQNAIQDFLICIEMAIAAIAHAYVFTVEPYQHIPVLDHGKVACEES

SEQ ID NO: 89236 - protein, 105 aa, Setaria italica
  Transcript Sequence Number=SeqID_23262
MWNEAMAPDGGSSTFRGLYGNIHTPAVVTGAAFAVVALLISLWLILQHLRSYNNPAEQKWIIAVLFMVPVYASESVSASSTCSYAYFRQRNATSSTRFACNCKLF

SEQ ID NO: 89237 - protein, 702 aa, Setaria italica
  Transcript Sequence Number=SeqID_23263
  Gene Ontology: Cellular component=plasma membrane
  Homolog annotation: Hit_ID=Q10JU9; Match level="QueryCoverage=100%, HitCoverage=92%, E-value=0.0, Identity=77%"; Hit description=Von Willebrand factor type A domain containing protein, expressed
  Pfam annotation: Domain name=VWA; Domain location=280-450; Score =47.4; E_value=5.5e-11; Accession=PF00092.20; Description=von Willebrand factor type A domain
MAYAVVVDPGAVDSPDVPSYQPHVYGRLDPPALIPLQMREVELRVDCAAAGCATAEVALRARWWVHCVTRSRACHCRIVVPMGHQGSILGAEVTVGKRSYNTHVIDTEDNSAVKISLPENGGLLKQEWFSLTIPEVGGGEDIFATIRWSQKLLYSNGQFSVEVPFCFPQFVNPLPKVFMKKEKIQLTINCGVSKEVILQGTSHPLKEKGRHGDKLSFLHEAAVENWSTKDFTFTYTVYSGDLSGGVLVQPSTLRDYDDRDMFCLFLLPGNNENRKVFRKAVVYLVDTSGSMQGKPLESVKNAMSTALSDLIQGDFFNIIAFNDELHSFSSCLEQVNDKTIESAIEWMNLNFVAQGGTDIMHPLSEAMTLLSNSHDALPQIYLVTDGSVDDERNICHTVKTQLMNRGSKSPRISTFGLGSYCNHYFLRMLASIGKGHYAAAFDTGSIEGRMVQWFQKASSTVVSNISIDAIKHIQDFEVDSEYIPDISAKYPLCVSGRYHGKLPETLIAKGHLADMSEISIELKVQHVKDIPLDKVLAKQQMDLLTAKAWLLENKELERKVVKLSIQNSLPSEYTRMVLLQTNLDKIDPAQQAKNKPTKQSSPDERSAMPLRGLTLGFGDVVATRENLTAGFGDIEVHERFEIFDKAVGCCSRMADCFCCMCFIKACSKMNDQCAIVMAQACAAIACLGCFECCSELCCGGAN

SEQ ID NO: 89238 - protein, 91 aa, Setaria italica
  Transcript Sequence Number=SeqID_23264
  Homolog annotation: Hit_ID=Q68Y48; Match level="QueryCoverage=97%, HitCoverage=25%, E-value=8e-18, Identity=55%"; Hit description=Tubby- like F-box protein 9
  Pfam annotation: Domain name=F-box; Domain location=23-78; Score =19.3; E_value=0.016; Accession=PF00646.25; Description=F-box domain
GGEAKVTPEVGPAAQEEEEVDEERWSRLLPELLTEIVRRVDAGAERWPLRRDVVVCACVCRRWRDAAFSVVRPPLEGGRITFPSSLKQPGP

SEQ ID NO: 89239 - protein, 108 aa, Setaria italica
  Transcript Sequence Number=SeqID_23265
PGRPVTAYCLFMSQVAGTVEDVKLLVHSGIVEHFLASDEQVAQDFADLCKGVVMDVDNIDRNYLMPMWHEMQERCENRVHRFMGWFCQFKNLVIIIVLLVALIIIACQ

SEQ ID NO: 89240 - protein, 83 aa, Setaria italica
  Transcript Sequence Number=SeqID_23266
  Gene Ontology: Mol. function=transcription regulator activity; Cellular component=nucleus; Biological process=regulation of transcription
  Homolog annotation: Hit_ID=Q0ZII0; Match level="QueryCoverage=100%, HitCoverage=23%, E-value=6e-30, Identity=81%"; Hit description=Joka8 (Fragment)
  Pfam annotation: Domain name=HLH; Domain location=13-62; Score=46.7; E_value=9.2e-11; Accession=PF00010.18; Description=Helix-loop-helix DNA-binding domain
PPRQRVRARRGQATDPHSIAERLRRERIAERMKALQELVPNANKTDKASMLDEIIDYVKFLQLQVKVLSMSRLGGAAAVAPLV

SEQ ID NO: 89241 - protein, 176 aa, Setaria italica
  Transcript Sequence Number=SeqID_23267
  Homolog annotation: Hit_ID=B6T3W9; Match level="QueryCoverage=91%, HitCoverage=43%, E-value=1e-14, Identity=32%"; Hit description=F-box domain containing protein
PETLPPIAYTLPPVRGKIYSLTKSGHILGLDMTAAKSSLIQRPDKVRTDNFMLSFGEEGSKLILIHAEGYLLSIWQLATTRSDSNDWVLVYDKIRVHEAWNRLEDVMVMAADDNLEFVFLWLRSSAVLMHMHLKSRSEKVYDEFKVRDGRFLDINPFMMVWPPVFPALREEDNVEG

SEQ ID NO: 89242 - protein, 347 aa, Setaria italica
  Transcript Sequence Number=SeqID_23268
  Gene Ontology: Mol. function=magnesium ion binding; Biological process=metabolic process
  Homolog annotation: Hit_ID=Q5GAS4; Match level="QueryCoverage=100%, HitCoverage=52%, E-value=1e-132, Identity=63%"; Hit description=Stc
  Pfam annotation: Domain name=Terpene_synth_C; Domain location=23-291; Score=391.7; E_value=1.3e-114; Accession=PF03936.8; Description =Terpene synthase family, metal binding domain
VRIYESKYYISTYEKEATVHESVLQLAKLNSNIMQLHHQQELELITRWWKDLEIESKLPFARDRVVECYFWILGVYFEPCYSRGRIILTMVISIATIFDDMFDSYGTVEECELLTNCIERWDRKLADDLPECMKHALGKILDSYETMDNELAQEEKYRMPYLKNFTIDLVRGYNAEVKMREEGYIPRTVNEHLQVSLRTGACHLLACASFVGMDEIATKDSFDWVSTMPKIVKALCIILRLLDDLQTYEREQLHPHVASTIKSYMKEHNVSIEIARKKIEELKEETWKYFNGEWLNPDNAVPSSLLERIFNLTRTMEFIYNLDDNFTNCQNLRDTIHLLFVEPFPIS

SEQ ID NO: 89243 - protein, 88 aa, Setaria italica
  Transcript Sequence Number=SeqID_23269
MVRSSAWDVSFYFLDKTNMLREPYILFYYIHIPFVFVCTVSPSQQFGATYITLHVHQLRSLSHDYDHEMLMALLAFNANNILLLNGNM

SEQ ID NO: 89244 - protein, 98 aa, Setaria italica
  Transcript Sequence Number=SeqID_23270
  Gene Ontology: Mol. function=ubiquinol-cytochrome-c reductase activity; Cellular component=mitochondrial respiratory chain; Biological process=electron transport chain
  Homolog annotation: Hit_ID=B4F892; Match level="QueryCoverage=100%, HitCoverage=36%, E-value=2e-53, Identity=98%"; Hit description =Ubiquinol-cytochrome c reductase iron-sulfur subunit
  Pfam annotation: Domain name=Rieske; Domain location=1-94; Score =65.0; E_value=2.9e-16; Accession=PF00355.18; Description=Rieske [2Fe- 2S] domain
RRRTEDDIKLANSVDVASLRHPQQDAERVKNPEWLVVIGVCTHLGCIPLPNAGDFGGWFCPCHGSHYDISGRIRKGPAPFNLEVPTYSFLEENKLLIG

SEQ ID NO: 89245 - protein, 207 aa, Setaria italica
  Transcript Sequence Number=SeqID_23271
  Gene Ontology: Mol. function=aspartic-type endopeptidase activity; Biological process=proteolysis
  Homolog annotation: Hit_ID=Q2L3E7; Match level="QueryCoverage=99%, HitCoverage=48%, E-value=1e-57, Identity=57%"; Hit description =Chloroplast nucleoid binding protein
  Pfam annotation: Domain name=Asp; Domain location=8-204; Score= -198.8; E_value=0.084; Accession=PF00026.15; Description=Eukaryotic aspartyl protease
  Subcellular localization annotation: CTP_CleavageSite=44; ConfidenceScore=5.58e-01
PKVSLTSQAAAKYGAGFSYCLPSSSSSAGYLSLGGAAPSNAQFTAMVARSDTPSFYYLDLVAIKVAGRTVSIPAAVLKAPGTVIDSGTVITRLPDTAYRALRSSFAGFMRRYKRAPALSLLDTCYDFTGHRTVQIPSVALVFSGGVTVSLDFSGVLYVSKVSQACLAFASNGDDTSIGILGNTQQKTFAVVYDVANQKIGFGAKGCT

SEQ ID NO: 89246 - protein, 49 aa, Setaria italica
  Transcript Sequence Number=SeqID_23272
KKQKGVGTAIGRTANLKLTLSGESPSELAYVHPMDFRQLLGAVTLISTF

SEQ ID NO: 89247 - protein, 83 aa, Setaria italica
  Transcript Sequence Number=SeqID_23273
  Gene Ontology: Mol. function=calcium-dependent cysteine-type endopeptidase activity; Cellular component=intracellular; Biological process=proteolysis
  Homolog annotation: Hit_ID=B9SBQ0; Match level="QueryCoverage=100%, HitCoverage=3%, E-value=3e-26, Identity=63%"; Hit description =Calpain, putative
GLDPNFSYMLKDKVMDPRILALLQRSSLDADREHQDDVDVTATDSDRLDTTIANQISLSEELRRSGLEKWLNISRLIFHQLAG

SEQ ID NO: 89248 - protein, 129 aa, Setaria italica
  Transcript Sequence Number=SeqID_23274
  Gene Ontology: Mol. function=electron carrier activity; Biological process=oxidation reduction
  Homolog annotation: Hit_ID=C0KHL8; Match level="QueryCoverage=99%, HitCoverage=25%, E-value=2e-61, Identity=82%"; Hit description =Putative ferulate 5-hydroxylase
SIDECELEGYTIPARSRVLINAWAIGRDPRYWNDAEEFKPERFEDGSVDFTGGSYEFVPFGSGRRMCPGFNYGLASMELGLAGLLHHFDWSLPEGVEEVDMGEAPGLGVRRRSPLMLCATPFDPVAASN

SEQ ID NO: 89249 - protein, 103 aa, Setaria italica
  misc_feature (84)..(84): Xaa can be any naturally occurring amino acid
  Transcript Sequence Number=SeqID_23275
  Homolog annotation: Hit_ID=B9RHU2; Match level="QueryCoverage=94%, HitCoverage=4%, E-value=3e-16, Identity=55%"; Hit description =Splicing endonuclease positive effector sen1, putative
RTIVAIVSALLSVHADNSYKLSRNESVNSTDSTKPRAKISESAAVTRAWQDAALAKQLEKDSQTECPGTTERFAKGRALICAQXNAAVDELVSRTTSRRELVN

SEQ ID NO: 89250 - protein, 349 aa, Setaria italica
  misc_feature (11)..(11): Xaa can be any naturally occurring amino acid
  Transcript Sequence Number=SeqID_23276
  Gene Ontology: Mol. function=transporter activity; Cellular component= integral to membrane; Biological process=transport
  Homolog annotation: Hit_ID=B6TCP1; Match level="QueryCoverage=99%, HitCoverage=71%, E-value=1e-146, Identity=76%"; Hit description =Carbohydrate transporter/ sugar porter/ transporter
  Subcellular localization annotation: CTP_CleavageSite=61; ConfidenceScore=5.20e-01
LQMTCNLGSIXGGSFGVLLAPVAFLGVPGWRLAFHAVAAVSVAVGALMWLFAADPRGKSSKAAATSATDEAKELLREARRVLGVPTFQIIVAQGIAGSIPWSALNFSAMWLELVGFTHWETSVITGLYLFATALGALFGGVVGDLVARRFPNAGRIALAQISSASALPLGAILLLALPNDPSTGVVHAVVFFIMGFAISWNASSTNNPIFAEIVPEKARTTVYALDKSFEAVFASFAPPIVGVLAERVFGYKPVSSDTSVDTDRENAAALAKAVYTEIAVPMAICCLTYTFLYCTYPRDRERARKELLMASDDQLGEEASDSEPSAVRTREDEESSVSSLNQRLISRGE

SEQ ID NO: 89251 - protein, 97 aa, Setaria italica
  Transcript Sequence Number=SeqID_23277
  Gene Ontology: Mol. function=translation initiation factor activity; Biological process=cellular metabolic process
  Homolog annotation: Hit_ID=Q5JMI2; Match level="QueryCoverage=77%, HitCoverage=29%, E-value=1e-17, Identity=60%"; Hit description =Eukaryotic translation initiation factor 2B family protein-like
  Pfam annotation: Domain name=DUF567; Domain location=24-97; Score= -37.8; E_value=0.095; Accession=PF04525.4; Description=Protein of unknown function (DUF567)
  Subcellular localization annotation: CTP_CleavageSite=58; ConfidenceScore=5.26e-01
MAKIQPLPAASSSPSCSPTGDESRSLQKQAAYTVWMKSLVFSGNGCTVYGADGGVAFRVDNYGCRGGREVFFMDRAGKTLIRIQRKRFGIFRRWEAC

SEQ ID NO: 89252 - protein, 333 aa, Setaria italica
  Transcript Sequence Number=SeqID_23278
  Gene Ontology: Mol. function=sequence-specific DNA binding; Cellular component=nucleus; Biological process=regulation of transcription, DNA-dependent
  Homolog annotation: Hit_ID=A6N087; Match level="QueryCoverage=37%, HitCoverage=100%, E-value=2e-48, Identity=79%"; Hit description=Ocp3 putative (Fragment)
  Pfam annotation: Domain name=Homeobox; Domain location=261-310; Score= 6.3; E_value=0.0029; Accession=PF00046.21; Description=Homeobox domain
  Subcellular localization annotation: CTP_CleavageSite=49; ConfidenceScore=5.47e-01
MATVLPLAVLAAASAPAAPRTCISVAPVPPPLLGTRVGLLLRSPPRGVACALRRRPSKYKTKIQSEEEVVATEDAMDNDDEDGALEALFKQLEEDLANDDLSVDDDDDEISEEDMARFEKELAEAIEDVGGVDESAGDSLLSSGDYGNDEQIDRSEGPELKTWQLRRLARALKIGRRKTSIKNLAGELGLDRALVIELLRNPPPKLILMSDSLPDEAPSKPEVKELELPGSTTIDVDEVSTTEIEPQMELPVHVMSAEWSARRRLKKVQLETLERVYLRSKRPTNTMISSIVQVTNLPRKTIVKWFEDRREQDGVPDHRVAFKRSLSETVASS

SEQ ID NO: 89253 - protein, 230 aa, Setaria italica
  Transcript Sequence Number=SeqID_23279
  Gene Ontology: Mol. function=hydrogen ion transporting ATPase activity, rotational mechanism; Cellular component=proton -transporting two-sector ATPase complex; Biological process=proton transport
  Homolog annotation: Hit_ID=Q2L9B8; Match level="QueryCoverage=98%, HitCoverage=99%, E-value=1e-103, Identity=83%"; Hit description =Vacuolar ATP synthase subunit E
  Pfam annotation: Domain name=vATP-synt_E; Domain location=16-225; Score=351.1; E_value=2.1e-102; Accession=PF01991.10; Description=ATP synthase (E31 kDa) subunit
MNDADVSKQIQQMVRFIRQEAEEKASEISVSAEEEFNIEKLQLVEAEKKKIRQEYERKEKQVEVRKKIEYSMQLNASRIKVLQAQDDLVNKMKEDAMKELLRVSDNHHEYKNLLKDLIVQGLLRLKEPAVLLRCRKEDHHHVESVLHSAKHEYASKADVHQPEIHVDHDVYLPPAPSHHDAHGQFCYGGVVLASRDGKIVYESTLDARLEVVFRKKLPEIRKLLFGQNAA

SEQ ID NO: 89254 - protein, 137 aa, Setaria italica
  Transcript Sequence Number=SeqID_23280
  Homolog annotation: Hit_ID=B6SVJ3; Match level="QueryCoverage=100%, HitCoverage=33%, E-value=7e-12, Identity=38%"; Hit description=BSD domain containing protein
GIRNDFADIGGRFRSGISRISSHKAVTGFSKMASGDEEWHQWEERVRLEVEDDRVGHELVDGHELEMERGKHEEDGELELQRVRHEEGGQFGEQRVRHEEGGELEGHGLGHEEEEVEEDWDVIGITEEVLAFATNIA

SEQ ID NO: 89255 - protein, 128 aa, Setaria italica
  Transcript Sequence Number=SeqID_23281
RMCYDNSYKKCHRTDVPNTGYSSPPVFGTNPSGKEHHIPQPSVLRLDISSILQQWCHRQHPPCNSNNVVFCSLEQIFPLLFTFSAECCSLPCRQRFISMITFPRQEWVLAVVLVVVVVVVVIFVWRSC

SEQ ID NO: 89256 - protein, 74 aa, Setaria italica
  Transcript Sequence Number=SeqID_23282
  Gene Ontology: Cellular component=extracellular region; Biological process=sexual reproduction
  Homolog annotation: Hit_ID=Q949I3; Match level="QueryCoverage=98%, HitCoverage=27%, E-value=2e-22, Identity=60%"; Hit description=Beta expansin B2
  Pfam annotation: Domain name=Pollen_allerg_1; Domain location=1-58; Score=45.2; E_value=2.6e-10; Accession=PF01357.13; Description =Pollen allergen
GAVVQVDLKEANSNTWRPLYESWGAVWRIEPGHPLKAPLSLRVRSDSGKILVANNVIPLNWRGNADYRTIAQFR

SEQ ID NO: 89257 - protein, 368 aa, Setaria italica
  Transcript Sequence Number=SeqID_23283
  Gene Ontology: Mol. function=oxidoreductase activity, acting on the CH-CH group of donors; Cellular component=glyoxysome; Biological process=metabolic process
  Homolog annotation: Hit_ID=B6TNB5; Match level="QueryCoverage=100%, HitCoverage=84%, E-value=0.0, Identity=94%"; Hit description =Glutaryl-CoA dehydrogenase
  Pfam annotation: Domain name=Acyl-CoA_dh_1; Domain location=207-353; Score=88.1; E_value=3.1e-23; Accession=PF00441.16; Description=Acyl -CoA dehydrogenase, C-terminal dom
  Pfam annotation: Domain name=Acyl-CoA_dh_2; Domain location=219-342; Score=-24.7; E_value=0.016; Accession=PF08028.3; Description=Acyl -CoA dehydrogenase, C-terminal doma
  Pfam annotation: Domain name=Acyl-CoA_dh_M; Domain location=101-153; Score=89.4; E_value=1.2e-23; Accession=PF02770.11; Description=Acyl -CoA dehydrogenase, middle domain
  Pfam annotation: Domain name=Acyl-CoA_dh_N; Domain location=1-97; Score=47.2; E_value=6.4e-11; Accession=PF02771.8; Description=Acyl -CoA dehydrogenase, N-terminal domain
  Pfam module annotation: Pfam domain module=Acyl-CoA_dh_1::Acyl-CoA_dh_ 2::Acyl-CoA_dh_M::Acyl-CoA_dh_N; Domain location=207-353::219 -342::101-153::1-97
EKEIAPIMAVYWEKAEFPFNAIPKLASLGVAGGTIKGYGCPGLSITASAVTMAEIARVDASCSTFILVHSSLAMVTIALCGSEAQKHKYLPSLAQLTTVGCWALTEPNYGSDASSLKTTATKVPGGWHVDGQKRWIGNSTFADVLVVLARNADTKQLNGFIVRKGAPGLKATKIENKIGLRMVQNGDIVFNKVFVPEEDRLPGVNSFQDISKVLAISRIMVAWQPIGISMGVFDMCHRYLKERKQFGVPLTAFQLNQEKLVRMLGNIQSMLLVGWRLCKLYESGKMTPGHASLGKAWNSRTAREVVSLGRELLGGNGILADFLVAKAFCDLEPIYSYEGTYDINSLVTGREITGVASFKPAALAKARL

SEQ ID NO: 89258 - protein, 45 aa, Setaria italica
  Transcript Sequence Number=SeqID_23284
LPSETQEYNMPSRKCSYCINKLRPTIKIITLFSHPSFKLSYSEKK

SEQ ID NO: 89259 - protein, 150 aa, Setaria italica
  Transcript Sequence Number=SeqID_23285
  Gene Ontology: Mol. function=protein serine/threonine kinase activity; Biological process=protein amino acid phosphorylation
  Homolog annotation: Hit_ID=Q2R2D9; Match level="QueryCoverage=94%, HitCoverage=13%, E-value=3e-44, Identity=67%"; Hit description =Leucine Rich Repeat family protein, expressed
YFWYFVLSIYLFDGSLIVQQSASSVGVRGTIGYAAPEYGAGNVVSTNGDIYSYGILVLEMVTGRRPTDSTFREGLSLREYVELALHNGMMDVIDTRLSLSLENEFQGVGEGDSSQNRKTDCLIALLKLGLSCSEELPSSRMPTADIKLIL

SEQ ID NO: 89260 - protein, 190 aa, Setaria italica
  misc_feature (12)..(12): Xaa can be any naturally occurring amino acid
  Transcript Sequence Number=SeqID_23286
  Gene Ontology: Mol. function=protein serine/threonine kinase activity; Cellular component=intrinsic to membrane; Biological process=regulation of transcription, DNA-dependent
  Homolog annotation: Hit_ID=Q9SZ67; Match level="QueryCoverage=39%, HitCoverage=10%, E-value=8e-23, Identity=51%"; Hit description =Probable WRKY transcription factor 19
GGWAKRCKFEGXAKGAQGNTDYCIRHGGGRRCKFEGCTKSAQGRTDFCIKHGGGSRCKFQGCGTSAKWGTDFCSVHRKSLLSGDNAIPEALPASSEKRRRAKKPKKAVKPSELSQENVTTAAIAGSSTQQMGVLLLATPVPNHDMLTKGVTVTAQAAIAPAQIVAPLSMKSPTPSGSVASAEREAGVLGL

SEQ ID NO: 89261 - protein, 395 aa, Setaria italica
  Transcript Sequence Number=SeqID_23287
  Gene Ontology: Mol. function=molecular_function; Cellular component =plasma membrane; Biological process=auxin mediated signaling pathway
  Homolog annotation: Hit_ID=B6TLA9; Match level="QueryCoverage=99%, HitCoverage=99%, E-value=1e-169, Identity=78%"; Hit description =Nodulin-like protein 5NG4
  Pfam annotation: Domain name=DUF6; Domain location=216-345; Score =63.1; E_value=1e-15; Accession=PF00892.12; Description=Integral membrane protein DUF6
  Pfam annotation: Domain name=DUF6; Domain location=28-161; Score =39.7; E_value=1.2e-08; Accession=PF00892.12; Description=Integral membrane protein DUF6
  Pfam annotation: Domain name=DUF606; Domain location=220-342; Score= -62.7; E_value=0.085; Accession=PF04657.5; Description=Protein of unknown function, DUF606
  Pfam annotation: Domain name=TPT; Domain location=207-345; Score= -28.6; E_value=0.03; Accession=PF03151.8; Description=Triose -phosphate Transporter family
  Pfam module annotation: Pfam domain module=DUF6::DUF6::DUF606::TPT; Domain location=216-345::28-161::220-342::207-345
MADAGEGRRVCGMPEKAQLHVAMLALQFGYAGFHVVSRLALNMGISKLVFPVYRNIIALCLLVPFAYFLEKKDRPQLTLNFVVQFFLLALCGITANQGFYLLGLDNTSPTFASAIQNSVPAITFAMAAALRIEKVRLDRRDGVAKVVGTLACVAGASVITLYKGPTIFGPSSGGDKQLIMQQLVAGPELAMGLSKAVEGEMKNWTLGCVYLIGHCLSWSGWLVLQAPVLKKYPARLSVTSYTCFFGVIQFLIIAAFMERDADAWKFHSGSELFTILYAGFIASGVAFAVQIWCIDRGGPVFVAVYQPVQTLVVAIMASLTLGEKFYLGGIIGAALIIVGLYLVLWGKSEERARLARDAAAAVVIMPPSSDAGATARSANKLTQPLLLPPSTENNV

SEQ ID NO: 89262 - protein, 136 aa, Setaria italica
  Transcript Sequence Number=SeqID_23288
  Gene Ontology: Mol. function=electron carrier activity; Cellular component=endoplasmic reticulum membrane; Biological process =oxidation reduction
  Homolog annotation: Hit_ID=Q7X979; Match level="QueryCoverage=90%, HitCoverage=36%, E-value=2e-38, Identity=63%"; Hit description=Ent -kaurenoic acid oxidase, putative
ALAPRPPRAKLPPGHMGLPFVGENPALKRYFRRARRPDGFVHDKKRRYGDATGGLYRTHLFGSPAVLACSPAANKLVLQSPDSFGVCWPAPDLVGASSILNADGARHARLRACVIEAVNRPSSLRSIARAVQPRMA

SEQ ID NO: 89263 - protein, 118 aa, Setaria italica
  Transcript Sequence Number=SeqID_23289
  Gene Ontology: Mol. function=electron carrier activity; Cellular component=endoplasmic reticulum membrane; Biological process =oxidation reduction
  Homolog annotation: Hit_ID=Q0Z7U8; Match level="QueryCoverage=86%, HitCoverage=20%, E-value=3e-44, Identity=82%"; Hit description =Flavonoid 3'-hydroxylase
DKTPKVVVAASAAVAAQFLRAHDANFSNRPPNSGAEHVAYNYQDLVFAPYGARWRALRKLCALHLFSARALDDLRAVREGEVALMVRELARQRGPAVALGQAANVCATNTLARATVGR

SEQ ID NO: 89264 - protein, 126 aa, Setaria italica
  misc_feature (108)..(108): Xaa can be any naturally occurring amino acid
  Transcript Sequence Number=SeqID_23290
  Gene Ontology: Mol. function=binding; Cellular component =intracellular; Biological process=RNA processing
  Homolog annotation: Hit_ID=O64496; Match level="QueryCoverage=61%, HitCoverage=5%, E-value=3e-12, Identity=44%"; Hit description =F20D22.14 protein
  Pfam annotation: Domain name=DUF946; Domain location=1-126; Score= -453.6; E_value=0.094; Accession=PF06101.3; Description=Plant protein of unknown function (DUF946)
RDYSLVWEFRAGGVANGSRGNAGNCYGLRDAYFWVPVPPEGYKALGCLVTTELQKPPLDEVACVRADLTDECEPHGSLLHLQLARPSASESCAAAAFAVRGVRPVHRXGMVGGKGVGAGTFCCAAD

SEQ ID NO: 89265 - protein, 183 aa, Setaria italica
  Transcript Sequence Number=SeqID_23291
  Gene Ontology: Mol. function=oxidoreductase activity; Biological process=oxidation reduction
  Homolog annotation: Hit_ID=B6UB33; Match level="QueryCoverage=84%, HitCoverage=42%, E-value=8e-58, Identity=73%"; Hit description =Retinol dehydrogenase 12
QNVSNVTKDVDNGLVTQGDWAEYLPLCAATCRPYDATQAYAVSKLANVLHTRELAARLQEAGANVTVNCVHPGIVRTRLNRDREGVLTDLVFLLLSKLLKTIPQAAATTCYVAAHPRMAGVSGRYFADCNEALPSPAATNRQEAARLWQISEAIIDAHHHDRSAALLLLPVPAHTGTAASPPP

SEQ ID NO: 89266 - protein, 156 aa, Setaria italica
  Transcript Sequence Number=SeqID_23292
VIDIVLLQRDNTKTTSAGAGRIIERWVIKYETCSGSGSGNGSKNSGKKSRSSSAQDHSLYRRAYNGSTVLFRSLYLVVRLLPAYHLFQELNSSGRIRPLSLSHKISSFVEPFTRAEDAEMKHYAFAPIETLSGRLSLSVSYVPVLEVAAAPEHIRH

SEQ ID NO: 89267 - protein, 101 aa, Setaria italica
  Transcript Sequence Number=SeqID_23293
  Gene Ontology: Mol. function=transcription regulator activity; Cellular component=nucleus; Biological process=regulation of transcription
  Homolog annotation: Hit_ID=B6SY64; Match level="QueryCoverage=79%, HitCoverage=23%, E-value=1e-15, Identity=50%"; Hit description =Symbiotic ammonium transporter
  Pfam annotation: Domain name=ACT; Domain location=26-91; Score=18.9; E_value=0.021; Accession=PF01842.17; Description=ACT domain
LSASSGTPAERKQLPEIEARFSEKSVMVRITCENGKGVAVKVLTEVEELRLSIIHANVMPFPAGTLIITITAKVEEGFTVTAEEIVGRLNSALLMRKQKTS

SEQ ID NO: 89268 - protein, 249 aa, Setaria italica
  Transcript Sequence Number=SeqID_23294
  Gene Ontology: Mol. function=receptor activity; Cellular component =integral to membrane
  Homolog annotation: Hit_ID=B6T7B7; Match level="QueryCoverage=98%, HitCoverage=99%, E-value=1e-113, Identity=84%"; Hit description =Transmembrane BAX inhibitor motif-containing protein 4
  Pfam annotation: Domain name=UPF0005; Domain location=33-249; Score =37.6; E_value=4.9e-08; Accession=PF01027.12; Description =Uncharacterised protein family UPF0005
MSSAFGYQKGGDLEAGTSGAPGPRALYPGMQESPEMRWALIRKIYVILSLQLLLTAAVAAVVVKVRAIPHFFTTTHAGLGLYIFLIILPFIVLCPLYYYHERHPVNLILLGLFTLAISFAVGMTCAFTSGKVILESAILTTVVVLSLTAYTFWAVRRGKDFSFLGPFLFASLIVLLVFAFIQILFPLGKLSQMIYGGLASLIFSGYIVYDTDNIIKRFTYDQYVWAAVSLYLDVINLFLSLMTLFRAAD

SEQ ID NO: 89269 - protein, 122 aa, Setaria italica
  Transcript Sequence Number=SeqID_23295
  Gene Ontology: Mol. function=ATP-dependent helicase activity; Cellular component=nucleus; Biological process=intracellular transport
  Homolog annotation: Hit_ID=Q69J41; Match level="QueryCoverage=96%, HitCoverage=21%, E-value=1e-56, Identity=86%"; Hit description=ATP -dependent RNA helicase-like protein
  Pfam annotation: Domain name=DEAD; Domain location=15-120; Score= -8.9; E_value=0.00018; Accession=PF00270.21; Description=DEADDEAH box helicase
SYEGALTSIGISRLYSHQSQAIESSISGRHIVVATSTSSGKSLCYNIPVLQSLSQDLMACALYIFPTKALAQDQLRTLLEMKNAFHTDIDVKIYDGDTPREDRLWIRDNARLLITNPDMLHV

SEQ ID NO: 89270 - protein, 71 aa, Setaria italica
  Transcript Sequence Number=SeqID_23296
HFAIGQFYHRTHRTIQHKIRTLYADIALLKAMAITSHPHLRLRDSSTQRWPQAAEYLQQLNDGTVRTKGTP

SEQ ID NO: 89271 - protein, 71 aa, Setaria italica
  Transcript Sequence Number=SeqID_23297
KPLGRALIIALVAPLFALFVCVVEHLLHCVVQRHVDEVDDGCLLVEALVPTREQGLGGDIHQDESTIAVIC

SEQ ID NO: 89272 - protein, 157 aa, Setaria italica
  Transcript Sequence Number=SeqID_23298
  Gene Ontology: Mol. function=hydrolase activity, acting on glycosyl bonds; Biological process=negative regulation of translation
  Homolog annotation: Hit_ID=C3SA73; Match level="QueryCoverage=91%, HitCoverage=69%, E-value=9e-13, Identity=34%"; Hit description =Ribosome inactivating protein
GDEVSFTRFITNLRHFVAEHPDQEDILDHAVLAKQRAEQPARWLHIKLEVVENKKTLSTTLLIRDDDLYVHGFMNQEGVCYELLETKDSVNMIPEDEYNPQPLYWGLTYNTVLNVQYGSEATAKLVTERLGMSFAIEAVRRLSSSTHPDVEVDGEKS

SEQ ID NO: 89273 - protein, 97 aa, Setaria italica
  Transcript Sequence Number=SeqID_23299
GKKDNISLVRIYGMGKEWVCDRDKMRLFPTATYPAGGVGFGWETRRGESDLLFIFSEQTVGHGSPSCRSPSTATTARHVLIVLPWPLGNGGIYSADG

SEQ ID NO: 89274 - protein, 164 aa, Setaria italica
  Transcript Sequence Number=SeqID_23300
  Gene Ontology: Cellular component=chloroplast
  Homolog annotation: Hit_ID=Q9LQ36; Match level="QueryCoverage=70%, HitCoverage=45%, E-value=5e-27, Identity=42%"; Hit description =F14M2.3 protein
  Pfam annotation: Domain name=DUF567; Domain location=44-164; Score =93.4; E_value=7.8e-25; Accession=PF04525.4; Description=Protein of unknown function (DUF567)
STTARGSSPLTADRIHRAKPPLQERCGGGDLNPMAAAAAPAALVAVVSPQFCAPYVVPLTVTQKAISLSDGDFTVTDANGTVVLLVKGALFSVHRRRVLLDAAGQPILSMQQKVFSMHKRWDVFRGDSAKASDLLFTVKKSSIIQLKTELDVFLASNTAEQACD

SEQ ID NO: 89275 - protein, 86 aa, Setaria italica
  Transcript Sequence Number=SeqID_23301
  Homolog annotation: Hit_ID=Q9SFZ8; Match level="QueryCoverage=70%, HitCoverage=5%, E-value=3e-14, Identity=54%"; Hit description=T22C5.3
WKMQKLWVGFLKLVSQTQPHSFDVLLQLPPPQFEHVLNKYPNLRGPLSSFVNQRNMHNTLPRYLYNITLVLYKLLNFIPSFDGLSS

SEQ ID NO: 89276 - protein, 503 aa, Setaria italica
  misc_feature (152)..(152): Xaa can be any naturally occurring amino acid
  Transcript Sequence Number=SeqID_23302
  Gene Ontology: Mol. function=binding
  Homolog annotation: Hit_ID=Q9SXC5; Match level="QueryCoverage=75%, HitCoverage=31%, E-value=4e-65, Identity=35%"; Hit description =T17H3.9
LSGRVGPLLLPPPPGDRGEVASPRFDSSRAFRLLRELGTNVTEDLVVLMPNLLSFLKHDDPAVVKQSIASGTNLFAAVLEEMALQINKCGKLEAWLEDMWAWMKQFKDAVRGVMHEPGPIATKLLAVKFIETWILCCTSQAISDQIQSIEGXNRRFDVSRFSQFHPCLDPVVLEADAHRALLLLLDILQSAYAHRGSFLVGTINSLAAVVKNRPIYYDRVLPVLLDFDPSLETAKGAHSASLRYALRAAFLGFLRSSHQAMIESKDILVRRLRALSPGEAMEQNIRQAEKMSRNIERASRTTKDESPAWEMPYGDNRKKSAARSSDVLAMSDGIAKRARFDTSATSNLPVMGSSDYSDMQADNDANGGHSSDPAILNSDVSPVEKMIEMIGALLAEGERGAESLGILVSTVEADVMADIVIETMKHLPGASFPLATNNNLQKPNFKYSSGLLTENLPVNSDSSLFAAQSTPTADGVSISTSDPFVMPGVHDAKRDPRRDPRRL

SEQ ID NO: 89277 - protein, 266 aa, Setaria italica
  Transcript Sequence Number=SeqID_23303
  Subcellular localization annotation: CTP_CleavageSite=72; ConfidenceScore=5.11e-01
ISAKPNFKYSSGLLTENLPVNSDSSLFAAQSTPTADGVSISTSDPFVMPGVHDAKRDPRRDPRRLDPRRTVSPAAVNSVQVKVETNIVPQTDNLPSTLCSNSSKAENYSDYSRDLQKNEDEHHSASQPNQTIAKDKLELLDVATEPEPTFEAEAPVDVGVHSSIVDEEMPNPISSEITSIDESDSLDSEVDPFLPVPEASTPEDTNQNLPVITSHLELSDKEKSLLNKLAIGRIIDDYKKNSLNARFSLLAHLIAQSADDDNIMDL

SEQ ID NO: 89278 - protein, 628 aa, Setaria italica
  misc_feature (26)..(26): Xaa can be any naturally occurring amino acid
  Transcript Sequence Number=SeqID_23304
  Gene Ontology: Mol. function=binding; Cellular component=plasma membrane
  Homolog annotation: Hit_ID=B9SQ20; Match level="QueryCoverage=98%, HitCoverage=46%, E-value=1e-157, Identity=48%"; Hit description =Symplekin, putative
CLELSDKEKSLLNKLAIGRIIDDYKXNSLNARFSLLAHLIAQSADDDNIMDLIQRHIIFHYHDQKGHELAMHVLYLLQTMNVANSPESSTSTSKHYEKFFISLARSLIDSMPASDKSFSKLLCDAPYLPESSFRLLEGLCMSEDNSQQVKDGDGDRVTQGLGTVWNLILGRPPLRDLCLDIVLKCAVHSQDEIRGKAVRLVAKRLYDLTYATEKIEQFATESLVGVANEHYVDTEINLKSSKESTAESEVSSQETSVSGQIPDAGCSESGSFKTSLVSRKQSAISLSEAKRHISLFFALCTKRPSLLQHLFNVYGRSPKVVKQCIHWHMPSLVSNLGSSCPEMLNIIHNPPEGSVHLITLILQTLTDESTPSAELVGAVKQLYNTLKDASILIPLLPSFPKEEVLPIFPRLVDLPLEKFQDALARILQGTAHTGPALTPAEVLIAIHDINPEKDKVALKKITDACKACFEQRTVFTQQVLEKALNQMVDRIPIPLLFMRTVIQALDAFPALVDFVMGLLSRLINKQIWKMQKLWVGFLKLVSQTQPHSFDVLLQLPPPQFEHVLNKYPNLRGPLSSFVNQRNMHNTLPRQMLISLGFISEPQQAPMSFVPATLQTADATSSLPGATLM

SEQ ID NO: 89279 - protein, 54 aa, Setaria italica
  Transcript Sequence Number=SeqID_23305
MPPTGDDPSAAAGISFPDADGGGGGDSEDGDFADAHLLDPTDPSLHNPTTSSAT

SEQ ID NO: 89280 - protein, 154 aa, Setaria italica
  misc_feature (137)..(137): Xaa can be any naturally occurring amino acid
  Transcript Sequence Number=SeqID_23306
  Gene Ontology: Cellular component=intracellular; Biological process =signal transduction
  Homolog annotation: Hit_ID=B9S3Y4; Match level="QueryCoverage=93%, HitCoverage=32%, E-value=4e-71, Identity=84%"; Hit description =Gtpase activating protein, putative
  Pfam annotation: Domain name=PBD; Domain location=12-58; Score=46.7; E_value=9e-11; Accession=PF00786.20; Description=P21-Rho-binding domain
  Pfam annotation: Domain name=RhoGAP; Domain location=75-153; Score= -39.6; E_value=0.0045; Accession=PF00620.19; Description=RhoGAP domain
  Pfam module annotation: Pfam domain module=PBD::RhoGAP; Domain location=12-58::75-153
EDAAAAELGEMEIGWPTDVRHVAHVTFDRFHGFLGLPVEFEDEMPCRVPSASASVFGVSAESMQCTYDGKGNSVPTILLLMQERLYAQGGLKAEGIFRINPENDQEEQVRDQLNKGVVPEDIEVHCLASLIKAWFRXLPEGVLDGLSPEQVLQC

SEQ ID NO: 89281 - protein, 65 aa, Setaria italica
  Transcript Sequence Number=SeqID_23307
MEGSRPRRGSPSAQARVRTVPIAVTPEGFWCCPSPAALHKSLKNPHHHAAGGGGNKHAPQQPHKT

SEQ ID NO: 89282 - protein, 66 aa, Setaria italica
  Transcript Sequence Number=SeqID_23308
FLHIEPKLEIYTPTVRLPMNKTRHAEPMAVDACRLLAVLILGGYMCGNRYRCEADGIAVISHIIQK

SEQ ID NO: 89283 - protein, 137 aa, Setaria italica
  Transcript Sequence Number=SeqID_23309
  Gene Ontology: Mol. function=oxidoreductase activity; Cellular component=extracellular region; Biological process=lignin catabolic process
  Homolog annotation: Hit_ID=Q0JHP8; Match level="QueryCoverage=100%, HitCoverage=25%, E-value=6e-60, Identity=79%"; Hit description =Laccase-8
  Pfam annotation: Domain name=Cu-oxidase; Domain location=40-137; Score=44.1; E_value=5.5e-10; Accession=PF00394.14; Description =Multicopper oxidase
VTGQEGTLWWHAHSSMLRATIYGALIIKPRGGYPFPAPYAEIPILLGEWWNRNVDDVETDGLLTGLGPAMSDAFTINGSPGDQTPCGGAGIFQVEVEPGKTYLLRIINAAVNAELFFRVAGHTFTVVAVDASYTNPH

SEQ ID NO: 89284 - protein, 44 aa, Setaria italica
  Transcript Sequence Number=SeqID_23310
ARLTSTYFQTPIIKKPCRYVRILKLHKTIGNITSSCQLVKYCRR

SEQ ID NO: 89285 - protein, 92 aa, Setaria italica
  Transcript Sequence Number=SeqID_23311
  Gene Ontology: Mol. function=transition metal ion binding
  Homolog annotation: Hit_ID=B6TDW5; Match level="QueryCoverage=85%, HitCoverage=18%, E-value=4e-12, Identity=46%"; Hit description =Transmembrane protein 49
MGPAVVAGEDKGVSELREKHRVDLERLTMTSQPFKTSAFFVLAIAQSLGRTCSSVLKKGSRLKVVFLLVVATWGLLLFTAGPHEKHVQELLW

SEQ ID NO: 89286 - protein, 117 aa, Setaria italica
  Transcript Sequence Number=SeqID_23312
LPKLVITTSKFIKLACCHIIYFLQYHLPFDPIIKAFEWFELVSCMIAFPTFLALINKHNQYAIFLCKRYFSRLCRPKSGSKDSMIKRALGTVHNPFWHGPVQVGTACMVCRACWRQV

SEQ ID NO: 89287 - protein, 80 aa, Setaria italica
  Transcript Sequence Number=SeqID_23313
WFLIKLPIGFSTSSFMNIWQFSGVTHNSEPERDGKRRGDGLRGKRFAATGWRKRAVERRRGRRWRDGARRRRRAGRVVGG

SEQ ID NO: 89288 - protein, 53 aa, Setaria italica
  Transcript Sequence Number=SeqID_23314
WRTILSRTRSKSTRCLYFLSCNCGKVMGRADNWPLTFNNDYAWHISNQLHNCD

SEQ ID NO: 89289 - protein, 96 aa, Setaria italica
  Transcript Sequence Number=SeqID_23315
  Gene Ontology: Mol. function=DNA binding; Cellular component=nuclear origin of replication recognition complex; Biological process=DNA replication
IKGNRELLDVLPSKRENNEDDSDSSDESSEDDQDELDLPTHKRRKKMEKQAYNEWKSSVLSSNKQTKPDPAKPRRQAQLNFKKPADITLEVPSAAN

SEQ ID NO: 89290 - protein, 133 aa, Setaria italica
  misc_feature (40)..(40): Xaa can be any naturally occurring amino acid
  Transcript Sequence Number=SeqID_23316
  Gene Ontology: Mol. function=DNA binding; Cellular component=nuclear origin of replication recognition complex; Biological process=DNA replication
  Homolog annotation: Hit_ID=Q6L3N4; Match level="QueryCoverage=72%, HitCoverage=32%, E-value=4e-26, Identity=59%"; Hit description =Probable origin recognition complex subunit 6, putative
YNFNKERFLAALPPSRRASTDFGRPVFTAAAFYLCAKRQXLKVDKLKLIDLCGTSSTEFTTVSTSMADLCFDVFGIAKEKKDPKSIKGNRELLDVLPSKRKHEDDSDSSDESSEDDQDELDLPTHKRRKKMGT

SEQ ID NO: 89291 - protein, 92 aa, Setaria italica
  misc_feature (16)..(16): Xaa can be any naturally occurring amino acid
  Transcript Sequence Number=SeqID_23317
ASETDQADGGYDVILXISDVPYAVNSLKKLYALISKCLRPPYGVLYVASKKNLVSSNGGARQLRALMEEEGVLGGHFLTELSDREIWKFFFK

SEQ ID NO: 89292 - protein, 50 aa, Setaria italica
  Transcript Sequence Number=SeqID_23318
MKDWSIFSKLDNNGGYLHKFPVGSPISHDIGLGLISQVGNLVECSFQHPR

SEQ ID NO: 89293 - protein, 60 aa, Setaria italica
  Transcript Sequence Number=SeqID_23319
MANRWWTGPLNLPEQPSGSSAPKTEPPAVKDPELSPAGGAPAADHADETNESGGGEPREG

SEQ ID NO: 89294 - protein, 67 aa, Setaria italica
  Transcript Sequence Number=SeqID_23320
LKRVTFYILYFGGFTMLLEHDSSRKIYVKGATDFSGGKMLTLILCLYNWLMHLDGTKLLSYCVLTSV

SEQ ID NO: 89295 - protein, 67 aa, Setaria italica; identical to SEQ ID NO: 89294
  Transcript Sequence Number=SeqID_23321

SEQ ID NO: 89296 - protein, 179 aa, Setaria italica
  misc_feature (23)..(23): Xaa can be any naturally occurring amino acid
  Transcript Sequence Number=SeqID_23322
  Gene Ontology: Mol. function=hormone activity; Cellular component=cis- Golgi network; Biological process=ER to Golgi vesicle-mediated transport
  Homolog annotation: Hit_ID=A8J2G7; Match level="QueryCoverage=78%, HitCoverage=87%, E-value=2e-30, Identity=47%"; Hit description =Component of TRAPP complex
  Pfam annotation: Domain name=Sedlin_N; Domain location=38-177; Score=- 51.3; E_value=0.073; Accession=PF04628.5; Description=Sedlin, N -terminal conserved region
  Pfam annotation: Domain name=Sybindin; Domain location=33-178; Score =290.9; E_value=2.7e-84; Accession=PF04099.4; Description=Sybindin -like family
  Pfam module annotation: Pfam domain module=Sedlin_N::Sybindin; Domain location=38-177::33-178
  Subcellular localization annotation: CTP_CleavageSite=20; ConfidenceScore=5.22e-01
MQFFGGSSLTSVAPDASPAPAAXPPGTGTGANAQVLYVFNRNGVCLLYREWHRPLRTLDPTQDHKLMFGLLFSLRSFTAKIDPTTAEKGNLGVPLLPGQGCSFYSFKTNTYKLNFMESPSGIKLILITHPRTGDQRDSLKHIYNLYVEYVVKNPLYAPATPIKCELFNKHLDQYVRTLI

SEQ ID NO: 89297 - protein, 80 aa, Setaria italica
  Transcript Sequence Number=SeqID_23323
  Gene Ontology: Mol. function=protein serine/threonine kinase activity; Cellular component=plasma membrane; Biological process =protein amino acid phosphorylation
  Homolog annotation: Hit_ID=B6SWS1; Match level="QueryCoverage=76%, HitCoverage=9%, E-value=1e-22, Identity=83%"; Hit description =BRASSINOSTEROID INSENSITIVE 1-associated receptor kinase 1
  Pfam annotation: Domain name=LRRNT_2; Domain location=28-68; Score =58.5; E_value=2.5e-14; Accession=PF08263.4; Description=Leucine rich repeat N-terminal domain
VLVASSLVLLLFVSACGPASGLLSPKGVNYEVQALMMIKNYLKDPHGVLKNWDQDSVDPCSWTMVTCSPENLVTGLEAPS

SEQ ID NO: 89298 - protein, 137 aa, Setaria italica
  Transcript Sequence Number=SeqID_23324
FFTGPKNTKGRVRRRNFLASFAAIFYPKQAQVAGPQRLRAEASGIPSTATGNLVLWEARLPHASSSPWPHPCSLTCLNTEEAPEPVAEEALGLRCLGNGDGSCCFLPGAALVRLRLRAAHCQAETRNGDRQGTQGIG

SEQ ID NO: 89299 - protein, 94 aa, Setaria italica
  Transcript Sequence Number=SeqID_23325
  Gene Ontology: Mol. function=protein serine/threonine kinase activity; Cellular component=plasma membrane; Biological process =protein amino acid phosphorylation
  Homolog annotation: Hit_ID=C0LGF5; Match level="QueryCoverage=98%, HitCoverage=8%, E-value=4e-43, Identity=88%"; Hit description =Leucine-rich repeat receptor-like protein kinase (Fragment)
CVPAILHRDVKCNNILLDSKYEAYLADFGLAKLMNSPNYHHAMSRIAGSYGYIAPEYAYTSNITEKSDVYSYGVVLLEILSGRSAIEPVVGEAS

SEQ ID NO: 89300 - protein, 52 aa, Setaria italica
  Transcript Sequence Number=SeqID_23326
  Gene Ontology: Cellular component=integral to membrane; Biological process=cell death
  Homolog annotation: Hit_ID=Q94CH2; Match level="QueryCoverage=100%, HitCoverage=10%, E-value=1e-19, Identity=82%"; Hit description=Seven transmembrane protein Mlo3
IKRVQKIKFIQDRCKGHERLTWVIIWMRSFFKQFYGSVSNDDYVTMRLGFVM

SEQ ID NO: 89301 - protein, 56 aa, Setaria italica
  Transcript Sequence Number=SeqID_23327
  Gene Ontology: Mol. function=metal ion binding
AGGSQQVVMRWRYGDVGDSNFAVHGRAVPLLVGLLCAVVFFVALCLYLRWRCHRYT

SEQ ID NO: 89302 - protein, 252 aa, Setaria italica
  Transcript Sequence Number=SeqID_23328
  Gene Ontology: Mol. function=aspartic-type endopeptidase activity; Biological process=proteolysis
  Homolog annotation: Hit_ID=B4FXW6; Match level="QueryCoverage=63%, HitCoverage=98%, E-value=1e-82, Identity=89%"; Hit description =Aspartic proteinase nepenthesin-2
  Subcellular localization annotation: CTP_CleavageSite=25; ConfidenceScore=5.33e-01
YNGDSFLASDGVLSLGYSNFSFASRAADRFGGRFSYCLVDHLAPRNATSYLTFGPNPALSSPAPKARTACAGSPPAAPGPRQTPLLLDHRMRPFYAVTVNGISVDGELLKIPRRVWDIEKGGGAILDSGTSLTVLVRPAYRAVVAALSKKLAGLPRVTMDPFDYCYNWTSPSTGEDLTVSVPELFVHFAGSARLQPPAKSYVIDAAPGVKCIGLQEGEWPGVSVIGNILQQEHLWEFDIKNQRLRFQRSRCT

SEQ ID NO: 89303 - protein, 105 aa, Setaria italica
  Transcript Sequence Number=SeqID_23329
  Gene Ontology: Mol. function=transporter activity; Cellular component= membrane; Biological process=oligopeptide transport
  Homolog annotation: Hit_ID=Q53JI5; Match level="QueryCoverage=81%, HitCoverage=13%, E-value=5e-39, Identity=89%"; Hit description =Nitrate transporter NTL1, putative, expressed
MDIESRQGSKGDSMAASEVSVDWRGRPCDHRKHGGMKAAVFVLGIQAFEMMAIAAVGNNLITYVFGEMHYPLSQAANIVTNFIGTVFLLSLLGGFLSDSYLGSFW

SEQ ID NO: 89304 - protein, 82 aa, Setaria italica
  Transcript Sequence Number=SeqID_23330
  Gene Ontology: Mol. function=protein binding
  Homolog annotation: Hit_ID=B6U8V8; Match level="QueryCoverage=100%, HitCoverage=17%, E-value=9e-23, Identity=69%"; Hit description =Regulatory protein NPR1
ELGKRFFPRCSKVLDQFMDDENELASLGRDTSTSTEKKRRFHDLQDVLQKAFSEDKEENDRSARSSSVSSRTTSIGAVRPRR

SEQ ID NO: 89305 - protein, 478 aa, Setaria italica
  Transcript Sequence Number=SeqID_23331
  Gene Ontology: Mol. function=protein binding; Biological process =plant-type hypersensitive response
  Homolog annotation: Hit_ID=B6U8V8; Match level="QueryCoverage=93%, HitCoverage=95%, E-value=0.0, Identity=85%"; Hit description =Regulatory protein NPR1
  Pfam annotation: Domain name=Ank; Domain location=203-236; Score =22.1; E_value=0.0024; Accession=PF00023.22; Description=Ankyrin repeat
  Pfam annotation: Domain name=Ank; Domain location=237-269; Score =23.9; E_value=0.00068; Accession=PF00023.22; Description=Ankyrin repeat
  Pfam module annotation: Pfam domain module=Ank::Ank; Domain location =203-236::237-269
KDKDKDKDKGTKDKVELRELLGEELEVGYEALRLVIEYLYSGRVGALPKAACLCVDEGGCAHLGCRPAVAFMAQVLFAASTFEVAELTSLFQRQLLDVLDKVEVDNLPLILSVANLCSKSCVKLLERCLEIVVRSNLDMITLEKALPPDVVKQIVDARLSLELVSPEDKGFPNIHVRRVHRALDSDDVELVRMLLKEGKTNLDDAYALHYAVEHCDSKITTELLDLALADVNHRNPRGYTVLHIAAMRMEPKIIVSLLTKGARPSDLTFDHRKAVQISKRLTKHGDYFGPTEDGKPSPKDKLCIEILEQAERRDPQLGEASVSLAMAGDCLRGRLLYLENRVALARILFPMEARVAMDIAQVDGTLEFALTVDLNDTPFKMKEEHLTRMSALSKTVELGKRFFPRCSKVLDQFMDDENELASLGRDTSTSTEKKRRFHDLQDVLQKAFSEDKEENDRSARSSSVSSRTTSIGAVRPRR

SEQ ID NO: 89306 - protein, 88 aa, Setaria italica
  Transcript Sequence Number=SeqID_23332
  Gene Ontology: Mol. function=transcription factor activity; Cellular component=nucleus; Biological process=regulation of transcription, DNA-dependent
  Homolog annotation: Hit_ID=B6TJI7; Match level="QueryCoverage=97%, HitCoverage=26%, E-value=5e-32, Identity=82%"; Hit description =Nuclear transcription factor Y subunit A-10
LSPEETRREGQFQVVPGAQGTPDPAPPAAAKRGSPEVLKFSVFQGNSESDGKGEKVPEHSTTVSLQSPFPEYNGRFEIGLGQSMAPSI

SEQ ID NO: 89307 - protein, 60 aa, Setaria italica
  Transcript Sequence Number=SeqID_23333
  Subcellular localization annotation: CTP_CleavageSite=45; ConfidenceScore=5.44e-01
MGDQQTKSSSYTRLGLRRWPRPARGFRLSPTRRLRARLSALLGVLGRYVRNLRLLTEGAR

SEQ ID NO: 89308 - protein, 71 aa, Setaria italica
  Transcript Sequence Number=SeqID_23334
IVTGVSLATCQGNPEEKGAHQATGNGNDNGSKAARRPPCMRSNSFYARAVAECLEFIKGSNVPPASPSPLP

SEQ ID NO: 89309 - protein, 138 aa, Setaria italica
  Transcript Sequence Number=SeqID_23335
  Gene Ontology: Mol. function=protein serine/threonine kinase activity; Cellular component=integral to membrane; Biological process=protein amino acid phosphorylation
  Homolog annotation: Hit_ID=B9RAX9; Match level="QueryCoverage=100%, HitCoverage=48%, E-value=8e-40, Identity=35%"; Hit description =Receptor protein kinase, putative
  Pfam annotation: Domain name=LRR_1; Domain location=115-137; Score =6.6; E_value=16; Accession=PF00560.25; Description=Leucine Rich Repeat
  Pfam annotation: Domain name=LRR_1; Domain location=17-36; Score =12.8; E_value=1.1; Accession=PF00560.25; Description=Leucine Rich Repeat
  Pfam annotation: Domain name=LRR_1; Domain location=42-64; Score =16.5; E_value=0.11; Accession=PF00560.25; Description=Leucine Rich Repeat
  Pfam annotation: Domain name=LRR_1; Domain location=66-88; Score=9.7; E_value=4.1; Accession=PF00560.25; Description=Leucine Rich Repeat
  Pfam module annotation: Pfam domain module=LRR_1::LRR_1::LRR_1::LRR _1; Domain location=115-137::17-36::42-64::66-88
GANLTGPIPPALGELPALAHLDLSNNALTGPIPAGLCRQGSKLETLYLNSNRLEGALPDAIGNLTALRELIIYDNQLAGRIPAAIGRMASLEVLRGGGNKNLQGALPTEIGNCSRLTMIGLAETSITGPLPTSLGRLK

SEQ ID NO: 89310 - protein, 143 aa, Setaria italica
  Transcript Sequence Number=SeqID_23336
  Gene Ontology: Mol. function=protein serine/threonine kinase activity; Cellular component=integral to membrane; Biological process=protein amino acid phosphorylation
  Homolog annotation: Hit_ID=Q9FKU3; Match level="QueryCoverage=100%, HitCoverage=36%, E-value=1e-38, Identity=40%"; Hit description =Receptor protein kinase-like protein
  Pfam annotation: Domain name=LRR_1; Domain location=108-130; Score =10.8; E_value=2.6; Accession=PF00560.25; Description=Leucine Rich Repeat
  Pfam annotation: Domain name=LRR_1; Domain location=12-34; Score=4.5; E_value=41; Accession=PF00560.25; Description=Leucine Rich Repeat
  Pfam annotation: Domain name=LRR_1; Domain location=36-58; Score =14.0; E_value=0.61; Accession=PF00560.25; Description=Leucine Rich Repeat
  Pfam annotation: Domain name=LRR_1; Domain location=60-82; Score =10.2; E_value=3.5; Accession=PF00560.25; Description=Leucine Rich Repeat
  Pfam annotation: Domain name=LRR_1; Domain location=84-106; Score =15.6; E_value=0.2; Accession=PF00560.25; Description=Leucine Rich Repeat
  Pfam module annotation: Pfam domain module=LRR_1::LRR_1::LRR_1::LRR _1::LRR_1; Domain location=108-130::12-34::36-58::60-82::84-106
GPLPASLGRLKNLTTLAIYTALLSGPIPPELGQCTSLENIYLYENALSGSIPAQLGGLRKLTNLLLWQNQLVGIIPPELGSCPGLTVVDLSLNGLTGHIPASFGNLSSLQQLQLSVNKISGTVPPELARCTNLTDLELDNNQL

SEQ ID NO: 89311 - protein, 175 aa, Setaria italica
  Transcript Sequence Number=SeqID_23337
  Gene Ontology: Mol. function=transporter activity; Cellular component= integral to membrane; Biological process=sodium ion transport
  Homolog annotation: Hit_ID=Q9FHJ8; Match level="QueryCoverage=96%, HitCoverage=24%, E-value=1e-63, Identity=73%"; Hit description=Urea active transporter-like protein
CGSAVANALTGINVYAASFLIPLGVVVYTLAGGLKATFLASYIHSVVVHVVLVIFVFLVYTSSNSLGSPKVVHDHLTAVASAARDCSAPLSHSDQACGPVHGNFKGSYLTMLSSGGLVFGIINIVGNFGTVFVDNGYWMSAIAARPSSTHKGYLLGGLVWFAVPFSLATSLGPSV

SEQ ID NO: 89312 - protein, 60 aa, Setaria italica
  Transcript Sequence Number=SeqID_23338
LKYEVCISIISSFSVKNRTQHARSVCGQRSHLTASTTGLWRRGELGGQLLQYADTIAPWP

SEQ ID NO: 89313 - protein, 124 aa, Setaria italica
  misc_feature (33)..(33): Xaa can be any naturally occurring amino acid
  Transcript Sequence Number=SeqID_23339
  Gene Ontology: Mol. function=acid-amino acid ligase activity; Cellular component=intracellular; Biological process=ubiquitin -dependent protein catabolic process
  Homolog annotation: Hit_ID=B9SIV0; Match level="QueryCoverage=92%, HitCoverage=35%, E-value=5e-28, Identity=55%"; Hit description =Protein pim1, putative
  Pfam annotation: Domain name=RCC1; Domain location=31-87; Score=8.7; E_value=0.093; Accession=PF00415.10; Description=Regulator of chromosome condensation (RCC1)
YPRLFWGAFTPDTVIKQVSCGAVHVVALSEDGXAASMGYTWGLGSMGQLGHCSLQSGDKELIPRRIVALDRIIIRDVSCGGVHSCAVTEGGALYAWGGGHVGQLGCSGPLVVGSFIFFLLFFLL

SEQ ID NO: 89314 - protein, 59 aa, Setaria italica
  Transcript Sequence Number=SeqID_23340
  Homolog annotation: Hit_ID=B9SIV0; Match level="QueryCoverage=98%, HitCoverage=12%, E-value=4e-20, Identity=81%"; Hit description =Protein pim1, putative
  Pfam annotation: Domain name=RCC1; Domain location=2-53; Score=10.5; E_value=0.06; Accession=PF00415.10; Description=Regulator of chromosome condensation (RCC1)
PGYNEYGQLGRGCTSQGLQGARVLTAYARFLDDAPEQVKIVRVSCGEYHTAAISENGEV

SEQ ID NO: 89315 - protein, 445 aa, Setaria italica
  Transcript Sequence Number=SeqID_23341
  Gene Ontology: Mol. function=cholestenol delta-isomerase activity
  Homolog annotation: Hit_ID=B9SIV0; Match level="QueryCoverage=98%, HitCoverage=92%, E-value=0.0, Identity=74%"; Hit description=Protein pim1, putative
  Pfam annotation: Domain name=RCC1; Domain location=183-241; Score =30.9; E_value=5.1e-06; Accession=PF00415.10; Description=Regulator of chromosome condensation (RCC1)
  Pfam annotation: Domain name=RCC1; Domain location=244-296; Score =20.3; E_value=0.0052; Accession=PF00415.10; Description=Regulator of chromosome condensation (RCC1)
  Pfam annotation: Domain name=RCC1; Domain location=299-358; Score =15.3; E_value=0.018; Accession=PF00415.10; Description=Regulator of chromosome condensation (RCC1)
  Pfam annotation: Domain name=RCC1; Domain location=361-409; Score =4.5; E_value=0.27; Accession=PF00415.10; Description=Regulator of chromosome condensation (RCC1)
  Pfam annotation: Domain name=RCC1; Domain location=78-127; Score =49.5; E_value=1.3e-11; Accession=PF00415.10; Description=Regulator of chromosome condensation (RCC1)
  Pfam module annotation: Pfam domain module=RCC1::RCC1::RCC1::RCC1::RCC 1; Domain location=183-241::244-296::299-358::361-409::78-127
MDVDDVLSNLRVVGVPTKSAIYIWGYNHSGQTARKGKECHLRIPKSLPPKLFKLGNGESLRWTDIACGREHTAAVASDGSLFTWGANDFGQLGDGTEESAKEPKKVKSLETELVKSVSCGAHCTAAVAEPRENDGTVSKSRLWVWGQNQGSDYPRLFWGAFTPDTVIKQVSCGAVHVVALSEDGLLQAWGYNEYGQLGRGCTSQGLQGARVLTAYARFLDDAPEQVKIVRVSCGEYHTAAISENGEVYTWGLGSMGQLGHCSLQSGDKELIPRRIVALDRIIIRDVSCGGVHSCAVTEGGALYAWGGGHVGQLGVGPQSGLFSCSLNGSDMLLRNIPVLVIPSGVRLATCGHSHTLVSMKDGRIYGWGYNSYGQAANAKSTYAWFPSPVDWCVGEVRRLAAGGGHSAVLTDACSLKELCEFKLAETVNLSNAELIEDVASLLTLS

SEQ ID NO: 89316 - protein, 143 aa, Setaria italica
  Transcript Sequence Number=SeqID_23342
  Homolog annotation: Hit_ID=B9SIV0; Match level="QueryCoverage=79%, HitCoverage=23%, E-value=5e-34, Identity=61%"; Hit description =Protein pim1, putative
  Pfam annotation: Domain name=RCC1; Domain location=15-67; Score=22.0; E_value=0.0024; Accession=PF00415.10; Description=Regulator of chromosome condensation (RCC1)
  Pfam annotation: Domain name=RCC1; Domain location=70-129; Score =14.2; E_value=0.024; Accession=PF00415.10; Description=Regulator of chromosome condensation (RCC1)
  Pfam module annotation: Pfam domain module=RCC1::RCC1; Domain location=15-67::70-129
MNLIVSTYKIFGFCSGEVYTWGLGSMGQLGHCSLQSGDKELIPRRIVALDRIIIRDVSCGGVHSCAVTEGGALYAWGGGHVGQLGVGPQSGLFSCSLNGSDMLLRNIPVLVIPSGVRLATCGQPHTLVFTFLLFFCIYERLAL

SEQ ID NO: 89317 - protein, 122 aa, Setaria italica
  Transcript Sequence Number=SeqID_23343
  Homolog annotation: Hit_ID=B9SIV0; Match level="QueryCoverage=87%, HitCoverage=22%, E-value=9e-43, Identity=76%"; Hit description =Protein pim1, putative
LVYRNRYGWGYNSYGQAANAKSTYAWFPSPVDWCVGEVRRLAAGGGHSAVLTDACSLKELCEFKLAETVNLSNAELIEDVASRTGADALARLCEKLREHVHDQVECELLEKQVPGEVKAKAG

SEQ ID NO: 89318 - protein, 76 aa, Setaria italica
  Transcript Sequence Number=SeqID_23344
  Gene Ontology: Mol. function=nitric-oxide synthase activity; Biological process=oxidation reduction
  Homolog annotation: Hit_ID=Q6YPG5; Match level="QueryCoverage=90%, HitCoverage=12%, E-value=6e-22, Identity=72%"; Hit description =Putative nitric oxide synthase
RRIFAGANPIILVITKVDLLPRDTDLNCVGDWVVESVVKKKLNVLSVHLTSSKSLVGITGVIAEIQQEKKVSMSFF

SEQ ID NO: 89319 - protein, 144 aa, Setaria italica
  Transcript Sequence Number=SeqID_23345
  Gene Ontology: Mol. function=nitric-oxide synthase activity; Biological process=oxidation reduction
  Homolog annotation: Hit_ID=Q6YPG5; Match level="QueryCoverage=64%, HitCoverage=17%, E-value=9e-47, Identity=96%"; Hit description =Putative nitric oxide synthase
  Pfam annotation: Domain name=MMR_HSR1; Domain location=16-114; Score=- 10.1; E_value=0.0086; Accession=PF01926.15; Description=GTPase of unknown function
YLVFLLLATLVILDQYYTLLQGSANVGKSAFISALLRTMAYKDPVAAAAQKYKPIQSAVPGTTLGPIQIEAFLGGGKLYDTPGVHLHHRQAAVIHADDLPSLAPQSRLKGRCFPVCIFHSLEHRFLPQNFHTNLFLQNMMLCSG

SEQ ID NO: 89320 - protein, 128 aa, Setaria italica
  misc_feature (12)..(12): Xaa can be any naturally occurring amino acid
  Transcript Sequence Number=SeqID_23346
  Gene Ontology: Mol. function=nucleic acid binding
  Homolog annotation: Hit_ID=Q6JB11; Match level="QueryCoverage=41%, HitCoverage=32%, E-value=2e-20, Identity=90%"; Hit description=MEG5
LFASADIFRPFXGFREVRLVNKESRHPGGDPHVLCFVDFDNPAQATIALEALQGDDTYNYGYGVCSGVDYLTNFCEMQFPMCILVKFCYTSLHLLLVCCEACFQIGNYTCPFNLTLCKSCNIVFKFIR

SEQ ID NO: 89321 - protein, 241 aa, Setaria italica
  misc_feature (26)..(26): Xaa can be any naturally occurring amino acid
  misc_feature (29)..(29): Xaa can be any naturally occurring amino acid
  Transcript Sequence Number=SeqID_23347
  Gene Ontology: Mol. function=nucleic acid binding
  Homolog annotation: Hit_ID=Q6JB11; Match level="QueryCoverage=43%, HitCoverage=65%, E-value=1e-52, Identity=93%"; Hit description=MEG5
  Pfam annotation: Domain name=RRM_1; Domain location=144-217; Score =38.5; E_value=2.7e-08; Accession=PF00076.14; Description=RNA recognition motif. (a.k.a. RRM, RBD, o
AAGMNPQAAAAMAQQAAAPPLKRALXSSXDVSGGQDMTGYYPRETDRAGYHSLRENEAIGASYDRYLRNGMPSVGANDTSRAAGMAAGMAAGMGAGMAAGMGAGMAGYGVDERRMMGVVGMDSRGMGYGGRPEPPLPPDASNTLYIEGLPANCTRREVSHIFRPFVGFREVRLVNKESRHPGGDPHVLCFVDFDNPAQATIALEALQGYKFDEHDRDSAHLRLQFSRFPGPRSAGGPRGRR

SEQ ID NO: 89322 - protein, 154 aa, Setaria italica
  Transcript Sequence Number=SeqID_23348
  Gene Ontology: Mol. function=amino acid transmembrane transporter activity; Cellular component=integral to membrane; Biological process=amino acid transport
  Homolog annotation: Hit_ID=B6TZ59; Match level="QueryCoverage=100%, HitCoverage=31%, E-value=1e-55, Identity=70%"; Hit description =Cationic amino acid transporter
PRRWAASVKGRKDWRLFFNTLFWNLNYWDSASTMAGEVERPERTLPRALAVAVVLIAASYLLPLMAATGATDAPPEAWANGYLADAAGIIGGSWLKYWIEAGAVLSSIGMFEAQLSSGAYQLLGMADLGLLPSAFARRAALFRTPWVAIAASSA

SEQ ID NO: 89323 - protein, 40 aa, Setaria italica
  Transcript Sequence Number=SeqID_23349
MGNLVSQCVVASGAGARPVVVAPDGSRTRVEEHTGVAELM

SEQ ID NO: 89324 - protein, 73 aa, Setaria italica
  Transcript Sequence Number=SeqID_23350
  Gene Ontology: Mol. function=hydrolase activity, hydrolyzing O -glycosyl compounds; Cellular component=extracellular region; Biological process=cell wall organization and biogenesis
  Homolog annotation: Hit_ID=B6U0P7; Match level="QueryCoverage=100%, HitCoverage=14%, E-value=1e-34, Identity=93%"; Hit description =Endoglucanase 1
AHPGRIGCSQGFTALYAGGANPNVLVGAVVGGPDLQDKFPDQRNDHEHSEPATYINAPLVGALAYLAHSYGQL

SEQ ID NO: 89325 - protein, 359 aa, Setaria italica
  Transcript Sequence Number=SeqID_23351
  Gene Ontology: Mol. function=hydrolase activity, acting on ester bonds; Biological process=lipid metabolic process
  Homolog annotation: Hit_ID=B6TTJ2; Match level="QueryCoverage=94%, HitCoverage=94%, E-value=1e-154, Identity=81%"; Hit description =Anther-specific proline-rich protein APG
  Pfam annotation: Domain name=Lipase_GDSL; Domain location=37-350; Score=155.6; E_value=1.5e-43; Accession=PF00657.14; Description=GDSL- like LipaseAcylhydrolase
MAPPPPLLLLLLAVAASSSACHGYQYDPSRGPLVTAVIVFGDSIVDPGNNNGLLTLIKANHPPYGKDFFNHEATGRYSNGLIPTDLIAQGLGVKQLLPGYLGVDLSPEDLLTGVSFASGATGFDPLTPVVVSVISLEQQLAYFDEYREKLVAIAGEEETEKIIGGALFVVCAGTDDVANTYFTTPFRSVEYDIPSYVELLVAGAESFLRNVSARGAAKIGFVGMPPVGCVPSQRTLGGGLRRECEPRRNEAAQLYNARIQEMIAGLNAEPGFPTLVVYLDIYRILDDLMERGEKYGFTETTRGCCGTGTIEVTGLCDSRFVSVCDDVSNHVFFDSYHPTERAYRIIVNDIFDNYIQVLT

SEQ ID NO: 89326 - protein, 77 aa, Setaria italica
  Transcript Sequence Number=SeqID_23352
  Gene Ontology: Mol. function=protein binding; Cellular component =plasma membrane
  Homolog annotation: Hit_ID=B6SVK6; Match level="QueryCoverage=100%, HitCoverage=14%, E-value=2e-33, Identity=87%"; Hit description =Protein lap4
LDISSNQIRVLPDSFGNLSNLRVFHADETPLEVPPKEVVKLGAQEVVNYMKNMVAARGASQKETDKRSFWAWLHSLF

SEQ ID NO: 89327 - protein, 314 aa, Setaria italica
  Transcript Sequence Number=SeqID_23353
  Gene Ontology: Mol. function=nucleic acid binding; Cellular component= nucleus
  Homolog annotation: Hit_ID=B9T555; Match level="QueryCoverage=41%, HitCoverage=48%, E-value=9e-33, Identity=56%"; Hit description =Glycine-rich RNA-binding protein, putative
  Pfam annotation: Domain name=RRM_1; Domain location=9-79; Score =101.9; E_value=2.2e-27; Accession=PF00076.14; Description=RNA recognition motif. (a.k.a. RRM, RBD, o
  Pfam annotation: Domain name=zf-CCHC; Domain location=114-131; Score =33.1; E_value=1.1e-06; Accession=PF00098.15; Description=Zinc knuckle
  Pfam module annotation: Pfam domain module=RRM_1::zf-CCHC; Domain location=9-79::114-131
MEGKEEGRIFVGGLSWQTDERKLEDAFGRFGKVVDAQIMLERHTNRHRGFGFVTFEDRRAVDSAIKEMHGQELDGRTISVNKAEPKMNTDDTRYDSGGGRAEYRGGRSDGPPPGNCFECGRPGHWVRDCPNAAGGRSGRFSSKFSGGSGGGRGDRFSGSDRFGDRYMDDRYDGGRYGYRDQVDTRDRYAGGRDRYANDRYPSGGDHFGADRYGGGPDRYAPSGYGRERERSYERDGVRGGGGGGGYDRSGPRGGGSYDRDGPRGGGYDRDGPRGGVTDRYGGGGPARYDGGSYRERPGPYDRPSRGGGRFDDRY

SEQ ID NO: 89328 - protein, 139 aa, Setaria italica
  misc_feature (19)..(19): Xaa can be any naturally occurring amino acid
  Transcript Sequence Number=SeqID_23354
  Gene Ontology: Mol. function=serine-type endopeptidase activity; Biological process=negative regulation of catalytic activity
  Homolog annotation: Hit_ID=Q6MW77; Match level="QueryCoverage=92%, HitCoverage=16%, E-value=2e-28, Identity=46%"; Hit description =B1248C03.20 protein
MGDGPLLVFPQALRNVRNXGGSGLIFVQYTTDGLTACEGITCVIVDIDYGKKIKEYINTTSSPIARIEPARSITGKEILAPKVAAFSSRGPSPDYADIIKPDIAAPGANILAAQGNSYAIKSGTSMATPHVTGIIALLK

SEQ ID NO: 89329 - protein, 320 aa, Setaria italica
  misc_feature (94)..(94): Xaa can be any naturally occurring amino acid
  Transcript Sequence Number=SeqID_23355
  Homolog annotation: Hit_ID=B9SYJ2; Match level="QueryCoverage=84%, HitCoverage=86%, E-value=9e-57, Identity=48%"; Hit description=ELL -associated factor, putative
  Pfam annotation: Domain name=EAF; Domain location=1-118; Score=218.2; E_value=2.1e-62; Accession=PF09816.1; Description=ELL-associated factor
MASGSSNGEPSTAPQPNRWYDLRLGSSCRDPSPTTKFCTLRYEFKPASIDKTQAGSLQSTKDNRVTVEFHNNQPGKPKVTFEGSQEEYKDNDGXLFFDGETFRLERLHRAVKRLRHVRVPGESAAANLATTITGMGAESHSPPLAKVGKSQSISKPTVHSVPVEVERIDIGEPENSGPRYNNKSTTYQPVTTDPFALSPYPNDEDDNLDILGDDDDNVSPNNITSGQGTSVCGFDINLPNQGNMDDEIADVDVNDEADEGLNAAEALRAQVNAEQDSSSSSGSSSSSSSGSGSGSGSGSSSSDSDGSDGVSASSGADVDI

SEQ ID NO: 89330 - protein, 45 aa, Setaria italica
  Transcript Sequence Number=SeqID_23356
MASGGGSMREQQQEMNISFGMMSHHGHHHHQPPSSSSSSSMHAAA

SEQ ID NO: 89331 - protein, 91 aa, Setaria italica
  Transcript Sequence Number=SeqID_23357
RVVVHPGMQGRESYLSPHMDRADRQREHLRWPDWQGRKGPPICVCTHISRVQELFFSILLLFSLAATWSCTNSLEPQVASATEAKGPHLHH

SEQ ID NO: 89332 - protein, 52 aa, Setaria italica
  Transcript Sequence Number=SeqID_23358
IYSLQLIYTDKTHRNAYAHSLVVVHDPSARSLAGRAVADDGDVELPERLERD

SEQ ID NO: 89333 - protein, 156 aa, Setaria italica
  misc_feature (60)..(60): Xaa can be any naturally occurring amino acid
  misc_feature (100)..(100): Xaa can be any naturally occurring amino acid
  misc_feature (121)..(121): Xaa can be any naturally occurring amino acid
  misc_feature (138)..(138): Xaa can be any naturally occurring amino acid
  misc_feature (149)..(149): Xaa can be any naturally occurring amino acid
  Transcript Sequence Number=SeqID_23359
  Gene Ontology: Mol. function=nucleic acid binding; Cellular component= ribonucleoprotein complex; Biological process=RNA processing
  Homolog annotation: Hit_ID=B6T390; Match level="QueryCoverage=98%, HitCoverage=37%, E-value=3e-62, Identity=69%"; Hit description=RNA binding protein
  Pfam annotation: Domain name=RRM_1; Domain location=37-93; Score=8.0; E_value=0.036; Accession=PF00076.14; Description=RNA recognition motif. (a.k.a. RRM, RBD, o
EALRTSSKLVVSDDGKRVKRQEPFTESDLQELKSRIVVAENLPGDPSYQNLKKIFSAVGXLHAFVEYETPEDAEKAIVALSDEENWRNGLRVRLLNTCSXKGAGKGKNGTHGTDGNGEEDXVSTSNQSNERQSEETSXQLLDVLPDHLXDETFNDK

SEQ ID NO: 89334 - protein, 31 aa, Setaria italica
  Transcript Sequence Number=SeqID_23360
  Homolog annotation: Hit_ID=B6T390; Match level="QueryCoverage=100%, HitCoverage=6%, E-value=8e-10, Identity=96%"; Hit description=RNA binding protein
GDPSYQNLKKIFSAVGSVISIRTCYPQTPNG

SEQ ID NO: 89335 - protein, 159 aa, Setaria italica
  misc_feature (92)..(92): Xaa can be any naturally occurring amino acid
  Transcript Sequence Number=SeqID_23361
  Gene Ontology: Mol. function=nucleic acid binding; Cellular component= ribonucleoprotein complex; Biological process=RNA processing
  Homolog annotation: Hit_ID=Q2QVL9; Match level="QueryCoverage=96%, HitCoverage=32%, E-value=3e-32, Identity=51%"; Hit description =Transposon protein, putative, Mutator sub-class, expressed
RNAAKGEEDVSTSNQSNERQSEETSQLLDVLPDHLFDETFNDKEVPKRGKGRGRGGRGRGRGNNQYNNYHHSNNQHHQNHQPHYNHHGNNHXGGNRGGAHPAGTPPHNLMSKPEQHQQLPIGASKLPPGPRMPDGTRGFTMGRGKPQAVLPGLCAVGEA

SEQ ID NO: 89336 - protein, 107 aa, Setaria italica
  misc_feature (88)..(88): Xaa can be any naturally occurring amino acid
  misc_feature (96)..(96): Xaa can be any naturally occurring amino acid
  Transcript Sequence Number=SeqID_23362
  Gene Ontology: Mol. function=nucleic acid binding; Cellular component= ribonucleoprotein complex; Biological process=RNA processing
  Homolog annotation: Hit_ID=B6T390; Match level="QueryCoverage=93%, HitCoverage=20%, E-value=6e-45, Identity=88%"; Hit description=RNA binding protein
RLTLFPSSLTTSFDGKRVKRQEPFTESDLQELKSRIVVAENLPGDPSYQNLKKIFSAVGSVISIRTCYPQTPNGSGPATNRSAKLDMXLFSNKLHXFVEYETPEDAE

SEQ ID NO: 89337 - protein, 206 aa, Setaria italica
  misc_feature (25)..(25): Xaa can be any naturally occurring amino acid
  misc_feature (76)..(76): Xaa can be any naturally occurring amino acid
  misc_feature (138)..(138): Xaa can be any naturally occurring amino acid
  Transcript Sequence Number=SeqID_23363
  Gene Ontology: Mol. function=nucleic acid binding; Cellular component= ribonucleoprotein complex; Biological process=RNA processing
  Homolog annotation: Hit_ID=B6T390; Match level="QueryCoverage=94%, HitCoverage=41%, E-value=2e-87, Identity=80%"; Hit description=RNA binding protein
  Pfam annotation: Domain name=RRM_1; Domain location=53-131; Score =4.1; E_value=0.083; Accession=PF00076.14; Description=RNA recognition motif. (a.k.a. RRM, RBD, o
FKKVKASVRNNFMLAEALRTSSKLXVVSDDGKRVKRQEPFTESDLQELKSRIVVAENLPGDPSYQNLKKIFSAVGXTPNGSGPATNRSAKLDMLFSNKLHAFVEYETPEDAEKAIVALSDEENWRNGLRVRLLNTCSXKGAGKGKNGTHGTDGNGEEDVSTSNQSNERQSEETSQLLDVLPDHLFDETFNDKEVPKRGKGRGRGGW

SEQ ID NO: 89338 - protein, 137 aa, Setaria italica
  Transcript Sequence Number=SeqID_23364
  Gene Ontology: Mol. function=nucleic acid binding; Cellular component= ribonucleoprotein complex; Biological process=RNA processing
  Homolog annotation: Hit_ID=B6T390; Match level="QueryCoverage=63%, HitCoverage=17%, E-value=1e-24, Identity=66%"; Hit description=RNA binding protein
  Pfam annotation: Domain name=La; Domain location=88-135; Score=47.0; E_value=7.3e-11; Accession=PF05383.9; Description=La domain
  Subcellular localization annotation: CTP_CleavageSite=16; ConfidenceScore=5.22e-01
PAPPAVVVPPPPQVIRVFAAPPPPPRAAFFAPPPPRPFEYYAPVGGRGGFTTKEQQVPEPEPDAELLPPAAKAEQAVDGLEDEVVHKITKQVEYYFSDINLATTEHLMRFITKDPEGYVPISVVTHRSFYFLEASNN

SEQ ID NO: 89339 - protein, 431 aa, Setaria italica
  misc_feature (51)..(51): Xaa can be any naturally occurring amino acid
  Transcript Sequence Number=SeqID_23365
  Gene Ontology: Mol. function=nucleic acid binding; Cellular component= ribonucleoprotein complex; Biological process=RNA processing
  Homolog annotation: Hit_ID=B6T390; Match level="QueryCoverage=93%, HitCoverage=81%, E-value=1e-154, Identity=70%"; Hit description=RNA binding protein
  Pfam annotation: Domain name=La; Domain location=76-135; Score=100.0; E_value=8.2e-27; Accession=PF05383.9; Description=La domain
  Pfam annotation: Domain name=RRM_1; Domain location=166-254; Score =11.5; E_value=0.017; Accession=PF00076.14; Description=RNA recognition motif. (a.k.a. RRM, RBD, o
  Pfam module annotation: Pfam domain module=La::RRM_1; Domain location= 76-135::166-254
FVRRPSYRPSVVVGPFFAPPPPRPFEYYAPVGGRGGFTTKEQQVPEPEPEXRKLLPPAAKAEQAVDGLEDEVVHKITKQVEYYFSDINLATTEHLMRFITKDPEGYVPISVIAGFKKVKASVRNNFMLAEALRTSSKLVVSDDGKRVKRQEPFTESDLQELKSRIVVAENLPGDPSYQNLKKIFSAVGSVISIRTCYPQTPNGSGPATNRSAKLDMLFSNKLHAFVEYETPEDAEKAIVALSDEENWRNGLRVRLLNTCSAKGAGKGKNGTHGTDGNGEEDVSTSNQSNERQSEETSQLLDVLPDHLFDETFNDKEVPKRGKGRGRGGRGRGRGNNQYNNYHHSNNQHHQNHQPHYNHHGNNHQGGNRGGAHPAGTPPHNLMSKPEQHQQLPIGASKLPPGPRMPDGTRGFTMGRGKPQAVLPGLCAVGEA

SEQ ID NO: 89340 - protein, 109 aa, Setaria italica
  misc_feature (13)..(13): Xaa can be any naturally occurring amino acid
  Transcript Sequence Number=SeqID_23366
  Gene Ontology: Mol. function=nucleic acid binding; Cellular component= cytoplasm; Biological process=ubiquitin-dependent protein catabolic process
  Homolog annotation: Hit_ID=Q9LSS9; Match level="QueryCoverage=100%, HitCoverage=9%, E-value=9e-28, Identity=52%"; Hit description =General negative transcription regulator-like
CKCGYDICVWCWXHIIDMAEKEETEGRCPACRTPYDKDRIVKMAANCERTVTEKNAEKKHKTQKVKPKAVAAAAAAAATSSTVEAKKHLASVRVIQRNLVYIIGLPAHL

SEQ ID NO: 89341 - protein, 192 aa, Setaria italica
  Transcript Sequence Number=SeqID_23367
  Gene Ontology: Mol. function=sulfotransferase activity
  Homolog annotation: Hit_ID=Q6EU01; Match level="QueryCoverage=96%, HitCoverage=52%, E-value=8e-68, Identity=69%"; Hit description =Putative steroid sulfotransferase
  Pfam annotation: Domain name=Sulfotransfer_1; Domain location=74-192; Score=-63.3; E_value=0.0025; Accession=PF00685.19; Description =Sulfotransferase domain
LEQHQHRHSVHDEMVAGEDGCADGFSKYEALASSLPTSRQGLGSLPYRKHDGFWYPEHLMAPALAMRDAFAARPTDVILATMPKSGTTWLKALVYSVVHRGRHAPADERHPLLASSPHELVPFLHSLYESRSPSAPPGQLLEEMPSPRVLAVHSPFTALPASVRESGCRVVYLCRDPKDAFVSLRHYLDEIK

SEQ ID NO: 89342 - protein, 260 aa, Setaria italica
  Transcript Sequence Number=SeqID_23368
  Gene Ontology: Cellular component=integral to membrane; Biological process=nodulation
  Homolog annotation: Hit_ID=B6SGD1; Match level="QueryCoverage=43%, HitCoverage=98%, E-value=1e-45, Identity=78%"; Hit description=Early nodulin 93
  Pfam annotation: Domain name=ENOD93; Domain location=156-234; Score =185.9; E_value=1.1e-52; Accession=PF03386.6; Description=Early nodulin 93 ENOD93 protein
AVRTLGPVQGWNSSSSDLESFVLESDAPGTPPRPTSSLGSDAPDPLRVDLRLARLARPQSPGGRGTLRLARPRVLGSGYSPPRPTLSDKGREGRSLSWSEYRTTLSKSIHHPPLLSVPPISYQHYKNIAPFSSIIFFAATRSNSKMSTVSRASLDQKLAMAKRCSREATLAGTKAAAVATIASAIPTLASVRMLPWAKANINPTGQALIISTVAGMAYFIAADKKILSLARRHSFEEAPDHLKNTSYQGAGRPHPAFFRP

SEQ ID NO: 89343 - protein, 144 aa, Setaria italica
  Transcript Sequence Number=SeqID_23369
  Gene Ontology: Cellular component=integral to membrane; Biological process=nodulation
  Homolog annotation: Hit_ID=B6SGD1; Match level="QueryCoverage=50%, HitCoverage=62%, E-value=2e-34, Identity=93%"; Hit description=Early nodulin 93
  Pfam annotation: Domain name=ENOD93; Domain location=58-118; Score =89.4; E_value=1.3e-23; Accession=PF03386.6; Description=Early nodulin 93 ENOD93 protein
  Subcellular localization annotation: CTP_CleavageSite=53; ConfidenceScore=5.41e-01
RVDLRFARPRVLGSGDAPTRPTQNPGVGRRSASPGPESPGSGDSPPRPTLSVKGREGQPLSWSEFGTTPTQMASVRMLPWAKANINPTGQALIISTVAGMAYFIAADKKILSLARRHSFENAPEHLKNTSYQGAGRPHPAFFRP

SEQ ID NO: 89344 - protein, 115 aa, Setaria italica
  Transcript Sequence Number=SeqID_23370
  Gene Ontology: Cellular component=integral to membrane; Biological process=nodulation
  Homolog annotation: Hit_ID=B6SGD1; Match level="QueryCoverage=99%, HitCoverage=98%, E-value=7e-47, Identity=82%"; Hit description=Early nodulin 93
  Pfam annotation: Domain name=ENOD93; Domain location=11-89; Score =186.0; E_value=1e-52; Accession=PF03386.6; Description=Early nodulin 93 ENOD93 protein
MSTVSRASLDQKLAMAKRCSREATLAGTKAAAVATIVSAIPTLASVRMLPWAKANINPTGQALIISTVAGMAYFIAADKKILSLARRHSYEEAPEHLKNTSFQGAGRPHPAFFRP

SEQ ID NO: 89345 - protein, 87 aa, Setaria italica
  Transcript Sequence Number=SeqID_23371
  Gene Ontology: Mol. function=transcription factor activity; Cellular component=nucleus; Biological process=regulation of transcription, DNA-dependent
  Homolog annotation: Hit_ID=Q01HM7; Match level="QueryCoverage=96%, HitCoverage=18%, E-value=1e-19, Identity=58%"; Hit description =OSIGBa0115K01-H0319F09.25 protein
LDKQPQPPVATSWQQDVSSKTMPVSGEMIHAPVAHGSEWGPADEAWFNAWGPGSSFWDYDMDSNPGLFLHGRFAGDEATMEHSTAQE

SEQ ID NO: 89346 - protein, 213 aa, Setaria italica
  Transcript Sequence Number=SeqID_23372
  Gene Ontology: Mol. function=hydrolase activity; Biological process =metabolic process
  Homolog annotation: Hit_ID=B6TY90; Match level="QueryCoverage=85%, HitCoverage=48%, E-value=6e-76, Identity=79%"; Hit description =Gibberellin receptor GID1L2
  Pfam annotation: Domain name=Abhydrolase_3; Domain location=134-213; Score=-67.0; E_value=0.003; Accession=PF07859.5; Description =alphabeta hydrolase fold
MVAKSKRQLAKLALLLLALLLLLAAAILLCVFLIPRHHRKPLPPVSPPGNASNPDDSVVAFDFSPYLIMYKSGRVHRLDGTARCSAGVDEDTGVTSKDVVIDGATGLAARMYLPPAPAGGAKGNKKDPGRLPVLVFYHGGAFVIESAFTPLYHAYLNAVAAKARVVAVSVEYRLAPEHRLPAAYDDSWRALNWVARNAASGPEPWLRDRATSP

SEQ ID NO: 89347 - protein, 127 aa, Setaria italica
  misc_feature (24)..(24): Xaa can be any naturally occurring amino acid
  misc_feature (66)..(66): Xaa can be any naturally occurring amino acid
  Transcript Sequence Number=SeqID_23373
  Homolog annotation: Hit_ID=B9S3K3; Match level="QueryCoverage=91%, HitCoverage=17%, E-value=2e-21, Identity=48%"; Hit description =Pentatricopeptide repeat-containing protein, putative
GRVDEAYEFVEGLGEEGNFISIWXSLLASCKAQGKQELANLVTERLLRVEKKYGHAGYKVLLSHIXAAESNWSSADSLRKEMRLRGLRKMAGSSWIKVEDAALQNYPKNDHVYSMLHGVDYGRDKII

SEQ ID NO: 89348 - protein, 83 aa, Setaria italica
  Transcript Sequence Number=SeqID_23374
EVVCQETLGLSVIPLLEAASDTEAEATNTERERGQPRSCIYTLQQCRVAPHPVVVAALSHAYNRDPTGLGSLARLPLGMEAAA

SEQ ID NO: 89349 - protein, 111 aa, Setaria italica
  misc_feature (7)..(7): Xaa can be any naturally occurring amino acid
  Transcript Sequence Number=SeqID_23375
  Gene Ontology: Mol. function=protein serine/threonine kinase activity; Cellular component=plasma membrane; Biological process =protein amino acid phosphorylation
  Homolog annotation: Hit_ID=Q9SCZ4; Match level="QueryCoverage=100%, HitCoverage=12%, E-value=2e-31, Identity=57%"; Hit description =Receptor-protein kinase-like protein
  Subcellular localization annotation: CTP_CleavageSite=41; ConfidenceScore=5.23e-01
PYIYGSXFLGVSFGKDKNLSITYTPSVPNYTAPVGVYESARSMGPNAQVNLNSNLTWILPVDAGFCYLLRFHFCEIQYPITKINQRSFFIYINNQTAQQQMDVIAWSGGIG

SEQ ID NO: 89350 - protein, 77 aa, Setaria italica
  misc_feature (42)..(42): Xaa can be any naturally occurring amino acid
  Transcript Sequence Number=SeqID_23376
  Subcellular localization annotation: CTP_CleavageSite=54; ConfidenceScore=5.45e-01
PHKQQDLEITPPRSAVPPLSSPARLKPSRPNDRPWPPLTSAXSIAHQTRFALRLAAALSSPPRPPPPPPPPTPFSPR

SEQ ID NO: 89351 - protein, 371 aa, Setaria italica
  Transcript Sequence Number=SeqID_23377
  Gene Ontology: Cellular component=intracellular; Biological process =signal transduction
  Homolog annotation: Hit_ID=B6TTW3; Match level="QueryCoverage=100%, HitCoverage=77%, E-value=1e-173, Identity=79%"; Hit description=Rac GTPase activating protein 2
  Pfam annotation: Domain name=PBD; Domain location=1-45; Score=35.1; E_ value=2.9e-07; Accession=PF00786.20; Description=P21-Rho-binding domain
  Pfam annotation: Domain name=RhoGAP; Domain location=62-202; Score =105.6; E_value=1.7e-28; Accession=PF00620.19; Description=RhoGAP domain
  Pfam module annotation: Pfam domain module=PBD::RhoGAP; Domain location=1-45::62-202
GGPTDVRHVSHVTFDRFVGFLGLPADLEPDVPRPVPSASVSVFGVSPTSMQCSYDRRGNSVPTILLTMQRKLYSLGGLQAEGIFRINADNTQELYVRDQLNRGVVPDGVDLHCLAGLIKAWFRELPNGVLDSLTPEQVMHCNTEEECGHLASTLPPVEAALLEWAINLMADVVENESYNKMNARNIAMVFAPNMTKMADPLTALIHAVQVMNFLKTLILKTVNERDEAVTVARAFQSNSGSPSDKDEPQTLEHLDMPSVCSSQRNVDSPTIDGAKLDQFLFRVEEALHHKTHGGTGGPKNHDSSGGNEKINGEISPLDTDLSSQNEFNNNNEEGLFDKFKFRKGVGRLCRHPVFQFSRSMKKADEAEQACV

SEQ ID NO: 89352 - protein, 266 aa, Setaria italica
  Transcript Sequence Number=SeqID_23378
  Gene Ontology: Cellular component=integral to membrane; Biological process=intracellular protein transport
  Homolog annotation: Hit_ID=Q5XQQ5; Match level="QueryCoverage=100%, HitCoverage=100%, E-value=1e-124, Identity=86%"; Hit description =SNARE 13
  Pfam annotation: Domain name=Sec20; Domain location=144-234; Score =4.9; E_value=0.0036; Accession=PF03908.5; Description=Sec20
MASDVPMSPELEQVDGEIRDIFRDLQKGFQKMDKIKDSNRQSKQLEDLTGKMRECKRLIKEFDRILKDEEKKNTPDVNKQLNDKKQFMIKELNSYVTLRKTYQSSLGNKRIELFDTGNDQVAEDTPVQMASEMSNQELISAGRKQMDQTDQAIERSKMVVAQTVEVGAQTAATLTQQTEQMKRIGNELDSVHFSLKKASQMVKEIGRQVATDKCIMAFLFLIVCGVIAIIVVKIVNPHNKSLRDIPGLAPPAMNRKLLSIDPFGGL

SEQ ID NO: 89353 - protein, 291 aa, Setaria italica
  misc_feature (160)..(160): Xaa can be any naturally occurring amino acid
  misc_feature (210)..(210): Xaa can be any naturally occurring amino acid
  misc_feature (225)..(225): Xaa can be any naturally occurring amino acid
  misc_feature (247)..(247): Xaa can be any naturally occurring amino acid
  misc_feature (266)..(266): Xaa can be any naturally occurring amino acid
  Transcript Sequence Number=SeqID_23379
  Gene Ontology: Mol. function=chloride channel activity; Cellular component=integral to membrane; Biological process=ion transport
  Homolog annotation: Hit_ID=Q9SSM5; Match level="QueryCoverage=70%, HitCoverage=39%, E-value=9e-40, Identity=43%"; Hit description =F3N23.22 protein
PEKLGHLNWLDFTWQPIDEIYSYFGTKIATYFAFLGMYTRWLFFPAVFGLATQLIDFGSLQWLVLPAFFIFVISWAVFFLQFWKRKNSALLARWGINCSLSEYKNLDNELGSLGDSLTIEEKKFDDVSAEKRKLQRNEWFGVLLRIRNNAIIVLAIICLXQLPFELAYAHLYEITETEVMRYLLTAVYLVAIQYYTRIGGKVSVNLIKYXNNQGEESSSASLVYXKVFGLYFMQSYIGLFYHASLLXRDILALRQVLIQRLIVSQXKKHEKESPSGKSVRLSTRVEKEYLK

SEQ ID NO: 89354 - protein, 350 aa, Setaria italica
  Transcript Sequence Number=SeqID_23380
  Gene Ontology: Mol. function=chloride channel activity; Cellular component=integral to membrane; Biological process=ion transport
  Homolog annotation: Hit_ID=Q9SSM5; Match level="QueryCoverage=97%, HitCoverage=59%, E-value=1e-121, Identity=63%"; Hit description =F3N23.22 protein
  Pfam annotation: Domain name=DUF590; Domain location=127-328; Score =288.0; E_value=2.1e-83; Accession=PF04547.4; Description=Protein of unknown function, DUF590
SLQRNEWFGVLLRIRNNAIIVLAIICLQLPFELAYAHLYEITETEVMRYLLTAVYLVAIQYYTRIGGKVSVNLIKYENNQGEESSSASLVYKVFGLYFMQSYIGLFYHASLYRDILALRQVLIQRLIVSQVLENLIENSIPYLKYSYKKYIAVHKKKHEKESPSGKSVRLSTRVEKEYLKPSYTASIGAELEDGLFDDFLELTLQFGMIMMFACAFPLIFCFAALNNVTEIRADALKLLVMLKRPVPRAAATIGAWLNIFQFLVVMAICTNCLLLVCLYDEEGNWRMEPGLAAILIMEHVLLLIKFGFSHFVPEEPAWVKANRVRYVAQAQNVCSKQLLRSISKFDAKLD

SEQ ID NO: 89355 - protein, 348 aa, Setaria italica
  Transcript Sequence Number=SeqID_23381
  Gene Ontology: Mol. function=aspartyl esterase activity; Cellular component=cell wall; Biological process=cell wall modification
  Pfam annotation: Domain name=Pectinesterase; Domain location=32-333; Score=670.0; E_value=2.1e-198; Accession=PF01095.11; Description =Pectinesterase
RARRGLFDVTDDEMVRRMAIEGPERTVAVNNVVTVDQSGAGNFTTVGDAVAAAPRNLDGSGGYYLIYVLAGVYEENVQVPKHSKYVMMIGDGIGQSVITGNRSVVDGWTTFNSATFAVLGTGFVAVNMTFRNTAGPAKHQAVALRSGADLSTFYRCSFEAYQDTLYTHSLRQFYRACDIYGTVDYVFGNAAVVFQGCNLYSRLPMQGQSNTVTAQGRTDPNQNTGTTLQGCSLAAAPDLAANTAFAVATYLGRPWKPYSRTVIMQSEVDALVDPAGWMPWDGDFALATLFYAEYNNSGPGADTSRRVAWPGFHVLSSAADAGNFTVGNMVLGDFWLPQTGVPFTSGLN

SEQ ID NO: 89356 - protein, 54 aa, Setaria italica
  Transcript Sequence Number=SeqID_23382
  Homolog annotation: Hit_ID=B6TWI9; Match level="QueryCoverage=100%, HitCoverage=41%, E-value=3e-12, Identity=68%"; Hit description =SAUR33-auxin-responsive SAUR family member
FQTLVDRTGGGGAAEAGCTVVGCEVVLFEHMLWMLENADPPPESLDELVEYYAC

SEQ ID NO: 89357 - protein, 90 aa, Setaria italica
  Transcript Sequence Number=SeqID_23383
  Gene Ontology: Mol. function=alanine-glyoxylate transaminase activity; Cellular component=mitochondrion; Biological process =photorespiration
  Homolog annotation: Hit_ID=B9SZ94; Match level="QueryCoverage=61%, HitCoverage=11%, E-value=2e-18, Identity=69%"; Hit description =Alanine-glyoxylate aminotransferase, putative
MQRLASSRRLLRAALAPAARANSSLSAAAVAAPAPENGAALPRMPAFDYTPPPYDGPRAEEIFRKRAQFLSPSLFHFYDRPLNIVDGKMQ

SEQ ID NO: 89358 - protein, 134 aa, Setaria italica
  Transcript Sequence Number=SeqID_23384
MQVRVHPDDIDQFEDQLVEGNVYALSNFTVENTRESCMICSNELTMYFGGQTVVNEIEDTDLIPLHSFEFINFKDLRSRCDDTSLLADVLGHIVYVGELEEVWKKSRRIEICNARIRNLRGRELSITLYGGGGG

SEQ ID NO: 89359 - protein, 55 aa, Setaria italica
  Transcript Sequence Number=SeqID_23385
DNDISHLVYSVVSSPLKVHLPSLYRFFFGTGYWNLDSSYHGDNLIRIDWSPVISA

SEQ ID NO: 89360 - protein, 299 aa, Setaria italica
  misc_feature (157)..(157): Xaa can be any naturally occurring amino acid
  misc_feature (254)..(254): Xaa can be any naturally occurring amino acid
  misc_feature (261)..(261): Xaa can be any naturally occurring amino acid
  Transcript Sequence Number=SeqID_23386
  Gene Ontology: Mol. function=RNA-directed DNA polymerase activity; Biological process=RNA-dependent DNA replication
  Homolog annotation: Hit_ID=Q7XVC3; Match level="QueryCoverage=100%, HitCoverage=62%, E-value=6e-66, Identity=46%"; Hit description =OSJNBa0072D21.13 protein
  Pfam annotation: Domain name=RVT_1; Domain location=1-269; Score =138.0; E_value=3e-38; Accession=PF00078.19; Description=Reverse transcriptase (RNA-dependent DNA pol
QTFIVLIPTKNTTELPQDFRPISLCNVIYKIIAKSLADRIKPFLPNKVHLSQSAFIPGRHISSNIIIAQEITHSFGLTSWNHKGFLLKIDLAKAFDRIDRNFITSAMLRIGLPLQIVNLTRTCISTLDFSVLVNGQPSSSFLSQRGIRQGCPLSPYXFALAINELSLPLQMALQNNHLFGISLGQNYPPIHSLLFADDLLTCGKATSVEASQIRLILYSFCQASGQTPNWAKSSILFSKNVDVCTKQEIRNLFXVPMMTSXITHLGHPTIFSYKDRCQAYNFIFNKFRAKFTGIKANKL

SEQ ID NO: 89361 - protein, 254 aa, Setaria italica
  misc_feature (165)..(165): Xaa can be any naturally occurring amino acid
  misc_feature (168)..(168): Xaa can be any naturally occurring amino acid
  misc_feature (190)..(190): Xaa can be any naturally occurring amino acid
  Transcript Sequence Number=SeqID_23387
  Homolog annotation: Hit_ID=B6U179; Match level="QueryCoverage=98%, HitCoverage=52%, E-value=1e-128, Identity=85%"; Hit description =LEC14B protein
  Pfam annotation: Domain name=WD40; Domain location=121-160; Score =38.3; E_value=3e-08; Accession=PF00400.24; Description=WD domain, G -beta repeat
  Pfam annotation: Domain name=WD40; Domain location=167-205; Score =24.2; E_value=0.00053; Accession=PF00400.24; Description=WD domain, G-beta repeat
  Pfam annotation: Domain name=WD40; Domain location=79-117; Score=6.6; E_value=6.6; Accession=PF00400.24; Description=WD domain, G-beta repeat
  Pfam module annotation: Pfam domain module=WD40::WD40::WD40; Domain location=121-160::167-205::79-117
TRTLGLRGSRIRVYDVERGWKIHKDISCRSLQWTVSDIALSPDQQFLAYASLSPIVHIVNVQSSGKESHANVNEIHEGLDFTGNEHDEDFGIFSVKFSKDGKEVVIGNNERSIYVYDLAANKVSVRIRAHTDDVNAVTFADESGNILYSGSDDTLCKVWDRRCLXGEXSAGLLTGHLDGVTFIDSRGDGXYFISNCKDQRIKLWDIRKMSSAVRARPVKMVDWDYRWMPFPSEAHHFKHPDDQSLATYRGHSVL

SEQ ID NO: 89362 - protein, 281 aa, Setaria italica
  misc_feature (42)..(42): Xaa can be any naturally occurring amino acid
  misc_feature (97)..(97): Xaa can be any naturally occurring amino acid
  Transcript Sequence Number=SeqID_23388
  Homolog annotation: Hit_ID=B6UBF1; Match level="QueryCoverage=99%, HitCoverage=81%, E-value=2e-77, Identity=54%"; Hit description=GAGA -binding protein
  Pfam annotation: Domain name=DUF1004; Domain location=1-281; Score =204.9; E_value=2.1e-58; Accession=PF06217.4; Description=Protein of unknown function (DUF1004)
MDDDGNLSIRNWGFYDTMKGNLGLQLMSSVPADRDTKSLLPXGAFLQHHGHHNAPHQLHSHHSRDSGGGGGASGGMPTEPHSIHMDFSRNEAWLHPXHHQHPREQKVLHARPVGPAGHVGHPGHGGHPGHGGHAVHHHPTGYGMMPDAPHTLQMMQPQLPSQPQEPPPCKEEHVPTPPVEDHSVVRTEPPVKKRQQGRQPKSPKPKKPKKPAVPREDGAVNGHAPRGRGPRKTVGMVINGIELDLSNIPTPVCSCTGTPQQCYRWGAGGWQSACCTTSIST

SEQ ID NO: 89363 - protein, 203 aa, Setaria italica
  Transcript Sequence Number=SeqID_23389
  Gene Ontology: Mol. function=ATP binding
  Homolog annotation: Hit_ID=B6TU02; Match level="QueryCoverage=100%, HitCoverage=68%, E-value=1e-107, Identity=92%"; Hit description =Nucleotide-binding protein-like
  Pfam annotation: Domain name=ParA; Domain location=51-131; Score =202.6; E_value=1.1e-57; Accession=PF10609.1; Description=ParA family ATPase
EDMKMIPIDNHGVRCMSIGFLVDKDAPIVWRGPMVMSALEKMTRGVAWGNLDILVVDMPPGTGDAQLSISQRLQLSGALIVSTPQDIALIDARRGANMFRKVQVPILGLVENMSCFKCPKCGEKSYIFGEGGAKRTAEEMDMKLLGEIPLEISIRTGSDEGNPIVISSPNSASAQAYVHAAEKVTERLKELANERLKGPEILL

SEQ ID NO: 89364 - protein, 69 aa, Setaria italica
  Transcript Sequence Number=SeqID_23390
  Subcellular localization annotation: CTP_CleavageSite=23; ConfidenceScore=5.16e-01
LPADSLCLYLVLDSSPKPLKCVLLAKKKRVPLNRYCTKSSCIFPFPANNPNPRQCSAAHICIQICYHFV

SEQ ID NO: 89365 - protein, 158 aa, Setaria italica
  Transcript Sequence Number=SeqID_23391
  Subcellular localization annotation: CTP_CleavageSite=76; ConfidenceScore=5.39e-01
RSCAARPPPPSHRRPRHPSASASPAAAHPSPMLRARPPPPAQAPHTRPTADGAPVRLRPPPWSSHRRREARVVALTAAKKNGKRGSLRRRSVRHPPPTSVRAAAPSATHGIEAPPRLQTRWPRDGHGPARIEAQPHQFATPRTAAPAPGKRPERSRRC

SEQ ID NO: 89366 - protein, 91 aa, Setaria italica
  Transcript Sequence Number=SeqID_23392
  Gene Ontology: Mol. function=RNA-directed DNA polymerase activity; Biological process=RNA-dependent DNA replication
GVEFDTYWNRVWDPQDIAGHDHVGIDVNSIRSTSYTRGLAKGDLSGTMSANITYDGGSKLMVVTLRLANGSTSQIQALVDFRDAGVPQDAA

SEQ ID NO: 89367 - protein, 92 aa, Setaria italica
  Transcript Sequence Number=SeqID_23393
LASVETRECTRHSREGRGHQPNPQPLSDANSSPSPCHPNRPTPPTPRRLSHCLAFVVGFVPDLLPTSPIPLLNRTKSATARPASSSGEERSR

SEQ ID NO: 89368 - protein, 480 aa, Setaria italica
  Transcript Sequence Number=SeqID_23394
  Gene Ontology: Mol. function=methyltransferase activity; Cellular component=integral to membrane; Biological process=vesicle-mediated transport
  Homolog annotation: Hit_ID=Q7XQK1; Match level="QueryCoverage=100%, HitCoverage=48%, E-value=1e-160, Identity=76%"; Hit description =OSJNBa0017B10.7 protein
MFVKKLVEKASKKQNIGSISSLRAEDVSPRLAFHYGVPADASLLAYDPVLHVLAVATRNGQIKLFGRDNTQALLQSPSPLPSRFLQFAEGQGVLLNVNTQNQIEVWDIDAKKLCYVHPFEKGITAFSVLQKSFYIYVGDSSGNVSLLKLDLAQRCLADMPYWIPFAESYGSGPSVGNDVEVIFVSPQPMAESNRVLIIFRDGVMSLWDIKASKAVSVSGKTMQQQSHQEAKTVASACWVCAKGSKIAIGYDNGDLYIWGIPEAIINAQNLSSMGNQNLPIQRLNLGYKLDKLPIVSLKWISSDGKAGRLYINGFNDHGHLFQVLILNEESESRIVKMVLPLTESCQGMELITGLSDPNKHRQSALVLLLKSGQMCLYDDSEIERYLLHSQSRSPPTLPNHSSVKLPYGDSGISVAKFYTSNHASSASFDEDYFSLASKFPWLFSMKDKGQTLTSFTNIHKTRNLYITGHLDGTLSFWDAS

SEQ ID NO: 89369 - protein, 91 aa, Setaria italica
  Transcript Sequence Number=SeqID_23395
  Subcellular localization annotation: CTP_CleavageSite=74; ConfidenceScore=5.71e-01
ETRSDQPASRATPRRRLLRPRRRSRSQSPSPSRTAARPRPPPPPSPPPPARSHRPAPAAPRSCPGPPTRRSGPPARRRTGRRGRAGRRTAA

SEQ ID NO: 89370 - protein, 69 aa, Setaria italica
  Transcript Sequence Number=SeqID_23396
  Gene Ontology: Mol. function=ubiquinol-cytochrome-c reductase activity; Cellular component=mitochondrial respiratory chain; Biological process=mitochondrial electron transport, ubiquinol to cytochrome c
  Homolog annotation: Hit_ID=B6TLS6; Match level="QueryCoverage=100%, HitCoverage=100%, E-value=5e-31, Identity=95%"; Hit description =Ubiquinol-cytochrome c reductase complex 7.8 kDa protein
  Pfam annotation: Domain name=UCR_hinge; Domain location=7-69; Score =106.8; E_value=7.4e-29; Accession=PF02320.8; Description=Ubiquinol -cytochrome C reductase hinge protein
MEDEELVDQKKYLEERCKPQCVKSLYEYEKCVKRVENDDTGHKHCTGQYFDYWACIDKCVAPKLLKKLK

SEQ ID NO: 89371 - protein, 63 aa, Setaria italica
  Transcript Sequence Number=SeqID_23397
  Pfam annotation: Domain name=DUF1903; Domain location=6-63; Score =115.3; E_value=2e-31; Accession=PF08991.2; Description=Domain of unknown function (DUF1903)
MAQPSKEPCKKEACDIQACLSKNMFDSRKCVRVIQLLQSCCEQCEYKSTHCGSLSGLLKNISK

SEQ ID NO: 89372 - protein, 79 aa, Setaria italica
  Transcript Sequence Number=SeqID_23398
DASPPPPLPLSMSLLGAAGAPRLGPALLAISCWMSSWGSFLELKNMRIGAERALGSVDDYLGLCVRLLVEVEGTHAVQR

SEQ ID NO: 89373 - protein, 55 aa, Setaria italica
  Transcript Sequence Number=SeqID_23399
SANYVLVHFFTQGALWGTGTLSPDAALFNLEYERWLGDHSKVVARLRAAAEEPPG

SEQ ID NO: 89374 - protein, 201 aa, Setaria italica
  misc_feature (168)..(168): Xaa can be any naturally occurring amino acid
  Transcript Sequence Number=SeqID_23400
  Gene Ontology: Cellular component=chloroplast envelope
  Homolog annotation: Hit_ID=Q9AS88; Match level="QueryCoverage=83%, HitCoverage=30%, E-value=1e-72, Identity=76%"; Hit description =P0028E10.3 protein
MVGPQYDQVGNPLGAVRATFERTAAAAAAESGGSDPVAAFRGKDWGACDLFRSFLLEEDGLDKVPVLNASNLGLIKPNTLVRYRGMVQDMLGNEYYIGAFKDGSTWRTNKFTDFSPFSMPHPCDSHLWERHLFHCVPAPGQNSWTMESSPGPDLRRMSSCLATELREXRKRDGDKDDMDVSENGHEESSALCKKPKEDDVH

SEQ ID NO: 89375 - protein, 425 aa, Setaria italica
  Transcript Sequence Number=SeqID_23401
  Gene Ontology: Mol. function=molecular_function; Cellular component =chloroplast envelope; Biological process=biological_process
  Homolog annotation: Hit_ID=Q9AS88; Match level="QueryCoverage=85%, HitCoverage=67%, E-value=0.0, Identity=84%"; Hit description =P0028E10.3 protein
  Pfam annotation: Domain name=DUF2044; Domain location=6-424; Score =549.3; E_value=4.7e-162; Accession=PF09739.1; Description=Conserved membrane protein (DUF2044)
DGDKDDMDVSENGHEESSALCKKPKEDDVHVSSSSNEVAEGVPEMNRGDHIPGSSFSCLVKVYDMPDSQVKLNDVIEFIGVYTFDPELAAPSDNPDDIMLDLIEDVIVQLPPSKVPRLHCLVWRKLSPHDFISRPPVVEPSPSILKGIRQSLLSHLTLVLGNDELAAQCLLLHLLSRLRNRVDVVTVGRLSLNFTGFNRESASIFGNQLYSLIQKLVPYSQAIPMSIEYLNTATLQPRKDNKSGRLVTGVLQLPQGSHLTFDETLLQTGSLTSKGVENTMLLKNLMESQKVDYDFEYYKLDMATDVQLLTLSEGKSNILPSDLVVPFRPSSVPTIDAGSEELENWRWYLATVRSLPQSTEPETYQMIQDEMVSAMRDDRSLGCSELSRWLTMAQIMASSFGEKSLSLEHWQMVKELERLRKQRLQ

SEQ ID NO: 89376 - protein, 66 aa, Setaria italica
  Transcript Sequence Number=SeqID_23402
GMSLSVRNFRTNCYCCSSIARSLGRRFSCLVSCDVVSWARSSLHMLCPTYCLPTYSIVYSALFVCC

SEQ ID NO: 89377 - protein, 80 aa, Setaria italica
  Transcript Sequence Number=SeqID_23403
  Homolog annotation: Hit_ID=Q651P4; Match level="QueryCoverage=88%, HitCoverage=13%, E-value=1e-10, Identity=56%"; Hit description =Putative auxin-independent growth promoter
KTDAYVEPISRSNQEPVNDAGIKKAVGRPPYPVYTDEEADGSDTEDDQDTTARGEMVDTEPDDDSVIRQEDPELEEILSD

SEQ ID NO: 89378 - protein, 126 aa, Setaria italica
  Transcript Sequence Number=SeqID_23404
  Gene Ontology: Mol. function=transferase activity
  Homolog annotation: Hit_ID=B6SS11; Match level="QueryCoverage=86%, HitCoverage=19%, E-value=2e-13, Identity=37%"; Hit description =Glycosyltransferase
  Pfam annotation: Domain name=DUF563; Domain location=16-126; Score= -108.6; E_value=0.028; Accession=PF04577.6; Description=Protein of unknown function (DUF563)
GSLINSDVGAPRISKLTCNFSHRHSDYCRMEGDLRIHGRSGRVYVVSSSTFRPENSTITVRPYTRKWEPETMSRIREVEIRSSAPPPHSFVIPPKCTVRHDVPAVIFSTGGCGKNFFHAMSDLIVP

SEQ ID NO: 89379 - protein, 149 aa, Setaria italica
  Transcript Sequence Number=SeqID_23405
  Gene Ontology: Mol. function=protein tyrosine kinase activity; Biological process=protein amino acid phosphorylation
  Homolog annotation: Hit_ID=B9RZY6; Match level="QueryCoverage=88%, HitCoverage=8%, E-value=7e-55, Identity=75%"; Hit description =Neurobeachin, putative
  Pfam annotation: Domain name=Beach; Domain location=6-128; Score =62.0; E_value=5.9e-19; Accession=PF02138.10; Description=BeigeBEACH domain
LRSAVRSVYEPNEYPSSNARLYQWTPDECIPEFYSDPRIFTSLHSEMSDLALPSWATSAEDFICLHRDALESDRVSQQLHHWIDITFGYKLSGEASVEAKNVMLPPSDPSRPKSIGRHQLFTRPHPKRLVSTPHAVYHNKMESCARCCG

SEQ ID NO: 89380 - protein, 56 aa, Setaria italica
  Transcript Sequence Number=SeqID_23406
HGSRFFLKLLEWDAHATAEGCALLGLLSEGLRLGSTRLEAASCLEGRVMVCHYYLV

SEQ ID NO: 89381 - protein, 176 aa, Setaria italica
  Transcript Sequence Number=SeqID_23407
  Gene Ontology: Mol. function=protein serine/threonine kinase activity; Cellular component=integral to membrane; Biological process=protein amino acid phosphorylation
  Homolog annotation: Hit_ID=B9RWM9; Match level="QueryCoverage=100%, HitCoverage=31%, E-value=3e-36, Identity=40%"; Hit description =Leucine-rich repeat receptor protein kinase EXS, putative
  Pfam annotation: Domain name=LRR_1; Domain location=116-138; Score =15.2; E_value=0.28; Accession=PF00560.25; Description=Leucine Rich Repeat
  Pfam annotation: Domain name=LRR_1; Domain location=140-162; Score =13.8; E_value=0.7; Accession=PF00560.25; Description=Leucine Rich Repeat
  Pfam annotation: Domain name=LRR_1; Domain location=19-41; Score =14.6; E_value=0.41; Accession=PF00560.25; Description=Leucine Rich Repeat
  Pfam annotation: Domain name=LRR_1; Domain location=43-66; Score=8.5; E_value=7.2; Accession=PF00560.25; Description=Leucine Rich Repeat
  Pfam annotation: Domain name=LRR_1; Domain location=68-90; Score =10.4; E_value=3.1; Accession=PF00560.25; Description=Leucine Rich Repeat
  Pfam annotation: Domain name=LRR_1; Domain location=92-114; Score =11.3; E_value=2.1; Accession=PF00560.25; Description=Leucine Rich Repeat
  Pfam module annotation: Pfam domain module=LRR_1::LRR_1::LRR_1::LRR _1::LRR_1::LRR_1; Domain location=116-138::140-162::19-41::43-66::68 -90::92-114
NSNQLSGPIPPELAGLAPSLKNLLLFDNRLSGELPPSLGELRLLESLRAGGNRDLAGPIPDSFSKLSNLAVLGLADTKISGPLPASLGQLQSLETLSIYTTELSGAIPPELGNCSNLTNIYLYENSLSGPLPPSLGALPQLQKLLLWQNALTGPIPDSFGNLTSLVSLDLSINSIS

SEQ ID NO: 89382 - protein, 97 aa, Setaria italica
  misc_feature (88)..(88): Xaa can be any naturally occurring amino acid
  Transcript Sequence Number=SeqID_23408
  Homolog annotation: Hit_ID=Q2R360; Match level="QueryCoverage=98%, HitCoverage=25%, E-value=3e-12, Identity=47%"; Hit description=C2 domain containing protein, expressed
GGRREKTPPDADGGENPDWDDAAFAFDLDGDGGGQQQQLVEFEVKAQVPLLGHKLVGTASVPVVDLAAGGGGGAGDGAALRHVSYQVXRPDGKPNGT

SEQ ID NO: 89383 - protein, 197 aa, Setaria italica
  misc_feature (35)..(35): Xaa can be any naturally occurring amino acid
  Transcript Sequence Number=SeqID_23409
  Gene Ontology: Mol. function=actin binding; Cellular component =integral to membrane; Biological process=actin cytoskeleton organization and biogenesis
  Homolog annotation: Hit_ID=Q6H7U3; Match level="QueryCoverage=81%, HitCoverage=18%, E-value=3e-41, Identity=55%"; Hit description =Formin-like protein 10
MRSIRFVLLLVATATLIKPSGGVEAEEEGLGAFLXQWRQHTSLPLPLLNGDLVDKIWSICIRDMVGAEEILGNVLSFASDELLSHSSENVLKTVLFLELLALLSHEKLSTTCDCIRANCFGLGIPQELSIALGTYLESHKPFLDSNFYSRRHLADKSIGDAPSMAPAFVPSMSSGDEVQFPQSVTETPSTPSNSLNI

SEQ ID NO: 89384 - protein, 60 aa, Setaria italica
  Transcript Sequence Number=SeqID_23410
ILSCNRIRVHDQLSKLANTHLRVHQHYARPLNPPEPRKLREPAAEGRVWEGRGVLRSRRG

SEQ ID NO: 89385 - protein, 177 aa, Setaria italica
  misc_feature (138)..(138): Xaa can be any naturally occurring amino acid
  Transcript Sequence Number=SeqID_23411
  Gene Ontology: Mol. function=aspartic-type endopeptidase activity; Cellular component=chromatin; Biological process=RNA-dependent DNA replication
  Homolog annotation: Hit_ID=Q8SA93; Match level="QueryCoverage=98%, HitCoverage=6%, E-value=4e-48, Identity=50%"; Hit description =Putative polyprotein
YLLFYLGSIRFRPCERIWKSWAPGKCKFFMWLVAHNRCRTVDHLTRRGLPHPERCPLCDQMDETIDHLLVSCVFTRQVWFRLLQSVGLQILAPQPDETSFDDWWEKVSERASGQVRKGLNSIIILGAWSVWNHRNRCXDGVPPDLNGVCDVIREELRLWTIAGARGISYLLALVPSQ

SEQ ID NO: 89386 - protein, 84 aa, Setaria italica
  Transcript Sequence Number=SeqID_23412
  Subcellular localization annotation: CTP_CleavageSite=35; ConfidenceScore=5.16e-01
HSSSATHYYSPLYLYYPQTQPASHCVSSSLDTRVCALVRVCVWKSVCDSLCIASSEARYVLVTPFSDLKLIRTKKASLIRLQGD

SEQ ID NO: 89387 - protein, 292 aa, Setaria italica
  misc_feature (38)..(38): Xaa can be any naturally occurring amino acid
  Transcript Sequence Number=SeqID_23413
  Gene Ontology: Mol. function=metal ion binding; Cellular component =plasma membrane
  Homolog annotation: Hit_ID=B9T7C4; Match level="QueryCoverage=91%, HitCoverage=36%, E-value=8e-94, Identity=65%"; Hit description =Protein binding protein, putative
SLHSISQTSGGTFSFIETEAAIQDAFAQCIGGLLSVVXAQGLHVKVESLHPDVHFGSIRSGSYSSRVSDDKRNGSIDVGDLYAEEERDFLVSVNVPPGYGETALLKVGCVYKDPLMKETVNMADVQVKISRPAFVSVQSVSIEVDRQKNRLHAAEVMAEARFSAERGDLTNAVSLLEDCRRMIMGSASGQSGDRLCQALDAELKEMQDRMANRQRYEASGRAYVLSGLSSHSWQRATARGDSTDSESLIQAYQTSSMVDMLLRSQTMSRSSTPRQTPQMRHAKSFPARPQPR

SEQ ID NO: 89388 - protein, 358 aa, Setaria italica
  Transcript Sequence Number=SeqID_23414
  Gene Ontology: Mol. function=DNA binding; Biological process =regulation of transcription
  Homolog annotation: Hit_ID=B6TK28; Match level="QueryCoverage=100%, HitCoverage=100%, E-value=1e-120, Identity=68%"; Hit description=Myb- like DNA-binding domain, SHAQKYF class family protein
  Pfam annotation: Domain name=Myb_DNA-binding; Domain location=237 -288; Score=36.8; E_value=8.5e-08; Accession=PF00249.23; Description =Myb-like DNA-binding domain
MGLDVLEIGMGSDLSLDLRYFASKAVRQARDAPASDVDACIRRLEEERGKIEMFRRELPLCARLLAEVIDVMKAEAGKKARSDRKAAAEEDGAAGDKSKWMSTAQLWTGDSGREDDSESEKQDKGRSSPEAKSGGGGAFVPFKAVGSGAPAFAPLCLRVDDKAADAGMPDLSLLSPPAIKSAPAPAGAAEESRRQVVGFAQAAGRAVAMAPSAPSLTLQPQPQQTAQQQQQQARKARRTWSPDLHRQFVAALNQLGGPQVATPKQIRELMKVDGLTNDEVKSHLQKYRLHNRRAPGSAVVSQPIVLVGGLWIPQEQSSSQSGSPQGPLHFSTSGLAVSSAATVSCEEEDGRSESYGWK

SEQ ID NO: 89389 - protein, 86 aa, Setaria italica
  Transcript Sequence Number=SeqID_23415
  Subcellular localization annotation: CTP_CleavageSite=57; ConfidenceScore=5.20e-01
RKRRETRPASSLPPVDRDLGLVPHHRPAHHRISPRPTAAQRRARITGTSSRALASASCARGAPIGTPRRGEQGPPGPSPAATSWRS

SEQ ID NO: 89390 - protein, 281 aa, Setaria italica
  Transcript Sequence Number=SeqID_23416
KIQEHTSANPATMEQTKVDSVRSGNHGEHPKEIYPTKEAVNIASQNFSCSALSGEDPTQVLPDPMNSKDAPIADFGKAQVSRESNDNEQSIGSQSRDTNIINLNVSRRPVGQFDSRNEVVEESVSLNEGSQGNQSFSDVPKKFLKKTSCGTTNTEEGTSGHKSLSSSTRRGTRNVEPALANERGSFSLLYKSENMKVSRVELTSETALNQLSGASKVIKKMTTHPTDLKREHKQANAGPDKSKTAFSKTYSKLPLSFASAGSTFLVPLRVEEERLLCPRSP

SEQ ID NO: 89391 - protein, 277 aa, Setaria italica
  misc_feature (176)..(176): Xaa can be any naturally occurring amino acid
  Transcript Sequence Number=SeqID_23417
  Pfam annotation: Domain name=zf-CCHC; Domain location=64-81; Score =19.7; E_value=0.00032; Accession=PF00098.15; Description=Zinc knuckle
RKENHIKKEASDDEDDSDDEEVDIALLVRRSSKMLKKLDKKGVNFDYKKKKFFTSDNKKSIKNMPCFNCSELDHLAHQCPLPDKRKYKNKNKPKDDDEKKHKKKPHKNKKHDKKRKPQKKEKKKEGKAYLGEWVIDDDTSEDTSSSSDSDNEGVAGLAIKEYLPPPPSLFSTSSEXICLMAKGDSKVSKSKDDISDSDNGYTPPSYEELASLVKEYTKIIIKLNEKIDKLKLDKKNLVTKCNEHEAKCLELEKKNVELKGIHDDLDKDYTKLKKKFQ

SEQ ID NO: 89392 - protein, 48 aa, Setaria italica
  Transcript Sequence Number=SeqID_23418
VVLISSDQFLITLMLYTSNNPIWHDHKTIDQTKKGRRKFTSTRATLEH

SEQ ID NO: 89393 - protein, 66 aa, Setaria italica
  Transcript Sequence Number=SeqID_23419
RYDVAAFLSHRLFESGEPVRMSVFYYISLKLLNGKESKTFPAIFFESRILILKLYVIPLFSLCLQR

SEQ ID NO: 89394 - protein, 381 aa, Setaria italica
  misc_feature (129)..(129): Xaa can be any naturally occurring amino acid
  Transcript Sequence Number=SeqID_23420
  Gene Ontology: Mol. function=sequence-specific DNA binding; Cellular component=nucleus; Biological process=regulation of transcription, DNA-dependent
  Homolog annotation: Hit_ID=B9RX94; Match level="QueryCoverage=74%, HitCoverage=75%, E-value=1e-85, Identity=54%"; Hit description=DNA binding protein, putative
  Pfam annotation: Domain name=Homeobox; Domain location=10-76; Score =6.5; E_value=0.0028; Accession=PF00046.21; Description=Homeobox domain
MGRPPSTGAPAFRFLPSEVAEMEARLQQLNNAIPTRAVLQTLADKFSASPERAGRVTIQPKQVWNWFQNRRYSHRAKTTRAAPPPAAKMTPSGADHLQHAANSSAFRAGQPSAVAAHHGSSPSAGKNPXEGVQVEFEAKSARDGAWYDVAAFLSHRLFESGEPEVRVRFSGFGAEEDEWINVRKCVRQRSLPCEATECVAVLPGDLILCFQEGKEQALYFDARVLDAQRRRHDVRGCRCRFLVRYDHDSSEEIVPLRKVCRRPETDYRLQILHAARAAATMDVHTPPKEVKLELTSNEKSPAEQKAPKQHKMMDVNTDEVTMVSGVEQEVTPAKAGAGASLPSATPETRNSSSDMMRDGESASVVEDDDEVQVVEKMKEGD

SEQ ID NO: 89395 - protein, 127 aa, Setaria italica
  misc_feature (16)..(16): Xaa can be any naturally occurring amino acid
  Transcript Sequence Number=SeqID_23421
  Subcellular localization annotation: CTP_CleavageSite=31; ConfidenceScore=5.59e-01
GSLSSSNAGFAGAAGXVGGFSAPAASAGGVFAAAATGGGFAALASKSGGFAAAASSGGGFAAAVPSGGGFAAAASSGGGFGGATQGGGFGSGGGFGSFGGNQGAGFSAFGASGPGRPPADLLTQMRK

SEQ ID NO: 89396 - protein, 179 aa, Setaria italica
  misc_feature (15)..(15): Xaa can be any naturally occurring amino acid
  misc_feature (21)..(21): Xaa can be any naturally occurring amino acid
  misc_feature (48)..(48): Xaa can be any naturally occurring amino acid
  Transcript Sequence Number=SeqID_23422
  Gene Ontology: Mol. function=mismatched DNA binding; Cellular component=synaptonemal complex; Biological process=mismatch repair
  Homolog annotation: Hit_ID=B9SXE1; Match level="QueryCoverage=99%, HitCoverage=32%, E-value=1e-71, Identity=68%"; Hit description=DNA mismatch repair protein mutS, putative
  Pfam annotation: Domain name=MutS_V; Domain location=1-124; Score= -37.7; E_value=3.6e-12; Accession=PF00488.13; Description=MutS domain V
ETAFIMQNASSKSLXVVDELXRATSSADGLAIAWSCCEHLLSVKAYTXFATHMESLSELATMYPNVNILHFEVDLRNDRLDFKFRLKDGVREVPHYGLLLARVAGLPASVIDTATSITSQITEQEMTRMDANCEEFQSLQMAYQVAQRLVCLKYSNQGDDYIREALRNLKEGYTAGRLT

SEQ ID NO: 89397 - protein, 504 aa, Setaria italica
  misc_feature (494)..(494): Xaa can be any naturally occurring amino acid
  Transcript Sequence Number=SeqID_23423
  Gene Ontology: Mol. function=drug transporter activity; Cellular component=membrane; Biological process=multidrug transport
  Homolog annotation: Hit_ID=C0J4I6; Match level="QueryCoverage=100%, HitCoverage=90%, E-value=0.0, Identity=78%"; Hit description =Aluminum activated citrate transporter
  Pfam annotation: Domain name=MatE; Domain location=303-462; Score =41.7; E_value=3e-09; Accession=PF01554.10; Description=MatE
  Pfam annotation: Domain name=MatE; Domain location=32-246; Score =55.3; E_value=2.3e-13; Accession=PF01554.10; Description=MatE
  Pfam module annotation: Pfam domain module=MatE::MatE; Domain location=303-462::32-246
PRKTGLHLFIMNIRSVFKLDELGSEVLRIAVPASLALAADPLASLIDTAFIGRLGSVEIAAVGVSIAIFNQVSKVCIYPLVSVTTSFVAEEDAIISKAVEENSSHDLEKASHVDSETNNSPVSGPDIAECVNTCIPTECTELSNHGSKKKYIPSVTSALIVGSILGLLQAIFLVFSAKFVLSIMGVKSGSPMQGPAVRYLTIRSLGAPAVLLSLAMQGVFRGFKDTKTPLYATVVGDATNIILDPILMFVCHMGVTGAAVAHVASQYLITLILLCRLVQQVDVIPPSIKSLKFGRFLGCGFLLLARVVAVTFCVTLAASLAARQGPTIMAGFQICCQLWLATSLLADGLAVAGQAVLASAFAKNDNKKVVAATSRVLQLSIVLGMCLTVVLGLAMKFGAGIFTKDLPVIEVIHKGIPFVAGTQTINSLAFVFDGINFGASDYTYSAYSMVAVASVSIPCLVYLSAHNGFIGIWIALTIYMSLRTIASTWRMGAXERGPWTFLRK

SEQ ID NO: 89398 - protein, 64 aa, Setaria italica
  Transcript Sequence Number=SeqID_23424
MEGEEGPGADMEALVRRLRLHRAAPSPYEPSDAVAPAPGAGELFRPRRAAVLVCLFRGAAGELR

SEQ ID NO: 89399 - protein, 55 aa, Setaria italica
  Transcript Sequence Number=SeqID_23425
MGDDGATKAATGMKQIARLRELLHKWQTMALGANKQQREDEVPDVDEEMVASAIP

SEQ ID NO: 89400 - protein, 79 aa, Setaria italica
  misc_feature (74)..(74): Xaa can be any naturally occurring amino acid
  Transcript Sequence Number=SeqID_23426
  Subcellular localization annotation: CTP_CleavageSite=51; ConfidenceScore=5.01e-01
SINLTTALASPPESSTASLLQVHSCPSQRCPHWHRHPLLCALPHQPVHTISVTNAPRQLLSTWTCSLRTAVIQXSSQKQ

SEQ ID NO: 89401 - protein, 84 aa, Setaria italica
  Transcript Sequence Number=SeqID_23427
GGGAGGSGGSYGNGSGSGGGRGVGEGEGDNYGAYGSSYANSGGSGSGSGGGHDGGFGSGSGGGSGNSGGATSGYNDGSRNGSTP

SEQ ID NO: 89402 - protein, 184 aa, Setaria italica
  Transcript Sequence Number=SeqID_23428
  Gene Ontology: Mol. function=pyridoxal phosphate binding; Cellular component=cytoplasm; Biological process=cysteine biosynthetic process from serine
  Homolog annotation: Hit_ID=B6TEX7; Match level="QueryCoverage=100%, HitCoverage=53%, E-value=5e-83, Identity=86%"; Hit description =Cysteine synthase
  Pfam annotation: Domain name=PALP; Domain location=33-184; Score= -59.3; E_value=0.00044; Accession=PF00291.17; Description=Pyridoxal -phosphate dependent enzyme
MAGEEAGRRGVPSLLNPSSSSSEGQQEHIASDVTQLIGWTPLIELKRIASKDGVDARIVGKVEAYQPLCSVKDRSALRMIEDAEERGLISPGVTTLVEPTSGNLGLGIVLIALRKGYRFVAVMPGQYSLDKQILLRYMGAELYLTDPALGFPGITKKVEELKEELPNVHVLDQFSNKANPEAHI

SEQ ID NO: 89403 - protein, 45 aa, Setaria italica
  Transcript Sequence Number=SeqID_23429
MDSPPALPPLNSLPPVNWDALDALVLDFARSDRLVVPPPAAPADA

SEQ ID NO: 89404 - protein, 620 aa, Setaria italica
  misc_feature (438)..(438): Xaa can be any naturally occurring amino acid
  Transcript Sequence Number=SeqID_23430
  Gene Ontology: Mol. function=binding; Cellular component=membrane coat; Biological process=intracellular protein transport
  Homolog annotation: Hit_ID=Q93YS9; Match level="QueryCoverage=97%, HitCoverage=61%, E-value=1e-125, Identity=40%"; Hit description =Putative AP3-complex beta-3A adaptin subunit
LEFIESSICNSVHFDGEDAVLVQAILSIKAIVKMDPVSHEKVIVRLVRGMDKIKEPAARSLIIWMFGEYNFMGDLIPKIVPAVLKYLAWSFTVDVVETKLQILNASAKVVMHCPEEHAEEFKRIVAYVIELATYDLNYDVRDRARLLSRLLPCSTTHLEPSYQPQNGDICKELADHIFDRKLQSTSPSARNYRIYLPGSLSQVVLHAAPGYAPLPKPQSMELSHNKIIESTRGIAKPSGSNNSDAESGSSTYESSSVYDSESEDDGLSDGDTDESLHHQDNQDAPVVHIYDASVQQGQTRETADENLADLISTDLTELMSKSALESWLDEAPAEPLVQNSSQASSARVAFTNRSFERKPKLHTLLDSSDSNGLSVLYAFSSEVSPRSRLLVCVDLYLENVTTQHLTDITIKSEEASSSVDSTGQTLEGSVSAPLLFLXEEIHSLAPQQTAKMVLEVHFHHHLLPLKLYVLCNGKTHPAKLHPDIAYFVRPLPMDLNAFLCKENQLRGMFEYARRCTFKDHLEKLEHSDKNLQVAQSVASKILSNANVHLVSMDMPVTFNVDDTSGLCWRFSSEIPSTLKPCLITILAEGHASGPLELTAKVNSEDTVFALNLLNRIGWSI

SEQ ID NO: 89405 - protein, 32 aa, Setaria italica
  Transcript Sequence Number=SeqID_23431
MAVSSRVPSQPAARGLLRRTPPRILPVERAPR

SEQ ID NO: 89406 - protein, 78 aa, Setaria italica
  Transcript Sequence Number=SeqID_23432
  Subcellular localization annotation: CTP_CleavageSite=55; ConfidenceScore=5.20e-01
DTGHTLSALVLCALHRAAAFALFSSISSYRLPARTWLASWFEAPTVTWPKAAPPRCAMAATGATRMATTCCAGAYLAR

SEQ ID NO: 89407 - protein, 108 aa, Setaria italica
  Transcript Sequence Number=SeqID_23433
TKPNNRTYDNRLDKPMAHLGGAAFGQVTVGASNQLASHVRAGNLYDEMLLKSANAAALWRAQSTRADSLQCSAAVQGMVFACCSAAAGVPSAFIVDLIVIFSIQIDPL

SEQ ID NO: 89408 - protein, 89 aa, Setaria italica
  Transcript Sequence Number=SeqID_23434
  Gene Ontology: Mol. function=nucleotide binding
  Homolog annotation: Hit_ID=Q4U3G6; Match level="QueryCoverage=100%, HitCoverage=27%, E-value=9e-31, Identity=76%"; Hit description=Crs-1
  Pfam annotation: Domain name=Jacalin; Domain location=1-89; Score= -32.8; E_value=0.027; Accession=PF01419.9; Description=Jacalin-like lectin domain
RAVGPWGGDAGKSKQPPIQFGPSETVKEIYGTTGNNYDGVHTVVTSLTIVTNVNTYGPYGKQAAGNTPFRVAAPNNHSIVGFYGRVGDV

SEQ ID NO: 89409 - protein, 49 aa, Setaria italica
  Transcript Sequence Number=SeqID_23435
MKITVQSSRAVRPDYGSDGAAAGSAAGDVVTLSVFDKVNFDTYVSVIYV

SEQ ID NO: 89410 - protein, 108 aa, Setaria italica
  Transcript Sequence Number=SeqID_23436
  Gene Ontology: Mol. function=hydrolase activity
  Homolog annotation: Hit_ID=Q5XLS1; Match level="QueryCoverage=100%, HitCoverage=41%, E-value=5e-14, Identity=39%"; Hit description =Protein S
GPKYMARRVYQLSPPEDLTLAIAMVRPSRRFLNDETMTGNVLTAERYGAVRRVYVVAEDDEWKPAEMQRLMASWNPGTEVMGLQGADHMPMFSKPRELSELLMEIANK

SEQ ID NO: 89411 - protein, 105 aa, Setaria italica
  Transcript Sequence Number=SeqID_23437
  Gene Ontology: Mol. function=amino acid transmembrane transporter activity; Cellular component=integral to membrane; Biological process=amino acid transport
  Homolog annotation: Hit_ID=B6SYL4; Match level="QueryCoverage=86%, HitCoverage=17%, E-value=4e-43, Identity=96%"; Hit description=Amino acid permease
TEQPAVRGPASLVWGWVVVSFFTWFVGVAMAEICSSFPTTGSLYFWAAHLAGPVWGPLASWCCAWLEAIGLIAGIGTQAYAGSQVLQSIILLCTGTNNRRLVLFC

SEQ ID NO: 89412 - protein, 70 aa, Setaria italica
  Transcript Sequence Number=SeqID_23438
  Gene Ontology: Mol. function=metallocarboxypeptidase activity; Biological process=proteolysis
  Homolog annotation: Hit_ID=A1YKF5; Match level="QueryCoverage=100%, HitCoverage=16%, E-value=1e-32, Identity=90%"; Hit description=Zinc carboxy peptidase
GALVANYPWDGTRDTGKHYYGCPDDKTFRHMASVYSQSHYNMSLSKEFEGGITNGAFWYPIYGGMQDWNY

SEQ ID NO: 89413 - protein, 103 aa, Setaria italica
  Transcript Sequence Number=SeqID_23439
MARSPFVPMEAREQAGTGGGAEAGKGQAPHQAREEEQEAAVLLVHSQVRRIKREDEEIRERLLKLRLLETRPAGGFVCDPVAWRASRSLSPLRRAGNGIPVGD

SEQ ID NO: 89414 - protein, 91 aa, Setaria italica
  Transcript Sequence Number=SeqID_23440
  Gene Ontology: Mol. function=protein kinase activity; Cellular component=plasma membrane; Biological process=protein amino acid phosphorylation
  Homolog annotation: Hit_ID=Q84XU7; Match level="QueryCoverage=100%, HitCoverage=42%, E-value=7e-29, Identity=44%"; Hit description =Receptor-like protein kinase
  Pfam annotation: Domain name=LRR_1; Domain location=1-21; Score=3.1; E_value=78; Accession=PF00560.25; Description=Leucine Rich Repeat
  Pfam annotation: Domain name=LRR_1; Domain location=23-45; Score =10.8; E_value=2.6; Accession=PF00560.25; Description=Leucine Rich Repeat
  Pfam annotation: Domain name=LRR_1; Domain location=47-69; Score =12.1; E_value=1.5; Accession=PF00560.25; Description=Leucine Rich Repeat
  Pfam annotation: Domain name=LRR_1; Domain location=71-90; Score =14.6; E_value=0.42; Accession=PF00560.25; Description=Leucine Rich Repeat
  Pfam module annotation: Pfam domain module=LRR_1::LRR_1::LRR_1::LRR _1; Domain location=1-21::23-45::47-69::71-90
RELNLRGNRLTGSLPDDIGDCPLLRSVDLGSNSLSGNLPESLRRLSTCTYLDLSSNEFTGSVPTWFGEMASLEVLDLSGNKLSGEIPGSIG

SEQ ID NO: 89415 - protein, 97 aa, Setaria italica
  Transcript Sequence Number=SeqID_23441
APARSRSPLPLSALEGSFPFGFVSFHPRAKRECEAAARGSGLDLRVLYRAPHVTGRSLAPAPPPLSPLPSPSHPAKQQQRAERRAASPGVPASQTHP

SEQ ID NO: 89416 - protein, 441 aa, Setaria italica
  Transcript Sequence Number=SeqID_23442
  Gene Ontology: Mol. function=DNA-directed DNA polymerase activity; Cellular component=nucleus; Biological process=nucleobase, nucleoside, nucleotide and nucleic acid metabolic process
  Homolog annotation: Hit_ID=B9FUS4; Match level="QueryCoverage=100%, HitCoverage=24%, E-value=0.0, Identity=89%"; Hit description=DNA polymerase
  Pfam annotation: Domain name=DNA_pol_B; Domain location=1-294; Score=- 7.7; E_value=4.8e-09; Accession=PF00136.13; Description=DNA polymerase family B
LIANVTYGYTAAGFSGRMPCAELADSIVQCGRRTLETAISFVNQHPMWKARVVYGDTDSMFVLLKGRSREEAFRIGKEIASSITAMNPDPVTLKFEKVYQPCFLLTKKRYVGYSYESPEQNEPIFDAKGIETVRRDTCPAVAKILERSIRIIFEEQDLTKVRSYLERQWTRLLSGKVSIRDFIFAKEVRLGTYSARASTLPPAAIVATKAMLSDPRAEPRYAERVPYVVIHGEPGARLADMVIDPYGLLEVGSPYRLNELYYITKQIIPALQRVFGLLGADLNNWFSEMPRPIRPTLAKRQSASGHGLFSRGGRFIWLGLNNKASSKGGRIDTYYMSSHCSICGDLIQGSETFCENCLKNEAVVATVVAGRTSKLEREIQHLAAICGHCGGADWIVESGVKCISLACPVLYERRKIQRELRVVSESAGEAGYYPFCCAELF

SEQ ID NO: 89417 - protein, 120 aa, Setaria italica
  Transcript Sequence Number=SeqID_23443
  Gene Ontology: Mol. function=protein tyrosine kinase activity; Biological process=defense response
  Homolog annotation: Hit_ID=Q6MWB5; Match level="QueryCoverage=68%, HitCoverage=59%, E-value=1e-16, Identity=54%"; Hit description =B1292H11.16 protein
  Pfam annotation: Domain name=Jacalin; Domain location=2-120; Score =3.9; E_value=3.6e-05; Accession=PF01419.9; Description=Jacalin-like lectin domain
MRASSPPRLRSITLYHSSAIHFMACDYYSPAAAAAAQWGLPHSFGSKGVPAVIELSAGEHVTAVAGTIGHFGSVPDAVITSLTFRTSTGRTYGPYGNKTTTTFSVPAADGACIVGFWGRS

SEQ ID NO: 89418 - protein, 307 aa, Setaria italica
  misc_feature (270)..(270): Xaa can be any naturally occurring amino acid
  Transcript Sequence Number=SeqID_23444
  Gene Ontology: Mol. function=protein tyrosine kinase activity; Biological process=defense response
  Homolog annotation: Hit_ID=Q6MWB5; Match level="QueryCoverage=29%, HitCoverage=66%, E-value=1e-20, Identity=57%"; Hit description =B1292H11.16 protein
  Pfam annotation: Domain name=Jacalin; Domain location=139-277; Score =47.1; E_value=6.9e-11; Accession=PF01419.9; Description=Jacalin-like lectin domain
MANKLKLSGPAVLLIIVVPLFVYAGALLIGIQLGRALERSPDSASVSFSIRGALAYLAKELWDANNVLGLGRQRGRGERLAQVWQPVSVSLVRDWIPSPCVEGQDNSSATPKAQQRYRTNNHTSPRGVISVGTWGGSGGKPFYMRASSPPRLRSITLYHSSAIHFMACDYYSPAAAAAAQWGLPHSFGSKGVPAVIELSAGEHVTAVAGTIGHFGSVPDAVITSLTFRTSTGRTYGPYGNKTTTTFSVPAADGACIVGFWGRSGWLLDAXGVLTIKPSCSSSNPAGYNYSHQPYAVRPPTEMEQKEV

SEQ ID NO: 89419 - protein, 97 aa, Setaria italica
  Transcript Sequence Number=SeqID_23445
  Gene Ontology: Mol. function=nucleotide binding; Biological process =defense response
  Homolog annotation: Hit_ID=Q2R1X1; Match level="QueryCoverage=64%, HitCoverage=6%, E-value=9e-20, Identity=65%"; Hit description=NB-ARC domain containing protein
YLRTCLLYISVYPAGYTINKDYLIWKWVAEGFVPEEHGIGLFERGERYFIELMNRSMIQPVQEERQDTIPQNNIRRISYQRRKIEDGPHAQIGTPIC

SEQ ID NO: 89420 - protein, 158 aa, Setaria italica
  Transcript Sequence Number=SeqID_23446
  Gene Ontology: Mol. function=oxidoreductase activity; Cellular component=cell wall; Biological process=DNA integration
  Homolog annotation: Hit_ID=Q5QJ60; Match level="QueryCoverage=100%, HitCoverage=30%, E-value=3e-44, Identity=53%"; Hit description=FAD -linked oxidoreductase BG60
  Pfam annotation: Domain name=BBE; Domain location=99-158; Score =102.4; E_value=1.6e-27; Accession=PF08031.4; Description=Berberine and berberine like
FTKNKSDYVRRAIAKDDWNKIFPWFAMDGAGMIILEPHGGFIDTIPASATPYPHRSGVLYNIQYITFWPWGNDGSAATSWINNFYDFMGQYVCKNPRVAYVNYRDLDIGVNTVVNDVTTFDGGKVWGEKYFAGNFRRLAAVKAAVDPTDFFRSEQSIP

SEQ ID NO: 89421 - protein, 50 aa, Setaria italica
  Transcript Sequence Number=SeqID_23447
LLSTSSTVLPAICMYTTEPQLQRMLVLHRLHRCFETIQKRIHPPICTGGS

SEQ ID NO: 89422 - protein, 284 aa, Setaria italica
  Transcript Sequence Number=SeqID_23448
  Gene Ontology: Mol. function=nucleotide binding; Cellular component =cytoplasm; Biological process=response to stress
  Homolog annotation: Hit_ID=P09189; Match level="QueryCoverage=93%, HitCoverage=41%, E-value=1e-118, Identity=79%"; Hit description=Heat shock cognate 70 kDa protein
  Pfam annotation: Domain name=HSP70; Domain location=2-252; Score=5.7; E_value=5.4e-14; Accession=PF00012.12; Description=Hsp70 protein
LHEVVHEAVAYGAAVQAAILTGEGNEKVQDLLLLDVSPLSLGLETAGGVMTVLIPRNTTIPTKKEQVFSTYSDNQPGVLIQVYEGERARTKDNNLLGKFELSGIPPAPRGVPQITVCFDMDANGILNVSAEDKTTGQKNKITITNDKGRLSKEEIERMVQEAEKYKAEDEEVKRKVEARNALENYAYNMRNTVRDDKIASKLPAEDRKKIEDTIEDAIKWLDGNQLAEAEEFEDKMKELEGICNPIISKMYQGEGGAAGMDEDVPNGAGTGGGSGAGPKIEEVD

SEQ ID NO: 89423 - protein, 171 aa, Setaria italica
  Transcript Sequence Number=SeqID_23449
  Gene Ontology: Mol. function=DNA binding; Biological process =regulation of transcription
  Homolog annotation: Hit_ID=B6TK28; Match level="QueryCoverage=77%, HitCoverage=34%, E-value=4e-25, Identity=51%"; Hit description=Myb -like DNA-binding domain, SHAQKYF class family protein
  Pfam annotation: Domain name=Myb_DNA-binding; Domain location=25-76; Score=34.5; E_value=4.4e-07; Accession=PF00249.23; Description=Myb -like DNA-binding domain
  Subcellular localization annotation: CTP_CleavageSite=55; ConfidenceScore=5.10e-01
ATSSAVTDGGGAAQRQHQQQQRKARRCWSPELHRRFVAALQRLGGAQVATPKQIRELMKVDGLTNDEVKSHLQKYRLHTRRASSSDGVGGDHHAAAAGLWSSAAPEQQYTTSQHSTSQSGSPQGPLQLTVSSRAMSATAGDSCDGDEAEGGRSESYSFGMQQQHGTKAASS

SEQ ID NO: 89424 - protein, 142 aa, Setaria italica
  misc_feature (105)..(105): Xaa can be any naturally occurring amino acid
  Transcript Sequence Number=SeqID_23450
  Homolog annotation: Hit_ID=Q9FZ97; Match level="QueryCoverage=59%, HitCoverage=14%, E-value=1e-31, Identity=75%"; Hit description =F3H9.11 protein
  Pfam annotation: Domain name=DUF616; Domain location=1-93; Score= -146.7; E_value=0.00083; Accession=PF04765.5; Description=Protein of unknown function (DUF616)
SDPGKSTSVSCWDPNFAHFPSHADVPEGCVIIREHIPITNLFTCLWFNEVDRFTSRDQISFSTVRDKIRARVGWMPEMFLDCERRNFVVQAYHRELLEQMIASGXRPPSTTDAPPSRKLRPGSRKAPPSKKPSVKRKKEKKS

SEQ ID NO: 89425 - protein, 109 aa, Setaria italica
  misc_feature (20)..(20): Xaa can be any naturally occurring amino acid
  Transcript Sequence Number=SeqID_23451
  Homolog annotation: Hit_ID=Q9FZ97; Match level="QueryCoverage=87%, HitCoverage=16%, E-value=7e-38, Identity=74%"; Hit description =F3H9.11 protein
  Pfam annotation: Domain name=DUF616; Domain location=1-107; Score= -96.1; E_value=5.2e-07; Accession=PF04765.5; Description=Protein of unknown function (DUF616)
MLNGQYLFVQIPKLLLHRLXFPNVRFSVWIDAKLELVADPYLLLERFLWRKKATFAISRHYKRFDVFEEAEANKAAGKYDNASVDYQIEFYRNEGLSHYSPAKVFPSLR

SEQ ID NO: 89426 - protein, 93 aa, Setaria italica
  Transcript Sequence Number=SeqID_23452
FGLGIVLVNCFLVLVERRNFVVQAYHRELLEQMIASGRRPPSTTDAPPSRKLRPGSRKAPPSKKPSVKRKKEKKSSSRRRVPKPPVAGGMGAM

SEQ ID NO: 89427 - protein, 485 aa, Setaria italica
  misc_feature (202)..(202): Xaa can be any naturally occurring amino acid
  Transcript Sequence Number=SeqID_23453
  Homolog annotation: Hit_ID=Q9FZ97; Match level="QueryCoverage=75%, HitCoverage=62%, E-value=1e-152, Identity=68%"; Hit description =F3H9.11 protein
  Pfam annotation: Domain name=DUF616; Domain location=148-463; Score =670.7; E_value=1.3e-198; Accession=PF04765.5; Description=Protein of unknown function (DUF616)
KERLQLLHRALRLVGRRRAGVLLLLAVASAAVFCSLFAVVKDDSSSISIVNNYEVPNAIQKSVYPSTTRPLKMSGDQYSSVVNKIELPNRLHLSYANFTHPCEGFSVPPPLVDKKRTGPRPCPVCYVSVDQAFALMPLQASPSPVLKNLNYISEDGIVANLSSQGSEFGGHPSLEQRNKSFDISESMTVHCGFVRGKKPGQXGTGFDIKDDDLVEMEQCRELVVASAIFGNYDMIQHPRNISEFSKANACFYMFVDEETEAYVKNSSSLYNNNKVGLWRLVVVRNLPYEDPRRTGKIPKLLLHRLFPNVRFSVWIDAKLELVADPYLLLERFLWRKKATFAISRHYKRFDVFEEAEANKAAGKYDNASVDYQIEFYRNEGLSHYSPAKFPITSDVPEGCVIIREHIPITNLFTCLWFNEVDRFTSRDQISFSTVRDKIRARVGWMPEMFLDCERRNFVVQVMHLIHNPLWSSVLPHFLVAQLPDS

SEQ ID NO: 89428 - protein, 210 aa, Setaria italica
  misc_feature (107)..(107): Xaa can be any naturally occurring amino acid
  Transcript Sequence Number=SeqID_23454
  Gene Ontology: Cellular component=integral to membrane
MEFGSKDVQMAGVNAELASREDALPALLIQVPAQSIAGFDCVAEDATVSLHELDDKVEELQDTGAHKDIVISIPAAPATAVSAAARSYDDAHVPYSISLSMPASPSXGFHLSQFRAASANRVEARVAPAAMPDGLVVHPVEEQPAEAHLHSPRLLKQTRFHSQPILNMHPSKNADEGARRCDSTRDKRFDSFKTFSGRLERQLSNLRGRP

SEQ ID NO: 89429 - protein, 77 aa, Setaria italica
  Transcript Sequence Number=SeqID_23455
  Subcellular localization annotation: CTP_CleavageSite=57; ConfidenceScore=5.72e-01
MGGASKLLSSLLLTSSPLRLRPATAAAALFLTPPCVASRRLLLLSSRSPLRTLCTSSAAAASSSFTEPPRAPFPEWS

SEQ ID NO: 89430 - protein, 48 aa, Setaria italica
  Transcript Sequence Number=SeqID_23456
RDHGLVAEIDERLRHAERQRPQAGAEASDENERLHGCGSPPPSSAPHP

SEQ ID NO: 89431 - protein, 70 aa, Setaria italica
  Transcript Sequence Number=SeqID_23457
IDGQDDLCNSNFLQSFDLVQDHGLVAEIDERLRHAERQRPQAGAEASDENERLHGCGSPPPSSAPHPVTF

SEQ ID NO: 89432 - protein, 362 aa, Setaria italica
  misc_feature (85)..(85): Xaa can be any naturally occurring amino acid
  Transcript Sequence Number=SeqID_23458
  Gene Ontology: Mol. function=translation initiation factor activity; Cellular component=cytoplasm; Biological process=biosynthetic process
  Homolog annotation: Hit_ID=Q1PCW7; Match level="QueryCoverage=100%, HitCoverage=100%, E-value=0.0, Identity=85%"; Hit description=GDP -mannose pyrophosphorylase
  Pfam annotation: Domain name=Hexapep; Domain location=249-266; Score =7.0; E_value=23; Accession=PF00132.16; Description=Bacterial transferase hexapeptide (th
  Pfam annotation: Domain name=Hexapep; Domain location=267-284; Score =18.0; E_value=0.039; Accession=PF00132.16; Description=Bacterial transferase hexapeptide (th
  Pfam annotation: Domain name=Hexapep; Domain location=307-324; Score =7.0; E_value=23; Accession=PF00132.16; Description=Bacterial transferase hexapeptide (th
  Pfam annotation: Domain name=NTP_transferase; Domain location=2-237; Score=250.4; E_value=4.4e-72; Accession=PF00483.15; Description =Nucleotidyl transferase
  Pfam module annotation: Pfam domain module=Hexapep::Hexapep::Hexapep:: NTP_transferase; Domain location=249-266::267-284::307-324::2-237
MKALILVGGFGTRLRPLTLSVPKPLVDFGNKPMILHQIEALKEVGVTEVVLAINYQPEVMLNFLKDFESKLGIKITCSQETEPLXGTAGPLALARDKLVDGSGDPFFVLNSDVISEYPFAELIQLHKAHGGEATIMVTKVDEPSKYGVVVMEEGTGKVERFVEKPKVFVGNKINAGIYLLNPSVLDRIELKPTSIEKEVFPRIAADAGLFAMVLPGFWMDIGQPRDYITGLRLYLDSLRKKAPARLASGAHVLGNVLVHETAVIGEGCLIGPDVAVGPGCVVEAGVRLSRCTVMRGARVKQHACVSSSIIGWHSTVGKWARVENMTILGEDVHVCDEIYSNGGVVLPHKEIKSSILKPEIVM

SEQ ID NO: 89433 - protein, 92 aa, Setaria italica
  Transcript Sequence Number=SeqID_23459
  Subcellular localization annotation: CTP_CleavageSite=82; ConfidenceScore=5.54e-01
RAYIRVREYDARSRSRSRSRSYSRSPSYSRSRTHHQVSWSPSPVDERSLSRSRSPVSSPSRGRSASRSPRSRSASRSRSPVRSDSTREPLKR

SEQ ID NO: 89434 - protein, 241 aa, Setaria italica
  Transcript Sequence Number=SeqID_23460
  Gene Ontology: Mol. function=nucleic acid binding; Cellular component= nucleus; Biological process=mRNA processing
  Homolog annotation: Hit_ID=Q64HC0; Match level="QueryCoverage=78%, HitCoverage=72%, E-value=2e-83, Identity=84%"; Hit description =ASF/SF2-like pre-mRNA splicing factor SRP30
  Pfam annotation: Domain name=RRM_1; Domain location=112-178; Score =33.7; E_value=7.4e-07; Accession=PF00076.14; Description=RNA recognition motif. (a.k.a. RRM, RBD, o
  Pfam annotation: Domain name=RRM_1; Domain location=9-76; Score=82.9; E_value=1.2e-21; Accession=PF00076.14; Description=RNA recognition motif. (a.k.a. RRM, RBD, o
  Pfam module annotation: Pfam domain module=RRM_1::RRM_1; Domain location=112-178::9-76
MSRRNSRTIYVGNLPGDIREREVEDLFYKYGQILDIDLKIPPRPPGYAFVEFEDPRDADDAIYGRDGYNFDGYRLRVELAHGGRGQSYSYDRSSSYSSARRGGVSRRSDYRVMVTGLPSSASWQDLKDHMRRAGDVCFSDVYREAGETIGIVDYTNYDDMKYAIRKLDDSLFRNAFSRAYIRVREYDARSRSRSRSRSYSRSPSYSRSRSPKSVSWSPSPVDERSGHARNLRTALVEYWMY

SEQ ID NO: 89435 - protein, 89 aa, Setaria italica
  Transcript Sequence Number=SeqID_23461
GPFSAIEIQAHIVNSCFSNTTRSILNILTVSPILLLRLVVAHLSYMHHNPALLSKVPNHPLRFSIHPIFYQCSPQIAGMARSRKNKSKP

SEQ ID NO: 89436 - protein, 116 aa, Setaria italica
  Transcript Sequence Number=SeqID_23462
  Gene Ontology: Mol. function=nucleic acid binding
  Homolog annotation: Hit_ID=Q688R3; Match level="QueryCoverage=98%, HitCoverage=18%, E-value=5e-18, Identity=50%"; Hit description=Zinc finger CCCH domain-containing protein 33
MCSGPRKPSTPPLPAATAKESAVMAALLLELAAADDLVAFRRAVEDDKVSALDASCQWYGPSAASGARLRLEVRTPAMVAALYGSTGVLAYVLSAAPAEAARASPTDGATPLHLAA

SEQ ID NO: 89437 - protein, 342 aa, Setaria italica
  misc_feature (8)..(8): Xaa can be any naturally occurring amino acid
  Transcript Sequence Number=SeqID_23463
  Gene Ontology: Mol. function=tetrahydrofolylpolyglutamate synthase activity; Biological process=folic acid and derivative biosynthetic process
  Homolog annotation: Hit_ID=B6U2J2; Match level="QueryCoverage=100%, HitCoverage=60%, E-value=1e-142, Identity=76%"; Hit description=GLA1
  Pfam annotation: Domain name=Mur_ligase_C; Domain location=143-229; Score=15.4; E_value=0.0089; Accession=PF02875.13; Description=Mur ligase family, glutamate ligase domain
GREHLAAXGGSLQNIAIAKSGIIKDDQYVVIGGPFSTDIEQIIRDRAFLTQSPVISACDPGIKSISKCIYWDNGKPYQRCDISIKISNDTLFSIELHDVNLQLLGDHQRQNAVTASCTALCLRNLGWDISDASIQSGLEETQLPGRSQFLTREEALVLGLDGPSTILIDGAHTEASAKALSNVIETVRPEGPLALVVGMANDKEHLAFAEQLLAGSRPNVVLLTEASIAGGASRAMPAPSLKEIWMAAARDLGINCVDIGTISGAKAPEHIANLAASPSSLAGKPTVMIGCQDAAVPFSCNLIRAASQIILESRGGGASPGLVCVTGSLHVVASVLQHLERH

SEQ ID NO: 89438 - protein, 82 aa, Setaria italica
  misc_feature (4)..(4): Xaa can be any naturally occurring amino acid
  misc_feature (7)..(7): Xaa can be any naturally occurring amino acid
  Transcript Sequence Number=SeqID_23464
  Gene Ontology: Mol. function=electron carrier activity; Cellular component=extracellular region; Biological process=response to oxidative stress
  Homolog annotation: Hit_ID=Q6Z3Y8; Match level="QueryCoverage=84%, HitCoverage=20%, E-value=1e-24, Identity=78%"; Hit description=Class III peroxidase 116
EDIXREXVAQLYHKHGNTAVSWLRALFHDCMVGSCDASLLLDTSPAAGVSEKSAPRSFGMRNFKYIDVIKAALERECPGPSP

SEQ ID NO: 89439 - protein, 70 aa, Setaria italica
  misc_feature (57)..(57): Xaa can be any naturally occurring amino acid
  Transcript Sequence Number=SeqID_23465
MLAGRGDGGGRRPRAVFMAFGTQGDVFPIAALAAAFARDQEDYAVVFITHSAHRSLXGHLAASNVTYMPV

SEQ ID NO: 89440 - protein, 112 aa, Setaria italica
  Transcript Sequence Number=SeqID_23466
  Gene Ontology: Mol. function=small conjugating protein ligase activity; Cellular component=cellular_component; Biological process =ubiquitin-dependent protein catabolic process
  Homolog annotation: Hit_ID=B8BAA3; Match level="QueryCoverage=97%, HitCoverage=26%, E-value=2e-57, Identity=90%"; Hit description =Ubiquitin carrier protein
  Pfam annotation: Domain name=UQ_con; Domain location=1-98; Score =101.6; E_value=2.7e-27; Accession=PF00179.18; Description=Ubiquitin -conjugating enzyme
MWVGKFVFTFQVPPAYPHEPPKVKCKTKVYHPNIDLEGNVCLNILREDWKPVLNINTIVYGFNLLFTQPNDEDPLNHDAAAVLRDDPKKFENNVRRAMAGGYIGETHFPRCM

SEQ ID NO: 89441 - protein, 240 aa, Setaria italica
  Transcript Sequence Number=SeqID_23467
  Gene Ontology: Mol. function=small conjugating protein ligase activity; Cellular component=cellular_component; Biological process =ubiquitin-dependent protein catabolic process
  Homolog annotation: Hit_ID=B8BAA3; Match level="QueryCoverage=77%, HitCoverage=45%, E-value=3e-99, Identity=89%"; Hit description =Ubiquitin carrier protein
  Pfam annotation: Domain name=UQ_con; Domain location=90-226; Score =197.7; E_value=3.2e-56; Accession=PF00179.18; Description=Ubiquitin -conjugating enzyme
  Subcellular localization annotation: CTP_CleavageSite=44; ConfidenceScore=5.46e-01
QPFPSANPLRTVSPPPSTRAPPPPAAEAGLAARLPRGGSVSLPSAETRPGVDRSRGKMINLFKIKGQKKDDAATANGKPAVKKQSPGELRLHKDIAELNLPKTTKISFPNGKDDLMNFEATIKPDEGYYVGGKFVFTFQVPPAYPHEPPKVKCKTKVYHPNIDLEGNVCLNILREDWKPVLNINTIVYGLNLLFTQPNDEDPLNHDAAAVLRDDPKKFENNVRRAMAGGYIGETHFPRCM

SEQ ID NO: 89442 - protein, 179 aa, Setaria italica
  Transcript Sequence Number=SeqID_23468
  Gene Ontology: Mol. function=catalytic activity; Cellular component =mitochondrion; Biological process=metabolic process
  Homolog annotation: Hit_ID=B4FQA8; Match level="QueryCoverage=100%, HitCoverage=59%, E-value=2e-77, Identity=80%"; Hit description =Methylglutaconyl-CoA hydratase
  Pfam annotation: Domain name=ECH; Domain location=2-103; Score=41.7; E_value=2.8e-10; Accession=PF00378.12; Description=Enoyl-CoA hydrataseisomerase family
FVYSGMPSFLYTQALSIPTIAVVEGAAFGGGLELALSCDLRICGKDAKFSLPETGLAIIPGAGGTQRLPRIVGRSRAKELIFTGRRFDAAEAVTMGVVNYCVPAGEAYQKALELAREINQKGPLAIKMAKKAINQGAEVDMTSALAVEEECYEQVLHTQDRLEGLAAFAEKRKPVYTGK

SEQ ID NO: 89443 - protein, 79 aa, Setaria italica
  Transcript Sequence Number=SeqID_23469
PYANVSSLFLEGVYNPVNGRMYLIGCRRIQATRQAFSTLKAVEDGMDCSIEMRVEYPPTTARWLINPTAKVRIASTRDP

SEQ ID NO: 89444 - protein, 79 aa, Setaria italica
  Transcript Sequence Number=SeqID_23470
  Gene Ontology: Cellular component=integral to membrane
  Homolog annotation: Hit_ID=B6TI82; Match level="QueryCoverage=78%, HitCoverage=23%, E-value=1e-25, Identity=91%"; Hit description =Transmembrane protein 56
MLVLMAHGHSICSYFFQVARIFLFIYVFYHIYLHYSQIMQMHAFGYYLTFLVPSVLFVMNTMWFMKILKGVKKTLAKYP

SEQ ID NO: 89445 - protein, 267 aa, Setaria italica
  Transcript Sequence Number=SeqID_23471
  Gene Ontology: Cellular component=integral to membrane
  Homolog annotation: Hit_ID=B6TI82; Match level="QueryCoverage=99%, HitCoverage=98%, E-value=1e-140, Identity=92%"; Hit description =Transmembrane protein 56
  Pfam annotation: Domain name=TRAM_LAG1_CLN8; Domain location=65-257; Score=125.9; E_value=1.3e-34; Accession=PF03798.8; Description=TLC domain
MAVVTVYKYQAQALMRDYLLADPLVPYTSVLIGIVLCKMAYDLTRILSSFYFKGYTSLTKIQRVEWNNRGMSSAHAIFITAVSLYLVVSTDLFSDRIKGPITFRNSVISTCALGVSVGYFITDLAMIFWLYPSLGGMEYVLHHTLSLVAIAYTMLSGEGQFYTYMVLISETTTPEINLRWFLDTAGLKKSSAYLVNGILMFVAWLVARIFLFIYVFYHIYLHYSQIMQMHAFGYYLTFLVPSVLFVMNTMWFMKILKGVKKTLAKYP

SEQ ID NO: 89446 - protein, 39 aa, Setaria italica
  Transcript Sequence Number=SeqID_23472
KCKLSVFVYNIKHVIGTSYIMFWQLLFSLASFAQWVNSI

SEQ ID NO: 89447 - protein, 115 aa, Setaria italica
  misc_feature (12)..(12): Xaa can be any naturally occurring amino acid
  Transcript Sequence Number=SeqID_23473
  Gene Ontology: Cellular component=chloroplast envelope
  Homolog annotation: Hit_ID=B6U4I8; Match level="QueryCoverage=100%, HitCoverage=40%, E-value=1e-56, Identity=92%"; Hit description=Tic22
  Pfam annotation: Domain name=Tic22; Domain location=1-115; Score= -46.7; E_value=0.00022; Accession=PF04278.4; Description=Tic22-like family
RFLPDPLQIKNXALELKSGLTAFDGVPVFQSDLLVVKKQKKRYCPIYFQKEDIERELTKASKSSRGSALSKQIMVGSLEDVLRKMEINDRNSGWDDLIFIPPGKSLNQHINEVSA

SEQ ID NO: 89448 - protein, 315 aa, Setaria italica
  misc_feature (8)..(8): Xaa can be any naturally occurring amino acid
  Transcript Sequence Number=SeqID_23474
  Gene Ontology: Mol. function=ATP-dependent helicase activity; Cellular component=nucleus; Biological process=mRNA processing
  Homolog annotation: Hit_ID=Q6K4U8; Match level="QueryCoverage=100%, HitCoverage=25%, E-value=1e-142, Identity=81%"; Hit description =Putative RNA helicase
AKEVVKRXDQEVYVKVVSVKGQKLSLSMRDVDQDTGKDLLPMQRGADDAPRANPSGGSGGGMGSGKRLGLSGIVITEEDEAAPTSRRPLKRMSSPERWEAKQLIASGVLDVRDYPMFDEDGDGMMYQEEGAEEELEIELNEDEPAFLQGQSRFSIDMSPVKIFKNPEGSLSRAAALQTALIKERREVREQEQRAMLDSIPKDLNRPWEDPMPDTGERHLAQELRGVGLSAYDMPEWKKEAYGKALTFGQRSKLSIQEQRQSLPIYKLKKELIQAVHDNQVLVVIGETGSGKTTQVTQYLAEAGYTTRGKIGCTQP

SEQ ID NO: 89449 - protein, 127 aa, Setaria italica
  Transcript Sequence Number=SeqID_23475
MHQLFEETLSLHVGCEHNHNYMSTEPSPMKLEAPTPCVERQHALSVEPNMEDKMVLNADKLSALEGASQIENVKALDRSRTNTILKDHLKNLVPFTEEWLAVMEARGQEVLEQKTGAVQNSPPDTRN

SEQ ID NO: 89450 - protein, 283 aa, Setaria italica
  Transcript Sequence Number=SeqID_23476
  Gene Ontology: Cellular component=integral to membrane
  Homolog annotation: Hit_ID=B6SQ55; Match level="QueryCoverage=59%, HitCoverage=43%, E-value=2e-76, Identity=86%"; Hit description=Inner membrane transport protein
  Pfam annotation: Domain name=C4dic_mal_tran; Domain location=32-282; Score=147.6; E_value=3.8e-41; Accession=PF03595.9; Description=C4 -dicarboxylate transportermalic acid transport protein
  Subcellular localization annotation: CTP_CleavageSite=38; ConfidenceScore=5.10e-01
MAAAAAAEAAASLKRRSIPSSSSISMLTRFHAGYFRISLALSGQALLWRTLTGDGDGDGDSSSSSTPMVRSLPSAAFLLLWSLALLALVALAALYAARCLLRFPAVRAEFRHHVAMNYLFAPWISCLLLLQSAPPFLRPAAAPYRLLWWAFSLPILALDVKVYGQWFTRGRKFLSMVANPASLITVIGNLVTARAAAKMGWHEAAVAIFAVGAAHYLVLFVTLYQRFPGSDSLPAVLRPVFFLFFAAPSMASLAWDAIAASFDTCCKMLFFVSLFLFASLVSR

SEQ ID NO: 89451 - protein, 82 aa, Setaria italica
  Transcript Sequence Number=SeqID_23477
  Gene Ontology: Mol. function=kinase activity; Biological process =fatty acid biosynthetic process
  Homolog annotation: Hit_ID=B6TF90; Match level="QueryCoverage=98%, HitCoverage=27%, E-value=2e-26, Identity=69%"; Hit description=SNF1 -related protein kinase regulatory subunit beta-1
  Pfam annotation: Domain name=AMPKBI; Domain location=1-80; Score =83.4; E_value=8e-22; Accession=PF04739.7; Description=5'-AMP -activated protein kinase, beta subunit, complex-interacting region
GLRVPGEKEFSKEPPQLPAQLYLGVLNSRSSEEGCCARPRHVVLDHLYIEKGWGSQPLVALGHTHRFHSKYVTCVLYKAIER

SEQ ID NO: 89452 - protein, 49 aa, Setaria italica
  Transcript Sequence Number=SeqID_23478
PSAPPLPEEAWSETTVPSGRCWYRWSAPWSSSGVWAASDITGTLAVYEL

SEQ ID NO: 89453 - protein, 210 aa, Setaria italica
  Transcript Sequence Number=SeqID_23479
  Gene Ontology: Mol. function=DNA binding; Cellular component=nuclear origin of replication recognition complex; Biological process=DNA replication
  Homolog annotation: Hit_ID=Q945C6; Match level="QueryCoverage=86%, HitCoverage=25%, E-value=5e-71, Identity=71%"; Hit description =Origin recognition complex subunit 3
RKKWTRRSTGSAGNGTAPLNEKAAMLLQDVTRKYLVPVECLPFHEIICFKNVSVLQSALIGNPRRMVQLDLLKSQSHLKCSCCSRTGTAVSGSLHVTSITCNLAQEYGDVINLHDWYMTFEGIINSTNSKAKRKSYNSPSKKSKPSSPEGRAMTQARFFRAVTEMQITGLVRMPSKRRPDLVQRITLALDGFVMTCCCTGETIMYISGLE

SEQ ID NO: 89454 - protein, 40 aa, Setaria italica
  misc_feature (18)..(18): Xaa can be any naturally occurring amino acid
  Transcript Sequence Number=SeqID_23480
RNAAKWKEEAEAATGPGXGSSFENLLSMVRALSNPPNSED

SEQ ID NO: 89455 - protein, 50 aa, Setaria italica
  Transcript Sequence Number=SeqID_23481
EVNWLHMDSSPCNTPYGTPMFSRENSFSSFASCFSSLDDSLADSDEEIEL

SEQ ID NO: 89456 - protein, 124 aa, Setaria italica
  Transcript Sequence Number=SeqID_23482
  Gene Ontology: Mol. function=electron carrier activity; Cellular component=integral to membrane; Biological process=oxidation reduction
  Homolog annotation: Hit_ID=B6SW10; Match level="QueryCoverage=100%, HitCoverage=22%, E-value=5e-54, Identity=83%"; Hit description =Cytochrome P450 CYP71S3
HGDPAYKSTFNSRNQIKGILTDMFIAGTDTTAATVEWTMTELVRHPDILAKAQKEVRGAVADGGGDIVRESDLPRLKYLKQVIRESMRVHPPVPLLVPRETIEPCTVYGCEIPAGTRVLVNARA

SEQ ID NO: 89457 - protein, 60 aa, Setaria italica
  Transcript Sequence Number=SeqID_23483
LASFRRLSSLANSPASATMASSDGGSGKACGGEAAGEMAGPLQLHSFGLGELRGVTHDFS

SEQ ID NO: 89458 - protein, 235 aa, Setaria italica
  Transcript Sequence Number=SeqID_23484
  Gene Ontology: Cellular component=plasma membrane
  Homolog annotation: Hit_ID=B6ST21; Match level="QueryCoverage=79%, HitCoverage=47%, E-value=1e-71, Identity=70%"; Hit description =Membrane protein
  Pfam annotation: Domain name=Cytochrom_B561; Domain location=19-219; Score=-62.0; E_value=0.024; Accession=PF03188.8; Description =Eukaryotic cytochrome b561
  Pfam annotation: Domain name=DUF568; Domain location=1-60; Score= -18.0; E_value=0.0003; Accession=PF04526.5; Description=Protein of unknown function (DUF568)
  Pfam module annotation: Pfam domain module=Cytochrom_B561::DUF568; Domain location=19-219::1-60
  Subcellular localization annotation: CTP_CleavageSite=38; ConfidenceScore=5.08e-01
TRVWQVGAAVAGGSPAPHAMGADNLAAKAKLDLLRSTTATAGTDSATRKRNIHGVLNAVSWGVLLPMGAIVARYLKTFRSADPAWFYLHVACQLAGYGVGVSGWATGMNLGRESEGVTYADHRDIGIAVFALGTLQVLALFLRPKKEHKYRAYWNAYHHSVGYAVIVLGVVNIFKGMGILGVEQRWRTAYIAAVCVLAIAAAALEAVTWGVVVRRRKAEGKTFSSSAASNGHLPH

SEQ ID NO: 89459 - protein, 272 aa, Setaria italica
  Transcript Sequence Number=SeqID_23485
  Gene Ontology: Mol. function=ligase activity; Biological process =protein modification process
  Homolog annotation: Hit_ID=B9T0T0; Match level="QueryCoverage=94%, HitCoverage=95%, E-value=9e-89, Identity=60%"; Hit description =Lipoate-protein ligase, putative
  Pfam annotation: Domain name=BPL_LipA_LipB; Domain location=62-174; Score=14.9; E_value=0.00032; Accession=PF03099.11; Description =Biotinlipoate AB protein ligase family
MAVTGSAVGCGAVRPLMRLVTMSGAPIMQQLHLEERLLRRTADNWCIINDGTAPPTIVMGVSGRVSELVEIEPVLRDRVSVVRRFSGGGTVIVDQGTMFVTFICNKSAVAGLQPFPRDIMSWSGQLYGKVFDKFGEFHLRENDYAFSCRKFGGNAQSITKNRWVHHTSFLWDYDVKNMDYLKIPKRAPEYRLARNHTDFLCRMKEYMPSRSAFTDGVITALGEHFSVQPADLETVLPDDEEFVPSTKLLSEQDLEEIVSSKGYSLGAQKAEA

SEQ ID NO: 89460 - protein, 129 aa, Setaria italica
  Transcript Sequence Number=SeqID_23486
  Subcellular localization annotation: CTP_CleavageSite=32; ConfidenceScore=5.71e-01
MPCHHHPSSTSSSMAMISPWSGTRKSAFRFSTSAHGSSSSSNLSFTAVTDKKKVYEDQLRGIICYRDDNGEMICEGYDEGPRLGIRLPEKACFPWPVGIQVTDFIQLATLQVFEDVDVLQLKDDQKRNL

SEQ ID NO: 89461 - protein, 229 aa, Setaria italica
  Transcript Sequence Number=SeqID_23487
  Gene Ontology: Mol. function=nucleotide binding; Biological process =defense response
  Homolog annotation: Hit_ID=B7UBD5; Match level="QueryCoverage=100%, HitCoverage=29%, E-value=1e-123, Identity=83%"; Hit description=NBS -LRR disease resistance protein
RNLNLEKWSDILHGWVSTENGQMMGAILARSYSDLPNHYIKSCFLYLAVFPEDYSISVSDLIKLWIAEGFIPPITRHTGDRTACMYVNDLAQRCLVQVVSRSKAHGWIEEIRIHDILRDWCVEEARYAGLFDVIDNTTGHVGESSSNTMVSYRSSFQKFCFGNMVTATPNLRTLFGFGFGLPSFSIPKLRFLRVLHVEKSILIDFGRVISGCIHLRYLVLRECRQATLP

SEQ ID NO: 89462 - protein, 312 aa, Setaria italica
  Transcript Sequence Number=SeqID_23488
  Gene Ontology: Mol. function=nucleotide binding; Biological process =defense response
  Homolog annotation: Hit_ID=B7UBD5; Match level="QueryCoverage=89%, HitCoverage=31%, E-value=1e-161, Identity=99%"; Hit description=NBS -LRR disease resistance protein
YFLLVVLHVEKSILIDFGRVISGCIHLRYLVLRECRQATLPSSIGKLLYLQTIDLRETTFTSAMPNSVWDIPTLRHVYLHRTVSAPRNCPQKELQSLHLHLPYGGGESKCFYTRAFLGQMTQLTTLNLIWWSMPAEMIHLLANMTFLVEVTLDRFTLLDRLPDSQLLPQGLRELHLAAETIKEDPMPILEKLPCLVVLELRGYKGRTMFCCAKGFPRLQELILRVSYIEEWRLEVETMPRLSLLHLYGCWEMKKLPEGLLHLPSLKELHCTDMNLEDDVTWKKLVGKGVSSLMQSSIGASSSHAARAHERRM

SEQ ID NO: 89463 - protein, 314 aa, Setaria italica
  Transcript Sequence Number=SeqID_23489
  Gene Ontology: Mol. function=nucleotide binding; Biological process =defense response
  Homolog annotation: Hit_ID=B7UBD5; Match level="QueryCoverage=98%, HitCoverage=34%, E-value=1e-180, Identity=99%"; Hit description=NBS -LRR disease resistance protein
  Pfam annotation: Domain name=NB-ARC; Domain location=101-314; Score =88.6; E_value=2.2e-23; Accession=PF00931.14; Description=NB-ARC domain
EAENVLQVVDYMEKRNMIKKDCVGAISRYARLPSDLITLHKVGNEIQRIRRRVSEILESLRNLEFLYRGNTELGNFHVDDESLQDHGLVLQNFEAVTVIGFDNEQKEIVEKLTEKDNKLSVVSIVGMGGAGKTTLARKIYTSDKIKQHFDAIACVTVSQKFEVVDLLKDIMKQITGGRDDGREVGQMEEIDLRNKIQAFLTEKRYLVVLDDVWTTNTWNQINRMVKVFPDLNNGSRVMLTTRRIDVANHIEMPTYVHQLKLLDGEKSWELFSTKALPPYRRSLIQNIDEFEEIGRKIARKCKGLPLALVLYISV

SEQ ID NO: 89464 - protein, 319 aa, Setaria italica
  Transcript Sequence Number=SeqID_23490
  Gene Ontology: Mol. function=oxidoreductase activity, acting on single donors with incorporation of molecular oxygen, incorporation of two atoms of oxygen; Cellular component=chloroplast; Biological process=fatty acid biosynthetic process
  Homolog annotation: Hit_ID=Q7XV13; Match level="QueryCoverage=100%, HitCoverage=35%, E-value=1e-175, Identity=92%"; Hit description =Putative lipoxygenase 5
  Pfam annotation: Domain name=Lipoxygenase; Domain location=1-319; Score=-8.9; E_value=5.9e-18; Accession=PF00305.11; Description =Lipoxygenase
VYNDLGNPDKGAEFARPVLGGEQLPYPRRMRTGRPKTVTDERAESRVEYPEPTYVSRDEEFEEGKNEMLSEGALKALLHNFMPLLVSSVSPDIRDFAGFHDVDNLFKEGLRLKQALQDQLFQKIPFVRKIQENSEGLLRYDTPDIIKKDKFAWLRDDEFARQALAGINPVNIERLQAFPPVSKLDPAVYGPKESAITEEHIIGQLDGMSVAQALEDNRLYMLDYHDIFLPFLDRINSLDGRKAYGTRTLFFLTAAGTLKPIAIELSLPPMTEGCKRAKRVFTPPADATSNWLWQLAKAHVCSNDAGVHQLINHWLRTHA

SEQ ID NO: 89465 - protein, 66 aa, Setaria italica
  Transcript Sequence Number=SeqID_23491
RQLSPAPLALPALWSREGFDPEGRGWGFNPGQKVSEWGKVKPGRTETNNTSKACLISKRTASNYLE

SEQ ID NO: 89466 - protein, 176 aa, Setaria italica
  Transcript Sequence Number=SeqID_23492
  Gene Ontology: Mol. function=protein serine/threonine kinase activity; Biological process=protein amino acid phosphorylation
  Homolog annotation: Hit_ID=Q84K89; Match level="QueryCoverage=100%, HitCoverage=27%, E-value=2e-79, Identity=78%"; Hit description =Receptor kinase LRK10
  Pfam annotation: Domain name=Pkinase; Domain location=1-173; Score= -19.5; E_value=2.5e-07; Accession=PF00069.17; Description=Protein kinase domain
  Pfam annotation: Domain name=Pkinase_Tyr; Domain location=1-173; Score=-89.4; E_value=8.8e-08; Accession=PF07714.9; Description =Protein tyrosine kinase
  Pfam module annotation: Pfam domain module=Pkinase::Pkinase_Tyr; Domain location=1-173::1-173
VVRLLGFCSEGSRRALIYEFMPNASLEKYIFSRASDTCCQENLTPNRMLDIATGIAKGIEYLHQGCNQRILHFDIKPSNILLDYSFKPKISDFGLAKLCARDQSIVTLTAARGTMGYIAPEIYSRNFGTVSYKSDVYSFGMVVLEMMSGESSSDPQTKNDNDVYIPEWIYEKIITG

SEQ ID NO: 89467 - protein, 83 aa, Setaria italica
  Transcript Sequence Number=SeqID_23493
  Gene Ontology: Mol. function=transferase activity
  Homolog annotation: Hit_ID=B6U486; Match level="QueryCoverage=97%, HitCoverage=33%, E-value=5e-30, Identity=76%"; Hit description =Glutathione S-transferase GSTU6
  Pfam annotation: Domain name=GST_N; Domain location=6-79; Score=74.8; E_value=3.1e-19; Accession=PF02798.12; Description=Glutathione S -transferase, N-terminal domain
MAGRNGELKLVGQWASPFVTRVKLALNLKGLSYEYVEEDLRNKSELLLSINPVHKSVPVLIHNGKDICESQAILHYIDEAFAG

SEQ ID NO: 89468 - protein, 73 aa, Setaria italica
  Transcript Sequence Number=SeqID_23494
NKQRRRIPSTHLAACTPHRRGERERELRRRHSRGSIRRRSRRGGRAQATYIHLFLSILYIYMQIGARRELDRD

SEQ ID NO: 89469 - protein, 255 aa, Setaria italica
  Transcript Sequence Number=SeqID_23495
  Gene Ontology: Mol. function=protein serine/threonine kinase activity; Cellular component=ubiquitin ligase complex; Biological process=ubiquitin-dependent protein catabolic process
  Homolog annotation: Hit_ID=Q2HTK4; Match level="QueryCoverage=89%, HitCoverage=25%, E-value=2e-64, Identity=53%"; Hit description =Protein kinase; U box
  Pfam annotation: Domain name=Pkinase; Domain location=86-250; Score= -5.8; E_value=3.8e-08; Accession=PF00069.17; Description=Protein kinase domain
  Pfam annotation: Domain name=Pkinase_Tyr; Domain location=86-255; Score=-48.1; E_value=1.6e-10; Accession=PF07714.9; Description =Protein tyrosine kinase
  Pfam module annotation: Pfam domain module=Pkinase::Pkinase_Tyr; Domain location=86-250::86-255
QQKCLLEHQISESDSIASYLGESMRVSDPLVQSLKLAYSKVKRERDDAVKKARDMHMEKELTAPCAYGVMNSEFSLLELEQATQVFSRSLNIGRGGFGSVYKGFLRGTTVAIKILDTESLHAQSQFQQEVVILSRVRHPHLVTLIGACPEASALVYEFLPNGSLEDRLNCVDNTLPLTWQVRIRIIREVCSALIFLHKHKPHPVVHGDLKPGNILLDANLLSKVSDFGISMHNRMRLVLESSVTGSDAHFTSQSK

SEQ ID NO: 89470 - protein, 110 aa, Setaria italica
  misc_feature (24)..(24): Xaa can be any naturally occurring amino acid
  Transcript Sequence Number=SeqID_23496
  Gene Ontology: Mol. function=transcription repressor activity
  Homolog annotation: Hit_ID=Q2QUH8; Match level="QueryCoverage=70%, HitCoverage=26%, E-value=5e-09, Identity=48%"; Hit description =Isoflavone reductase, putative, expressed
SCSNTAIGLLQPLVQDHPAYVLMXRRSDLILDKLQRLLFFNAQGAQLMEVSRGNHTSLVITMRQSGHNRVNLVQEHNLLQLKLMEAIKKADRACALAWISANNNFGRRAS

SEQ ID NO: 89471 - protein, 56 aa, Setaria italica
  Transcript Sequence Number=SeqID_23497
VDEKLVGRQGGGEDANRESIIEPHKARARLVDYSLCNPAAFACAYQCGSWVLQNVA

SEQ ID NO: 89472 - protein, 119 aa, Setaria italica
  Transcript Sequence Number=SeqID_23498
  Gene Ontology: Mol. function=protein serine/threonine kinase activity; Cellular component=integral to membrane; Biological process=protein amino acid phosphorylation
  Homolog annotation: Hit_ID=Q2R8X2; Match level="QueryCoverage=99%, HitCoverage=19%, E-value=3e-20, Identity=40%"; Hit description =Protein kinase domain containing protein, expressed
MDLKPENILLDQNMAPKIADFGTLIDQDKSFFTKNFTGISGYMAPEYNNGGPISKRADIFSFGVIILELMTGSRPNYPLSEESAALFANEVAGKWRDRLSNAAYSQQVRMCALTIGCIR

SEQ ID NO: 89473 - protein, 73 aa, Setaria italica
  Transcript Sequence Number=SeqID_23499
  Gene Ontology: Mol. function=nucleotide binding; Biological process =defense response
  Homolog annotation: Hit_ID=Q84YF1; Match level="QueryCoverage=100%, HitCoverage=5%, E-value=3e-20, Identity=68%"; Hit description =Putative Xa1-like protein
FGEVIAEHDNKEELIDIARQIANKLKCSPLAAKTVGRLLKKRFSREHWMGILQKKEWLNQTHNDDIMPALKIS

SEQ ID NO: 89474 - protein, 61 aa, Setaria italica
  Transcript Sequence Number=SeqID_23500
VFIICFLKKCRSFDFHLAKGVHSYKLGTKEPSPQRTGKQGGDTFIMKISKFVNVQNLSHCG

SEQ ID NO: 89475 - protein, 107 aa, Setaria italica
  Transcript Sequence Number=SeqID_23501
  Gene Ontology: Mol. function=aspartyl esterase activity; Cellular component=cell wall; Biological process=cell wall modification
KFAALVDRYLARHRHLSPSAIGALRDCQLMAELNVDFLSSAGATIRSTDTLLDPQADDVHTLLSAIVTNQQTCFDGLQQAAAGAWSDRGGLDSPIANGTKLYSLSLS

SEQ ID NO: 89476 - protein, 77 aa, Setaria italica
  Transcript Sequence Number=SeqID_23502
APIQSQEEGQYTTIPTYISCIYLLSLRIYKVFSTVAFSHSNSTLLCFSALQHHILSKSSNLSSFLNKAHIMRKFIFS

SEQ ID NO: 89477 - protein, 51 aa, Setaria italica
  Transcript Sequence Number=SeqID_23503
MAKPTPVASAEEAAALRRRLRRLVAAVAAGSADAEAFDEAAEALAKLRDAE

SEQ ID NO: 89478 - protein, 152 aa, Setaria italica
  misc_feature (79)..(79): Xaa can be any naturally occurring amino acid
  Transcript Sequence Number=SeqID_23504
  Homolog annotation: Hit_ID=B9R7G8; Match level="QueryCoverage=100%, HitCoverage=11%, E-value=1e-20, Identity=40%"; Hit description =Ribonuclease p/mrp subunit, putative
KSSFDGSDHSKGRSMLVAALMDIITSNCDNADYSSFQPLLPADADTRDIAAVIEVIEQGGMHFDDHEDNSSNDGDTGLXKGIGIKVLGGTTILGFSRGNNSLELDNSDDMLEVSHNSRRLVAQQTAIESPLVEKLSSSVPGLWDDLQREHVA

SEQ ID NO: 89479 - protein, 71 aa, Setaria italica
  Transcript Sequence Number=SeqID_23505
HKAILNRLPIKKLILEQRLVNFMCMTMLCIPSQNGFYFLSEASQPLAELQGMPGGPGHTLVAWFAGLGPTP

SEQ ID NO: 89480 - protein, 119 aa, Setaria italica
  Transcript Sequence Number=SeqID_23506
FLFSSSSPASSLSPCVPACVREHQQQIPLPIPQLHPLHWLAVAATLTTPPPHLLFYYSPSPPRAAPSGPDNDSLPAQAQRRTTTKRSPATSIPAPLRCRPALELHTHGRSGSTSRRGER

SEQ ID NO: 89481 - protein, 206 aa, Setaria italica
  Transcript Sequence Number=SeqID_23507
  Gene Ontology: Mol. function=transferase activity, transferring groups other than amino-acyl groups; Cellular component=membrane; Biological process=fatty acid biosynthetic process
  Homolog annotation: Hit_ID=B6SYP9; Match level="QueryCoverage=87%, HitCoverage=36%, E-value=3e-88, Identity=88%"; Hit description =Acyltransferase
  Pfam annotation: Domain name=ACP_syn_III_C; Domain location=119-203; Score=-27.4; E_value=0.011; Accession=PF08541.2; Description=3 -Oxoacyl-[acyl-carrier-protein (ACP)
  Pfam annotation: Domain name=FAE1_CUT1_RppA; Domain location=23-206; Score=217.6; E_value=3.1e-62; Accession=PF08392.4; Description =FAE1Type III polyketide synthase-like
  Pfam module annotation: Pfam domain module=ACP_syn_III_C::FAE1_CUT1 _RppA; Domain location=119-203::23-206
MELLPLLTALLLAHALAYLAWTAAARRRQSRCYLLDYVCHKPCDTRKISTEEAGDLIQRNKRLGLADYRFLLRVIVRSGIGEETYAPRSILEGREDSPTLQDALDEMDAFLDEAVAGLFARTGVAPRDVDVLVFNVSMLSPAPSLASRVVRRYGLREDVAAYNLAGMGCSAGLVALDLARNALRTRPRALALVVSSESIAPNWYSG

SEQ ID NO: 89482 - protein, 254 aa, Setaria italica
  Transcript Sequence Number=SeqID_23508
MPFISEKELLLSSNAVKNMEHHSGTSGFTLCGQETENEDTAGGFCFVKISPELSFLSSPELVVEGGKDASEKEPCQLDEKEENDVSANIEEALVGTPLVNTAEPDYGTTGFSLRPQDSNMMEAPAVINIFSAIPESNQPASVELLAENYVDSKDAQISDVHLPEQKGQEDFLDPLVVNSFEYSFVSEFLSEGASKHQNNAVASPYDGGDAENAISDSMSIQFIPEANIMEALQDVQETLPNPHHRSAAAEMTKV

SEQ ID NO: 89483 - protein, 33 aa, Setaria italica
  Transcript Sequence Number=SeqID_23509
CTCNFSCIVALLPSLFCAVPARRQRVFPLLHEL

SEQ ID NO: 89484 - protein, 110 aa, Setaria italica
  misc_feature (93)..(93): Xaa can be any naturally occurring amino acid
  Transcript Sequence Number=SeqID_23510
  Gene Ontology: Mol. function=DNA binding
REVCNNAVDAQKDTQQLATSNQDNGNKEECSDSHRNNMSESSVAEKPASVIVPRAPASLTAEKPASVTVPPASLTGDVTNPIENDVEKSMETXEKISKKECEDSIVAKKD

SEQ ID NO: 89485 - protein, 232 aa, Setaria italica
  misc_feature (88)..(88): Xaa can be any naturally occurring amino acid
  Transcript Sequence Number=SeqID_23511
  Gene Ontology: Mol. function=protein serine/threonine kinase activity; Biological process=protein amino acid phosphorylation
  Homolog annotation: Hit_ID=Q9LE81; Match level="QueryCoverage=90%, HitCoverage=17%, E-value=5e-72, Identity=63%"; Hit description=IRE
  Pfam annotation: Domain name=Pkinase; Domain location=1-122; Score= -99.8; E_value=0.015; Accession=PF00069.17; Description=Protein kinase domain
DHQPADAEQRAQQRQQRQRQTAVGTPDYLAPEILLGMAHGPTADWWSVGIILFELLVGIPPFNAEHPQIIFDNIMNREIPWPHVPEEXSFEAYDLIDKLLMENPVQRLGATGAGEVKAHPFFKDINWDMLARQKVAFIPSTDDEYDTSYFACRHAWGTADEHVNAPCNEYDDRSDTSSMSCCSSPHSCDYEEDGDECGSMEEFGAPLSVKYSFSNFSFKNISQFSRSNCNLL

SEQ ID NO: 89486 - protein, 223 aa, Setaria italica
  Transcript Sequence Number=SeqID_23512
  Gene Ontology: Mol. function=structural molecule activity; Cellular component=viral capsid
  Homolog annotation: Hit_ID=Q8H9C1; Match level="QueryCoverage=82%, HitCoverage=84%, E-value=1e-63, Identity=61%"; Hit description =Citrate binding protein
  Pfam annotation: Domain name=Alginate_lyase2; Domain location=43-222; Score=209.8; E_value=7.1e-60; Accession=PF08787.3; Description =Alginate lyase
MASYTLPLPWLTCLCVVVVVLLLSPAALLAAAADDPTAGFKAVSLSESNFVLQQPYDVPRDARYRFVGGVRQLWVLSSDKPHTPQSNTKPRTEIRMKGYNYSSGVWQFEGYGYVPSGTTGVSIMQVFGGGESATTLMLHVYDGALRYYSQQVVENTIYNRWFRLNVVHDVDASSLSVFIDGVKKLQVPGRGGDSHYFKFGVYMQHDASSFMESRWKNIRILKK

SEQ ID NO: 89487 - protein, 58 aa, Setaria italica
  Transcript Sequence Number=SeqID_23513
VKERFAVGTARYGAMRGEESRWAGRNLAAANAVEAMVRSGGRGEGIARVRDGGGAGGG

SEQ ID NO: 89488 - protein, 125 aa, Setaria italica
  Transcript Sequence Number=SeqID_23514
  Gene Ontology: Mol. function=nucleotide binding; Cellular component =integral to membrane; Biological process=transport
  Homolog annotation: Hit_ID=Q2QQ88; Match level="QueryCoverage=100%, HitCoverage=52%, E-value=6e-56, Identity=84%"; Hit description =Ureide permease 4, putative, expressed
  Pfam annotation: Domain name=FAE_3-kCoA_syn1; Domain location=14-125; Score=-57.3; E_value=0.0074; Accession=PF07168.3; Description=Fatty acid elongase 3-ketoacyl-CoA sy
MYLVKDISGAIGLMAVALVLLGTWPVVLAVLERRGRLPQHTFLDFSITNFLAAVLIALTFGQIGPDTPETPNFLTQLSQNNWPSVLFAMAGGVTLSLGTLATQYGWAFVGLSVTEVMASSLKVVI

SEQ ID NO: 89489 - protein, 416 aa, Setaria italica
  misc_feature (7)..(7): Xaa can be any naturally occurring amino acid
  misc_feature (17)..(17): Xaa can be any naturally occurring amino acid
  misc_feature (40)..(40): Xaa can be any naturally occurring amino acid
  misc_feature (68)..(68): Xaa can be any naturally occurring amino acid
  misc_feature (75)..(75): Xaa can be any naturally occurring amino acid
  misc_feature (342)..(342): Xaa can be any naturally occurring amino acid
  Transcript Sequence Number=SeqID_23515
  Gene Ontology: Mol. function=transferase activity, transferring glycosyl groups; Cellular component=integral to membrane; Biological process=protein amino acid glycosylation
  Homolog annotation: Hit_ID=Q8L7F9; Match level="QueryCoverage=100%, HitCoverage=64%, E-value=1e-155, Identity=62%"; Hit description=Beta- 1,3-galactosyltransferase 15
  Pfam annotation: Domain name=Gal-bind_lectin; Domain location=1-136; Score=-17.0; E_value=0.01; Accession=PF00337.14; Description =Galactoside-binding lectin
  Pfam annotation: Domain name=Galactosyl_T; Domain location=179-376; Score=95.4; E_value=2e-25; Accession=PF01762.13; Description =Galactosyltransferase
  Pfam module annotation: Pfam domain module=Gal-bind_lectin::Galactosyl _T; Domain location=1-136::179-376
EDPVIVXNTWTVADDWXSEDRCPSSESDAKDSAKVDDLEXCSGMVGKDHKEILASKLRSNVSTMPPAXEKSAEPXKYFPFKQGYLAVAILRVGAHGIHMTVDGKHITSFAFREDLEPGFVGEVRIAGDIKLLSVIASGLPTTEDFEHVMDLETLKAPPVPIDKSVDLFIGIFSTANNFKRRMAVRRTWMQYDAVRSAKVAVRFFVGLHKNEVVNEELWNEARTYGDIQLMPFVDYYSLILWKTIAICIYGTNVLSAKYVMKTDDDAFVRVDEILSSLDRVNISHGLLYGRVNSDSQPHRDPYSKWYITPEEWPEESYPPWAHGPGYIVSKDIAKEVYRKHKXRGELKMFKLEDVAMGIWINEMKKDGLDVKYENDGRILVEGCEDGYVIAHYQEPRDMMCLWDKFQKTKRGTCCKE

SEQ ID NO: 89490 - protein, 208 aa, Setaria italica
  misc_feature (18)..(18): Xaa can be any naturally occurring amino acid
  Transcript Sequence Number=SeqID_23516
  Gene Ontology: Mol. function=catalytic activity; Cellular component =integral to membrane; Biological process=metabolic process
  Homolog annotation: Hit_ID=Q6K821; Match level="QueryCoverage=31%, HitCoverage=8%, E-value=5e-24, Identity=78%"; Hit description =Phosphatidylinositolglycan-like
LLQLLLQQPINAIPLLLXFLQTVSSVAHFSLDKTLHKQWVQVIAMLFLGMAGHFGLGNTNSLASIDVAGAFIGISSYSTVLSGILMFTITYGSPLMLYLGMVVYISVNNTDDISTARQLTWSYILDKMVTLPCLLPLLINSVALTSYTIVLLLMRNHLFVWSVFSPKYLYVCAATVCTYVGVLIIAMTTIYTCAVFSFRAKSYRDKFH

SEQ ID NO: 89491 - protein, 144 aa, Setaria italica
  misc_feature (119)..(119): Xaa can be any naturally occurring amino acid
  misc_feature (137)..(137): Xaa can be any naturally occurring amino acid
  Transcript Sequence Number=SeqID_23517
  Gene Ontology: Mol. function=transposase activity; Biological process= transposition, DNA-mediated
  Homolog annotation: Hit_ID=Q10PZ8; Match level="QueryCoverage=100%, HitCoverage=16%, E-value=3e-63, Identity=75%"; Hit description =Transposon protein, putative, Mutator sub-class
  Pfam annotation: Domain name=MULE; Domain location=1-65; Score=44.9; E_value=3.3e-10; Accession=PF10551.1; Description=MULE transposase domain
AYGVIETESKESWTWFIQNLKVAIGTPIGLVISTDAGKGIEGAVDDVYPGVEHRECMRHLWKNFKKLYYGPLFNYNMWPAAKSYTIEKFNWHMARIQEKCPEAIAYLDENHPYLWSRSXISDHCKVDYINNNLSECXNNWVKEV

SEQ ID NO: 89492 - protein, 179 aa, Setaria italica
  misc_feature (134)..(134): Xaa can be any naturally occurring amino acid
  Transcript Sequence Number=SeqID_23518
  Gene Ontology: Mol. function=transposase activity; Biological process= transposition, DNA-mediated
  Homolog annotation: Hit_ID=Q10PZ8; Match level="QueryCoverage=100%, HitCoverage=20%, E-value=9e-35, Identity=45%"; Hit description =Transposon protein, putative, Mutator sub-class
  Pfam annotation: Domain name=MuDR; Domain location=80-159; Score =96.1; E_value=1.2e-25; Accession=PF03108.7; Description=MuDR family transposase
KGKKRKTASGHDDGKLVGVHEEGNYSGTESLAALSDSSYDTDLAASSDSDCSDPEYERDVEIFDEDDEDDSSVFSYDVDDPCFDIGVVFPDVKQCKSALTQHAILNGYAFRTVKKDKKRFQVKCLRAEEGCKWXIFASTSSKKYLGCKVKKNGPIHKCSSVNNCGDTMATINWVAERVV

SEQ ID NO: 89493 - protein, 64 aa, Setaria italica
  misc_feature (24)..(24): Xaa can be any naturally occurring amino acid
  Transcript Sequence Number=SeqID_23519
  Gene Ontology: Mol. function=transposase activity; Cellular component= nucleus; Biological process=transposition, DNA-mediated
  Homolog annotation: Hit_ID=Q10PZ8; Match level="QueryCoverage=84%, HitCoverage=6%, E-value=2e-18, Identity=72%"; Hit description =Transposon protein, putative, Mutator sub-class
QGRKCPEAIAYLDENHPYLWSRSXFSDHCKVDYINNNLSECFNNWVKEVKDLQIVEMLERSSVL

SEQ ID NO: 89494 - protein, 357 aa, Setaria italica
  misc_feature (167)..(167): Xaa can be any naturally occurring amino acid
  Transcript Sequence Number=SeqID_23520
  Gene Ontology: Mol. function=transposase activity; Biological process= transposition, DNA-mediated
  Homolog annotation: Hit_ID=Q10PZ8; Match level="QueryCoverage=95%, HitCoverage=40%, E-value=1e-152, Identity=73%"; Hit description =Transposon protein, putative, Mutator sub-class
  Pfam annotation: Domain name=MULE; Domain location=208-304; Score =127.1; E_value=5.5e-35; Accession=PF10551.1; Description=MULE transposase domain
  Pfam annotation: Domain name=MuDR; Domain location=9-85; Score=62.9; E_value=1.2e-15; Accession=PF03108.7; Description=MuDR family transposase
  Pfam module annotation: Pfam domain module=MULE::MuDR; Domain location=208-304::9-85
RRTGKTKVVGPIGIDPDVKQCKSALTQHAILNGYAFRTVKKDKKRFQVKCLRAEEGCKWTFFASTSSKKYLGCKVKKNGPIHKCSSVNNCGDTMATINWVAERVVDWLKDKSTKGPKELQAALRKKYSMEIPYDKVSRGKEKALDMIFGKWDDSYDLLPTYRAELLXSVLGSIVEFDTEKHQGDVCFRRFFLALKPCIDGFLEGCRPYIAIDATHLTGRSRGQLVAAVAIDGHNWLFPVAYGVIETESKESWTWFIQNLKVAIGTPIGLVISTDAGKGIEGAVDDVYPGVEHRECMRHLWKNFKKLYYGPLFNYNMWPAAKSYTIEKFNWHMARIQEKCPEAIAYLDENHPYLWSRS

SEQ ID NO: 89495 - protein, 269 aa, Setaria italica
  Transcript Sequence Number=SeqID_23521
  Homolog annotation: Hit_ID=Q9SRR3; Match level="QueryCoverage=66%, HitCoverage=26%, E-value=2e-31, Identity=41%"; Hit description =F21O3.24 protein
MLQKLVTEDEGKDLTSLMPLYSPGNIEECMQKIQPVKYGEEVCFNGIFMLKASSSGLELGNSVWTIKGPRASITYLPSSVFVSAHALDFDYSSLKENDVILFSDLSSLNDMDEDNEKLDEHAMNETDSSLCHRSVLRDDGADADETITFLCNNDDITEEIERISFICSCIIDAIKSGGSVLIPIGRLGAILLLLELISETLHSSSIKVPIFMISETAEEIIAFTNALPEWLCKSRQEKLFSGEALFGHMELLKEGKLFLFPHLHSKGLL

SEQ ID NO: 89496 - protein, 275 aa, Setaria italica
  Transcript Sequence Number=SeqID_23522
  Gene Ontology: Mol. function=oxidoreductase activity, acting on sulfur group of donors, disulfide as acceptor; Biological process =protein metabolic process
  Homolog annotation: Hit_ID=B6U8S9; Match level="QueryCoverage=87%, HitCoverage=90%, E-value=1e-114, Identity=84%"; Hit description =Peptide methionine sulfoxide reductase
  Pfam annotation: Domain name=PMSR; Domain location=109-261; Score =267.6; E_value=2.8e-77; Accession=PF01625.13; Description=Peptide methionine sulfoxide reductase
  Subcellular localization annotation: CTP_CleavageSite=87; ConfidenceScore=5.22e-01
KRGKGKGQRPSPRLPPLPTSPAASPLLLASRLGALHGPAPLLFHHHRRAGAGASSVHFLAPRRKTRPGPAMSWLGKLGLSGLGGSPRASEASAALAQGPDEDQPAPGNEFAQFGAGCFWGVELAFQRVPGVTRTEVGYSQGNLHEPTYEDVCTGATNHNEVVRVQYDTTACKFDDLLDVFWARHDPTTPNRQGNDVGTQYRSGIYYYTPEQEKAARESLEKQQKLLNRTIVTEILPAKRFYRAEEYHQQYLEKGGRFGFRQSAAKGCNDPIRCYG

SEQ ID NO: 89497 - protein, 148 aa, Setaria italica
  misc_feature (95)..(95): Xaa can be any naturally occurring amino acid
  misc_feature (132)..(132): Xaa can be any naturally occurring amino acid
  Transcript Sequence Number=SeqID_23523
  Homolog annotation: Hit_ID=B4FTW1; Match level="QueryCoverage=87%, HitCoverage=37%, E-value=2e-10, Identity=43%"; Hit description=DNA binding protein
MEKEDTKKKEADDSTPQHRRKAGLKFAPKVLPKKDPKIIPKTEPQEENKALTIDKKMMSGLGSLQSSYGPGSGTKAEKQGDYYFNHLFLIIIFLXRTPVQVAFGRADPSIARTFPTRRSFSSDVSAVKLPRXHEPWDYNCTDYPVTLP

SEQ ID NO: 89498 - protein, 291 aa, Setaria italica
  misc_feature (41)..(41): Xaa can be any naturally occurring amino acid
  Transcript Sequence Number=SeqID_23524
  Gene Ontology: Mol. function=DNA-directed RNA polymerase activity; Cellular component=DNA-directed RNA polymerase III complex; Biological process=transcription from RNA polymerase III promoter
  Homolog annotation: Hit_ID=B4FTW1; Match level="QueryCoverage=93%, HitCoverage=88%, E-value=8e-58, Identity=49%"; Hit description=DNA binding protein
  Pfam annotation: Domain name=RNA_pol_Rpc4; Domain location=176-291; Score=89.4; E_value=1.2e-23; Accession=PF05132.6; Description=RNA polymerase III RPC4
MEKEDTKKKEADDSTPQHRRKAGLKFAPKVLPKKDPKIIPXKTEPQEENKALTIDKKMMSGLGSLQSSYGPGSGTKAEKQGTPVQVAFGRADPSIARTFPTRRSFSSDVSAVKLPKEHDEPWDYNCTDYPVTLPLRRPNSGNAEILDEEEFGHSSGRAQVSELSAAEELGLMQRVDTPQLLFFQFPTTLPLPRQADPDAGTNMNMNAKSMGDNRKRRLDSIHGCGLKELPDGFMGKMLVYKSGKVKMTLGDVLFDVSAGSNCMFPQEVVAINTREKHCCGIGEIGKRAIVT

SEQ ID NO: 89499 - protein, 178 aa, Setaria italica
  Transcript Sequence Number=SeqID_23525
KTTLGIYRPLRLVQRAREPLEGPIPHLDARLCMLLALIPLSVDAILKEESDIFGAEGSKILSRRQGLISSLQDLIQYSGLLVPPSSVVNAANAAASKAAIFKANYTAGVVNSSMVAQTDSSTKVSMKAVGNMLHLIIEACISRKLIDTSAYLWPGYVVSSAPLKDTTLPQESPWLNFI

SEQ ID NO: 89500 - protein, 89 aa, Setaria italica
  Transcript Sequence Number=SeqID_23526
  Gene Ontology: Mol. function=hydrolase activity, acting on acid anhydrides, catalyzing transmembrane movement of substances; Cellular component=integral to membrane; Biological process =metabolic process
  Homolog annotation: Hit_ID=B9SZQ4; Match level="QueryCoverage=83%, HitCoverage=8%, E-value=8e-22, Identity=68%"; Hit description=H(\\+)- transporting atpase plant/fungi plasma membrane type, putative
  Pfam annotation: Domain name=Cation_ATPase_N; Domain location=2-41; Score=-1.7; E_value=0.0063; Accession=PF00690.18; Description=Cation transporterATPase, N-terminus
VYNKLEEKQESKVLKFLGFMWNPLSWVMEAAAIMAIALAHGGTDDRGKKMSIDYHDFIGIMLLLIINSTISFIEENNAGNAAAALMAPP

SEQ ID NO: 89501 - protein, 72 aa, Setaria italica
  Transcript Sequence Number=SeqID_23527
NQNSCSPRLVLVVNHHCTADAAPTLFPYEMKAVTSHDFCCFVFNNSNEQNEIVKQHPFRFILISAGVTIYRA

SEQ ID NO: 89502 - protein, 57 aa, Setaria italica
  Transcript Sequence Number=SeqID_23528
SGKGSFSLSLLLALSLSLSQEFQEEVNRTGLRRKKSHQFCMLQLDRSMDRLDDSHDT

SEQ ID NO: 89503 - protein, 91 aa, Setaria italica
  Transcript Sequence Number=SeqID_23529
  Gene Ontology: Mol. function=triacylglycerol lipase activity; Biological process=lipid metabolic process
  Homolog annotation: Hit_ID=B9R7B0; Match level="QueryCoverage=100%, HitCoverage=19%, E-value=6e-22, Identity=54%"; Hit description =Triacylglycerol lipase, putative
  Pfam annotation: Domain name=Lipase_3; Domain location=1-80; Score= -3.5; E_value=0.0011; Accession=PF01764.17; Description=Lipase (class 3)
FAVAGHSLGGALAVLFPAVLALHREEGVLARLEGVYTFGQPRVGDESLGRFMARYLDQPSRYFRFVYCNDIVPRVPYDDSALQFRHFGTCL

SEQ ID NO: 89504 - protein, 247 aa, Setaria italica
  Transcript Sequence Number=SeqID_23530
  Gene Ontology: Mol. function=electron carrier activity; Biological process=oxidation reduction
  Homolog annotation: Hit_ID=B6SXJ4; Match level="QueryCoverage=98%, HitCoverage=44%, E-value=1e-109, Identity=80%"; Hit description =Cytochrome P450 CYP78A55
METSSVESWWVLPMTLIPAISGDQHENIATIATSFTYMAIFACLAWAGASLLYWAHPGGPAWGKYWRARGKGPKPMTLPGPRGLPVVGSLGLMSGLAHRSLADEASRQPGAKRLMALSLGPVRAVVTSHPDVAKEILDNPAFADRPLNHAAYGLMFHRSIGFAEHGPYWRALRRIAAGHLFGPRQVEAFAPYRASVGEGVVTALRGAGAGAVQVRGLLRRASLYYIMRFVFGKEYDVSRAAAPASGK

SEQ ID NO: 89505 - protein, 95 aa, Setaria italica
  Transcript Sequence Number=SeqID_23531
ARRVSSTTSGEPAATATGDEQDKAARARSMTSHGATAETGKRGRCCGTSGEDRSAVAMAIARAWLLQACSQEQTQRRVVVASWKLLVCQRPGWNG

SEQ ID NO: 89506 - protein, 162 aa, Setaria italica
  Transcript Sequence Number=SeqID_23532
  Homolog annotation: Hit_ID=Q01K95; Match level="QueryCoverage=100%, HitCoverage=6%, E-value=9e-64, Identity=75%"; Hit description =OSIGBa0148A10.3 protein
SDNILAHSAKEQKVIHFLEYVILKNIIELSSEIQSHLNQLKSIPFLSQFIRSSLLHRFNDPVAIKAIRSILVVLSQAKFSADEIIELILGHSNFMSTITCNEVSEYPSACNPSGGMLQPAPSILKLVDSSFMEENKPQLCTKEKGRVEIIRLLRVLYDIKSR

SEQ ID NO: 89507 - protein, 124 aa, Setaria italica
  Transcript Sequence Number=SeqID_23533
  Gene Ontology: Mol. function=transcription factor activity; Cellular component=transcription factor complex; Biological process =regulation of transcription, DNA-dependent
  Homolog annotation: Hit_ID=Q27W79; Match level="QueryCoverage=66%, HitCoverage=19%, E-value=2e-26, Identity=63%"; Hit description =Transcription regulator of the cell cycle TaE2Fe
RSNLHSKIQKKAKLGERGDILKNCKVAVQSRLGQGKNNGFVYGPFHPAGARKHELDGGNKPGQRERAEDWESLSVSFRPQYQNQALGDLFAHYVEAWKTWYSEFAQGSNSMQQHLGQSVVNQFL

SEQ ID NO: 89508 - protein, 161 aa, Setaria italica
  Transcript Sequence Number=SeqID_23534
  Gene Ontology: Mol. function=protein dimerization activity; Cellular component=nucleus; Biological process=regulation of transcription, DNA-dependent
  Homolog annotation: Hit_ID=Q06979; Match level="QueryCoverage=89%, HitCoverage=30%, E-value=2e-67, Identity=89%"; Hit description=Ocs -element binding factor 3.2
FHVLSGMWKTPAERCFMWLGGFRSSELLKLLAGQLEPLTDQQLVGISNLQQSSQQAEDALSQGMEALQQSLAETLASGSLGPAGSSGNVASYMGQMAMAMGKLGTLENFLRQADNLRLQTLQQMQRILTTRQSARALLAISDYFSRLRALSSLWLARHGII

SEQ ID NO: 89509 - protein, 330 aa, Setaria italica
  misc_feature (222)..(222): Xaa can be any naturally occurring amino acid
  Transcript Sequence Number=SeqID_23535
  Gene Ontology: Mol. function=protein dimerization activity; Cellular component=nucleus; Biological process=regulation of transcription, DNA-dependent
  Homolog annotation: Hit_ID=Q06979; Match level="QueryCoverage=95%, HitCoverage=71%, E-value=1e-131, Identity=73%"; Hit description=Ocs -element binding factor 3.2
  Pfam annotation: Domain name=bZIP_1; Domain location=61-113; Score =18.6; E_value=0.004; Accession=PF00170.13; Description=bZIP transcription factor
  Pfam annotation: Domain name=bZIP_2; Domain location=61-111; Score =21.6; E_value=0.0027; Accession=PF07716.7; Description=Basic region leucine zipper
  Pfam module annotation: Pfam domain module=bZIP_1::bZIP_2; Domain location=61-113::61-111
KPNLVALPTGNIEKLGESAMADSPMTDTSTDPDTDERNQMFEQGLVAGPTASDSSDKSRDKLDQKTLRRLAQNREAARKSRLRKKAYIQNLESSRLKLTQLEQELQRARQQGIFISTSGDQPQSTSGNGALAFDMEYARWLEEHNKHVNELRAAVNAHAGDNDLRGIVDSIMAHYDEIFRLKGVAAKADVFHVLSGMWKTPAERCFMWLGGFRSSELLKSQXSQQAEDALSQGMEALQQSLAETLASGSLGPAGSSGNVASYMGQMAMAMGKLGTLENFLRQADNLRLQTLQQMQRILTTRQSARALLAISDYFSRLRALSSLWLARPRE

SEQ ID NO: 89510 - protein, 83 aa, Setaria italica
  Transcript Sequence Number=SeqID_23536
QHRLCLGQASWDFKSKPKMASSKIVSEDKLSSKRARAYLSPVLQGIQMPFHWLKLIYNLSYVYKFRLTGEVQLPNKIQHVGQG

SEQ ID NO: 89511 - protein, 134 aa, Setaria italica
  misc_feature (7)..(7): Xaa can be any naturally occurring amino acid
  Transcript Sequence Number=SeqID_23537
  Gene Ontology: Mol. function=protein serine/threonine kinase activity; Biological process=protein amino acid phosphorylation
  Homolog annotation: Hit_ID=Q7X8R6; Match level="QueryCoverage=100%, HitCoverage=17%, E-value=4e-35, Identity=55%"; Hit description =OSJNBa0023J03.15 protein
LLRKEPXFTDEFGSKQNLFNYFLSELKSRPITEIVDAHIREEATEQEIKSVASLAEMCLKLRGEERPTMKQVEITLHNLRMERLNSLCQVARGNNQEIQPFIYSRANGGGTPSVHSRTCYSLEQEFIASAEIPR

SEQ ID NO: 89512 - protein, 122 aa, Setaria italica
  misc_feature (106)..(106): Xaa can be any naturally occurring amino acid
  Transcript Sequence Number=SeqID_23538
  Subcellular localization annotation: CTP_CleavageSite=90; ConfidenceScore=5.53e-01
NTSFSSPPPPPPPPPPPPPLVNNTDVSLSQPRLLDIKDSATSKYLGTPSLTPPRTPPVPPPPPPSRTPPVPPPPPPLSGAPHVPPPPPPPSQTPPAPPPPPPPSRXPSVPPPPPPPSRAPHR

SEQ ID NO: 89513 - protein, 74 aa, Setaria italica
  Transcript Sequence Number=SeqID_23539
KRRIQSYNCQKNTLIVTQLLPSQDRHPNLMWLQCHNTTAANLRRNKRIHYTFNFSFKTVLVHAWWRRCVSKVFF

SEQ ID NO: 89514 - protein, 149 aa, Setaria italica
  misc_feature (38)..(38): Xaa can be any naturally occurring amino acid
  misc_feature (75)..(75): Xaa can be any naturally occurring amino acid
  Transcript Sequence Number=SeqID_23540
  Gene Ontology: Mol. function=protein kinase activity; Cellular component=extracellular region; Biological process=protein amino acid phosphorylation
  Homolog annotation: Hit_ID=Q2R2T2; Match level="QueryCoverage=93%, HitCoverage=28%, E-value=2e-59, Identity=76%"; Hit description=ABC1 family protein
  Pfam annotation: Domain name=ABC1; Domain location=1-102; Score =108.9; E_value=1.7e-29; Accession=PF03109.8; Description=ABC1 family
HPIAAASIAQVHRGRLHDNQDVAVKVQYPGLEQRMKIXTSMTMSFLSKSVSWIFPDYKFDRILVEFEKSMSMELXFTLEAKNSERTANCFRKNSVVKVPYVFWQLTTREVLTMEFCYGHKVNDLDFLRRANISPTKVAKALIELFGEMV

SEQ ID NO: 89515 - protein, 70 aa, Setaria italica
  Transcript Sequence Number=SeqID_23541
HDDHEVREQVVPLLHVAVVVAPAGAEAALQVGRRDEAVDDADEDGRLRRAAVADRLDAGRAWPEEVERHG

SEQ ID NO: 89516 - protein, 104 aa, Setaria italica
  Transcript Sequence Number=SeqID_23542
  Subcellular localization annotation: CTP_CleavageSite=44; ConfidenceScore=5.31e-01
MVSGAAGFRAAAAIAVLAVLVMSSQGHPSKKPLCSDCPSLCNTNCSAVVAAACAVDCSPPVGQCEGCKSQVLRGCCQSFCSSSNDTSTVSSCCPSDCISGDCGT

SEQ ID NO: 89517 - protein, 111 aa, Setaria italica
  misc_feature (110)..(110): Xaa can be any naturally occurring amino acid
  Transcript Sequence Number=SeqID_23543
QPCSSMFWRRQPGKPLGKGRKLRLQGTRPWFNRASEFKEAEIVHPKCQPRSTGERAPNQEGPPRRSPSLSSSRRSSGLDTGGLDLWPPLLGLATSHERERERKIRSFFSXL

SEQ ID NO: 89518 - protein, 60 aa, Setaria italica
  Transcript Sequence Number=SeqID_23544
MEDEDEFGDLYTDILIPTQTPASTSAPSNPAPVETLPRPPPNPNPTPAAAAPAAAEDDDD

SEQ ID NO: 89519 - protein, 155 aa, Setaria italica
  Transcript Sequence Number=SeqID_23545
  Gene Ontology: Mol. function=metal ion binding
  Homolog annotation: Hit_ID=B6UFQ4; Match level="QueryCoverage=100%, HitCoverage=27%, E-value=3e-67, Identity=79%"; Hit description =Transposon protein
GHVYGRYCLERWLQQCGKKKAQCPQCGKRYKQNNIINLYVPEIAVPNNDLEKQVLLLREKNDSLEKQQAKLLEEIKEHKRQIMLQQNVIYESSSKRQKMTEQTSNGMPDVAPIASVTEDIDRRNLCSFVLQNEFLVEGARVMGIDASSQIIFTSG

SEQ ID NO: 89520 - protein, 36 aa, Setaria italica
  Transcript Sequence Number=SeqID_23546
INALAHKVIHLPKYIYNTMSNSACLSHRKNDEAPLE

SEQ ID NO: 89521 - protein, 230 aa, Setaria italica
  Transcript Sequence Number=SeqID_23547
  Gene Ontology: Mol. function=hydrogen ion transporting ATPase activity, rotational mechanism; Cellular component=proton -transporting two-sector ATPase complex; Biological process=proton transport
  Homolog annotation: Hit_ID=Q9SWE7; Match level="QueryCoverage=100%, HitCoverage=100%, E-value=5e-85, Identity=68%"; Hit description=V -type proton ATPase subunit E
  Pfam annotation: Domain name=vATP-synt_E; Domain location=16-225; Score=315.5; E_value=1.1e-91; Accession=PF01991.10; Description=ATP synthase (E31 kDa) subunit
MEEVDVSRQLKQMTDFIRQEAVEKAVEIEAAAAEEFQIEKLQLVEAEKKKIRQEFDRKEKQVGIKNKIDYSMQLNASRIKVLQAQDDLVTNMMESARKELLYISRDHQTYKKLLKILIVQSLLRLKEPAVLLRCRKEDLDLVDSVLESASNEYAEKANVYPPEIVVDRRVFLPSAPSHYQAPGPSCSGGVVLASRDGKIVCENTLDARLQAVFRKKLPEIRQSLFRQVAA

SEQ ID NO: 89522 - protein, 319 aa, Setaria italica
  Transcript Sequence Number=SeqID_23548
  Gene Ontology: Mol. function=serine-type endopeptidase activity; Cellular component=cytoplasm; Biological process=proteolysis
  Homolog annotation: Hit_ID=C0P421; Match level="QueryCoverage=81%, HitCoverage=83%, E-value=1e-135, Identity=91%"; Hit description=ATP -dependent Clp protease proteolytic subunit
  Pfam annotation: Domain name=CLP_protease; Domain location=77-256; Score=351.9; E_value=1.2e-102; Accession=PF00574.15; Description=Clp protease
  Subcellular localization annotation: CTP_CleavageSite=70; ConfidenceScore=5.79e-01
MEAAAAAMAALPAPPCTSSSPPSVFLTPSSSADRRKAPRAVAVRASAATAAAARRSLSAGWDPSGRSAARPAARKARLEELDTTNMLLRQRIVFLGSPVDDTSADLIISQLLLLDAEDQTKDIKLFINSPGGSITAGMGVYDAMKFCKADVSTVCFGLAASMGAFLLAAGTKGKRYCMPNARIMIHQPSGGAGGKVTEMGLQIREMMYEKIKINKILSRITGKPEEQIDEDTKFDYFMSPWEAKDYGIVDSIIDEGKPGLVAPFAGAVPPPKSRVWYLWKASGPTRKIMKDLPSEEKLILNGNGSATGDDGKLKEASAT

SEQ ID NO: 89523 - protein, 79 aa, Setaria italica
  Transcript Sequence Number=SeqID_23549
PHGVSCICSTSYSQLTQEIIHLGAFFSGTQRRRAAPHLDGTWAQEIPSSLTPWIDEELDQDKLLVPRLSISLRQPRRKY

SEQ ID NO: 89524 - protein, 121 aa, Setaria italica
  Transcript Sequence Number=SeqID_23550
  Gene Ontology: Mol. function=histone acetyltransferase activity; Cellular component=nucleus; Biological process=metabolic process
  Homolog annotation: Hit_ID=Q7X7L3; Match level="QueryCoverage=79%, HitCoverage=16%, E-value=2e-29, Identity=73%"; Hit description =Elongator complex protein 3
TAAAAAAVAAPEQPRRRKPAPGRGGVVLPAGLSEEEARVRAIAEIVSAMGELSRRGEDVDLNALKSAACRKYGLARAPKLVEMIAAVPEADRAALLPRLRAKPVRTASGIDVVAVMSKPHR

SEQ ID NO: 89525 - protein, 109 aa, Setaria italica
  Transcript Sequence Number=SeqID_23551
KVESGEREQQEEEEAEEGGGDRLLPAPSPSSRSPWPPPLLNPHRLSPHNSVAPTLPRWPAGRAAMRPISPPDSESVGFRWGRESLTPGRAFLSVLLLRNRHLLPASLST

SEQ ID NO: 89526 - protein, 82 aa, Setaria italica
  Transcript Sequence Number=SeqID_23552
RRQPHQERQFDPLKDGIKDIQHYSNDLVRIKAGKSGGISKFKNSSPQKDHTSPNIYDRHFLQTRISSKLRISLKYSNQLKIR

SEQ ID NO: 89527 - protein, 89 aa, Setaria italica
  Transcript Sequence Number=SeqID_23553
RLLHWRQWQHFGGTFDRLIGLFLPLVAARQRRRSQCGYGGGGGDDGGTIRPYVDSLLDLRVPDDDVDGARRPLTDHEMASLVWEFVSAA

SEQ ID NO: 89528 - protein, 72 aa, Setaria italica
  Transcript Sequence Number=SeqID_23554
QATTGTKCELLPMIKQPLMQAISLKAQIRLSKVHNGHDNKILHRISEPAVTITNMNIRNSTHVSSILLNIFL

SEQ ID NO: 89529 - protein, 758 aa, Setaria italica
  misc_feature (635)..(635): Xaa can be any naturally occurring amino acid
  Transcript Sequence Number=SeqID_23555
  Gene Ontology: Mol. function=protein binding; Cellular component =cytoplasm; Biological process=post-Golgi vesicle-mediated transport
  Homolog annotation: Hit_ID=Q2QV94; Match level="QueryCoverage=94%, HitCoverage=89%, E-value=0.0, Identity=88%"; Hit description=Exocyst complex component 5
  Pfam annotation: Domain name=Sec10; Domain location=78-755; Score =769.3; E_value=2.6e-228; Accession=PF07393.3; Description=Exocyst complex component Sec10
FFGEDDAAPAPPPPPLVLGAAPPVFPAVDELLGLFKHSCKELVDLRKQIDKRLQNLKKEVAVQDSKHRKTLGELEKGVDGLFDSFARLDSRISSVGQTAAKIGDHLQSAESQRETASQTIDLIKYLMEFNSTPGDLMELSPLFSDDSRVAEAASIAQKLRSFAEEDVGRHGVTPAVGSANASRGLEVAVANLQEYCNELENRLLARFDAASQRRELSTMAECAKILSQFNRGTSAMQHYVATRPMFIDVDIMNTDIQVVLGDEGLQADSNYIADGLSTLYKEIADTVRREATTITAVFPSPNEVMAILVQRVLEQRVTTILDRILIKPSLASLPPLEEGGLLQYLRILAVAYNKTKELAKDLQSIGCGDLDIEGLTESIYVAHKDEYTEFEQASLRQLYQSKMAELKAEAKQQSESTGSIGRAKGASLTTSPQQLISVTVVTEFVRWNEEAIARCTLLFSQPTTVAANVRSIFACLLDQVSQYLTEGLDRARDSLNDAAAMRDRYVIGSSVSRRVAAAAASAAEAAASAGESSFRSFMIAVQRCASSVSILQQYFSNTISRLLLPVDGAHPSACEDMGSAVSVVEAAAHKGLLQCIDTVMSEVERLLSSEQKATDYRTPDDGAAPDHRPTNACIXVAYLSRVLEVAFNALEGLNKQSFLTELGNRLHKGLLNHWQKFTFSPSGGLRLKRDITEYGDFVRSFNAPSIDEKFEQLGIVANVFIVAPESLASLFEGTPSIRKDALRLCLYRTFNDISRISH

SEQ ID NO: 89530 - protein, 263 aa, Setaria italica
  Transcript Sequence Number=SeqID_23556
  Gene Ontology: Mol. function=protein binding; Cellular component =cytoplasm; Biological process=vesicle docking
  Homolog annotation: Hit_ID=Q2QV94; Match level="QueryCoverage=85%, HitCoverage=28%, E-value=1e-128, Identity=96%"; Hit description =Exocyst complex component 5
  Pfam annotation: Domain name=Sec10; Domain location=2-261; Score= -199.1; E_value=0.0057; Accession=PF07393.3; Description=Exocyst complex component Sec10
RHRLCRKVISVWEAYQHLKYSQAEAAASAGESSFRSFMIAVQRCASSVSILQQYFSNTISRLLLPVDGAHPSACEDMGSAVSVVEAAAHKGLLQCIDTVMSEVERLLSSEQKATDYRTPDDGAAPDHRPTNACIRIVAYLSRVLEVAFNALEGLNKQSFLTELGNRLHKGLLNHWQKFTFSPSGGLRLKRDITEYGDFVRSFNAPSIDEKFEQLGIVANVFIVAPESLASLFEGTPSIRKDALRFIQLRDDYKTSKIASMLNN

SEQ ID NO: 89531 - protein, 114 aa, Setaria italica
  Transcript Sequence Number=SeqID_23557
  Gene Ontology: Cellular component=cytoplasm
  Homolog annotation: Hit_ID=Q2QV94; Match level="QueryCoverage=78%, HitCoverage=11%, E-value=4e-40, Identity=90%"; Hit description =Exocyst complex component 5
TAIIVVDASHCKVIILAEPYFTVPFLFYCSGGLRLKRDITEYGDFVRSFNAPSIDEKFEQLGIVANVFIVAPESLASLFEGTPSIRKDALRFIQLRDDYKTSKIASMLNNITAE

SEQ ID NO: 89532 - protein, 62 aa, Setaria italica
  Transcript Sequence Number=SeqID_23558
MGLVSPAAIVFHRILIIHPLRLHHRMERSHGLDGCLEPLITFQWCVRKVKEKVDNANSSLNG

SEQ ID NO: 89533 - protein, 189 aa, Setaria italica
  Transcript Sequence Number=SeqID_23559
  Gene Ontology: Mol. function=solute:hydrogen antiporter activity; Cellular component=integral to membrane; Biological process =regulation of pH
  Homolog annotation: Hit_ID=Q9LUN4; Match level="QueryCoverage=99%, HitCoverage=23%, E-value=2e-73, Identity=69%"; Hit description =Cation/H+ exchanger
LVIANACLGKIGGTVITSLFVKIPVREAITLGFLMNTKGLVELIVLNIGRDRKVLNDEAFAILVLMALFTTFITTPIVMAIYKPARKTVPYKRRTVECTAGDAENELRVLACFHTNRHIPTLLNLVEASRGTGRRRLTMYAMHLVELSERSSAISLVHRARRDGMPFFNSKEQRTEQMVVAFEAFQQLS

SEQ ID NO: 89534 - protein, 48 aa, Setaria italica
  Transcript Sequence Number=SeqID_23560
  Gene Ontology: Mol. function=DNA binding; Cellular component=nucleus; Biological process=regulation of transcription
  Homolog annotation: Hit_ID=B6SUW6; Match level="QueryCoverage=100%, HitCoverage=14%, E-value=3e-14, Identity=80%"; Hit description=NAC domain protein NAC5
MEQELHQPMELPPGFRFHPTDEELITHYLARKVADARFAAFAVSEADL

SEQ ID NO: 89535 - protein, 122 aa, Setaria italica
  Transcript Sequence Number=SeqID_23561
  Gene Ontology: Mol. function=protein kinase activity; Cellular component=plastoglobule; Biological process=protein amino acid phosphorylation
  Homolog annotation: Hit_ID=B9SMA1; Match level="QueryCoverage=100%, HitCoverage=17%, E-value=4e-48, Identity=72%"; Hit description =Protein ABC1, mitochondrial, putative
  Pfam annotation: Domain name=ABC1; Domain location=1-107; Score =136.6; E_value=7.9e-38; Accession=PF03109.8; Description=ABC1 family
EISPEPVAAASLGQVYQARLRSNGKVVAVKVQRPGVQAAISLDIYILRFLASLARKAAKLNTDLPAVLDEWASSLFREMDYREEARNGLKFRELFGKFRDVSVPEMYLEQSRRRVLIMEWIE

SEQ ID NO: 89536 - protein, 45 aa, Setaria italica
  Transcript Sequence Number=SeqID_23562
  Gene Ontology: Cellular component=chloroplast; Biological process =response to stress
  Homolog annotation: Hit_ID=Q9ZP25; Match level="QueryCoverage=100%, HitCoverage=21%, E-value=7e-13, Identity=77%"; Hit description=Small heat shock protein Hsp23.5
GRIELSPEVYRMDTIKAEMKNGVLKVVVPKVKEQQRKDVFQVNVE

SEQ ID NO: 89537 - protein, 207 aa, Setaria italica
  Transcript Sequence Number=SeqID_23563
  Gene Ontology: Mol. function=transferase activity; Cellular component= mitochondrion
  Homolog annotation: Hit_ID=B9RZG0; Match level="QueryCoverage=100%, HitCoverage=72%, E-value=4e-31, Identity=31%"; Hit description =Pentatricopeptide repeat-containing protein, putative
  Pfam annotation: Domain name=PPR; Domain location=114-148; Score =51.7; E_value=2.9e-12; Accession=PF01535.12; Description=PPR repeat
  Pfam annotation: Domain name=PPR; Domain location=149-183; Score =22.8; E_value=0.0015; Accession=PF01535.12; Description=PPR repeat
  Pfam annotation: Domain name=PPR; Domain location=44-78; Score=23.5; E_value=0.00087; Accession=PF01535.12; Description=PPR repeat
  Pfam annotation: Domain name=PPR; Domain location=79-113; Score=42.2; E_value=2.1e-09; Accession=PF01535.12; Description=PPR repeat
  Pfam annotation: Domain name=PPR; Domain location=9-43; Score=40.8; E_ value=5.3e-09; Accession=PF01535.12; Description=PPR repeat
  Pfam module annotation: Pfam domain module=PPR::PPR::PPR::PPR::PPR; Domain location=114-148::149-183::44-78::79-113::9-43
RNWVKPNVIIYNALIGGHCRNGNISDAIGVLGTMKSNGVQPTAVTYGSLMHWMCHSGLVKEAKAIFAQCIIKNIELGVIGYTIMIQGLCKIGKIDEAVICFKDMRSRDIPPNKLTYTTLMFAYCKSGNNEEASKLFDEMVSSGIVPDSVSYNTLISGCCEADSLDKVIAMPAEMPSRVFKQDGCSYNPLVNGITTPWCQKEAASSAE

SEQ ID NO: 89538 - protein, 46 aa, Setaria italica
  Transcript Sequence Number=SeqID_23564
  Gene Ontology: Mol. function=hydrolase activity, acting on ester bonds; Biological process=lipid metabolic process
DFVAKKLGFDKSPMAYFVLKARKKLIPSAINRGVSYASAGAGILDS

SEQ ID NO: 89539 - protein, 61 aa, Setaria italica
  Transcript Sequence Number=SeqID_23565
LDLVQQLWYTPNRLWSLRNPYLKREVTAKRLFYPFLLLDFLHSKMNCFKALLISVTRLKYA

SEQ ID NO: 89540 - protein, 300 aa, Setaria italica
  misc_feature (142)..(142): Xaa can be any naturally occurring amino acid
  Transcript Sequence Number=SeqID_23566
  Gene Ontology: Mol. function=ATP binding; Cellular component =chromosome; Biological process=chromosome organization and biogenesis
  Homolog annotation: Hit_ID=Q8GU52; Match level="QueryCoverage=82%, HitCoverage=23%, E-value=1e-81, Identity=64%"; Hit description=SMC6 protein
MKNEATGIEQINLEREGQKSELVVQRGKIELQLRSLKRKREDEERRLERKKLQLDDTKKLSADNNHDTAVDTSELVAEMMQVKEDIGNKELVLQKINLKLTDTLLDYYNKRASYKDFIESAYAEMGSISDVEHELQLVEEKXHDAQQEKAHYEDVMERKVLAPIKTAETEYTNLQQLHQEYFEKASKICIESEVEALGGVAGSTLEQLSEEINKLTRRLQQESRRYTESIDDLRALHDKTRQKILRKQQMYAGFRDKLNACQKALDLRWKKFQRNAGLLKRQLTWLFNEHLGKKGISGHI

SEQ ID NO: 89541 - protein, 139 aa, Setaria italica
  Transcript Sequence Number=SeqID_23567
  Homolog annotation: Hit_ID=B6UFP9; Match level="QueryCoverage=44%, HitCoverage=30%, E-value=4e-15, Identity=61%"; Hit description =Extensin
MPTVAITLDLSCGRCRSKIEKILCSIQERGKFVFDKVVYEKDKVLITGSFDAIELCCKLRCKAGCFVIKIDIVEEKKPPPPPPECPKVPKCCEKDPKKCCKKDPKCCKEEEPKCKPDPKCCKEEEPKCKPVVDSPKPVV

SEQ ID NO: 89542 - protein, 177 aa, Setaria italica
  Transcript Sequence Number=SeqID_23568
PAATERRICLDGRGRVSPIREVDAETGPPRLSCSDTDRGSEASILSAEEKSGGALDESSSSKAKKRSWKKKLIASAKKLNKGRKSKEADSPGSFRSDGDAADASARRGNAIAADPSDSRRGTANQTEAAVAEEPDSLRGSRRSEGIEEMVAAPVEIDDAQSVVLVVEEEEEEEGRAG

SEQ ID NO: 89543 - protein, 135 aa, Setaria italica
  Transcript Sequence Number=SeqID_23569
  Gene Ontology: Mol. function=protein kinase activity; Cellular component=plasma membrane; Biological process=protein amino acid phosphorylation
  Homolog annotation: Hit_ID=B6SV61; Match level="QueryCoverage=100%, HitCoverage=16%, E-value=1e-44, Identity=72%"; Hit description =Brassinosteroid LRR receptor kinase
  Pfam annotation: Domain name=LRR_1; Domain location=107-129; Score =17.7; E_value=0.048; Accession=PF00560.25; Description=Leucine Rich Repeat
  Pfam annotation: Domain name=LRR_1; Domain location=17-39; Score =15.2; E_value=0.27; Accession=PF00560.25; Description=Leucine Rich Repeat
  Pfam annotation: Domain name=LRR_1; Domain location=58-80; Score=9.1; E_value=5.6; Accession=PF00560.25; Description=Leucine Rich Repeat
  Pfam annotation: Domain name=LRR_1; Domain location=82-105; Score =16.1; E_value=0.15; Accession=PF00560.25; Description=Leucine Rich Repeat
  Pfam module annotation: Pfam domain module=LRR_1::LRR_1::LRR_1::LRR _1; Domain location=107-129::17-39::58-80::82-105
RNALSADIPAEVVASASLLFLDLSYNNLSGPIPDAFAGSTKSPSKLLLNKDSITGSYQLVFLSLAQNSLDGPIPESLTKLAKLQHLDLAGNSKLNGTIPAELGSLADLKALDLSSNDLSGEIPPSLDNLTATLQS

SEQ ID NO: 89544 - protein, 96 aa, Setaria italica
  Transcript Sequence Number=SeqID_23570
IVFPGSNLCLMQNAFLPDQNHNFLRKSGCRIYTYILSNSKSYYCLLKYIVFPNSVAYYCLTKIHITCCPKNQFQSISHNHMYRKRAYCISEAYNES

SEQ ID NO: 89545 - protein, 122 aa, Setaria italica
  Transcript Sequence Number=SeqID_23571
APPRAAGVDADAARIHADSCSRPPLLLAPPFFYETSPSPSPPKERNETHTSARARTNTHARTRAHTPTSARNRGRRGDRGRVGWPAQMKQEEEASLWRKKLVLQSMRVDVFMGYSENPMAPP

SEQ ID NO: 89546 - protein, 198 aa, Setaria italica
  Transcript Sequence Number=SeqID_23572
RTKGRDCQRRFWPSGRPNRHRRAQGDAPKLCDWDNGGSTGGATILQGEWYPSICIIRNQGCRGNRCTRKPWPQDGRGPPPRDTARHLEPSNAGSLLQLRGRPTAGVSRQTWGHQEGGGRRNGLGWQRTPAATRRQPQPARPACRWIYKLVVPARRRLNRWRPPAGGGIQGNGGQPQVAQATRRPPAGRRCSMANRPGR

SEQ ID NO: 89547 - protein, 182 aa, Setaria italica
  Transcript Sequence Number=SeqID_23573
  Gene Ontology: Mol. function=methyltransferase activity; Biological process=methylation
  Homolog annotation: Hit_ID=B9T8H4; Match level="QueryCoverage=40%, HitCoverage=19%, E-value=9e-21, Identity=63%"; Hit description=DNA binding protein, putative
MFDAIICDPPYGVRAGGRKSGGRKIIKGVKGPYTVPDEKRDNHIPSTAPYSLAECVHDLLHLAARMLVMGGRLVFFYPVLRGEDGADSRVASPQFPEHPCFKLIASCEQILSYRYSRVLLTMVKVAPYTEEIERVAEERHREFRENHQKWMEEGNLHSAVFEPAQDAKPDRELKPKYRGKYV

SEQ ID NO: 89548 - protein, 70 aa, Setaria italica
  Transcript Sequence Number=SeqID_23574
  Subcellular localization annotation: CTP_CleavageSite=31; ConfidenceScore=5.06e-01
TVVTLTGPGTRYFICNVTGLCSSGMKLAVTVAESGGGTVPSGASGGAPTPGVGSAVVVVATGVLIKLALF

SEQ ID NO: 89549 - protein, 43 aa, Setaria italica
  Transcript Sequence Number=SeqID_23575
METMAAAAPPQQRTGGIARRLARLLRRKRTPAGAGVAYSVAGD

SEQ ID NO: 89550 - protein, 140 aa, Setaria italica
  Transcript Sequence Number=SeqID_23576
  Homolog annotation: Hit_ID=C3SAE9; Match level="QueryCoverage=70%, HitCoverage=22%, E-value=4e-31, Identity=68%"; Hit description =Sphingosin kinase
  Subcellular localization annotation: CTP_CleavageSite=81; ConfidenceScore=5.51e-01
MSSRNLVRSPVSCSASINGCFTSNTCRSRNYHQHSHNTSLQSFQAYQTLLPQKLRKSAQRNASFFTQRKFIPHCSSDLSTSCREEVPNYLAVSVLQDQANTRQGAVRKVLVILNPNSGFRSTRDVFYKKVQSKLKLSGFM

SEQ ID NO: 89551 - protein, 115 aa, Setaria italica
  Transcript Sequence Number=SeqID_23577
  Gene Ontology: Mol. function=catalytic activity
  Homolog annotation: Hit_ID=Q7XAP3; Match level="QueryCoverage=100%, HitCoverage=16%, E-value=1e-33, Identity=67%"; Hit description =Plastid (P)ppGpp synthase
  Subcellular localization annotation: CTP_CleavageSite=54; ConfidenceScore=5.70e-01
HSSSPLKWRDLHHHHHHSPVSVFQGPSSSSPSRSPPASWLAGRDRDRLFAGFVRNALGSCVDYAPATSPRPEVGAGELAFELDENLAEASPACEPYARELLASAQDRHRIFHEEV

SEQ ID NO: 89552 - protein, 58 aa, Setaria italica
  Transcript Sequence Number=SeqID_23578
  Subcellular localization annotation: CTP_CleavageSite=26; ConfidenceScore=5.04e-01
KQKLRKQPVQTSEHAGRVNTKCHFLSSTLVVSKRALLSFCSTDSLTSYYKVIKLLTRE

SEQ ID NO: 89553 - protein, 120 aa, Setaria italica
  Transcript Sequence Number=SeqID_23579
  Subcellular localization annotation: CTP_CleavageSite=78; ConfidenceScore=5.02e-01
HNAGQLSKPSPPVSSLSDTRKEKTGIAETIQTSVVSPNDQLGGQATRNAGPASVPPAVKSPEDNKTYQEEAARQELPRDQSRAQLAEKKKQGDDATPTTRIGKRKDEDSLANTSDNITEQ

SEQ ID NO: 89554 - protein, 120 aa, Setaria italica
  Transcript Sequence Number=SeqID_23580
  Gene Ontology: Mol. function=translation initiation factor activity; Biological process=cellular metabolic process
  Homolog annotation: Hit_ID=Q338M7; Match level="QueryCoverage=100%, HitCoverage=28%, E-value=8e-39, Identity=75%"; Hit description =Initiation factor 2 subunit family protein, expressed
VSDFVLKLKRRKVEGSHAVARQTAELLRSVVSQHRMGSSANQAAALADAVRAVGEQLIAANPIELAVGNIVRRVLHIIKEEDISSTAVGIEGLSVTVDSDDEFDSEHDDRPALSAAVLAA

SEQ ID NO: 89555 - protein, 63 aa, Setaria italica
  Transcript Sequence Number=SeqID_23581
GDGSFGRDDVAAAVRRVMVEEERKVFSSNATKLKQVLNDQRRQDQYMDELVGYLTRYKDSNSY

SEQ ID NO: 89556 - protein, 76 aa, Setaria italica
  Transcript Sequence Number=SeqID_23582
  Homolog annotation: Hit_ID=Q3LFF8; Match level="QueryCoverage=100%, HitCoverage=27%, E-value=2e-12, Identity=53%"; Hit description=Rid2 protein (Fragment)
SLAEENETLKTQAGRTEAELQQKYEVAVAELELAKAAEQDVRMRLGLVTEEADKSSRRAARASEQLDAAQAASGEM

SEQ ID NO: 89557 - protein, 147 aa, Setaria italica
  Transcript Sequence Number=SeqID_23583
  Gene Ontology: Mol. function=drug transporter activity; Cellular component=membrane; Biological process=multidrug transport
  Homolog annotation: Hit_ID=Q9LUH2; Match level="QueryCoverage=97%, HitCoverage=29%, E-value=2e-45, Identity=56%"; Hit description =Aberrant lateral root formation 5
  Pfam annotation: Domain name=MatE; Domain location=21-147; Score =58.3; E_value=3e-14; Accession=PF01554.10; Description=MatE
AWLGRIVDTEEAQAQLRFAVPMVLTNMAYYGIPLVSVMFSGHLGDVHLAGATLGNSWATVTGYAFVMGLSGALETLCGKAYGARLYRMLGLYLQSSFIMSAAASLLISVLWYFTEPLLLLLRQDPEVSHAAGIFVQAQIPGLFAFSF

SEQ ID NO: 89558 - protein, 127 aa, Setaria italica
  Transcript Sequence Number=SeqID_23584
  Gene Ontology: Cellular component=cytoplasm; Biological process =intracellular protein transport
  Homolog annotation: Hit_ID=Q8RZ91; Match level="QueryCoverage=99%, HitCoverage=14%, E-value=4e-27, Identity=53%"; Hit description =Vacuolar protein sorting-associated protein VPS16-like
  Subcellular localization annotation: CTP_CleavageSite=35; ConfidenceScore=5.11e-01
RGPIAAVRDDSKIVQLHSEPSRRRLLLFSSSGHPIASAPWPPMLPRLHSLAFSSSLSLLGLISDGSLLRFRLPDLQPSPSSSPMPLLPPASGGVADAVFWGGGVAILTEDNRVVVATDIEADDPHPR

SEQ ID NO: 89559 - protein, 83 aa, Setaria italica
  Transcript Sequence Number=SeqID_23585
  Gene Ontology: Cellular component=nucleus; Biological process=cell division
  Homolog annotation: Hit_ID=Q0DQA9; Match level="QueryCoverage=79%, HitCoverage=18%, E-value=1e-24, Identity=86%"; Hit description =Cyclin-D5-1
CVSLAAKMEEYRAPALPEFRADDDEYEFSCVSIRRMELLVLSTLGWRMGGVTPFDYLPCLSSRLRRGNSGAGAGAVIVAAKAA

SEQ ID NO: 89560 - protein, 63 aa, Setaria italica
  Transcript Sequence Number=SeqID_23586
  Subcellular localization annotation: CTP_CleavageSite=45; ConfidenceScore=5.00e-01
HGSTLPQGMQVTSSFDLSTDKRGYMHLGKTLCTLSFSLKMHETYRQMITVEASCLLVLSRRND

SEQ ID NO: 89561 - protein, 65 aa, Setaria italica
  Transcript Sequence Number=SeqID_23587
SVFSAELVEVIVVLGLTLGPLVVIDISTSKSNCHLADIDHLVDFPSLFLTAFIIFHCSCHYLKFL

SEQ ID NO: 89562 - protein, 249 aa, Setaria italica
  Transcript Sequence Number=SeqID_23588
  Gene Ontology: Mol. function=isomerase activity; Cellular component =endoplasmic reticulum; Biological process=cell redox homeostasis
  Homolog annotation: Hit_ID=Q7XRB5; Match level="QueryCoverage=97%, HitCoverage=87%, E-value=1e-119, Identity=66%"; Hit description =OSJNBa0006B20.4 protein
  Pfam annotation: Domain name=ERp29_N; Domain location=2-115; Score= -36.3; E_value=0.012; Accession=PF07912.5; Description=ERp29, N -terminal domain
  Pfam annotation: Domain name=Thioredoxin; Domain location=3-111; Score=146.9; E_value=6.3e-41; Accession=PF00085.12; Description =Thioredoxin
  Pfam module annotation: Pfam domain module=ERp29_N::Thioredoxin; Domain location=2-115::3-111
ERQSLTLDAGNFSDVVAKHPFIVVEFYAPWCGHCKQLAPEYEKAAAVLRKHDPPVVLAKVDAYEERNKEVKDKYQVHAYPTIKIIENGGNNVRGYSGPRDADGIVEYLKKQVGPASIELRSAEEAVHAIGDKGVVLVGIFPKFAGVDYENFMAMAEKKRSDYDFFHTSDASILPRGDQAVKGPVVRLFKPFDELFVDSQDFDKDALDKFIEVSGFPTVVTFDDDPTNHKFLERYYSTPSAKAMLFLNFS

SEQ ID NO: 89563 - protein, 109 aa, Setaria italica
  Transcript Sequence Number=SeqID_23589
  Homolog annotation: Hit_ID=Q2HT93; Match level="QueryCoverage=99%, HitCoverage=12%, E-value=3e-16, Identity=37%"; Hit description=P -type trefoil, putative
SVYGAVGCLLISQQQLSGMMDLRLLALVPWMVVATFLKRSRAYGPAGGVSAALSVVIIMGRRYDETPMAFTVARLVETFIGISCTVMADILFQPGARPSAKAREHLTRC

SEQ ID NO: 89564 - protein, 113 aa, Setaria italica
  Transcript Sequence Number=SeqID_23590
  Subcellular localization annotation: CTP_CleavageSite=53; ConfidenceScore=5.57e-01
PTIVSKHAPPSASSNPSSSPRRRASTIDPAIASKHAPPSASSNPSSSPLGWPPAQAEGSDGDTGGRRLLDWASSPTQDGPCGPGPPSSSPRAPAAGAGGSGGLSGGARYLIDP

SEQ ID NO: 89565 - protein, 73 aa, Setaria italica
  Transcript Sequence Number=SeqID_23591
  Subcellular localization annotation: CTP_CleavageSite=14; ConfidenceScore=5.19e-01
TSLYFMSGYAFFMRTATEPSFEGFFRARLASRQRRLMRARGFDVDRYNALGSAPAPVQSGDPREVLRHVSHVQ

SEQ ID NO: 89566 - protein, 102 aa, Setaria italica
  Transcript Sequence Number=SeqID_23592
  Gene Ontology: Mol. function=protein dimerization activity; Cellular component=nucleus; Biological process=regulation of transcription, DNA-dependent
  Homolog annotation: Hit_ID=B4F9B9; Match level="QueryCoverage=84%, HitCoverage=35%, E-value=4e-40, Identity=93%"; Hit description=IAA17- auxin-responsive Aux/IAA family member
  Pfam annotation: Domain name=AUX_IAA; Domain location=1-102; Score =26.8; E_value=2.7e-11; Accession=PF02309.8; Description=AUXIAA family
GKKVADEEEDDKKVAATPQPAAKAQVVGWPPIRSYRKNTMATTQQKSSKEDAEAKQGQGFLYVKVSMDGAPYLRKIDLKTYKNYKDLSTALEKMFSGFSTGE

SEQ ID NO: 89567 - protein, 86 aa, Setaria italica
  Transcript Sequence Number=SeqID_23593
RARGRSNDCRALYEKTKKSNSFTTNSALWSVLHGFAVNDEVKELHVCYVSFAKSSMDQNSIRLWLRLCTSVIRICVNGLLHCVLLL

SEQ ID NO: 89568 - protein, 167 aa, Setaria italica
  misc_feature (158)..(158): Xaa can be any naturally occurring amino acid
  Transcript Sequence Number=SeqID_23594
  Gene Ontology: Mol. function=isomerase activity; Cellular component =intracellular; Biological process=protein folding
  Homolog annotation: Hit_ID=B6TI78; Match level="QueryCoverage=99%, HitCoverage=67%, E-value=1e-73, Identity=56%"; Hit description =Peptidyl-prolyl isomerase
  Pfam annotation: Domain name=FKBP_C; Domain location=48-145; Score =125.2; E_value=2.1e-34; Accession=PF00254.20; Description=FKBP-type peptidyl-prolyl cis-trans isomer
KKGRPAAGEEGAVPPNATLLVDLELVSWKTVTEIGDDKKILKKVLKEGEGYERPNESAVVKVKITGKLLDGTVFTKKGHDEEPFEFKTDEEEVIDGLDRAVLNMKKGEVALVTIPPEYAFGSTESKQDLAVVPPNSTLVYEVELVSFVKDKESWDLNXEEKIEAAGK

SEQ ID NO: 89569 - protein, 116 aa, Setaria italica
  misc_feature (109)..(109): Xaa can be any naturally occurring amino acid
  Transcript Sequence Number=SeqID_23595
  Gene Ontology: Mol. function=isomerase activity; Cellular component =intracellular; Biological process=protein folding
  Homolog annotation: Hit_ID=Q43207; Match level="QueryCoverage=89%, HitCoverage=18%, E-value=2e-35, Identity=75%"; Hit description=70 kDa peptidyl-prolyl isomerase
WQEERRREHTVQVPPNSTVVYEVELVSFVKDKESWDLNNEEKIEAAGKKKEEGNTLFKLGKYARASKRYEKAAKYIEYDSSFSEDEKKQSKQLKISCNLNMLRDKTKLXKDYKQAE

SEQ ID NO: 89570 - protein, 211 aa, Setaria italica
  Transcript Sequence Number=SeqID_23596
  Gene Ontology: Mol. function=protein dimerization activity; Cellular component=nucleus; Biological process=regulation of transcription, DNA-dependent
  Homolog annotation: Hit_ID=B4F9B9; Match level="QueryCoverage=95%, HitCoverage=80%, E-value=1e-64, Identity=66%"; Hit description=IAA17- auxin-responsive Aux/IAA family member
  Pfam annotation: Domain name=AUX_IAA; Domain location=26-204; Score =130.2; E_value=6.7e-36; Accession=PF02309.8; Description=AUXIAA family
MSPPLELDYIGLSPPPAAAAADATDDLKGTELRLGLPGSESPDRRVAAAAATTLELLPAKGAKRGFSDEAPPPSPAATAGKGKKVADEEEDDKKVAATPQPAAKAQVVGWPPIRSYRKNTMATTQQKSSKEDAEAKQGQGFLYVKVSMDGAPYLRKIDLKTYKNYKDLSTALEKMFSGFSTGEMSRVTLHFYQTQYVIVFHFDVDSVRSTS

SEQ ID NO: 89571 - protein, 153 aa, Setaria italica
  Transcript Sequence Number=SeqID_23597
  Gene Ontology: Mol. function=electron carrier activity; Biological process=electron transport chain
  Homolog annotation: Hit_ID=B6TFN3; Match level="QueryCoverage=61%, HitCoverage=44%, E-value=3e-33, Identity=75%"; Hit description=Blue copper protein
  Pfam annotation: Domain name=Cu_bind_like; Domain location=35-116; Score=147.0; E_value=5.9e-41; Accession=PF02298.9; Description =Plastocyanin-like domain
MASGGASLALAALLLVSCASAAAATKYTVGDTTGWTTSGDYATWASDKKFKIGDSLVFNYAGGAHTVDEVSAADYAACSSSKALSSDSAGTTTVTLKTAGKHYFICGVAGHCSSGMKLVVDVAAAKAATPSPAPAPAVAPAPDAADTNPGRPP

SEQ ID NO: 89572 - protein, 53 aa, Setaria italica
  Transcript Sequence Number=SeqID_23598
IMLLCICYRLFLSSAKRLFIVRNPTSRDKGNCKMDLYATCFVICVPSLTTIHV

SEQ ID NO: 89573 - protein, 81 aa, Setaria italica
  Transcript Sequence Number=SeqID_23599
LVAYAEGAYHYGESASCPTLHPSSTSTARGALQALGASFSCAHLKEHLATSYKLQYSGGGAHAPGSSPPMGLQAPPLHVGQ

SEQ ID NO: 89574 - protein, 58 aa, Setaria italica
  Transcript Sequence Number=SeqID_23600
  Subcellular localization annotation: CTP_CleavageSite=29; ConfidenceScore=5.56e-01
RTLALFSSPCQRTFPLKTPPTLPPILLASASLASILSTTTAPSLSSPPRALISPSTRI

SEQ ID NO: 89575 - protein, 99 aa, Setaria italica
  misc_feature (65)..(65): Xaa can be any naturally occurring amino acid
  Transcript Sequence Number=SeqID_23601
  Gene Ontology: Mol. function=transferase activity
  Homolog annotation: Hit_ID=B6UFI8; Match level="QueryCoverage=100%, HitCoverage=14%, E-value=2e-32, Identity=66%"; Hit description =Glycosyltransferase
IQVVPLGPMVFVASYFRGPSMDMGLRYLEYQIAPEESTLLDKYPRDHPVIADPGSIKAKDWVSFXGVYLFEQDVRLDMKRFRPVLKKALSRLRAKPKSN

SEQ ID NO: 89576 - protein, 304 aa, Setaria italica
  Transcript Sequence Number=SeqID_23602
  Gene Ontology: Mol. function=phosphotransferase activity, alcohol group as acceptor; Cellular component=chromosome; Biological process= response to DNA damage stimulus
  Homolog annotation: Hit_ID=Q5Z987; Match level="QueryCoverage=96%, HitCoverage=10%, E-value=1e-131, Identity=81%"; Hit description =Serine/threonine-protein kinase ATR
  Pfam annotation: Domain name=UME; Domain location=81-187; Score=80.3; E_value=7e-21; Accession=PF08064.5; Description=UME (NUC010) domain
SSPALLFFIEDGQHLPSVLQFYKNETGTDSKEIFAAALPSLLDEIVCFAVESDQSETDIRTAKISPTIQNIARILTGNETLPEFLKNDFVRLLNSIDKKMLRSDDMKLQKQALQRIRKLVEMMGPYLSTHTPKIMVLLIFAIDKEGLQMDGLDVLHFFVKQLAEVSPNSIKYVMSQVVAAFIPSLERYKGCPAHLSKTVEILEELVVKNNSLLKQHIRELPLLPSLPSLSEVNKVIQEARGLMTLQDHLKDSVNGLNHESLNVRYMVACELSKLFNARREDMTALIIGEDIADLDVISFFNYGL

SEQ ID NO: 89577 - protein, 134 aa, Setaria italica
  Transcript Sequence Number=SeqID_23603
KAPAFFSLVDLSITAFLFIIFFYEEIWEFVVFLLSNWFMVSVLCSFRAKYDWPRSPTFGGAFRRLLWLRSRMSHAPLRVKQFSMLNLRWPPHLPLFSPLFLAIRTEGVPNSLKQSIMDCLVEHDRHPNNTPLTK

SEQ ID NO: 89578 - protein, 83 aa, Setaria italica
  Transcript Sequence Number=SeqID_23604
PELNFSPWIQTNLRRIKSTHVKHAHFIRRKKGLREHISLGTSILSQGRNLLLPPDPITAAAAVMGSGEGEDYAPARGSMCPVK

SEQ ID NO: 89579 - protein, 68 aa, Setaria italica
  Transcript Sequence Number=SeqID_23605
NTETSSCLLQALHFLHKLTLLEQTTWQPKQQLEINYTARFRIRVNRAAQWNRREDNVHKRLLVTGANC

SEQ ID NO: 89580 - protein, 124 aa, Setaria italica
  Transcript Sequence Number=SeqID_23606
SYSHLEEIQLQFKFTQHQPYSTKRVVTIEITTTWQPKQQLEINYTARFRIRVNRAAQWNRREDNVHKRLLVTGANAGEGRVLGEEPALLYAKSAMQATTGSATVIPAFFPAQTAHPKIRNFTGP

SEQ ID NO: 89581 - protein, 87 aa, Setaria italica
  Transcript Sequence Number=SeqID_23607
  Gene Ontology: Mol. function=calcium ion binding; Cellular component =integral to membrane
  Homolog annotation: Hit_ID=B6U1M5; Match level="QueryCoverage=91%, HitCoverage=14%, E-value=5e-35, Identity=82%"; Hit description =Calcium ion binding protein
  Pfam annotation: Domain name=efhand; Domain location=48-76; Score =17.2; E_value=0.069; Accession=PF00036.24; Description=EF hand
  Pfam annotation: Domain name=efhand; Domain location=8-36; Score =11.3; E_value=1.3; Accession=PF00036.24; Description=EF hand
  Pfam module annotation: Pfam domain module=efhand::efhand; Domain location=48-76::8-36
CHEPCFVLTRRLFHKIDMDESRTLSRSELHALIVGINFEELDFDKMDAVNKVMDDFDTSRNDVVEEEEFVQGMKKWLNEAKRSVPAG

SEQ ID NO: 89582 - protein, 117 aa, Setaria italica
  Transcript Sequence Number=SeqID_23608
  Gene Ontology: Mol. function=calcium ion binding; Cellular component =integral to membrane
  Homolog annotation: Hit_ID=B6U1M5; Match level="QueryCoverage=84%, HitCoverage=17%, E-value=1e-48, Identity=96%"; Hit description =Calcium ion binding protein
  Pfam annotation: Domain name=Na_Ca_ex; Domain location=4-114; Score =9.0; E_value=0.0028; Accession=PF01699.16; Description=Sodiumcalcium exchanger protein
GRDVGGVGEVVDGVHERSANATHIPSFFISFIALPLATNSSEAVSAIIFASRKKQRTCSLTFSEVYGGVTMNNTLCLGVFLALIYFRNLTWDFSSEVLIILVVCVVMALFTSFRTTF

SEQ ID NO: 89583 - protein, 575 aa, Setaria italica
  Transcript Sequence Number=SeqID_23609
  Gene Ontology: Mol. function=calcium ion binding; Cellular component =integral to membrane
  Homolog annotation: Hit_ID=B6U1M5; Match level="QueryCoverage=100%, HitCoverage=100%, E-value=0.0, Identity=78%"; Hit description =Calcium ion binding protein
  Pfam annotation: Domain name=Na_Ca_ex; Domain location=431-565; Score= 72.4; E_value=1.7e-18; Accession=PF01699.16; Description =Sodiumcalcium exchanger protein
  Pfam annotation: Domain name=Na_Ca_ex; Domain location=87-257; Score =24.8; E_value=0.00031; Accession=PF01699.16; Description =Sodiumcalcium exchanger protein
  Pfam annotation: Domain name=efhand; Domain location=300-328; Score =15.0; E_value=0.31; Accession=PF00036.24; Description=EF hand
  Pfam annotation: Domain name=efhand; Domain location=340-368; Score =17.2; E_value=0.069; Accession=PF00036.24; Description=EF hand
  Pfam module annotation: Pfam domain module=Na_Ca_ex::Na_Ca _ex::efhand::efhand; Domain location=431-565::87-257::300-328::340-368
MAALRRQHRRAFPLVPLLISLLGCAAYGRLISDGGAAPSAPLLASVIRLASPAVAAAVEGKCEQSYGFLPCTTTVLGNLFLILVYGFLMFKAATYLSSGSELLLEIMGPGLVGGLLLPILGALPDALLVLVSGLSGSKETAQSQVLIGMGLLAGSTVFLLTLLWGTCVVVGKCDAGPNGEAVDLTNTKGFSLTGTCITTDVQTSYAARIMGLSVIPFVIAQFPKMLKTHHGQRLAVLLALIVSFLLVLSYCVYQVFQPWIQRRKLAYAKHKHVISGILRHAQMQSLGRLLNEDGTPNEDVIRKLFHKIDMDESRTLSRSELHALIVGINFEELDFDKMDAVNKVMDDFDTSRNDVVEEEEFVQGMKKWLNEAKRSVPAGGAFSHKFINDFHERTRQEHDQLIDRSDEAVESVENPGWCITKAVALLLLGAAIAAAFADPLVDTVHNFSNATHIPSFFISFIALPLATNSSEAVSAIIFASRKKQRTCSLTFSEVYGGVTMNNTLCLGVFLALIYFRNLTWDFSSEVLIILVVCVVMALFTSFRTTFPLWTCLVAYVLYPLSLVIVYILDYVFGWS

SEQ ID NO: 89584 - protein, 62 aa, Setaria italica
  Transcript Sequence Number=SeqID_23610
  Gene Ontology: Mol. function=serine-type carboxypeptidase activity; Biological process=proteolysis
  Homolog annotation: Hit_ID=B6TG69; Match level="QueryCoverage=77%, HitCoverage=10%, E-value=7e-12, Identity=62%"; Hit description =Serine carboxypeptidase 1
QDSWTKVSNVIFLDSPVGAGFSYSDTDRGYVSSDTKAVNQILIFLRKWLSLAINLFFNDQKP

SEQ ID NO: 89585 - protein, 43 aa, Setaria italica
  Transcript Sequence Number=SeqID_23611
  Gene Ontology: Mol. function=peptidase activity
GKVKILRDPGRFQDSKSQALWPKAQKVGSKGGQSQIDHFFGKR

SEQ ID NO: 89586 - protein, 241 aa, Setaria italica
  Transcript Sequence Number=SeqID_23612
  Homolog annotation: Hit_ID=B6TWE7; Match level="QueryCoverage=98%, HitCoverage=71%, E-value=3e-68, Identity=56%"; Hit description=PHI-1
  Pfam annotation: Domain name=Phi_1; Domain location=1-237; Score =357.6; E_value=2.3e-104; Accession=PF04674.4; Description=Phosphate -induced protein 1 conserved region
RPSVAAWWRTVRLYTDQTDANVSAAVSLGAEKSDARMSRGARLSRMDIQAVVRDAVGARTRPLPVDSGGVYLVLTSPEVVVEDFCGQVCGFHYFTFPSVVGYTLPYAWVGNSARRCPEVCAYPFAIPAYVHGRRPESPPNADVGVDGMVSVIAHELAELASNPLANAWYAGTDPSFPTEIADLCEGIYGTGGGGAYTGQLLTDARSGAAYNVNGAGGRRFLVQWVWNPVLSYCSGPNALDQ

SEQ ID NO: 89587 - protein, 138 aa, Setaria italica
  Transcript Sequence Number=SeqID_23613
  Gene Ontology: Mol. function=metal ion binding; Cellular component =integral to membrane; Biological process=ubiquitin-dependent protein catabolic process
  Homolog annotation: Hit_ID=Q7X843; Match level="QueryCoverage=68%, HitCoverage=27%, E-value=4e-19, Identity=47%"; Hit description=RING -H2 finger protein ATL3I
  Pfam annotation: Domain name=PHD; Domain location=31-76; Score=5.7; E_ value=0.0063; Accession=PF00628.21; Description=PHD-finger
  Pfam annotation: Domain name=zf-C3HC4; Domain location=32-73; Score =40.3; E_value=7.5e-09; Accession=PF00097.17; Description=Zinc finger, C3HC4 type (RING finger)
  Pfam module annotation: Pfam domain module=PHD::zf-C3HC4; Domain location=31-76::32-73
PEFAYAELSGAASAAAAAIRKGKEKAARPFDCAVCLSEFADHDRLRLLPACGHAFHVACIDVWLRSSATCPLCRTKLSAHHLAAADAPSAGPDAEEHKQQASDEAAASSVVLPVRLGRFTSADGDGDAEASTSDSSRI

SEQ ID NO: 89588 - protein, 51 aa, Setaria italica
  Transcript Sequence Number=SeqID_23614
MLHRLFRPPPLPLKLAFTISLAVSFSVSCCADPLPTVIVPRIGHGPGPGPA

SEQ ID NO: 89589 - protein, 91 aa, Setaria italica
  misc_feature (1)..(7): Xaa can be any naturally occurring amino acid
  Transcript Sequence Number=SeqID_23615
XXXXXXXVFHVYHYRNEKGYTCRAAAANCTIYINPEVERQSCFRGVSGCYLELSFKASGVEVPSEFHPPPPPLPLGACPRPRRSLIASSSS

SEQ ID NO: 89590 - protein, 118 aa, Setaria italica
  misc_feature (99)..(99): Xaa can be any naturally occurring amino acid
  Transcript Sequence Number=SeqID_23616
  Gene Ontology: Cellular component=integral to membrane
  Homolog annotation: Hit_ID=B6U032; Match level="QueryCoverage=100%, HitCoverage=34%, E-value=1e-58, Identity=89%"; Hit description=Mpv17 / PMP22 family protein
  Pfam annotation: Domain name=Mpv17_PMP22; Domain location=35-102; Score=80.2; E_value=7.6e-21; Accession=PF04117.4; Description=Mpv17 PMP22 family
QALFPFKDWWVVPAKVAFDQTIWSAIWNSIYFVVLGFLRLESPTTIYSELKSTFWPMLTAGWKLWPFAHLVTYGVIPVEQRLLWVDCVELIWVTILSTXEARNSDGTSTPDALKDNSR

SEQ ID NO: 89591 - protein, 303 aa, Setaria italica
  misc_feature (45)..(45): Xaa can be any naturally occurring amino acid
  Transcript Sequence Number=SeqID_23617
  Gene Ontology: Mol. function=protein binding; Cellular component =integral to membrane
  Homolog annotation: Hit_ID=B6U032; Match level="QueryCoverage=100%, HitCoverage=86%, E-value=1e-151, Identity=86%"; Hit description =Mpv17 / PMP22 family protein
  Pfam annotation: Domain name=Mpv17_PMP22; Domain location=215-282; Score=81.6; E_value=2.8e-21; Accession=PF04117.4; Description=Mpv17 PMP22 family
EADVLPGPGGEAVPGRLEEPRDEPLGGSQLDIGGLAFQGDVGGGXFAGGGGGAGSGASGGGDGNKALDRAINTAIVLGASTYALTKLLTVDQDYWHGWTIFEILRYMPEHNWSAYEEALKANPVLAKMMISGVVYSLGDWIAQCYEGKPIFDFDRARMFRSGLVGFTLHGSLSHYYYHVCEALFPFKDWWVVPAKVAFDQTIWSAIWNSIYFVVLGFLRLESPTTIYSELKSTFWPMLTAGWKLWPFAHLVTYGVIPVEQRLLWVDCVELIWVTILSTYSNEKSEARNSDGTSTPDALKDNSR

SEQ ID NO: 89592 - protein, 131 aa, Setaria italica
  Transcript Sequence Number=SeqID_23618
LEGGQEPLEQDCAGDHEGGDQEDDDEGQTDESANAPSAPPPNALLLMRCRSAPAKGLSMSRGETGGLLAGDVEQEKPTADAAPGDGETEDREELVFMSSAPGFLKLSLDIAKETWVVGGVDPLAKSRSSRR

SEQ ID NO: 89593 - protein, 113 aa, Setaria italica
  Transcript Sequence Number=SeqID_23619
  Gene Ontology: Mol. function=oxidoreductase activity; Biological process=oxidation reduction
  Homolog annotation: Hit_ID=Q6EQL4; Match level="QueryCoverage=99%, HitCoverage=29%, E-value=5e-36, Identity=62%"; Hit description =Iron/ascorbate-dependent oxidoreductase-like
GRKTELWPANPPSFRGTLHKYSMEMTGLARRLLRFMAIDLGVSQEALLDAFFSGDAEKGQSMGMHHYPPCRHPEKVLGIPPHTDGLGLTVLLHADDTPGLLIKRGGRWFPVRP

SEQ ID NO: 89594 - protein, 207 aa, Setaria italica
  Transcript Sequence Number=SeqID_23620
  Gene Ontology: Mol. function=oxidoreductase activity; Biological process=oxidation reduction
  Homolog annotation: Hit_ID=B6TBV5; Match level="QueryCoverage=99%, HitCoverage=53%, E-value=4e-66, Identity=66%"; Hit description =Leucoanthocyanidin dioxygenase
  Pfam annotation: Domain name=2OG-FeII_Oxy; Domain location=57-157; Score=112.4; E_value=1.5e-30; Accession=PF03171.12; Description=2OG -Fe(II) oxygenase superfamily
ANPPTLRHALDRYSVEMTDLARRVLGFMAADLGVSRDALLGAFFSRDDHDDDTLKPKMQSVAMHHYPPCHHVDKVLGIAPHTDTLGLTFLLHADDTPGLQIKRGGRWFPVRPLPGAFVVNVGDILNVLTNGAYASVEHRVVPDAERGRTTVVVFQDASVDGMVKPFPELLGGDEAQARYNSIGKLEFTEGHFRALGEGTRFLESLKK

SEQ ID NO: 89595 - protein, 188 aa, Setaria italica
  Transcript Sequence Number=SeqID_23621
  Homolog annotation: Hit_ID=A6YRS1; Match level="QueryCoverage=100%, HitCoverage=40%, E-value=2e-84, Identity=85%"; Hit description=R -interacting factor 1
  Pfam annotation: Domain name=ENT; Domain location=51-124; Score =155.6; E_value=1.5e-43; Accession=PF03735.6; Description=ENT domain
  Subcellular localization annotation: CTP_CleavageSite=40; ConfidenceScore=5.13e-01
MEYRPSDSSGTDDDLPPSYPNSRSNRGSGRVSGNGRAIVPASSYARAPTDMEAQIQQLEQEAYCSVLRAFKAQSDAITWEKEGLITELRKELRVSDKAHRELLNRVNNDNIICSIREWRSTGGLQASLSNNPQPIHDPVPSPTTSGRKRQKTSQSVPALPAPPPAMHSQQLATPTQPSSSTARKAVPP

SEQ ID NO: 89596 - protein, 59 aa, Setaria italica
  Transcript Sequence Number=SeqID_23622
  Homolog annotation: Hit_ID=A6YRS1; Match level="QueryCoverage=89%, HitCoverage=11%, E-value=8e-24, Identity=88%"; Hit description=R -interacting factor 1
  Pfam annotation: Domain name=LBR_tudor; Domain location=4-52; Score =9.7; E_value=0.067; Accession=PF09465.2; Description=Lamin-B receptor of TUDOR domain
HPLIGRKVMIRWPEDNSFYEAVISDYNADTGLYALVYDMNTANETWEWVDLKEVHGHYL

SEQ ID NO: 89597 - protein, 435 aa, Setaria italica
  misc_feature (95)..(95): Xaa can be any naturally occurring amino acid
  misc_feature (175)..(175): Xaa can be any naturally occurring amino acid
  Transcript Sequence Number=SeqID_23623
  Homolog annotation: Hit_ID=A6YRS1; Match level="QueryCoverage=98%, HitCoverage=92%, E-value=1e-172, Identity=74%"; Hit description=R -interacting factor 1
  Pfam annotation: Domain name=ENT; Domain location=22-104; Score =127.9; E_value=3.2e-35; Accession=PF03735.6; Description=ENT domain
  Pfam annotation: Domain name=LBR_tudor; Domain location=215-270; Score=14.3; E_value=0.012; Accession=PF09465.2; Description=Lamin-B receptor of TUDOR domain
  Pfam module annotation: Pfam domain module=ENT::LBR_tudor; Domain location=22-104::215-270
TGRNYSSPITTDTSTARAPTDMEAQIQQLEQEAYCSVLRAFKAQSDAITWEKEGLITELRKELRVSDKAHRELLNRVNNDNRLICSILNSFLCIXREWRSTGGLQASLSNNPQPIHDPVPSPTTSGRKRQKTSQSVPALPAPPPAMHSQQLATPTQPSSSTARKAVPPGPKGKNXKPGHKVPGGSASKPMSSAAGPSGRGPHMNRNFPGAAEAQAQNVHPLIGRKVMIRWPEDNSFYEAVISDYNADTGLYALVYDMNTANETWEWVDLKEMGPEDIRWKEDEISGIDLKMYLQGRGPPTSGGRKPGRGGPMPGPGRGRGFQKNMSKKDFPPPQNGVGKRSSDDIDILHTESLIKEVEKVFSVNNPDPQEVEKAKKALKEQEQSLIDAIARLAEASDGESDGHNHGRRNALYAGNQHQANYVDAMPVDGDQADAM

SEQ ID NO: 89598 - protein, 538 aa, Setaria italica
  Transcript Sequence Number=SeqID_23624
  Gene Ontology: Mol. function=kinase activity; Cellular component =plasma membrane
  Homolog annotation: Hit_ID=UPI0001A8238C; Match level="QueryCoverage =94%, HitCoverage=94%, E-value=0.0, Identity=76%"; Hit description =plant synaptotagmin
  Pfam annotation: Domain name=C2; Domain location=262-346; Score =111.0; E_value=4e-30; Accession=PF00168.22; Description=C2 domain
  Pfam annotation: Domain name=C2; Domain location=421-503; Score=55.7; E_value=1.8e-13; Accession=PF00168.22; Description=C2 domain
  Pfam module annotation: Pfam domain module=C2::C2; Domain location =262-346::421-503
MGFFSTVLGFFGFGVGVTLGLGIGYYLFIYYQPTDVKHPVITALVELDTKSLENMLPEIPLWIKNPDFDRIDWLNKFIETMWSYLDKAICKMAKEIAKPIIAENTAKYKIDSVEFETLTLGSLPPTFQGMKVYTTDEQELIMEPSVKWAGNPNITVVVKAYGLKATAQVIDLQVFALPRITLRPLVPSFPCFAKILVSLMEKPHVDFGLKLLGADLMAIPGLYGFVQETIKTQVANMYLWPKVLEVQIMDPAKAQKKPVGILFVNVVQAVKLTKKDLLGKSDPYVKLKLTEDKLPSKKTSVKRSNLNPEWNEEFKIVVKDPESQALELTVYDWEQVGKHDRIGMNVIPLKDITPDETKSITLNLLKSMDANDPANEKFRGQLTVDLTYKPFKDGDSDVETSDESGVIEKAPDGMPEGGGLLVVIVHEAQDVEGKHHTNPYVRILFKGEERKTKHIKKNRDPRWEQEFEFVCEEPPINDKMQVEVISRPPSLGIHSKESLGYVVISLGDVINNTRINEKYHLIDSKNGRIQLELQWRTS

SEQ ID NO: 89599 - protein, 130 aa, Setaria italica
  misc_feature (73)..(73): Xaa can be any naturally occurring amino acid
  Transcript Sequence Number=SeqID_23625
  Gene Ontology: Mol. function=transferase activity, transferring glycosyl groups; Biological process=metabolic process
  Homolog annotation: Hit_ID=B6U7W5; Match level="QueryCoverage=90%, HitCoverage=23%, E-value=6e-56, Identity=88%"; Hit description =Cytokinin-O-glucosyltransferase 2
QHEAVGVFLTHSGWNSTLESLCAGVPMLSWPFFAEQQTNCRYKRTEWGVGMEIGGEVQRDEVAVIIKEAMEGXKGKEMRRRAEEWKEKAVKVTLPGAPAETNLNRVIDEVLALQEEGKNFSRRVIVLFIL

SEQ ID NO: 89600 - protein, 239 aa, Setaria italica
  misc_feature (138)..(138): Xaa can be any naturally occurring amino acid
  Transcript Sequence Number=SeqID_23626
  Gene Ontology: Mol. function=structural constituent of ribosome; Cellular component=intracellular; Biological process=translation
  Homolog annotation: Hit_ID=B9RXF3; Match level="QueryCoverage=98%, HitCoverage=79%, E-value=1e-108, Identity=80%"; Hit description=50S ribosomal protein L4, putative
  Pfam annotation: Domain name=Ribosomal_L4; Domain location=41-232; Score=176.1; E_value=1e-49; Accession=PF00573.14; Description =Ribosomal protein L4L1 family
EVLIPPELLSSQTVGTPKRTIGQYEDLVARVTNFHHVALGYMVLDGDVFDVPIRKDIVHRVVRWQLAKRQQGTHSTKTISEVSGTGRKPYKQKGTGRARHGTLRGPQFRGGATMHGPKPRSHAIKLQKKVRRLGLKIXLSARTAEGRNLFVFEDLEVPSHKTKNIVNYISQMDNTKKVLLVDGGDIDKKLKLATQNLHYVNVLPSIGLNVYSILQHDTLVMTRDAVNRIVERMHTPINR

SEQ ID NO: 89601 - protein, 77 aa, Setaria italica
  misc_feature (14)..(14): Xaa can be any naturally occurring amino acid
  misc_feature (50)..(50): Xaa can be any naturally occurring amino acid
  Transcript Sequence Number=SeqID_23627
  Gene Ontology: Mol. function=aspartic-type endopeptidase activity; Cellular component=extracellular region; Biological process =proteolysis
  Homolog annotation: Hit_ID=Q94D20; Match level="QueryCoverage=100%, HitCoverage=15%, E-value=6e-29, Identity=80%"; Hit description =Nucleoid DNA-binding protein cnd41-like
FDPRRSRSYATVPXAAPLCRRLDSGGCNKRRGSCLYQVAYGDGSITAGDXATETLSFARGARVPRVAIGCGHDNEGL

SEQ ID NO: 89602 - protein, 174 aa, Setaria italica
  Transcript Sequence Number=SeqID_23628
  Gene Ontology: Mol. function=sequence-specific DNA binding; Cellular component=cytoplasm; Biological process=multicellular organismal development
  Homolog annotation: Hit_ID=B9RE89; Match level="QueryCoverage=79%, HitCoverage=54%, E-value=8e-57, Identity=74%"; Hit description =Translin associated factor X, putative
  Pfam annotation: Domain name=Translin; Domain location=3-150; Score =153.8; E_value=5.1e-43; Accession=PF01997.8; Description=Translin family
HWKVSKELQGTDFWKLRRAYTFGVQEYVEAATLCRFCKTGTLLTLAEINDSLLALSDKSVEPLQINVLDYLLGVADLSGELMRLAIGRISDGEVEYAKKICAFVRDIYRELTLVVPLMDDNNEMKKKMEVMLQSVVKIENACFSVHVRGSEYIPLLGSSADPDYSFFGASDFDQ

SEQ ID NO: 89603 - protein, 45 aa, Setaria italica
  Transcript Sequence Number=SeqID_23629
YRPKCPIVNASFSTGRCYRLVLNSTPRVLVLLSGTIKPPRIENLY

SEQ ID NO: 89604 - protein, 363 aa, Setaria italica
  misc_feature (101)..(101): Xaa can be any naturally occurring amino acid
  misc_feature (135)..(135): Xaa can be any naturally occurring amino acid
  misc_feature (167)..(167): Xaa can be any naturally occurring amino acid
  Transcript Sequence Number=SeqID_23630
  Gene Ontology: Cellular component=integral to membrane
  Homolog annotation: Hit_ID=B6SWN8; Match level="QueryCoverage=100%, HitCoverage=57%, E-value=1e-138, Identity=70%"; Hit description=C4 -dicarboxylate transporter/malic acid transport protein
  Pfam annotation: Domain name=C4dic_mal_tran; Domain location=196-363; Score=8.2; E_value=7.1e-06; Accession=PF03595.9; Description=C4 -dicarboxylate transportermalic acid transport protein
  Subcellular localization annotation: CTP_CleavageSite=46; ConfidenceScore=5.03e-01
PGYRSVQPGSISLPASPSGFGVPVAIPVGPNGGGDTDGLRRQAMANAAARGEAQQPQEKQGGGSVRFAHQPDKVVFRSQPIPGGQPAGPGSARAGRAGSRXSMSRDKRYDSFKTFSGKLERQLTHLAGAAEVREXGEDGNGDDDDDAITASRSTSLPKVDRFFAALXGPELDKLKSSEELVLPSDKTWPFLLRFPVSAFGICLGVSSQAILWKTIATSAPTMFLHVGTKVNLVLWCISVALMCATAAVYALKIAFFFEAVRREYYHPIRVNFFFAPWIACLFLAIGVPPSVATELPRWLWYALMAPVLILELKIYGQWMSGGQRRLSKVANPSNHLSVVGNFVGALLGASMGLKEGPIFFFSV

SEQ ID NO: 89605 - protein, 152 aa, Setaria italica
  Transcript Sequence Number=SeqID_23631
  Homolog annotation: Hit_ID=Q01IX7; Match level="QueryCoverage=79%, HitCoverage=47%, E-value=4e-37, Identity=68%"; Hit description =OSIGBa0106G07.7 protein
  Subcellular localization annotation: CTP_CleavageSite=24; ConfidenceScore=5.37e-01
MLRLLTAYSPLRLPSTRGSARRRSAAAAAGTITMRDRSKNRKPTQRGRYLSTEAIQAVQSLKRAALRSGSAASAAAAVEPKLRRLLKADMVAVFRELAAQGEALLALQVFDEIRKEHWYRPRLLWYVDLVTVLASKGLQSEVDKACSYLKRE

SEQ ID NO: 89606 - protein, 124 aa, Setaria italica
  Transcript Sequence Number=SeqID_23632
  Homolog annotation: Hit_ID=A5YBP9; Match level="QueryCoverage=35%, HitCoverage=9%, E-value=1e-09, Identity=61%"; Hit description=ALMT3
MAGAAAHQQTAADGGAEWRVAVPAALHAEHENTKGSRRACCAPALSSLLFSWAAAPMHRTVGFAAAAWRWLLSLAAAARDRIFGVARTAWKIGADDPRKVAHGFKMALALTLCSVFYYVQPLYV

SEQ ID NO: 89607 - protein, 46 aa, Setaria italica
  Transcript Sequence Number=SeqID_23633
  Pfam annotation: Domain name=A_thal_3526; Domain location=16-46; Score=24.1; E_value=0.00019; Accession=PF09713.2; Description=Plant protein 1589 of unknown function (A
MALGDNSNPASYIHTVQHLIERCMTFGMSMEECMEALAKRADVQPV

SEQ ID NO: 89608 - protein, 79 aa, Setaria italica
  misc_feature (22)..(22): Xaa can be any naturally occurring amino acid
  Transcript Sequence Number=SeqID_23634
  Gene Ontology: Mol. function=potassium ion transmembrane transporter activity; Cellular component=membrane; Biological process=potassium ion transport
  Homolog annotation: Hit_ID=Q653B6; Match level="QueryCoverage=69%, HitCoverage=6%, E-value=7e-21, Identity=87%"; Hit description =Potassium transporter 18
KYQRWLEGHQLRKNVILIIVLXGTCMAVGDGILTPAISVLSATGGIQVEEPKMRNGTCETWKLVFFSAFISIYLVLSYV

SEQ ID NO: 89609 - protein, 192 aa, Setaria italica
  misc_feature (26)..(26): Xaa can be any naturally occurring amino acid
  misc_feature (66)..(66): Xaa can be any naturally occurring amino acid
  Transcript Sequence Number=SeqID_23635
  Gene Ontology: Mol. function=potassium ion transmembrane transporter activity; Cellular component=membrane; Biological process=potassium ion transport
  Homolog annotation: Hit_ID=Q653B6; Match level="QueryCoverage=93%, HitCoverage=22%, E-value=3e-79, Identity=81%"; Hit description =Potassium transporter 18
  Pfam annotation: Domain name=K_trans; Domain location=2-191; Score= -404.4; E_value=1.9e-06; Accession=PF02705.8; Description=K+ potassium transporter
KSLAASIKRWLEGHQLRKNVILIIVXFGTCMAVGDGILTPAISVLSATGGIQVEEPKMRNGTCETXNVVVIVSVEILIGLFSMQHFGTDKVSWLFAPIVLVWFILIGILGAVNIYKYDRSVLKAFNPIYVYRYFKRGRTSWASLGGIMLSITGTEALFADLSYFPVQAIQVQVVACLSLLAMNFLMRTKEPF

SEQ ID NO: 89610 - protein, 208 aa, Setaria italica
  Transcript Sequence Number=SeqID_23636
  Gene Ontology: Mol. function=potassium ion transmembrane transporter activity; Cellular component=membrane; Biological process=potassium ion transport
  Homolog annotation: Hit_ID=Q653B6; Match level="QueryCoverage=100%, HitCoverage=25%, E-value=1e-107, Identity=89%"; Hit description =Potassium transporter 18
  Pfam annotation: Domain name=K_trans; Domain location=50-208; Score= -408.6; E_value=2.7e-06; Accession=PF02705.8; Description=K+ potassium transporter
METTSSTNEDTGRGTMWELERNLDQPMDAEAGRLRNMYREKTYPTLVLLQLAFQSLGVVFGDLGTSPLYVFYNIFPHEIEDTEQVIGALSLIIYSLTLIPLVKYVFIVLRANDNGQGGTFALYSLLCRHAKINTIPNQHRTDEDLTTYSRHTYDEKSLAASIKRWLEGHQLRKNVILIIVLFGTCMAVGDGILTPAISVLSATGGIQV

SEQ ID NO: 89611 - protein, 64 aa, Setaria italica
  Transcript Sequence Number=SeqID_23637
  Gene Ontology: Mol. function=binding
  Homolog annotation: Hit_ID=B9SQS9; Match level="QueryCoverage=92%, HitCoverage=38%, E-value=8e-16, Identity=61%"; Hit description=O -linked n-acetylglucosamine transferase, ogt, putative
LRVQFQVKGDYRRAEEYYSRAILADPDDGELLSEYAKLVWDVHRDEERASSYFERAAKASPENR

SEQ ID NO: 89612 - protein, 320 aa, Setaria italica
  Transcript Sequence Number=SeqID_23638
  Gene Ontology: Mol. function=binding
  Homolog annotation: Hit_ID=B9SQS9; Match level="QueryCoverage=31%, HitCoverage=47%, E-value=2e-35, Identity=63%"; Hit description=O -linked n-acetylglucosamine transferase, ogt, putative
  Pfam annotation: Domain name=TPR_2; Domain location=206-240; Score =13.7; E_value=0.66; Accession=PF07719.9; Description=Tetratricopeptid e repeat
  Pfam annotation: Domain name=TPR_2; Domain location=241-275; Score =3.6; E_value=12; Accession=PF07719.9; Description=Tetratricopeptide repeat
  Pfam module annotation: Pfam domain module=TPR_2::TPR_2; Domain location=206-240::241-275
GSCPQSPAVSSPAVHFPESPAAAYHPPAISCHLAGHGSGSDHERSLGAGSGMRRTSSEGNLSSLASRADDHHHLLPPPGKCAPRPRPVPLETIQSFTDRRASTDDEDEEEEDDDDFEAAERELSFGQFSGFVGGGSTYSHEHPLFLARGLGIDRLGSGLLSADDGVGGFGGSGGGGSNLVTSGNGGDRSGIEMHYKKMIEEDPCNGLFLRNYAQFLYQVKGDYRRAEEYYSRAILADPDDGELLSEYAKLVWDVHRDEERASSYFERAAKASPENSHVLAAHAAFLWDTEDADVPEESGIGALGYVGFAPAHSSLASATT

SEQ ID NO: 89613 - protein, 95 aa, Setaria italica
  Transcript Sequence Number=SeqID_23639
  Gene Ontology: Mol. function=hydrolase activity, hydrolyzing O -glycosyl compounds; Cellular component=extracellular region; Biological process=carbohydrate metabolic process
  Homolog annotation: Hit_ID=Q0J360; Match level="QueryCoverage=100%, HitCoverage=15%, E-value=2e-29, Identity=60%"; Hit description=Beta -fructofuranosidase, insoluble isoenzyme 7
VVGWYNDGADTFSPVEEGERGGDVRNWRRIYHGHLFVAKSFFDARKNRRVLWAWVDETDGSSYDGAKGWTGIQSFPRALWLDTEGKQLVQWPVEE

SEQ ID NO: 89614 - protein, 174 aa, Setaria italica
  Transcript Sequence Number=SeqID_23640
  Gene Ontology: Mol. function=nutrient reservoir activity; Cellular component=cell wall
  Homolog annotation: Hit_ID=Q43557; Match level="QueryCoverage=97%, HitCoverage=45%, E-value=6e-52, Identity=56%"; Hit description =Unidentified
  Pfam annotation: Domain name=DUF642; Domain location=1-174; Score =167.2; E_value=5e-47; Accession=PF04862.4; Description=Protein of unknown function, DUF642
TPNCPHHVKNNMLRNGDFEDGPYIFPNTPWGLLVPPIIEDDHSPLPGWMIMSDTKVVKYVDAAHHKVPHGSYAVELVAGRECALVQEVRTVPGRPYRLSFSVGDAANGCGGYLAVVAYASRATLNVPYESHGAGGSKRAELEFVADHNLTRVVFQSANHYMKPDATLCGPIVDD

SEQ ID NO: 89615 - protein, 63 aa, Setaria italica
  Transcript Sequence Number=SeqID_23641
  Subcellular localization annotation: CTP_CleavageSite=15; ConfidenceScore=5.52e-01
PPQLTSRLPLPPTVCCDSWSPNSSNFVSLVIRISTCMRASLHRACSNSYVSVIFCYNLLPMCI

SEQ ID NO: 89616 - protein, 237 aa, Setaria italica
  misc_feature (54)..(54): Xaa can be any naturally occurring amino acid
  misc_feature (153)..(153): Xaa can be any naturally occurring amino acid
  Transcript Sequence Number=SeqID_23642
  Homolog annotation: Hit_ID=Q6ZCX3; Match level="QueryCoverage=30%, HitCoverage=5%, E-value=3e-12, Identity=45%"; Hit description=Formin- like protein 6
MFSTAFIEDNLLVLDRDQIDILWDTKHRFPVDFRVEAIFSDMDMSTTIGKSKLXSEEKESLAKVDDAFSHLDWSSKNDHITNHEPDQKGLHNEHDGFDAIPLEETETSNSAAEHSLLDSRSVQIHHIEPADNHYSTHSLPEAEAPGPNSQGDXLFKDTSARDEPEVDGTKNEPNSETPKDAEAGGAGAAEWSDNNSDVFLSDSPSSSAPSSPPKFDEDILEEAGMVETRSQPTELKI

SEQ ID NO: 89617 - protein, 271 aa, Setaria italica
  Transcript Sequence Number=SeqID_23643
  Homolog annotation: Hit_ID=B6TJK4; Match level="QueryCoverage=98%, HitCoverage=47%, E-value=2e-89, Identity=62%"; Hit description =Glyoxal oxidase
  Pfam annotation: Domain name=Glyoxal_oxid_N; Domain location=1-195; Score=259.3; E_value=9e-75; Accession=PF07250.3; Description=Glyoxal oxidase N-terminus
QSVEYSVTSNTFRGLSIFTDTWCSSGHVRTDGTLVQNGGWKDGTRKIRLMPACNGSNDASCDWTEQPAPVELAEDRWYATNQKLPDGRAIIVGGLGQSTYEFYPRTGVPTSDDFSLFLRQTNSLYPFVHLNVDGNLFIFASNRAILFDYKSGRIVRNYATLGDGGDLRNNPNAGSSVLLPLKPNPTEAEVLICGGTRNTAAAAVGRGQFPEALRTCGRLRITDPNPSWVVEEMPSPRVMGDMILLPNGEVAIINGATDGIGGWESANTSNP

SEQ ID NO: 89618 - protein, 74 aa, Setaria italica
  Transcript Sequence Number=SeqID_23644
TAEIDHELNQSFRHAIAEKNKMQYNRINVHHGLHSSFCGHRRCRPSPAAGARLPPRHPAWVPLWLPPSSRPPWP

SEQ ID NO: 89619 - protein, 181 aa, Setaria italica
  misc_feature (137)..(137): Xaa can be any naturally occurring amino acid
  Transcript Sequence Number=SeqID_23645
  Gene Ontology: Mol. function=catalytic activity; Cellular component =membrane; Biological process=phosphatidylcholine metabolic process
  Homolog annotation: Hit_ID=Q6AVR2; Match level="QueryCoverage=100%, HitCoverage=21%, E-value=2e-72, Identity=74%"; Hit description =Phospholipase D
LVQEAESQNLVCAKNLKIDRSIHSAYVKAIRSAQRFIYIENQYFIGSSFCWPSCKNAGADNLIPIELALKIASKIKAKERFAVYIVIPMWPEGIPTTAAMQQILFWQGQTMSMMYKIVADTLQSQDLFDAHPQDYLXNFYCLGKRELADGDILSPKTLCNDTSPLHMAQKFRRFMIYVHSK

SEQ ID NO: 89620 - protein, 43 aa, Setaria italica
  misc_feature (38)..(38): Xaa can be any naturally occurring amino acid
  Transcript Sequence Number=SeqID_23646
  Gene Ontology: Mol. function=zinc ion binding; Cellular component =intracellular
ETYNADVTALSYSDEQQKPQEHIYSYHQSSLDSTALEXPIWES

SEQ ID NO: 89621 - protein, 102 aa, Setaria italica
  misc_feature (52)..(52): Xaa can be any naturally occurring amino acid
  Transcript Sequence Number=SeqID_23647
  Gene Ontology: Mol. function=inorganic phosphate transmembrane transporter activity; Cellular component=integral to membrane; Biological process=phosphate transport
  Homolog annotation: Hit_ID=Q7XDZ7; Match level="QueryCoverage=98%, HitCoverage=18%, E-value=3e-42, Identity=88%"; Hit description =Probable inorganic phosphate transporter 1-3
FGILFGAIVALVVSAGFRNSYPAPSYQDNPTASLVVPEADYVWRIILMFGTXPAALTYYWRMKMPETARYTALIARNAKQAAADMSKVLNAEIVEDDADRAG

SEQ ID NO: 89622 - protein, 447 aa, Setaria italica
  Transcript Sequence Number=SeqID_23648
  Gene Ontology: Mol. function=nucleic acid binding; Cellular component= nucleus
  Homolog annotation: Hit_ID=B6TQ61; Match level="QueryCoverage=89%, HitCoverage=84%, E-value=0.0, Identity=88%"; Hit description=Zinc finger CCCH type domain-containing protein ZFN-like 1
  Pfam annotation: Domain name=zf-CCCH; Domain location=129-155; Score =46.9; E_value=7.9e-11; Accession=PF00642.16; Description=Zinc finger C-x8-C-x5-C-x3-H type (and similar)
  Pfam annotation: Domain name=zf-CCCH; Domain location=283-309; Score =47.2; E_value=6.3e-11; Accession=PF00642.16; Description=Zinc finger C-x8-C-x5-C-x3-H type (and similar)
  Pfam annotation: Domain name=zf-CCCH; Domain location=329-355; Score =39.1; E_value=1.8e-08; Accession=PF00642.16; Description=Zinc finger C-x8-C-x5-C-x3-H type (and similar)
  Pfam annotation: Domain name=zf-CCCH; Domain location=35-61; Score =41.5; E_value=3.2e-09; Accession=PF00642.16; Description=Zinc finger C-x8-C-x5-C-x3-H type (and similar)
  Pfam annotation: Domain name=zf-CCCH; Domain location=84-110; Score =43.6; E_value=7.9e-10; Accession=PF00642.16; Description=Zinc finger C-x8-C-x5-C-x3-H type (and similar)
  Pfam module annotation: Pfam domain module=zf-CCCH::zf-CCCH::zf -CCCH::zf-CCCH::zf-CCCH; Domain location=129-155::283-309::329 -355::35-61::84-110
PGTGLEGPMLRLGLDGGGEGEDGEREADARLPERPGEADCGYYLRTGACGFGERCRYNHPRDRGGTEFGGGTKNGAAPDFPERQGQPVCEYFLKTGTCKFGSNCKYHHPKQDGSVQSVILNNNGFPLRPGEKECSYYMKTGQCKFGSTCKFHHPEFGGIPVTPGIYPPLQSASVPSPHTYAPLANWQMGRSPVVPGSYMPGSYTPMMLSSGMVPLQGWSPYPASVNPVASGGAQQTVQAGPLYGIGHHGSSATIAYGSPYMPYSSSTGQSSNNHQEHGFPERPGQPECQYYMRTGDCKFGATCKYNHPRDWSAAKSNYMFSPLCLPLRPGAQPCAYYAQNGYCRYGVACKYDHPMGTLGYSSSALPLSDMPIAPYPLSFSVATLAPSPSSPEYISTKDPSMNQVASPVAAPEPVGAVLPKGGFPPDTIMRTQTSTTGVGSSSPGGGR

SEQ ID NO: 89623 - protein, 278 aa, Setaria italica
  Transcript Sequence Number=SeqID_23649
  Gene Ontology: Mol. function=electron carrier activity; Cellular component=extracellular region; Biological process=response to oxidative stress
  Homolog annotation: Hit_ID=Q94DM0; Match level="QueryCoverage=100%, HitCoverage=78%, E-value=1e-123, Identity=75%"; Hit description =Class III peroxidase 23
  Pfam annotation: Domain name=peroxidase; Domain location=1-223; Score= 354.7; E_value=1.8e-103; Accession=PF00141.15; Description=Peroxidase
HFHDCFVQGCDASVLLDGSATGPGEKQAPPNLTLRPSAFKAINDIHDRLTRECGGPVVSCSDVLALAARDSVVVSGGPSYRVPLGRRDSTSFATQQDVLGGLPPPTATVPALLGVLSKINLDATDLVALSGGHTIGLGHCTSFEGRLFPRPDPTLNATFAGHLRQTCPAKGTDRRTPLDVRTPNTFDNKYYVNLVNREGLFTSDQDLFTNPATRPVVDKFAQNQKAFFDQFGSSMIKMGQIKVLTGSQGQIRRNCSARNPGTAGLPWSILEEAESLIF

SEQ ID NO: 89624 - protein, 50 aa, Setaria italica
  Transcript Sequence Number=SeqID_23650
  Gene Ontology: Mol. function=protein binding
  Homolog annotation: Hit_ID=Q2QNU9; Match level="QueryCoverage=100%, HitCoverage=10%, E-value=8e-12, Identity=74%"; Hit description =Leucine Rich Repeat family protein, expressed
AIGEGCNKLFEIGLSKCSGVTDEGISSLVARCSDLRAIDLTCCNFILRHA

SEQ ID NO: 89625 - protein, 104 aa, Setaria italica
  Transcript Sequence Number=SeqID_23651
  Homolog annotation: Hit_ID=Q2R069; Match level="QueryCoverage=94%, HitCoverage=15%, E-value=1e-41, Identity=79%"; Hit description=Kelch motif family protein, expressed
  Pfam annotation: Domain name=Kelch_1; Domain location=39-85; Score =15.6; E_value=0.046; Accession=PF01344.17; Description=Kelch motif
WSIRLLDDTKILSLDKLSWDSVSPKVRPSSNGRCPKLRPCKGHCLVPWGKNVILVGGKSDPPYDKISVWTFNTETELWSHMETKGDVPVSRSGHTVIRAGPVQF

SEQ ID NO: 89626 - protein, 82 aa, Setaria italica
  Transcript Sequence Number=SeqID_23652
  Homolog annotation: Hit_ID=Q2R069; Match level="QueryCoverage=100%, HitCoverage=13%, E-value=4e-36, Identity=87%"; Hit description=Kelch motif family protein, expressed
  Subcellular localization annotation: CTP_CleavageSite=47; ConfidenceScore=5.17e-01
MPKMFGFSRRRMKLGRLKGHLHDPFHGSRSPSRQTKRFSHPNGEDPVTTSVSGRADDLAWRCSSDTFDLNGRAFESSENWAV

SEQ ID NO: 89627 - protein, 175 aa, Setaria italica
  Transcript Sequence Number=SeqID_23653
  Gene Ontology: Mol. function=protein binding
  Homolog annotation: Hit_ID=Q2QNU9; Match level="QueryCoverage=100%, HitCoverage=77%, E-value=4e-59, Identity=48%"; Hit description =Leucine Rich Repeat family protein, expressed
LLAKKCPELRSVDISYLKVSNESLRSLSTLEKLEDITMVCCLFIDDDGLQMLSAGNSLKSIDVSRCPHVTSEGLASLIVSQRFIQKINAGHSLHEIETCFLSKLSTICETLTVLRLDGLEIFASNLQSIGDSCKNLVEIGLSKCNGITDDGIASLVVNCSYLRTIDVTCCHLLTN

SEQ ID NO: 89628 - protein, 140 aa, Setaria italica
  Transcript Sequence Number=SeqID_23654
  Gene Ontology: Mol. function=protein binding
  Homolog annotation: Hit_ID=Q2QNU9; Match level="QueryCoverage=87%, HitCoverage=25%, E-value=3e-43, Identity=71%"; Hit description =Leucine Rich Repeat family protein, expressed
GLAKVAVGCPGLEKLSVKWYREISDIGIELLAKKCPELRSVDISYLKVSNESLRSLSTLEKLEDITMVCCLLVDNDGLLMLSAGNSLKSIDVSRCPHVTSEGLASLIVSQRFIQKVNAGHSLHVPWGKNVILVGGKVTAL

SEQ ID NO: 89629 - protein, 101 aa, Setaria italica
  Transcript Sequence Number=SeqID_23655
KLNIGMMQGNNSTNEINTSYLLTFFDKGTFINKTMTEITFLLHSCKNKIELINFQCINNDRLAMHMPDVRSGPCRICNCQHSEFLFEKNRLFLCYFVNCPF

SEQ ID NO: 89630 - protein, 171 aa, Setaria italica
  misc_feature (112)..(112): Xaa can be any naturally occurring amino acid
  Transcript Sequence Number=SeqID_23656
  Gene Ontology: Mol. function=protein binding; Cellular component =cytoplasm; Biological process=ubiquitin-dependent protein catabolic process
  Homolog annotation: Hit_ID=Q2QNU9; Match level="QueryCoverage=81%, HitCoverage=28%, E-value=7e-63, Identity=88%"; Hit description =Leucine Rich Repeat family protein, expressed
  Pfam annotation: Domain name=LRR_1; Domain location=113-136; Score =5.1; E_value=33; Accession=PF00560.25; Description=Leucine Rich Repeat
  Pfam annotation: Domain name=LRR_1; Domain location=36-58; Score=8.3; E_value=7.9; Accession=PF00560.25; Description=Leucine Rich Repeat
  Pfam annotation: Domain name=LRR_1; Domain location=60-83; Score=0.6; E_value=2.4e+02; Accession=PF00560.25; Description=Leucine Rich Repeat
  Pfam annotation: Domain name=LRR_1; Domain location=86-110; Score =7.4; E_value=12; Accession=PF00560.25; Description=Leucine Rich Repeat
  Pfam module annotation: Pfam domain module=LRR_1::LRR_1::LRR_1::LRR _1; Domain location=113-136::36-58::60-83::86-110
SVLLVVVVSCNVFVLLESCSLINEKGLERIATCCSNLKEIDLTDCGVNDAALQHLGKCSELQILKLGLCSSISDKGIAFISSNCGKLVELDLYRCNSITDDGLAALANGCKXKIKLLNLCYCNKITDSGLGHIGSMEELTNLELRCLVRITGVGIYLQIRQIRNRQRRPRI

SEQ ID NO: 89631 - protein, 70 aa, Setaria italica
  Transcript Sequence Number=SeqID_23657
LGDGIELMIPAHLEDFFPTIILNLIEKKVDISTNYSVCMQDVRFFILERSLMDLTQQRMGSVIVYGEMLW

SEQ ID NO: 89632 - protein, 304 aa, Setaria italica
  Transcript Sequence Number=SeqID_23658
  Gene Ontology: Mol. function=hydrolase activity, hydrolyzing O -glycosyl compounds; Cellular component=extracellular region; Biological process=carbohydrate metabolic process
  Homolog annotation: Hit_ID=Q8L5C6; Match level="QueryCoverage=89%, HitCoverage=89%, E-value=2e-88, Identity=61%"; Hit description =Xylanase inhibitor protein 1
  Pfam annotation: Domain name=Glyco_hydro_18; Domain location=37-291; Score=72.4; E_value=1.7e-18; Accession=PF00704.20; Description =Glycosyl hydrolases family 18
  Subcellular localization annotation: CTP_CleavageSite=13; ConfidenceScore=5.12e-01
MAFTRGRPSLAVSAAALLSVVLISFLAGPASAQGKTGQVTVFWGRHRDEGSLREACDSGLYSMVIMSFLDVYGGNGNYHLDLSGHSLAGMGAAIKRCQFLGVPVSISIGGFGGAYSLPTNQSALALFDHLWNTYFGGSLNDTRRPFGNAWLDGVDMFLEHGGAAERYSTLALELAKHNIRAGDGKLLHLTATAHCRFPDDRVKEALDTGIFERIHVRFYDDTDCAAGFSAAEWAKWAAAYPFTKIYVGVPASLQAAKTGYTDPAALRRAVLPVAQKASNYGGVMIWDRYFDKRSNYSGSIKSWV

SEQ ID NO: 89633 - protein, 62 aa, Setaria italica
  Transcript Sequence Number=SeqID_23659
GLVWYMITTRFLSLSLTTKPKVLNTYISRIYKIPISISNNQTKVSTPISLGLHDPRYIRRYL

SEQ ID NO: 89634 - protein, 217 aa, Setaria italica
  misc_feature (141)..(141): Xaa can be any naturally occurring amino acid
  Transcript Sequence Number=SeqID_23660
  Homolog annotation: Hit_ID=Q2R069; Match level="QueryCoverage=67%, HitCoverage=22%, E-value=8e-52, Identity=70%"; Hit description=Kelch motif family protein, expressed
RGGGLKGHLHDPFHGSRNPSRQTKRFSHPNGEDPHSANLLFHVVRCADDLAWRCSSDTFDLNGHAFESSENGAVLLTEGDKPTPRFDLAAAMVGSNMAVFGADSGHRLLDDTEILSLDKLSWDSVSPKVRPSSNGRCPKLXPCKGHCLGSSKETTGLDTVLLLPSSPSLGNFTKETSSTQEPRAQAVSPTDNSTEHLMSYLQDPKSVRLLAEKSREI

SEQ ID NO: 89635 - protein, 108 aa, Setaria italica
  Transcript Sequence Number=SeqID_23661
  Gene Ontology: Mol. function=zinc ion binding; Cellular component =intracellular
LNAQQPAGGVMGGLARTASHGRSSEGGGGDGGGGGGGDAMTRDFLGLRALSHRDILGLAGFDSSCMGAVAANANINCYERQQHTQAHAQQHQQQSSNEPSHGMGSHRP

SEQ ID NO: 89636 - protein, 280 aa, Setaria italica
  Transcript Sequence Number=SeqID_23662
MSPAPPPSPLLPPAGEPFRVFVGYDPREHEAYEVCRRSLLRHATMPLDVRPVRQPDLRAAGLYWRARGPTESTEFSFTRFLTPYLAGYRGWALFVDCDFLYLADVADLLAAAVPPGADADRLAVACVKHVYEPAEATKMDGAIQTTYPRKNWSSMVLYNCAHPKNVAALTPDAVSTQTGAFLHRFAWLNDDEIGEVPFVWNFLVGHNRVDPADPATHPRAIHYTCGGPWFERYRDCEFADLWIKEAEELKAEKDKLEDGEKLKLIEDKDAKEQDDNKEEN

SEQ ID NO: 89637 - protein, 75 aa, Setaria italica
  Transcript Sequence Number=SeqID_23663
  Gene Ontology: Mol. function=metal ion binding; Cellular component =plasma membrane
  Homolog annotation: Hit_ID=B6SXK5; Match level="QueryCoverage=85%, HitCoverage=9%, E-value=2e-23, Identity=81%"; Hit description =Protein binding protein
RAAAERGALSEAVTILEDCRRVLSQSFASQNGDRLCMALDAELREMQERMANRQLYEASREAYMLSGLSSHSVAE

SEQ ID NO: 89638 - protein, 523 aa, Setaria italica
  Transcript Sequence Number=SeqID_23664
  Gene Ontology: Mol. function=electron carrier activity; Cellular component=endoplasmic reticulum membrane; Biological process =oxidation reduction
  Homolog annotation: Hit_ID=B6TC85; Match level="QueryCoverage=99%, HitCoverage=98%, E-value=0.0, Identity=90%"; Hit description =Flavonoid 3-monooxygenase
  Pfam annotation: Domain name=p450; Domain location=30-509; Score =322.5; E_value=8.7e-94; Accession=PF00067.14; Description=Cytochrome P450
DPVLLSILLCLWIFILVGRKGRNSMRQRLPPGPPTWPIFGNLLQLSPLPHKDFARFCTKYGPLVYLRLGTIDAITTDDPEVIREILIRQDEVFASRPRTLAAVHLAYGCGDVALAPLGPNWKRMRRVCMEHLLTTKRLESFAAHRAQEAEHLCQFVWAKAQSGKPVNLREVLGAFSMNNVTRMLLGKQYFGIQSAGPGEAMEFMHITHELFFLLGLIYLGDYLPAWRWVDPYGCEKKMREVEKKVDDFHQKIIDEHRKAWEAKKSAAASLDDDDTKEEMDFVDVLLSLPGENGKEHMDDVEIKALMQDMIAAATDTSSVTNEWVMAEVIKNPRVLRRIQEELDAVIGRDRMVVESDLAHLPYLRCVVRESFRMHPAGPFLIPHESLKPTTIMGYHVPARTRVFINTHALGRNPRVWDAVDEFRPERHLPTAEGGRVEISHLPDFKILPFSAGKRKCPGAPLGVALVLMALARLFHCFDWSPPDGLRPEDVDTREVYGMTMPKATPLVAVATPRLPPHMYASLA

SEQ ID NO: 89639 - protein, 50 aa, Setaria italica
  Transcript Sequence Number=SeqID_23665
CVRAMLLELDARGAHQELAAAAPGLRLEKCMQFINTDSFDGSFIENSMDD

SEQ ID NO: 89640 - protein, 37 aa, Setaria italica
  Transcript Sequence Number=SeqID_23666
QLVDFSESCCIHFVLPLPHQSRNPFGTHFRVLCCKLK

SEQ ID NO: 89641 - protein, 48 aa, Setaria italica
  Transcript Sequence Number=SeqID_23667
  Gene Ontology: Mol. function=transporter activity; Cellular component= mitochondrial inner membrane; Biological process=transport
  Homolog annotation: Hit_ID=Q4A3J5; Match level="QueryCoverage=100%, HitCoverage=13%, E-value=2e-13, Identity=77%"; Hit description =Mitochondrial carrier like protein
PALAGVSHVAIQFPAYEKIKAYLAERDNTTVEALSFGDVAVASSLAKV

SEQ ID NO: 89642 - protein, 340 aa, Setaria italica
  Transcript Sequence Number=SeqID_23668
  Gene Ontology: Mol. function=transporter activity; Cellular component= mitochondrial inner membrane; Biological process=transport
  Homolog annotation: Hit_ID=B9SAW7; Match level="QueryCoverage=89%, HitCoverage=96%, E-value=1e-108, Identity=64%"; Hit description =Mitochondrial carrier protein, putative
  Pfam annotation: Domain name=Mito_carr; Domain location=135-227; Score=114.5; E_value=3.5e-31; Accession=PF00153.19; Description =Mitochondrial carrier protein
  Pfam annotation: Domain name=Mito_carr; Domain location=235-327; Score=119.1; E_value=1.4e-32; Accession=PF00153.19; Description =Mitochondrial carrier protein
  Pfam annotation: Domain name=Mito_carr; Domain location=33-129; Score= 107.1; E_value=5.8e-29; Accession=PF00153.19; Description =Mitochondrial carrier protein
  Pfam module annotation: Pfam domain module=Mito_carr::Mito_carr::Mito_ carr; Domain location=135-227::235-327::33-129
  Subcellular localization annotation: CTP_CleavageSite=47; ConfidenceScore=5.59e-01
MPGDVPTSPAPAPPSASSSSQHHHHRGPTSARGLLCHAVAGASAGVVAATFVCPLDVIKTRFQVHGWPKLGTGTIGGSVIIGSLQQIAQREGFRGMYRGLSPTVLALLPNWAVYFTVYEQLKSLLSSNDGSHQLSLGANVVAASCAGAATSIVTNPLWVVKTRFQTQGIRAGPIPYKGTLAALSRIAHEEGIRGLYSGLVPALAGVSHVAIQFPAYEKIKAYLAERDNTTVEALSFGDVAVASSLAKVAASTMTYPHEVVRSRLQDQGAHSETRYKGVIDCIKKVYYKEGVAGFYRGCATNLLRTTPAAVITFTSFEMIHRFLLDLIPPEPEPHIQPLKH

SEQ ID NO: 89643 - protein, 153 aa, Setaria italica
  misc_feature (76)..(76): Xaa can be any naturally occurring amino acid
  Transcript Sequence Number=SeqID_23669
  Gene Ontology: Mol. function=magnesium ion binding; Biological process=metabolic process
  Homolog annotation: Hit_ID=A5YZT3; Match level="QueryCoverage=97%, HitCoverage=23%, E-value=7e-49, Identity=62%"; Hit description =Monoterpene synthase
  Pfam annotation: Domain name=Terpene_synth; Domain location=11-153; Score=84.0; E_value=5.3e-22; Accession=PF01397.13; Description =Terpene synthase, N-terminal domain
ASPYNFQPSIWGDFFLRYSDPAASSKQQIWMAERADKMKEAVAKMIASSVAWDLHPRLQLIDALERLCLVHLFEDXINAALAQIKTANVTGCDLHTVALWFYLLRKHGYRVSPDIFVRFKDQDGSFFANNPVELLSLYNAAHLGTHGETILDE

SEQ ID NO: 89644 - protein, 111 aa, Setaria italica
  misc_feature (34)..(34): Xaa can be any naturally occurring amino acid
  Transcript Sequence Number=SeqID_23670
  Gene Ontology: Mol. function=magnesium ion binding; Biological process=metabolic process
  Homolog annotation: Hit_ID=Q6K3L4; Match level="QueryCoverage=83%, HitCoverage=27%, E-value=1e-26, Identity=61%"; Hit description =Putative sesquiterpene cyclase
  Pfam annotation: Domain name=Terpene_synth; Domain location=1-105; Score=-29.3; E_value=4.3e-06; Accession=PF01397.13; Description =Terpene synthase, N-terminal domain
WIEGILILQIPFHEFVVVFSDIFVRFKDQDGSFXANNPVELLSLYNAAHLGTHGETILDEAIVFTRTHLETIFPSLEGSLAHEVKCALETFLPRRVRIYESKYYISTYEKE

SEQ ID NO: 89645 - protein, 63 aa, Setaria italica
  Transcript Sequence Number=SeqID_23671
SGRDLSMSQQQQQLPVSKNNAKMSLHCTECIARQNDTTKESLDKMVPHANAHVIYNQVPACYK

SEQ ID NO: 89646 - protein, 101 aa, Setaria italica
  Transcript Sequence Number=SeqID_23672
RVVRLLNIGHHCKFCSISSRTSPRRQHARLHQLACVQEGDGAGEDVAGEGVNPARRAGNALRDHPRVAGSLRHGVGSQGHSVEQVVLRQAVAVPVSCLRTE

SEQ ID NO: 89647 - protein, 155 aa, Setaria italica
  Transcript Sequence Number=SeqID_23673
  Gene Ontology: Mol. function=protein serine/threonine phosphatase activity; Cellular component=protein serine/threonine phosphatase complex; Biological process=protein amino acid dephosphorylation
  Homolog annotation: Hit_ID=Q7XUC5; Match level="QueryCoverage=98%, HitCoverage=39%, E-value=1e-76, Identity=88%"; Hit description =Probable protein phosphatase 2C 43
FISNHLSAHIVRLAQEHGTMSEDVVRNAFSATEEGFMSLVRRTHLIKPAMTTIGSCCLVGIIWRGTLYLANLGDSRAVVGCSNGPNKIVAEQLTRDHNAGMEEIRQELQSLHPDDSQIVVLKNGVWRIKGIIQVSRSIGDAYLKKREFALDPSTA

SEQ ID NO: 89648 - protein, 129 aa, Setaria italica
  Transcript Sequence Number=SeqID_23674
  Gene Ontology: Mol. function=protein binding; Cellular component =nucleus; Biological process=regulation of transcription, DNA -dependent
  Homolog annotation: Hit_ID=B9GYX5; Match level="QueryCoverage=100%, HitCoverage=28%, E-value=2e-42, Identity=63%"; Hit description=GRAS family transcription factor
GYTAANAAILEAVEGFPVVHVVELGTTHCMQIPTLIDMLASRAEGPPILRLTVADVASTTSAPPPALDMSYDELGAKLVNFARSRNMSMDFRVVPTSPGDAFTSLIDQLRVQQLVSDGTEALVVNCHML

SEQ ID NO: 89649 - protein, 83 aa, Setaria italica
  Transcript Sequence Number=SeqID_23675
  Subcellular localization annotation: CTP_CleavageSite=14; ConfidenceScore=5.24e-01
YLRLAHVSPHQLPRARNRPSHTPTFTVRSGDAGEELLRWLKVPFMTSNSSLNTTSGSPLRFSSLTEYTPKYVELFCELSQKGG

SEQ ID NO: 89650 - protein, 73 aa, Setaria italica
  Transcript Sequence Number=SeqID_23676
SECSPKLEKGSKVIEVPSIGKEGPLQQSSSHPLHGEDEGLSQAHQSNVSGISVVTGNCPSETTLRTPILDSSL

SEQ ID NO: 89651 - protein, 776 aa, Setaria italica
  misc_feature (26)..(26): Xaa can be any naturally occurring amino acid
  misc_feature (526)..(526): Xaa can be any naturally occurring amino acid
  Transcript Sequence Number=SeqID_23677
  Gene Ontology: Mol. function=phosphatidylinositol phosphate kinase activity; Biological process=phosphatidylinositol metabolic process
  Homolog annotation: Hit_ID=Q6ZLF2; Match level="QueryCoverage=97%, HitCoverage=42%, E-value=0.0, Identity=77%"; Hit description=1 -phosphatidylinositol-3-phosphate 5-kinase-like
  Pfam annotation: Domain name=PIP5K; Domain location=508-744; Score =179.5; E_value=9.6e-51; Accession=PF01504.10; Description =Phosphatidylinositol-4-phosphate 5-Kinase
VVNYCSLSSLGNLFVFFHSVYLPPPXLDFTSQHQEWVEQEAKEVDDSAELLFSEVLNALHKISGGRPITGSFDGNLKILELRRNIGELEEILLAEKADFMESLKNLLKSDMRKGQPFIDILEVNKLRRHLLFLCYLWDQRLKFIANSGGKYCDALAGLRIGSGNCDFNDKSVNASAAPKLEKGSKVIEVPSIGKEGPLQQSSSHPLHGEDEGLSQAHQSNENSLRNVEELNHATSADVKDRLDNEESRIGVRRVVSDGQFPVTTDIPDTLDAKWRGQNGPAPDSTSAKPLHSAEGTGVDVKSQTKAVPSHTPTFTVRSGDAGEELLRWLKVPFMTSNSSLNTTSGSPLRFSSLTEYTPKYVELFCELSQKGGARFFLPTGANDIVIPVFDDEPTSVISYALVSPMYCFQLSDESIKNREKDSSLPLPVYDSGNFNPFHLFDEFGSHYDVTSSVSGGRGSVAPDQVHLSVSFEDGGPLGKVKYNVTCYYANKFEALRRSCCPSELDFLRSISRCKKWGAQGGKSNVXFFAKSLDDRFIIKQVTKTELESFLKFGTEYFKYLSESISTGSPTCLAKILGIYQVTIKHVKGGKESKMDLLVMENLLFGRNITRLYDLKGSSRSRYNADSNGSNKVLLDQNLIEAMPTSPIFVGNKAKRLLERAVWNDTSFLAGIDVMDYSLLVGVDEEKHELVLGIIDFMRQYTWDKHLETWVKSSGILGGPKNASPTVVSPMQYKKRFRKAMSAYFIVIPEQWMPAIINPSKSSSNVCEEDSQRALQE

SEQ ID NO: 89652 - protein, 66 aa, Setaria italica
  Transcript Sequence Number=SeqID_23678
THSTLHLFILDETLMTESCFYFKTSISLINNSTNYHTSLIVDVYFVHFVEHGIDGLQLRFFYNTAW

SEQ ID NO: 89653 - protein, 68 aa, Setaria italica
  Transcript Sequence Number=SeqID_23679
  Homolog annotation: Hit_ID=B6TNR9; Match level="QueryCoverage=97%, HitCoverage=25%, E-value=6e-11, Identity=59%"; Hit description =Isochorismatase hydrolase
MGSEASAAEVDQLLRSQIPFQSDGELVLPPRDGGGVGLVLVDVSNGFCTVGAGNLAPAAPNKQIEKDG

SEQ ID NO: 89654 - protein, 81 aa, Setaria italica
  Transcript Sequence Number=SeqID_23680
YTDLSYVLFDDSLVFLMIMHAIFTNCYAWLMTCGCCLWVLQYYQYDEHMTSYLFVYHVVVCLRLICWSTARYLPCCPVILL

SEQ ID NO: 89655 - protein, 47 aa, Setaria italica
  Transcript Sequence Number=SeqID_23681
SRQQHERAATAKNREKKSNGLLARKEISKDSLIRLILKYYFYFYHWG

SEQ ID NO: 89656 - protein, 66 aa, Setaria italica
  Transcript Sequence Number=SeqID_23682
  Gene Ontology: Mol. function=transferase activity, transferring groups other than amino-acyl groups; Cellular component=cytoplasm; Biological process=biosynthetic process
  Homolog annotation: Hit_ID=Q2R2G0; Match level="QueryCoverage=84%, HitCoverage=14%, E-value=2e-14, Identity=62%"; Hit description =Chalcone and stilbene synthases, N-terminal domain containing protein, expressed
QYGNTRCSSVILVMEEMRRRSEELDRHTAGEGLDWGLLVGYGPGITVEAILLFALPDKAVNKLSVT

SEQ ID NO: 89657 - protein, 140 aa, Setaria italica
  Transcript Sequence Number=SeqID_23683
FMNFFILAYVLEQTSITYFFFPILSTLTQTKCCVHTRTPALYADRAARSTDNGRVGGKWGPVIPDVILGDGCQSRSPRDFAKSTGFRNWLQLRKFLASITRTRRTEHFATPQGLSEDMTAHTLGDWWALSGSNSSGFLLP

SEQ ID NO: 89658 - protein, 54 aa, Setaria italica
  Transcript Sequence Number=SeqID_23684
FLRTQQIIPRSIGDRAVSAQGRCLGLAVNTFFDLEHGYCELYMRNGYVKRTYFV

SEQ ID NO: 89659 - protein, 157 aa, Setaria italica
  Transcript Sequence Number=SeqID_23685
  Gene Ontology: Mol. function=protein binding
  Homolog annotation: Hit_ID=B9RCS2; Match level="QueryCoverage=91%, HitCoverage=24%, E-value=1e-26, Identity=47%"; Hit description =Protein binding protein, putative
  Pfam annotation: Domain name=LRR_1; Domain location=116-136; Score =6.7; E_value=16; Accession=PF00560.25; Description=Leucine Rich Repeat
  Pfam annotation: Domain name=LRR_1; Domain location=138-157; Score =9.6; E_value=4.4; Accession=PF00560.25; Description=Leucine Rich Repeat
  Pfam annotation: Domain name=LRR_1; Domain location=24-46; Score=3.7; E_value=59; Accession=PF00560.25; Description=Leucine Rich Repeat
  Pfam annotation: Domain name=LRR_1; Domain location=48-68; Score=4.8; E_value=37; Accession=PF00560.25; Description=Leucine Rich Repeat
  Pfam module annotation: Pfam domain module=LRR_1::LRR_1::LRR_1::LRR _1; Domain location=116-136::138-157::24-46::48-68
NRSSFICNFTTPYKTLRSLQVLTRLEHLDIWGSEITNEGASVLKAFTRLRFLNLYWTSVNHLPVPPTMRCLNMSKCKIHSIWYEDSEVPVALENLIVSEAEFGNIDQVFSGIQADSLLYLDMSSCDLSNLSFMEKMKNLEHLDLSSNRITDDAIEHI

SEQ ID NO: 89660 - protein, 68 aa, Setaria italica
  Transcript Sequence Number=SeqID_23686
  Homolog annotation: Hit_ID=Q9ZQT2; Match level="QueryCoverage=61%, HitCoverage=12%, E-value=1e-11, Identity=76%"; Hit description=Root cap protein 1
  Pfam annotation: Domain name=Root_cap; Domain location=1-41; Score =71.7; E_value=2.7e-18; Accession=PF06830.3; Description=Root cap
QTYRTDYVNRLNVTAKMPVMGGADNFVSSGLFETDCAVARFGRGSTATASAAAGAGNGIAMVTDAKYL

SEQ ID NO: 89661 - protein, 153 aa, Setaria italica
  Transcript Sequence Number=SeqID_23687
  Gene Ontology: Mol. function=structural constituent of cell wall
  Homolog annotation: Hit_ID=Q9ZQT2; Match level="QueryCoverage=95%, HitCoverage=44%, E-value=5e-61, Identity=78%"; Hit description=Root cap protein 1
  Pfam annotation: Domain name=Root_cap; Domain location=77-133; Score =140.1; E_value=7.1e-39; Accession=PF06830.3; Description=Root cap
AFDDEDVELPRSVGARWAPPTAPALSVTRTAQVNTVVVELRGVFRIMANVVPITAEDSRIHNYGVTDDDSLAHLDLGFKFHDLTDDVHGVLGQTYRPDYVNKLDVKSNMPVMGGAPDYLSSDLFSTDCAVARFGRRPATIGGGPAIEMVTGTE

SEQ ID NO: 89662 - protein, 77 aa, Setaria italica
  Transcript Sequence Number=SeqID_23688
  Gene Ontology: Mol. function=transferase activity, transferring groups other than amino-acyl groups
MESTVRRTSRSYVRPAADTPSGSLELSAVDRVVGMRHMVRSLHVFRPRHPVRGEEEDEQRSPARVVREALAKALVDY

SEQ ID NO: 89663 - protein, 44 aa, Setaria italica
  Transcript Sequence Number=SeqID_23689
LVMPLFVLYTLVTETFCTKKLKKTPRSSNANHGHRRHKRRHADK

SEQ ID NO: 89664 - protein, 201 aa, Setaria italica
  misc_feature (36)..(36): Xaa can be any naturally occurring amino acid
  misc_feature (194)..(194): Xaa can be any naturally occurring amino acid
  Transcript Sequence Number=SeqID_23690
  Gene Ontology: Cellular component=plasma membrane
  Homolog annotation: Hit_ID=Q7XTT0; Match level="QueryCoverage=87%, HitCoverage=40%, E-value=4e-20, Identity=27%"; Hit description =OSJNBa0035M09.19 protein
NKQLQASEKSAQAKKWAEPHLETAKTKWMPVAKEKXVNLKKNMEPYVQMVSEKSVEVYQTSSDFIRPHLVNAHKVADPYFQEAKKLSKPYIDQIATATKPHVEKIGTTMKPYTKRARHVYGQFRETAATYHHQAQESISDYLHQHEFTKQFATEELVWYLAAALLVMPLFVLYTLVTETFCTKKLKKTPRSSNXQPWSSET

SEQ ID NO: 89665 - protein, 371 aa, Setaria italica
  Transcript Sequence Number=SeqID_23691
  Gene Ontology: Cellular component=plasma membrane
  Homolog annotation: Hit_ID=Q7XTT0; Match level="QueryCoverage=90%, HitCoverage=68%, E-value=1e-43, Identity=30%"; Hit description =OSJNBa0035M09.19 protein
  Pfam annotation: Domain name=Apolipoprotein; Domain location=91-311; Score=-52.5; E_value=0.089; Accession=PF01442.10; Description =Apolipoprotein A1A4E family
AAQDAAVEGVAPAAEEIAANARAKEAAVLTAELGKLRAKISALESRIADQTLELKTKDDAIETLDMIIKEKSQEITAMQNEVTSLQAKGSLAAEEQASKANARAVELEKQIEKLKKDITAQKGKKAALEARVGDADKKVQELNTKLEKLQRTSDDQKRRIQKTEHALKVAEEELMKVQLETTTKAKQLKEVHGAWLPPWLATHAAHSMEVMSNHWNEHGKPAVNSLLQKASEKSAQAKKWAEPHLETAKTKWMPVAKEKMVNLKKNMEPYVQMVSEKSVEVYQTSSDFIRPHLVNAHKVADPYFQEAKKLSKPYIDQIATATKPHVEKIGTTMKPYTKRARHVYGQFRETAATYHHQAQESISDYLHLPRS

SEQ ID NO: 89666 - protein, 97 aa, Setaria italica
  Transcript Sequence Number=SeqID_23692
  Gene Ontology: Mol. function=protein binding
  Homolog annotation: Hit_ID=B6TK48; Match level="QueryCoverage=94%, HitCoverage=24%, E-value=6e-20, Identity=63%"; Hit description =Speckle-type POZ protein
LLAAAHRYELDRLKLICKRKLQSGATYVDMAARTLALAEQHNYRRLKAKCIDFIVGSPETLHAVLATEGYKHLEASCPAVLTELLKSVHGRKNLISK

SEQ ID NO: 89667 - protein, 62 aa, Setaria italica
  Transcript Sequence Number=SeqID_23693
  Gene Ontology: Mol. function=hydrolase activity, acting on acid anhydrides, catalyzing transmembrane movement of substances; Cellular component=integral to membrane; Biological process=copper ion transport
  Homolog annotation: Hit_ID=Q6JAG2; Match level="QueryCoverage=96%, HitCoverage=6%, E-value=2e-10, Identity=56%"; Hit description =Putative copper-exporting ATPase
  Subcellular localization annotation: CTP_CleavageSite=41; ConfidenceScore=5.05e-01
MGATTRAILLSCFHGGGGGSEVSRRLALRPRYPSMPRRPKRAAVSGGCGGGGGGGDLEAAAG

SEQ ID NO: 89668 - protein, 94 aa, Setaria italica
  misc_feature (22)..(22): Xaa can be any naturally occurring amino acid
  Transcript Sequence Number=SeqID_23694
  Gene Ontology: Mol. function=electron carrier activity; Cellular component=endoplasmic reticulum membrane; Biological process =oxidation reduction
  Homolog annotation: Hit_ID=B6TEH7; Match level="QueryCoverage=100%, HitCoverage=18%, E-value=7e-36, Identity=70%"; Hit description =Cytochrome P450 CYP71K14
LSDLRYLPLVIKEALRLHPPAXLLIPRECRSPCQVLGFNVPAGAMVLVNAWAIGRDPSNWDAPEEFMPERFENNDVDFKGTDFEFIPFGAGRRM

SEQ ID NO: 89669 - protein, 83 aa, Setaria italica
  Transcript Sequence Number=SeqID_23695
  Gene Ontology: Mol. function=transferase activity, transferring glycosyl groups; Biological process=metabolic process
  Homolog annotation: Hit_ID=B6T9G0; Match level="QueryCoverage=92%, HitCoverage=16%, E-value=3e-22, Identity=68%"; Hit description =Cytokinin-O-glucosyltransferase 2
MEAAHVLVFPVPVQGHINAMLPFAAALLDAGAHVTFLHTDHNLRRVGRAASVASSPRLRFLSIPDGLPDDSRRSVGDLGELDR

SEQ ID NO: 89670 - protein, 70 aa, Setaria italica
  Transcript Sequence Number=SeqID_23696
SFQAVRLCWLHRQLQLHGITGPQVSLMLLTWLLQLQPQRCSSNLYRTLSLFDGSWSFDEQPYLYSFEHLC

SEQ ID NO: 89671 - protein, 80 aa, Setaria italica
  Transcript Sequence Number=SeqID_23697
GIGASCSSQGSTTGVGSRQVDETTRLESSTVVSSPGHHLEHAIWQQNHSTVPVDPVLEIPPEFDPDSAEFMSDVSDYATE

SEQ ID NO: 89672 - protein, 133 aa, Setaria italica
  Transcript Sequence Number=SeqID_23698
SVSAAPRARGHDSLLQEDYANTRTNPLFDSAASPSPPQQPAGSATAAGGGDAPTRDRGREPLKVGGRGGGGRARSVSVAPQRRDTASAPSVDSAGAVGGRRASRARSVADEVRPYRCSETDTEARDAARKLQS

SEQ ID NO: 89673 - protein, 107 aa, Setaria italica
  misc_feature (86)..(86): Xaa can be any naturally occurring amino acid
  Transcript Sequence Number=SeqID_23699
NLALLFLHQAIWQQNHSTVPVDPVLEIPPEFDPDSAEFMSDVSDYATEYRKKDVVEIPLDFDTDAAELDSDVRNNAAKQHREQMEXISLEFDTDASELVSDIWHMKQ

SEQ ID NO: 89674 - protein, 93 aa, Setaria italica
  Transcript Sequence Number=SeqID_23700
  Subcellular localization annotation: CTP_CleavageSite=58; ConfidenceScore=5.50e-01
RLTSNPDSRNLVHSSASLWNGALFSGGVGDSSAETLQSPIPLLTTSTFSGSRSGSNVRSTTSGDPSSRSLCTSKPPSLVVFRSSCEMRLPIVY

SEQ ID NO: 89675 - protein, 315 aa, Setaria italica
  Transcript Sequence Number=SeqID_23701
  Gene Ontology: Mol. function=helicase activity; Cellular component =mitochondrion
  Homolog annotation: Hit_ID=B9RAT8; Match level="QueryCoverage=97%, HitCoverage=48%, E-value=8e-49, Identity=33%"; Hit description =Pentatricopeptide repeat-containing protein, putative
  Pfam annotation: Domain name=PPR; Domain location=122-156; Score =17.6; E_value=0.053; Accession=PF01535.12; Description=PPR repeat
  Pfam annotation: Domain name=PPR; Domain location=158-192; Score=1.5; E_value=5.9; Accession=PF01535.12; Description=PPR repeat
  Pfam annotation: Domain name=PPR; Domain location=194-228; Score =18.5; E_value=0.029; Accession=PF01535.12; Description=PPR repeat
  Pfam annotation: Domain name=PPR; Domain location=52-86; Score=17.3; E_value=0.065; Accession=PF01535.12; Description=PPR repeat
  Pfam module annotation: Pfam domain module=PPR::PPR::PPR::PPR; Domain location=122-156::158-192::194-228::52-86
LFRFMSSRPEKLSTDYFIFLLKKVVATGDLDLKLVTRVLRYYRHAGNEVKDSAFDSVLKSLRSVGRLGESGRVLKAMQEGGFEPDSAEHEKAVIAMCDAGNLEEARNYLTGVEESGHKLGPRIWSCLVQKYSLGENVDMAVSCFHEMLEKCGNENVGSALEALVSGLYKKKGAKEAFQVLKNLIAEKAVVPWQTTYKYLIHKLIRQGHLKQAFEVLGLMKSHGYPTFVDPFIPHISKSGTLDDALGLLNATSLRGLPSRIVYVRLFQALFKEERHEVAQQLLSQSPDSIQNHADVRDVFNRMKLEEPVTAALAEG

SEQ ID NO: 89676 - protein, 93 aa, Setaria italica
  Transcript Sequence Number=SeqID_23702
  Subcellular localization annotation: CTP_CleavageSite=73; ConfidenceScore=5.10e-01
RCSGDISGGAAAAPSPASIPAMARNQWVQLQWPDRPHPRPSLSPESANREPGAARQNPTSRITPSTPARQIPRREAPRGGLEPIRPAALLVRR

SEQ ID NO: 89677 - protein, 150 aa, Setaria italica
  Transcript Sequence Number=SeqID_23703
  Gene Ontology: Mol. function=protein dimerization activity; Cellular component=nucleus; Biological process=regulation of transcription, DNA-dependent
  Homolog annotation: Hit_ID=Q3LAG0; Match level="QueryCoverage=88%, HitCoverage=15%, E-value=5e-14, Identity=34%"; Hit description =Transposase-related protein w-gary2
IALRRSSSKANIDQVLDIERMQLKFDQLWRKWYLWLSLAAVLDPRYKIRFLVICFKEAFGSHAKKYILEVRGKLYELFLQYSFHVDQQNRENFNQRNNDLQLDIHGSLPVTDTSQSYIEQAAHEELGEVITYLEGELIPQNVCFDVLKWW

SEQ ID NO: 89678 - protein, 103 aa, Setaria italica
  Transcript Sequence Number=SeqID_23704
  Homolog annotation: Hit_ID=B6TB68; Match level="QueryCoverage=90%, HitCoverage=27%, E-value=6e-14, Identity=48%"; Hit description=GATA zinc finger family protein
  Pfam annotation: Domain name=GATA; Domain location=58-93; Score=45.4; E_value=2.2e-10; Accession=PF00320.19; Description=GATA zinc finger
QRPGSFSFSCHWKAESELILPKKDKDQEVCQQQEQEQEEEKCEKGALVPRQERLVKRCSNCLSCETPRWRNGPSGIQMLCNACGLRLKPENRFATISEEHYSQ

SEQ ID NO: 89679 - protein, 298 aa, Setaria italica
  Transcript Sequence Number=SeqID_23705
  Gene Ontology: Mol. function=sequence-specific DNA binding; Cellular component=nucleus; Biological process=regulation of transcription, DNA-dependent
  Homolog annotation: Hit_ID=B6TB68; Match level="QueryCoverage=100%, HitCoverage=94%, E-value=5e-99, Identity=63%"; Hit description=GATA zinc finger family protein
  Pfam annotation: Domain name=GATA; Domain location=147-182; Score =45.4; E_value=2.2e-10; Accession=PF00320.19; Description=GATA zinc finger
  Pfam annotation: Domain name=GATA; Domain location=229-264; Score =67.4; E_value=5.4e-17; Accession=PF00320.19; Description=GATA zinc finger
  Pfam module annotation: Pfam domain module=GATA::GATA; Domain location=147-182::229-264
DLFPHQAAALESDESNLEWLSGYVEDCFSSSTSYTNPVFARPAPTMANQGAGKPKLPPPPPSNGRRKRRSLASVMGNDDDQQYIIPLYVEPPLLLIDQKHWMAESDLILPKKDKDQEVCQQQEQEQEEEKCEKGALVPRQERLVKRCSNCLSCETPRWRNGPSGIQMLCNACGLRLKPENRFATISEEHYSQETKKEQEPGKRLDKKKKMIKKTYVSKELSSEQAEKRCTHCMSSKTPQWRSGPLGPKTLCNACGVRYKSGRLLPEYRPANSPTFVSCLHSNSHKKVMQMRQAIAYKE

SEQ ID NO: 89680 - protein, 48 aa, Setaria italica
  Transcript Sequence Number=SeqID_23706
IGEGGSDDDDDDDEDGDDDGEDDDDDDDDDDDEDEDEDEDQPPSKKKK

SEQ ID NO: 89681 - protein, 64 aa, Setaria italica
  Transcript Sequence Number=SeqID_23707
ALLPPHHYSSNGDRGVEAIAAAPNQVAIECVLGRFAPESDLFLTPTRHSSQDGTGRAGRWKTRD

SEQ ID NO: 89682 - protein, 65 aa, Setaria italica
  Transcript Sequence Number=SeqID_23708
KVQCRSRDLVHKGASYPSQRSSLSARLAPHRGMASPPPWNPLLGEPDLPWNLAAGPTVEELNAME

SEQ ID NO: 89683 - protein, 189 aa, Setaria italica
  misc_feature (164)..(164): Xaa can be any naturally occurring amino acid
  Transcript Sequence Number=SeqID_23709
  Pfam annotation: Domain name=WIYLD; Domain location=1-68; Score =119.2; E_value=1.4e-32; Accession=PF10440.1; Description=WIYLD domain
MGRPRPKRGERRIDAAIDHLAEYGFPKPRIRKIINNLLQLYGRDGWVFLEEGSYKIVLDTLLEEQEQLEKQQAAAADEASLQKDMEVSPAVHSEALTESQSAVEPQAFPNSSPPREHVLPPAKGAARARPPCRGWISEESDTESELEDGEMISHAQRPFFPKKXDIPNPAESLPYSKRKRPTRWDVRPN

SEQ ID NO: 89684 - protein, 356 aa, Setaria italica
  misc_feature (270)..(270): Xaa can be any naturally occurring amino acid
  misc_feature (316)..(316): Xaa can be any naturally occurring amino acid
  Transcript Sequence Number=SeqID_23710
  Gene Ontology: Mol. function=nucleoside-triphosphatase activity; Cellular component=membrane; Biological process=transport
  Homolog annotation: Hit_ID=B8XSN5; Match level="QueryCoverage=98%, HitCoverage=60%, E-value=1e-159, Identity=58%"; Hit description=PDR -like ABC transporter
  Pfam annotation: Domain name=ABC_tran; Domain location=5-203; Score= -19.6; E_value=0.00012; Accession=PF00005.19; Description=ABC transporter
ISQDGNLLQVTGDISYNGYRLDEFVPEKTAAYISQYDLHIPDMTVRETLDFSARCQGVGSRAEILKEVKKREKVAGIIPDHDIDLYMKATITGATEKSLQTDYILKIMGLDICADTMVGDAMRRGISGGQKERLTTAEMIVGPSKAFFMDEISNGLDSSTTFRIIKCFQQLANINECTMLISLLQPTPEVFDLFDDLILMAQGKIIYHGPRNEAHNFFEECGFRCPERKGMADFLQEVLSRKDQRQYWSGTDESYRYISSDKLSSMFEKXQKRRKLEEATVPHKSELDKESLSFNKYSLPKLELLKACGAREALFXILKGNMFVYAFKTVQLSVIAVITMSVFFRTHMTTDLTHAN

SEQ ID NO: 89685 - protein, 115 aa, Setaria italica
  Transcript Sequence Number=SeqID_23711
  Gene Ontology: Mol. function=heat shock protein binding; Biological process=protein folding
  Homolog annotation: Hit_ID=Q8H812; Match level="QueryCoverage=60%, HitCoverage=13%, E-value=2e-32, Identity=88%"; Hit description =Putative DNAJ protein
  Subcellular localization annotation: CTP_CleavageSite=34; ConfidenceScore=5.04e-01
MSSRSPKHPPHRSLRRFPSACCLLVLTLALLFASAAAKSSRRPISDNEIRQKKEACYTDVENGLWGWVCRSSPTEKENCVLRCLSPECYDLIYGGDPLEEGELDYVRSQEYKYCM

SEQ ID NO: 89686 - protein, 86 aa, Setaria italica
  Transcript Sequence Number=SeqID_23712
  Gene Ontology: Mol. function=electron carrier activity; Cellular component=extracellular region; Biological process=response to oxidative stress
  Homolog annotation: Hit_ID=Q5U1G9; Match level="QueryCoverage=62%, HitCoverage=16%, E-value=2e-11, Identity=66%"; Hit description=Class III peroxidase 124
RIRPRNLAQSGGPRWRVLLGRRDGTTTNVQSARNLPGPFDSLDKLQQKFRNVNLDDTDLVALQGIVHLLHVPVHAGELHGRAACGC

SEQ ID NO: 89687 - protein, 104 aa, Setaria italica
  Transcript Sequence Number=SeqID_23713
  Gene Ontology: Mol. function=aspartic-type endopeptidase activity; Cellular component=extracellular region; Biological process=response to oxidative stress
  Homolog annotation: Hit_ID=Q5U1G9; Match level="QueryCoverage=92%, HitCoverage=29%, E-value=8e-35, Identity=74%"; Hit description=Class III peroxidase 124
FQKKKPTSGAHTFGKVQCQFTRENCTAGQPVGALEDLDRVTPNVFDNKYYGNLVRGQAQLPSDQVMLSDQAAPATTAPIVHRFASNQKDFFRNFVESMIKMGNI

SEQ ID NO: 89688 - protein, 169 aa, Setaria italica
  Transcript Sequence Number=SeqID_23714
  Gene Ontology: Mol. function=DNA binding; Cellular component=nucleus
  Homolog annotation: Hit_ID=B6TYB6; Match level="QueryCoverage=50%, HitCoverage=31%, E-value=5e-13, Identity=54%"; Hit description=DNA -binding protein
  Pfam annotation: Domain name=DUF296; Domain location=1-81; Score =42.6; E_value=1.5e-09; Accession=PF03479.7; Description=Domain of unknown function (DUF296)
  Subcellular localization annotation: CTP_CleavageSite=94; ConfidenceScore=5.28e-01
VALRQPGASPPGSMVATLRGRFEILSLTGTVLPPPAPPGVSGLTVFLSGGQGQVIGGSVVGPLVAAGPVVLMAASFANAVYERLPLEGEEEETAAAAGGAEPQDQVAQSAGPQGQQPTASQSSGVTGGDAGGGGMSLYNLAGNVGAYQLPGDNFGGWSGGGGGGVRPQF

SEQ ID NO: 89689 - protein, 204 aa, Setaria italica
  misc_feature (182)..(182): Xaa can be any naturally occurring amino acid
  Transcript Sequence Number=SeqID_23715
  Gene Ontology: Mol. function=L-threonine ammonia-lyase activity; Cellular component=chloroplast; Biological process=isoleucine biosynthetic process
  Homolog annotation: Hit_ID=Q10DZ5; Match level="QueryCoverage=90%, HitCoverage=29%, E-value=5e-85, Identity=85%"; Hit description =Threonine dehydratase biosynthetic, chloroplast, putative, expressed
  Pfam annotation: Domain name=Thr_dehydrat_C; Domain location=109-199; Score=95.9; E_value=1.4e-25; Accession=PF00585.10; Description=C -terminal regulatory domain of Threonine dehydratase
GGILAVDEWRWDGWWWLGSVGGAVKTVGEETFRLCRELVDGIVMVSRDAICASIKDMFEEKRSILEPAGALALAGAEAYCKYYNLKGETVVAITSGANMNFDRLRLVTELADVGRKREAVLATFLPEEQGSFKRFTELVGRMNITEFKYRYDSNAKDALVLYSVGIYTDNELGAMVDRMESXKLRTVNLTDNDLAKDHLRYFIG

SEQ ID NO: 89690 - protein, 547 aa, Setaria italica
  Transcript Sequence Number=SeqID_23716
  Gene Ontology: Mol. function=L-threonine ammonia-lyase activity; Cellular component=chloroplast; Biological process=isoleucine biosynthetic process
  Homolog annotation: Hit_ID=Q10DZ5; Match level="QueryCoverage=92%, HitCoverage=84%, E-value=0.0, Identity=86%"; Hit description =Threonine dehydratase biosynthetic, chloroplast, putative, expressed
  Pfam annotation: Domain name=PALP; Domain location=54-346; Score =339.6; E_value=6e-99; Accession=PF00291.17; Description=Pyridoxal -phosphate dependent enzyme
  Pfam annotation: Domain name=Thr_dehydrat_C; Domain location=359-449; Score=95.1; E_value=2.5e-25; Accession=PF00585.10; Description=C -terminal regulatory domain of Threonine dehydratase
  Pfam annotation: Domain name=Thr_dehydrat_C; Domain location=455-542; Score=128.8; E_value=1.8e-35; Accession=PF00585.10; Description=C -terminal regulatory domain of Threonine dehydratase
  Pfam module annotation: Pfam domain module=PALP::Thr_dehydrat_C::Thr _dehydrat_C; Domain location=54-346::359-449::455-542
KEDARGGAGKCLVAGFRERGAGAADGDGFGDAAPGGGGGPGAMEYLTSVLSSKVYDVAIESPLQLATKLSDRLGVNLWIKREDLQPVFSFKLRGAYNMMAKLSPEQLERGVICSSAGNHAQGVALSAQRLGCDAVIVMPVTTPEIKWKSVERLGATVVLEGDSYDEAQSYAKLRCEQEGRTFIPPFDHPDVITGQGTVGMEIVRQLQGPLHAIFVPVGGGGLIAGIAAYVKRVRPEVKIIGVEPSDANAMALSLCHGKRVMLEHVGGFADGVAVKTVGEETFRLCRELVDGIVMVSRDAICASIKDMFEEKRSILEPAGALALAGAEAYCKYYNLKGETVVAITSGANMNFDRLRLVTELADVGRKREAVLATFLPEEQGSFKRFTELVGRMNITEFKYRYDSNAKDALVLYSVGIYTDNELGAMVDRMESAKLRTVNLTDNDLAKDHLRYFIGGRSEIKDELVYRFIFPERPGALMKFLDAFSPCWNISLFHYRAQGEAGANVLVGIQVPPKDFDEFKSRAESLGYEYMSEHNNEIYRLLLRDPKI

SEQ ID NO: 89691 - protein, 106 aa, Setaria italica
  misc_feature (83)..(83): Xaa can be any naturally occurring amino acid
  Transcript Sequence Number=SeqID_23717
  Gene Ontology: Mol. function=catalytic activity; Biological process =cellular metabolic process
  Homolog annotation: Hit_ID=B6T7H1; Match level="QueryCoverage=82%, HitCoverage=27%, E-value=3e-22, Identity=57%"; Hit description =Dihydroflavonol-4-reductase
SSSCFTHCISGGFKHCSSAGDHETIENRLRNLVDVRDVADALLLAYENSKASGRYICSSTPIRVRDIMDILRTMHPTSRWPKXFVEVQDDFTYDTDKIQKLGCAFR

SEQ ID NO: 89692 - protein, 245 aa, Setaria italica
  Transcript Sequence Number=SeqID_23718
  Gene Ontology: Mol. function=catalytic activity; Cellular component =plasma membrane; Biological process=cellular metabolic process
  Homolog annotation: Hit_ID=B6T7H1; Match level="QueryCoverage=99%, HitCoverage=75%, E-value=2e-97, Identity=72%"; Hit description =Dihydroflavonol-4-reductase
  Pfam annotation: Domain name=Epimerase; Domain location=1-177; Score=- 18.1; E_value=9.2e-06; Accession=PF01370.13; Description=NAD dependent epimerasedehydratase family
AGCEGVFHVASPVPYGQPSNPEADVIAPAVTGTLNVLKACYEAKVKRVVLVSSVAAVFNNPKWPKGKAFDEDSWSDEDYCRKNEEWYLLSKILSEREASAYAAKTGLDMVTICPSLVIGPLMQSTLNTSVKIFLDYIKGDHETIENRLRNLVDVRDVADALLLAYENSKASGRYICSSTPIRVRDIMDILRTMHPTSRWPKSFVEVQDDFTYDTDKIQKLGCAFRPMEETIRDSIICYMDLGILK

SEQ ID NO: 89693 - protein, 177 aa, Setaria italica
  Transcript Sequence Number=SeqID_23719
  Gene Ontology: Mol. function=structural constituent of cell wall
  Homolog annotation: Hit_ID=B6UBA8; Match level="QueryCoverage=87%, HitCoverage=45%, E-value=9e-68, Identity=79%"; Hit description =Transposon protein
  Pfam annotation: Domain name=Root_cap; Domain location=106-162; Score= 113.8; E_value=5.7e-31; Accession=PF06830.3; Description=Root cap
TFGAGHRLYVGARRVVEWDEDEDHIQITLDGEPVDIDAVRNARWESNKQALPGLSVTRMKDVNTVAVELDGVFRISANAVPITEEDDRIHKYGKTGRDSLVHLDLGFQFHNLTRDVDGVLGQTYRPGYVTKLDIRKKMPIMGGAPKYRSSGLFTTDCAVSRFRRGGVAGGGVTTFAS

SEQ ID NO: 89694 - protein, 49 aa, Setaria italica
  Transcript Sequence Number=SeqID_23720
AREASQRPPMAAVVKELTDTRPAAGAGGRSLFKKQGKQGPGSQSHSSSY

SEQ ID NO: 89695 - protein, 79 aa, Setaria italica
  Transcript Sequence Number=SeqID_23721
SNSFLCYFELFTQASVLSDNGQARERKDKTHHSEHVCISYTSYNFQKKCCSSGLCHTDLPSCCYRVRKKKRRKRLKQSV

SEQ ID NO: 89696 - protein, 56 aa, Setaria italica
  Transcript Sequence Number=SeqID_23722
SKLKTTSYCDRPIRPTQLSPGEGCEGSMPPNHTTSSPITLPPKSDHHQLGSSSHAS

SEQ ID NO: 89697 - protein, 52 aa, Setaria italica
  Transcript Sequence Number=SeqID_23723
  Homolog annotation: Hit_ID=Q84QW4; Match level="QueryCoverage=98%, HitCoverage=19%, E-value=4e-10, Identity=68%"; Hit description =Putative auxin-induced protein
  Pfam annotation: Domain name=DUF568; Domain location=1-52; Score= -40.0; E_value=0.027; Accession=PF04526.5; Description=Protein of unknown function (DUF568)
QATGLAADVGVGGKVRLYATLRLDTGMKKVVNHVWQVGSSVTRGAPDIHAMD

SEQ ID NO: 89698 - protein, 117 aa, Setaria italica
  Transcript Sequence Number=SeqID_23724
  Gene Ontology: Mol. function=nucleotide binding; Cellular component =myosin complex; Biological process=protein amino acid phosphorylation
  Homolog annotation: Hit_ID=O24517; Match level="QueryCoverage=53%, HitCoverage=4%, E-value=1e-22, Identity=77%"; Hit description =Unconventional myosin
DILSNMRVLMTEDSNNAESSSFLLDDNSSIPFSVDDITNSVQEKDFSDMKPAEELLENPAFQFYRTRACDVSSFILLDILSDHFLICCKFFQSFLPHNCIWYIAFLSFSLHCLIYSI

SEQ ID NO: 89699 - protein, 190 aa, Setaria italica
  Transcript Sequence Number=SeqID_23725
  Gene Ontology: Mol. function=nucleotide binding; Cellular component =myosin complex; Biological process=protein amino acid phosphorylation
  Homolog annotation: Hit_ID=B9S596; Match level="QueryCoverage=99%, HitCoverage=14%, E-value=5e-99, Identity=86%"; Hit description =Myosin XI, putative
  Pfam annotation: Domain name=Myosin_head; Domain location=1-190; Score=-313.1; E_value=0.00014; Accession=PF00063.13; Description =Myosin head (motor domain)
IPFRRLPHLYDTQMMQQYKGADFGELSPHPFAVADVAYRVMLNEGISQSILVSGESGAGKTESTKMIMRYLAYMGGKAASEGRTVEKQVLQSNPVLEAFGNAKTVRNNNSSRFGKFVEIQFDQKGRISGAAVRTYLLERSRVCQISDPERNYHCFYMLCAAPPEERERYKLGDPRTFHYLNQSNCIKLEG

SEQ ID NO: 89700 - protein, 1293 aa, Setaria italica
  Transcript Sequence Number=SeqID_23726
  Gene Ontology: Mol. function=nucleotide binding; Cellular component =myosin complex; Biological process=signal transduction
  Homolog annotation: Hit_ID=B0CN59; Match level="QueryCoverage=97%, HitCoverage=83%, E-value=0.0, Identity=74%"; Hit description=Myosin XI-2
  Pfam annotation: Domain name=DIL; Domain location=1114-1221; Score =205.1; E_value=1.8e-58; Accession=PF01843.11; Description=DIL domain
  Pfam annotation: Domain name=IQ; Domain location=517-537; Score=16.9; E_value=0.087; Accession=PF00612.19; Description=IQ calmodulin -binding motif
  Pfam annotation: Domain name=IQ; Domain location=540-560; Score=27.3; E_value=6.1e-05; Accession=PF00612.19; Description=IQ calmodulin -binding motif
  Pfam annotation: Domain name=IQ; Domain location=565-585; Score=25.6; E_value=0.00021; Accession=PF00612.19; Description=IQ calmodulin -binding motif
  Pfam annotation: Domain name=IQ; Domain location=588-608; Score=23.7; E_value=0.00074; Accession=PF00612.19; Description=IQ calmodulin -binding motif
  Pfam annotation: Domain name=IQ; Domain location=613-633; Score=27.4; E_value=5.7e-05; Accession=PF00612.19; Description=IQ calmodulin -binding motif
  Pfam annotation: Domain name=IQ; Domain location=636-656; Score=29.3; E_value=1.6e-05; Accession=PF00612.19; Description=IQ calmodulin -binding motif
  Pfam annotation: Domain name=Myosin_head; Domain location=5-501; Score=486.9; E_value=2.8e-143; Accession=PF00063.13; Description =Myosin head (motor domain)
  Pfam module annotation: Pfam domain module=DIL::IQ::IQ::IQ::IQ::IQ::IQ ::Myosin_head; Domain location=1114-1221::517-537::540-560::565 -585::588-608::613-633::636-656::5-501
ELISLRDPVSVKYLILSSIPVVLVLNYSCIPERNYHCFYMLCAAPPEERERYKLGDPRTFHYLNQSNCIKLEGLDESKEYLETRKAMDIIGISSEEQEAIFRVVAAILHLGNVEFVEGDDGDSSKPKDEKSLFHLRTAAELFMCDEKALQDSLCQRVIVTRDENIVKTLDPEAAKGSRDALAKTVYSRLFDWLVNKINHSIGQDPNSKCLIGVLDIYGFESFKTNSFEQFCINLTNEKLQQHFNQHVFKMEQEEYTKEEINWSYIEFIDNQDVLDLIEKKPGGIVALLDEACMLPRSTHETFAQKLYTTFKNHKRFAKPKLSRSDFTICHYAGDVTYQTELFLDKNKDYVVAEHQALLSASKCAFVSGLFPLLSEDSSKSSKFSSIGSRFKQQLQSLLETLSATEPHYIRCVKPNNLLKPAIFENQNVLQQLRCGGVMEAIRISCAGYPTRRTFYEFIDRFGILAPDVLSGSSDEVSAVRRLLEKVDLQGYQIGKTKVFLRAGQMAELDARRNEVLGHSASLIQRKVRSFLAQKSFIALRRSALQIQTVCRGELARRVYHNLRREAASLKIQTWYRMHTARKAYNELSASAVTIQSALRGMCARKELHFRRQTRAAIIIQSRCRQFLARLHYSRTKKAAITTQCAWRGKVARKELRKLKMAARETGALQAAKNKLEKQVEELTWRLQLEKRMRADLEEAKSQENAKLQAALQEVQQQYKETKEILVQEREAAKKAAEVAPVIKEVPVVDAELMNKLRDENDKLKTLVSSLEKKIDDTEKKYQETSKVSEERLKQAMDAETKIVDLNMAMLRLQEKISTMESEEKVQRQALLSTPVKSMSEHLSIPIAPKNLENGYHEVEEQKEPQSAPPAIKEYGNGDPKLRKSCADRQLENVDALIDCVGKNLGYCAGKPIAAFTIYKCLLHWKSFEAEKTSVFDRLIQLIGSAIENEDDNCNLAYWLSNTSSLLFLLQRSLKAAGAPGSVSRKKPPQPTSLFGRMALGLRSASFANMHVEATDVVRQVEAKYPALLFKQQLTAYVEKIYGIVRDNIKKELSSLISLCIQAPRTMKASMLRVSARLSGQSQNQSNNWQKIIESLDKLLRTLQDNHVPPVLAQKIFTQIFSYINVQLFNSLLLRRECCSFSNGEYVKAGLAELELWCAKATTEYAASSWDELKHIRQAVGFLVIFQKFRISYDEIVNDLCPILSVQQLYRICTQYWDDKYNTQSVSSDVLSNMRVLMTEDSNNAESSSFLLDDNSSIPFSVDDITNSVQEKDFSDMKPAEELLENPAFQFLQD

SEQ ID NO: 89701 - protein, 122 aa, Setaria italica
  Transcript Sequence Number=SeqID_23727
  Gene Ontology: Mol. function=transferase activity, transferring groups other than amino-acyl groups
  Homolog annotation: Hit_ID=Q339U5; Match level="QueryCoverage=63%, HitCoverage=52%, E-value=8e-17, Identity=55%"; Hit description =Agmatine coumaroyltransferase, putative
SSYAAVVGVIRDAVARVDAEYVQSFVDFGEALERSGERLTATAAVAGTAYCPDLEVDSWLGFGFHDLDFGGGPPCAFLPPVLPLEGLIFFVRSCTAKGGVDLFAALHNEHADAFKQICYSLD

SEQ ID NO: 89702 - protein, 77 aa, Setaria italica
  Transcript Sequence Number=SeqID_23728
QEVVPLRARNVLGADKTRVGMRWIELIRAALNRSSQRVGAGGGGDSGRQKVHPVRDGGAGAGEELAREYRCVVSKQM

SEQ ID NO: 89703 - protein, 296 aa, Setaria italica
  Transcript Sequence Number=SeqID_23729
  Gene Ontology: Mol. function=inositol or phosphatidylinositol phosphatase activity
  Homolog annotation: Hit_ID=B9RM01; Match level="QueryCoverage=83%, HitCoverage=21%, E-value=5e-71, Identity=55%"; Hit description=Type II inositol 5-phosphatase, putative
DFAEPGLCIRFFICFEVERELQGLCDPSVVYSSRLDTDCPVVAAVTAYEACMDVTDSDHKPVRCTFSVDIARVDELTRRQEFGKIIESNEKVRSLLRESHIIPDTIVSTNNIILENQEDVILRISNNCETSKAAFEILCEGQSITKQDGTKSELPPRASFGFPFWLEVQPSVGLIEPGETMEVAVHHEEFFTKEEFVDGVQQNSWCEATRGMGAVLLVNVTGSASTETITHRINVQHCCPVHSAPPPVNPHSITDKPSDAVSGSKNHQSNHLQRSDFANFGSSEVHDLCGVRKRNM

SEQ ID NO: 89704 - protein, 81 aa, Setaria italica
  Transcript Sequence Number=SeqID_23730
LKPCTWIFGDAPRLNQVHHASSSPQPCSHDDGGCNLHAIGGAVKYILFEMVSIYCTDGRYYLWIGEGYTEISEDLKTPICF

SEQ ID NO: 89705 - protein, 120 aa, Setaria italica
  Transcript Sequence Number=SeqID_23731
CNLHAIGGAVKYILCTYSICCMLTPWCVEMVSIYCTDGRYYLWIGEGYTEISEDLKTPYLFLVSDNNYLLYKYNRANESAAFASPFVLSTFNNSMGLPRPVSSISSMQNQSRANKLPFRP

SEQ ID NO: 89706 - protein, 137 aa, Setaria italica
  Transcript Sequence Number=SeqID_23732
VALGYTLLHCKQVASGIIFSATIWRPDAFKYGSCLDPSPQSALCKTNHEQTSSPSVPIPNSRLHSLAASPPIIVAYHGLHSPGRRVRGERRRLGSLRRGHGAVPAPRGRPGEAPHGGGRWAARPRAQRPVRPRRGPR

SEQ ID NO: 89707 - protein, 94 aa, Setaria italica
  misc_feature (20)..(20): Xaa can be any naturally occurring amino acid
  misc_feature (41)..(41): Xaa can be any naturally occurring amino acid
  misc_feature (79)..(79): Xaa can be any naturally occurring amino acid
  Transcript Sequence Number=SeqID_23733
  Homolog annotation: Hit_ID=B6TQ13; Match level="QueryCoverage=100%, HitCoverage=26%, E-value=2e-15, Identity=55%"; Hit description =Flavonol synthase/flavanone 3-hydroxylase
METIAPARVQALAETGVSGXRLPARYIQPPENRPTPSPSPXASALSVPVVDLSSSTPADAVRAACADWGAFHVVGHGVXPGELPHAVRESGLAF

SEQ ID NO: 89708 - protein, 50 aa, Setaria italica
  Transcript Sequence Number=SeqID_23734
LRGAFLSFSTLIARPLRSFSLAARLAFASSSEENWTMPQLPRTLEEVTVP

SEQ ID NO: 89709 - protein, 50 aa, Setaria italica
  Transcript Sequence Number=SeqID_23735
TMIIILTRCIDYTLSEYQKIWLESKYIFIYTTGHLNLHILKHRRHVFQIY

SEQ ID NO: 89710 - protein, 120 aa, Setaria italica
  Transcript Sequence Number=SeqID_23736
  Gene Ontology: Mol. function=nucleic acid binding
  Pfam annotation: Domain name=SPOC; Domain location=4-87; Score=10.1; E_value=0.00062; Accession=PF07744.5; Description=SPOC domain
VRRILICESYRGKCTCAFTVGTDFFGRNHNFLFSTVQREVCRLLPCSDGDQKGFQDFISYLINRECAGVIRVPAVNSMWTRLLFILPPTPDACGMLALPPHPSDCIIVVILPKETTAEAA

SEQ ID NO: 89711 - protein, 80 aa, Setaria italica
  Transcript Sequence Number=SeqID_23737
TDEITVTINTHRKVVVHEQSAGVAYHEAQPFLGLGQGGRSVCRHRLTVPLLKDTTAQLAHAEGQVIKHLCTECQAFSATS

SEQ ID NO: 89712 - protein, 67 aa, Setaria italica
  Transcript Sequence Number=SeqID_23738
TDEITVTINTHRKVVVHEQSAGVAYHEAQPFLGLGQGGRSVCCHRLTVPLLKDTTAQLAHAEGPRLI

SEQ ID NO: 89713 - protein, 60 aa, Setaria italica
  Transcript Sequence Number=SeqID_23739
  Subcellular localization annotation: CTP_CleavageSite=28; ConfidenceScore=5.25e-01
IRRREGAGRPAGVSWCQRVDVPAPPRVRCRTLTLPRSLCTAQSCARPRRGPSPFFNGGAP

SEQ ID NO: 89714 - protein, 72 aa, Setaria italica
  Transcript Sequence Number=SeqID_23740
  Pfam annotation: Domain name=DUF1677; Domain location=1-55; Score= -7.3; E_value=5.7e-05; Accession=PF07911.5; Description=Protein of unknown function (DUF1677)
GDAVSEEVAARGGSVLEVEAAIARHAAFCRSLDGRRTPVAAERLIAAVRRLLRNAGGKEEKAVVVVEIQEAS

SEQ ID NO: 89715 - protein, 141 aa, Setaria italica
  Transcript Sequence Number=SeqID_23741
  Gene Ontology: Mol. function=nucleic acid binding
  Homolog annotation: Hit_ID=B9N1U4; Match level="QueryCoverage=84%, HitCoverage=9%, E-value=3e-44, Identity=66%"; Hit description =Chromatin remodeling complex subunit
  Pfam annotation: Domain name=PHD; Domain location=83-127; Score=19.8; E_value=0.00018; Accession=PF00628.21; Description=PHD-finger
IDFIHKNSRMFYNPFNGNISLQPEPCPPYVSGGILADEMGLGKTVELLACIFAHRRPFSMDFSISQNKTEMSQIKRQKVERVECICGAASESFAYKGLWVQCDICDAWQHADCVGYTPKEDIPFDTAEGVASKIKKKNMKA

SEQ ID NO: 89716 - protein, 104 aa, Setaria italica
  Transcript Sequence Number=SeqID_23742
MDDVFAKIVGPDTRDTKRTYGPVPCTSELRGKTAAKVSLRLAHAAKRNAEEEAATLKKKMMEMEENNRKLQEDLACAKSPASSGVKDRRRMSTDDLQRNQPVNH

SEQ ID NO: 89717 - protein, 168 aa, Setaria italica
  Transcript Sequence Number=SeqID_23743
  Gene Ontology: Mol. function=RNA binding; Cellular component =ribonucleoprotein complex; Biological process=mRNA processing
  Homolog annotation: Hit_ID=B6SWV8; Match level="QueryCoverage=99%, HitCoverage=46%, E-value=4e-83, Identity=85%"; Hit description=CRS2 -associated factor 1
  Pfam annotation: Domain name=CRS1_YhbY; Domain location=67-150; Score= 51.8; E_value=2.7e-12; Accession=PF01985.13; Description=CRS1  YhbY domain
TTLTLDNICFHLEDKTGGKIIYRNINILILHRGRNYDPKQRPAIPLMLWKPLAPIYPRLVQNVAEGMTFEETKELRNKGLNSPPLTKLTRNGVYVNVVDKVREAFKTVEVVRLDCSHVGTSDCKKIGVKLRDLVPCVPILFKDEQIILWSGKVNQEHSVSAQCTSRPQ

SEQ ID NO: 89718 - protein, 231 aa, Setaria italica
  Transcript Sequence Number=SeqID_23744
TIEDVTRNKDSSVSSEEIKQLLHGTRDASEANIESSYKSLLQENIEGSLEDQEETSSHENAPMDGNLTGEDTTENLEQGYIEVPTVEVAMQGETTSSTESIVSTYLDADDSEIKEVVIEDKPGQRDSPPDVQPLDGINIEASTNDNIQTQISHDKEEISAISKIAAVKLMIESDQALEDDKLIHGLGNQDEDSTEWTSCDNLYNGEVVAKCQSSLRNPTAISDQELGNETK

SEQ ID NO: 89719 - protein, 76 aa, Setaria italica
  Transcript Sequence Number=SeqID_23745
  Gene Ontology: Mol. function=oxidoreductase activity
  Homolog annotation: Hit_ID=B9RD96; Match level="QueryCoverage=100%, HitCoverage=11%, E-value=1e-20, Identity=65%"; Hit description =Oxidoreductase, putative
EGLYKQLTVEEVVRRRRSAVDMDGVHVMGRDTFYQMLLHCLPSGKVGSGERQGQQCALPFRVLPWDAEVHAALFVH

SEQ ID NO: 89720 - protein, 103 aa, Setaria italica
  Transcript Sequence Number=SeqID_23746
  Gene Ontology: Cellular component=cytosol
  Homolog annotation: Hit_ID=Q803S3; Match level="QueryCoverage=99%, HitCoverage=35%, E-value=2e-21, Identity=50%"; Hit description =Protein MEMO1
VFLLSPSHRHYTAKCALTKATVYSTPIGDLRVDQEVTEELNNTGKFELMDLSVDEAEHGFEMLLPYLSKVFQGHTVKVVPVLIGSLDFENEAMYGQLLGKYLD

SEQ ID NO: 89721 - protein, 45 aa, Setaria italica
  Transcript Sequence Number=SeqID_23747
VPTPTTAPTTRATPSSTGGASAGEAPLAMGVLACAAGLVGLALMA

SEQ ID NO: 89722 - protein, 74 aa, Setaria italica
  Transcript Sequence Number=SeqID_23748
  Gene Ontology: Mol. function=hydrolase activity, acting on ester bonds; Biological process=lipid metabolic process
  Homolog annotation: Hit_ID=B4G1Z0; Match level="QueryCoverage=83%, HitCoverage=17%, E-value=2e-19, Identity=70%"; Hit description=Alpha- L-fucosidase 2
SNAGDYDGLGCLKKFNDLSTNHNNQLKTQIASLQSKYPNARIMYADFYSGVYDMVKNPGSYGTFLFLFFLSSQP

SEQ ID NO: 89723 - protein, 102 aa, Setaria italica
  misc_feature (95)..(95): Xaa can be any naturally occurring amino acid
  Transcript Sequence Number=SeqID_23749
  Gene Ontology: Mol. function=hydrolase activity, acting on ester bonds; Biological process=lipid metabolic process
  Homolog annotation: Hit_ID=B6TLP8; Match level="QueryCoverage=74%, HitCoverage=19%, E-value=1e-20, Identity=70%"; Hit description=Alpha- L-fucosidase 2
  Subcellular localization annotation: CTP_CleavageSite=60; ConfidenceScore=5.40e-01
AAETFAQADAPPSPFASCWLWSHWSAGSKRPRIMGSHRTATGAAPASALMLTLLFASWVLAAAQNYSAIFNFGDSITDTGNLCTNGRPSMITFTXPPYGETY

SEQ ID NO: 89724 - protein, 228 aa, Setaria italica
  misc_feature (57)..(57): Xaa can be any naturally occurring amino acid
  Transcript Sequence Number=SeqID_23750
  Gene Ontology: Mol. function=hydrolase activity, acting on ester bonds; Biological process=lipid metabolic process
  Homolog annotation: Hit_ID=B6TLP8; Match level="QueryCoverage=97%, HitCoverage=58%, E-value=1e-112, Identity=85%"; Hit description =Alpha-L-fucosidase 2
  Pfam annotation: Domain name=Lipase_GDSL; Domain location=2-215; Score=72.7; E_value=1.4e-18; Accession=PF00657.14; Description=GDSL -like LipaseAcylhydrolase
MGPLFQILSSVCGQNCKSYLGNSLFVFGEFGGNDYNAMLFGNYNTDQASTYTPQIVXTIANGIEKLIAMGATDIVVPGVLPIGCFPIYLTIYGTSNAGDYDGLGCLNKFNDLSTYHNTLLKKRVDIIQSRHRKTVRIMYADFYSGVYDMVRNPQNYGFSSVFETCCGSGGGKYNYQNSARCGMQGASACASPASHLSWDGIHLTEAAYKQITDGWLKGPYCRPPMLHS

SEQ ID NO: 89725 - protein, 366 aa, Setaria italica
  Transcript Sequence Number=SeqID_23751
  Gene Ontology: Mol. function=hydrolase activity, acting on ester bonds; Biological process=lipid metabolic process
  Homolog annotation: Hit_ID=A1C0L3; Match level="QueryCoverage=90%, HitCoverage=91%, E-value=1e-171, Identity=84%"; Hit description =UCW116, putative lipase
  Pfam annotation: Domain name=Lipase_GDSL; Domain location=33-354; Score=160.6; E_value=4.5e-45; Accession=PF00657.14; Description=GDSL- like LipaseAcylhydrolase
MRSGHRMAGAAALVAVVCASWAAAAAAQKYNAIFSFGDSITDTGNLCTNGKPSQITFTQPPYGETYFGTPTCRCCDGRVIVDFLSSKFGLPFLPPSKSTTADFKKGANMAITGATAMDAPFFRSLGLSDKIWNNGPISFQLQWFQQITSSVCGQNCKSYLGNSLFVFGEFGGNDYNAMLFGNYNTDQASTYTPQIVSTIANGIEKLIAMGATDIVVPGVLPIGCFPIYLTIYGTSNAGDYDGLGCLKKFNDLSTNHNNQLKTQIASLQSKYPNARIMYADFYSGVYDMVKNPGSYGFSTAFQTCCGSGGGKYNYQNSARCGMSGASACSNPAAHLSWDGIHLTEAAYKQITDGWLSGAHCSPAILH

SEQ ID NO: 89726 - protein, 365 aa, Setaria italica
  misc_feature (94)..(94): Xaa can be any naturally occurring amino acid
  misc_feature (271)..(271): Xaa can be any naturally occurring amino acid
  Transcript Sequence Number=SeqID_23752
  Gene Ontology: Mol. function=hydrolase activity, acting on ester bonds; Biological process=lipid metabolic process
  Homolog annotation: Hit_ID=B4G1Z0; Match level="QueryCoverage=94%, HitCoverage=93%, E-value=1e-180, Identity=92%"; Hit description =Alpha-L-fucosidase 2
  Pfam annotation: Domain name=Lipase_GDSL; Domain location=28-353; Score=164.7; E_value=2.8e-46; Accession=PF00657.14; Description=GDSL- like LipaseAcylhydrolase
  Subcellular localization annotation: CTP_CleavageSite=43; ConfidenceScore=5.18e-01
MAARLVVAFLALSSACFLAVSGQKYNAIFSFGDSMSDTGNLCVNGAPAGLTLTQPPYGETFFGRATCRCSDGRLVVDFLAEKYGLPLLKPSKQXGGADFKKGANMAIIGATTMDSGFFQSLGIADKIWNNGPLNTQIQWFQQLMPSICGSTQACKSYLSKSLFVLGEFGGNDYNAQIFGGYSPEQASGQSATIVDAIGKGVDQLISLGATSIVVPGVLPVGCFPIYLTLYQTSNAGDYDQYGCLKRFNALSSRHNQLLQAKVSSLQSKYPXGARIMYADFYSHVYDMVRSPGSYGFSTNLRACCGAGGGKYNYQNSARCGMSGASACSNPESSLSWDGIHLTEAAYKKIADGWVSGAYCHPAIGA

SEQ ID NO: 89727 - protein, 103 aa, Setaria italica
  Transcript Sequence Number=SeqID_23753
SIGQFVKDLGNLGELRALRIFTGLFKDKRMQSDFVESLGNLHKLQRLQLFGESATIEDGEQPWHKNRWQFLLLLPQGLCHLVLATVPELPPCIDPTRLLNLSH

SEQ ID NO: 89728 - protein, 147 aa, Setaria italica
  misc_feature (41)..(41): Xaa can be any naturally occurring amino acid
  Transcript Sequence Number=SeqID_23754
  Gene Ontology: Mol. function=protein serine/threonine kinase activity; Biological process=protein amino acid phosphorylation
  Homolog annotation: Hit_ID=B6U4S9; Match level="QueryCoverage=100%, HitCoverage=17%, E-value=4e-54, Identity=71%"; Hit description =Protein kinase G11A
CPGGDLHTLRQRQPGKHFSEYAASYALCKVQNSRIESNSFXVMCREQSAPRFYAAEVLLALEYLHMLGVVYRDLKPENVLVRDDGHIMLSDFDLSLRCAVSPTLIRTSAFDTDPRRAGGSFCVQPACMEPTSACIQPACFLPKLFGQ

SEQ ID NO: 89729 - protein, 684 aa, Setaria italica
  misc_feature (92)..(92): Xaa can be any naturally occurring amino acid
  Transcript Sequence Number=SeqID_23755
  Gene Ontology: Mol. function=protein serine/threonine kinase activity; Biological process=protein amino acid phosphorylation
  Homolog annotation: Hit_ID=B6U4S9; Match level="QueryCoverage=100%, HitCoverage=100%, E-value=0.0, Identity=86%"; Hit description =Protein kinase G11A
  Pfam annotation: Domain name=Pkinase; Domain location=292-626; Score =235.9; E_value=1e-67; Accession=PF00069.17; Description=Protein kinase domain
  Pfam annotation: Domain name=Pkinase_Tyr; Domain location=292-620; Score=-70.4; E_value=4.8e-09; Accession=PF07714.9; Description =Protein tyrosine kinase
  Pfam module annotation: Pfam domain module=Pkinase::Pkinase_Tyr; Domain location=292-626::292-620
MEAVDKIAEPKDPLVLTARKVQSLEPPIPIKASWKGKNSQQQEEKDLPADGEESFRSLDSSDEGGRSSFSGASHPPEPIDMDIMKTVYVAIXDEERSEPPVSLVRGVSMKGPFMDDLSIRVAGTKANLVVGAEGLAEERNVSGSAVASVATARSSQATSLPQDSEEKECVWDASLPPSGNVSPHSSIDSMGVVTAMSTLNSCASTYKSEAVASEGMLTVERNCESVKGVRGDLLESAKTSMSRASDSSGVSDDSSWSHITGGASKPHKGNDPRWKAIHAVRTRDSVLGMSHFRLLKRLGCGDIGSVYLSELSGTRCYFAMKVMDKASLASRKKLNRAQTEREILQLLDHPFLPTLYTHFETDRFSCLVMEFCPGGDLHTLRQRQPGKHFSEYAARFYAAEVLLALEYLHMLGVVYRDLKPENVLVRDDGHIMLSDFDLSLRCAVSPTLIRTSAFDTDPRRAGGSFCVQPACMEPTSACIQPACFLPKLFGQKSKKKIRKTRSELGQNVGTLPELVAEPTSARSMSFVGTHEYLAPEIIKGEGHGSAVDWWTFGIFLHELLFGKTPFKGSGNRATLFNVVGQQLKFPESPSTSYSSRDLIRGLLVKEPQNRLGVKRGATEIKQHPFFEGVNWALIRCSTPPEVPRPVEAELPVKYGVAEAIGSNSKRIVGADVKSGGKYLDFEFF

SEQ ID NO: 89730 - protein, 63 aa, Setaria italica
  Transcript Sequence Number=SeqID_23756
ICCTSIWWYLLPILSGEEALGVTRSPAAKARKDVGNKVGDKLAVAPPPSHGKKGSSGAAHEVI

SEQ ID NO: 89731 - protein, 61 aa, Setaria italica
  Transcript Sequence Number=SeqID_23757
KSTISSKKNSKPRIGEQPLVQCVCYFPPEAKSELKLVNCSNQWGWLSRKDYARSKNYYFSS

SEQ ID NO: 89732 - protein, 116 aa, Setaria italica
  Transcript Sequence Number=SeqID_23758
MAPANLAAVLVLAVVVCALAAAPAAAYYSGGAPAQESCQTQIEYFTNCLAHDEIREQCCTVVENEKCLCQLKREVSVPCSLHRRHERKCGPIKGPAAPTVKLAELQHLPCFKTLKC

SEQ ID NO: 89733 - protein, 519 aa, Setaria italica
  misc_feature (216)..(216): Xaa can be any naturally occurring amino acid
  Transcript Sequence Number=SeqID_23759
  Gene Ontology: Mol. function=transporter activity; Cellular component= membrane; Biological process=oligopeptide transport
  Homolog annotation: Hit_ID=O48542; Match level="QueryCoverage=97%, HitCoverage=87%, E-value=0.0, Identity=74%"; Hit description=Peptide transporter
  Pfam annotation: Domain name=MFS_1; Domain location=8-447; Score= -14.7; E_value=0.085; Accession=PF07690.8; Description=Major Facilitator Superfamily
  Pfam annotation: Domain name=PTR2; Domain location=38-439; Score =499.2; E_value=5.7e-147; Accession=PF00854.13; Description=POT family
  Pfam module annotation: Pfam domain module=MFS_1::PTR2; Domain location=8-447::38-439
TSARGTSIAAKNVTNWSGTCYITPLIGAFLADAYMGRYWTIASFMIIYIIGLALLTMASSVKGLVPSCDISRTCHPTEPQTAVVFVALYLIALGTGGIKPCVSSFGADQFDENDAKEQKSKSSFFNWFYFSINIGALVASTVLVYVQTYVGWGWGFGIPAVVMAIAVVSFFIGTPLYRHQRPGGSPITRIAQVLVASARKWSVAVPADKSLLHETXDGECGIKGSRKLEHTDQFGCLDKAAVETAADRTAASPWRLCTVTQVEELKSVVRLLPIWATGIVFATVYGQMGTMFVLQGNTLDQRMGPKFSVPSATLSMVDTISVIIWVPIYDRIIVPVVRSYTGRPRGFTQLQRMGIGLVISIFSMVAAGVLDIVRLRAVARHGLYGDKDVVPISIFWQIPQYFIIGCAEVFTFVGQLEFFYDQAPDAMRSLCSALSLTTVALGNYLSTVLVTIVTRITTRHGKLGWIPDNLNLGHLDYFFWLLAVLSLLNFLVYLVIASWYKYKKTADYPDAKGEQNQEH

SEQ ID NO: 89734 - protein, 182 aa, Setaria italica
  Transcript Sequence Number=SeqID_23760
  Gene Ontology: Mol. function=protein serine/threonine kinase activity; Biological process=protein amino acid phosphorylation
  Pfam annotation: Domain name=PAN_2; Domain location=1-67; Score=97.9; E_value=3.4e-26; Accession=PF08276.3; Description=PAN-like domain
GSSDGFWVVNRMKLPQATDATVYAGMTLDQCRQACLGNCSCGAYAAANNSGGVGVGCVLWTVDLLDMRQYPIVVQDVYIRLAQSDIDALKAAAADNHERSHKGKLIIIVVATISGVLLLLAAAGCCCFLMKKGRSKRESDDMASLPPSTTTGDFVLPYRPRSQPSLSPGPGQQPDEGSEGMR

SEQ ID NO: 89735 - protein, 54 aa, Setaria italica
  Transcript Sequence Number=SeqID_23761
SIERTDNILNRNLAHIVRKKLSSFERMNNTLLCYTMFSQSSNTLFTNIHRSVRY

SEQ ID NO: 89736 - protein, 111 aa, Setaria italica
  Transcript Sequence Number=SeqID_23762
PRIRGERSPPRGSRHRLKRRAPLDLRSRQTRVLHDRVTYFFLLSLIHPWICCEGSHPRPSSSAAASSSMSPMVAHGSASAGKARARRSSSNHAMASNTARCISSACSVIFS

SEQ ID NO: 89737 - protein, 119 aa, Setaria italica
  misc_feature (10)..(10): Xaa can be any naturally occurring amino acid
  Transcript Sequence Number=SeqID_23763
  Gene Ontology: Mol. function=protein binding; Biological process =apoptosis
  Homolog annotation: Hit_ID=Q2R0G9; Match level="QueryCoverage=99%, HitCoverage=8%, E-value=2e-25, Identity=53%"; Hit description=NB-ARC domain containing protein
DDLQILAKKXQKLCMLFLLDNSYDEIQLTFHEDEFPKLKHLTVKCLKIREISFAEKSACKLEKIIWSFIELKSLSGIDKLPELKELVFNGDSIPLEVRRDIHAHDKKLIHNKTQHQDKE

SEQ ID NO: 89738 - protein, 150 aa, Setaria italica
  Transcript Sequence Number=SeqID_23764
  Gene Ontology: Mol. function=nucleotide binding; Biological process =defense response
  Homolog annotation: Hit_ID=Q5Z5Z4; Match level="QueryCoverage=78%, HitCoverage=10%, E-value=1e-24, Identity=51%"; Hit description =Putative Pib
LDKGIRTKLTALHTLGVVNAAITPRKATIKELKMLTQLRKLGVSGINKKNCKQVSEAFSCHVHLESLSLWLRKGDQCCLQDISSPPKNLQTLKMYGLVKVVPPWIKDLHKLTKLELEMTISQEGKIIEILGEIKELTILRLRVKPLQDGD

SEQ ID NO: 89739 - protein, 465 aa, Setaria italica
  Transcript Sequence Number=SeqID_23765
  Gene Ontology: Mol. function=ATP binding; Cellular component=nucleus; Biological process=ubiquitin-dependent protein catabolic process
  Homolog annotation: Hit_ID=Q6K8E1; Match level="QueryCoverage=78%, HitCoverage=100%, E-value=0.0, Identity=90%"; Hit description=F-box containing protein TIR1-like
MTISDDDLHLVAKSFPLFRELSLVCCDGFSTVGLAAIAKLCRHLRVLDLIEDYVEDEDDELVDWISKFPESNTSLESLVFDCVSVPFNFEALEVLVARSPALRRLRVNHHVSVEQLRRLMARAPQLTHFGTGAFRSEAAPGGGLSVTELATSFAASRSLICLSGFRDVNPEYLPAIYPVCAKLTSLNFSFASLTAEELKPVIRNCINLRTFWVLDTVGDEGLRAVADTCSELRELRVFPLDASEDSEGSVSDVGLQAISEGCRKLESILYFCQRMTNAAVIAMSKNCPDLVVFRLCIMGRHRPDRITGEPMDDGFGAIVMNCKKLTRLSVSGLLTDKAFAYIGKYGKLIKTLSVAFAGNSDMSLQYIFEGCTKLQKLEVRDSPFSDKGLLSGLNYFYNMRFLWMNSCRLTMRGCKDVAQQMQNLVVEVIKDHPDDEGEAEIVDKLYLYRSLAGPRNDAPPFVTLL

SEQ ID NO: 89740 - protein, 40 aa, Setaria italica
  Transcript Sequence Number=SeqID_23766
LISSDVDILKLISSDGDIFKLVVTLLITSTNALACITISI

SEQ ID NO: 89741 - protein, 252 aa, Setaria italica
  Transcript Sequence Number=SeqID_23767
  Gene Ontology: Mol. function=electron carrier activity; Biological process=response to oxidative stress
  Homolog annotation: Hit_ID=Q5U1M7; Match level="QueryCoverage=99%, HitCoverage=71%, E-value=4e-74, Identity=59%"; Hit description=Class III peroxidase 66
  Pfam annotation: Domain name=peroxidase; Domain location=1-212; Score= 60.0; E_value=8.9e-15; Accession=PF00141.15; Description=Peroxidase
IGLAGFEVIDTIKQKVGANTSCADILVFAGRDAADILSGGKIFYKLDGGLKDGVVSSAAAADANLPESTFDFTDLQNNFAASGRGFTVKELVALSGAHSIGVAHLSSYQDRLAADATPIDSDYQLALNKTTPLELLKKGQNPTVPNNPRDASAAFQKDAAYDPVTLGVSPTRNVLDNSYYHNNLENKVLFKSDWVLRTDGVAAGKLQDYKDNAAMWNSDFAAAMAKLSGLPPQGKNLEIRKNCRFTNQQYYY

SEQ ID NO: 89742 - protein, 46 aa, Setaria italica
  Transcript Sequence Number=SeqID_23768
MASPANGALERCKSAITAATSVVAAAMLLRRLVADVLPAGARPLVG

SEQ ID NO: 89743 - protein, 78 aa, Setaria italica
  Transcript Sequence Number=SeqID_23769
KLENRNRRRRPAASAAAGRPDPPASRSPTRSRQLHLRPRDLVAASAHDHDHAVKPQRQRPIPPAPLASSSNPPRPLHH

SEQ ID NO: 89744 - protein, 93 aa, Setaria italica
  Transcript Sequence Number=SeqID_23770
  Gene Ontology: Mol. function=protein serine/threonine phosphatase activity; Cellular component=protein serine/threonine phosphatase complex; Biological process=protein amino acid dephosphorylation
  Homolog annotation: Hit_ID=Q0J2L7; Match level="QueryCoverage=97%, HitCoverage=25%, E-value=3e-29, Identity=69%"; Hit description =Probable protein phosphatase 2C 68
PIGDGYLKPYVSSVPEVTVTDLVEDDECLILASDGLWDVVSNEAACEVARACLRRGREKWCAEAAALLTKLALARRSADNVSVVVVDLRRKNH

SEQ ID NO: 89745 - protein, 193 aa, Setaria italica
  misc_feature (19)..(19): Xaa can be any naturally occurring amino acid
  Transcript Sequence Number=SeqID_23771
  Gene Ontology: Mol. function=transition metal ion binding; Cellular component=integral to membrane
  Homolog annotation: Hit_ID=B6UIE2; Match level="QueryCoverage=93%, HitCoverage=75%, E-value=1e-94, Identity=91%"; Hit description=Fiber protein Fb38
  Pfam annotation: Domain name=Cyt-b5; Domain location=2-85; Score =18.7; E_value=0.0017; Accession=PF00173.20; Description=Cytochrome b5-like HemeSteroid binding doma
PSSSSSTVLGSRSVFDVTXGRSHYGPGGGYHHFAGRDASRAFVSGNFTGDGLTDSLHGLSSSEVNSIVDWRKFYFERYIFAGKLIGRYYDNQGNPTKYLKGVEVKAKRGAQLLEKQKSEEAKIPSCNSKWSQQEGGEVWCDTGYPRLVRRPGDIALTGQVSQRCACFQEDELNKPGLVAYQGCDHLSKSCKVN

SEQ ID NO: 89746 - protein, 53 aa, Setaria italica
  Transcript Sequence Number=SeqID_23772
MTGRCQFLATKEEGDGWGWAKFMAAKSVEDWYLVKGSCLIEADVAIVGSSKMA

SEQ ID NO: 89747 - protein, 92 aa, Setaria italica
  Transcript Sequence Number=SeqID_23773
  Gene Ontology: Mol. function=NAD(P)H dehydrogenase (quinone) activity; Cellular component=plasma membrane; Biological process =oxidation reduction
  Homolog annotation: Hit_ID=B6UDE7; Match level="QueryCoverage=100%, HitCoverage=45%, E-value=7e-35, Identity=83%"; Hit description=NADPH quinone oxidoreductase 1
MEASAAKPVVLRVAAISGSIRKASWHRGLIRAAAEVCADSIPGLRVDDVDVAGLPMLNTDLETDGDRGFPPAVEAFRASVRDADCFLFASPE

SEQ ID NO: 89748 - protein, 81 aa, Setaria italica
  Transcript Sequence Number=SeqID_23774
RRLLARLRDAYVNAMLRLASSAAVAGYGAAGPYCTAADPFARPRPLTGDYDEKALVEIYRAILARGEAAPVVAAARLPAVV

SEQ ID NO: 89749 - protein, 141 aa, Setaria italica
  Transcript Sequence Number=SeqID_23775
  Gene Ontology: Mol. function=DNA binding; Cellular component=nucleus; Biological process=regulation of transcription, DNA-dependent
  Homolog annotation: Hit_ID=Q8LT05; Match level="QueryCoverage=99%, HitCoverage=32%, E-value=1e-30, Identity=61%"; Hit description =Transcription factor PCF7
QSNQHQIFSHQGMISGAGVPGWPEHGQRMPPWHASESGAGDGRGAGNGDGYMFGAQPRQGLEHQSQLFSQGEPLQSSGGWASSARTWLDPLAAIHQPAAMAGQIGFSHLVGAGGGFMGFLAPAAAQRLQSEEEQGSEAMRE

SEQ ID NO: 89750 - protein, 76 aa, Setaria italica
  Transcript Sequence Number=SeqID_23776
  Subcellular localization annotation: CTP_CleavageSite=61; ConfidenceScore=5.30e-01
VEYWLTLDLLSSSSAPCGPAVRVADSREVNHVIPGKRTRRARLPTDGSMASRPFRSVQQSRAAQRSCCGWSLPSVR

SEQ ID NO: 89751 - protein, 88 aa, Setaria italica
  Transcript Sequence Number=SeqID_23777
  Gene Ontology: Mol. function=drug transporter activity; Cellular component=membrane; Biological process=multidrug transport
  Homolog annotation: Hit_ID=Q10A00; Match level="QueryCoverage=97%, HitCoverage=17%, E-value=8e-29, Identity=69%"; Hit description=MATE efflux family protein, expressed
LLQNIINILSLMFVGHLGELPLAGASLANSVASVTGFSIITGMATALDTLCGQAFGARQHNLLGVYKQRAMVVLGLTCVPIAVVWAHA

SEQ ID NO: 89752 - protein, 89 aa, Setaria italica
  Transcript Sequence Number=SeqID_23778
  Gene Ontology: Mol. function=serine-type endopeptidase activity; Biological process=negative regulation of catalytic activity
  Homolog annotation: Hit_ID=B9RHC5; Match level="QueryCoverage=98%, HitCoverage=11%, E-value=3e-20, Identity=57%"; Hit description=Xylem serine proteinase 1, putative
AVAKGKLLLVCSAGNSGPYSETVINSAPWIVTVAAGTLDRTFLTKITLGNNSTYVGQTLYSGKHPAKSMRVVYAEDIASNNADDTDAKK

SEQ ID NO: 89753 - protein, 118 aa, Setaria italica
  Transcript Sequence Number=SeqID_23779
  Gene Ontology: Cellular component=membrane
  Homolog annotation: Hit_ID=B9SL59; Match level="QueryCoverage=100%, HitCoverage=16%, E-value=1e-45, Identity=70%"; Hit description =Catalytic, putative
LGECRCFHGYSGKGCEEVLKLECNLPSSPEWPAGRWIVSICAAHCDTTRAMCFCGPGTKYPDRPVAEACGFKTIFPAKPDDPKLTDWKTPDLENVFTTNRSKLGWCNVVPEDAYSSKV

SEQ ID NO: 89754 - protein, 75 aa, Setaria italica
  Transcript Sequence Number=SeqID_23780
MHRTWPITPHPIPHRIQSRQGATYATWLTIPILSMWFVWNSAQESSYQDRSLTNSNKSKSSEIQSQHDSSILAQV

SEQ ID NO: 89755 - protein, 78 aa, Setaria italica
  Transcript Sequence Number=SeqID_23781
  Gene Ontology: Mol. function=transferase activity, transferring glycosyl groups; Biological process=metabolic process
  Homolog annotation: Hit_ID=Q8LKT1; Match level="QueryCoverage=100%, HitCoverage=17%, E-value=1e-40, Identity=89%"; Hit description =Putative glucosyl transferase
PQQRVLSHPSVACFMTHCGWNSTMEGVLHGVPFLCCPYFSDQFCNQSYVCNVWKTGLKLCANEQGVITKEEIKDKVAQ

SEQ ID NO: 89756 - protein, 253 aa, Setaria italica
  Transcript Sequence Number=SeqID_23782
  Gene Ontology: Mol. function=voltage-gated potassium channel activity; Cellular component=integral to membrane; Biological process=potassium ion transport
  Homolog annotation: Hit_ID=Q7XUW4; Match level="QueryCoverage=100%, HitCoverage=35%, E-value=1e-122, Identity=81%"; Hit description =OSJNBa0027P08.8 protein
  Pfam annotation: Domain name=Ank; Domain location=131-163; Score =22.4; E_value=0.0019; Accession=PF00023.22; Description=Ankyrin repeat
  Pfam annotation: Domain name=Ank; Domain location=195-227; Score =35.8; E_value=1.7e-07; Accession=PF00023.22; Description=Ankyrin repeat
  Pfam annotation: Domain name=Ank; Domain location=98-130; Score=51.5; E_value=3.2e-12; Accession=PF00023.22; Description=Ankyrin repeat
  Pfam module annotation: Pfam domain module=Ank::Ank::Ank; Domain location=131-163::195-227::98-130
PYSVRVCELCSVLRIDRQSLTSILQVYSKDNRQILSNLLKGRKSESKGNQLESDMAYLISRQEADLVIGVNNAAYHGDLLRLKGLISAGADPSKPDYDGRTALHVAALRGYEDIVRFLIQRGANVNSIDKFGNSPMLLALKSGHDRITSLLAKHGAALNLEDAGGYLCRVLTDGRIDLLKRLLSFGVDPNCKNYDQRTPLHIAAGEGLHLVAGMLIDFGADVQAKDRWGNTPLDEGRRCSSKPLIRILEQART

SEQ ID NO: 89757 - protein, 88 aa, Setaria italica
  Transcript Sequence Number=SeqID_23783
GLRLSLFGRTLRFKLGGCVEVAGKKDGACVWGVGRSRRMAWGHGRRGREAMAGAPVPLLSSTAPTSAASTRRIGVLLEAGRTELGGFA

SEQ ID NO: 89758 - protein, 248 aa, Setaria italica
  Transcript Sequence Number=SeqID_23784
  Gene Ontology: Mol. function=transferase activity, transferring nitrogenous groups; Biological process=cellular amino acid and derivative metabolic process
  Homolog annotation: Hit_ID=Q2R2Q2; Match level="QueryCoverage=82%, HitCoverage=51%, E-value=1e-78, Identity=76%"; Hit description =Tyrosine/nicotianamine aminotransferases family protein
KGHNRRSSMENGAGNEAAAAWNFAPNDSLLGVTALSVRGVLGSIKAGMVEDSGGGDGERPVIPLGHGDPSAFPCFRTAPEAVDAVAGALRSGEYNSYANATCVGLKLARRSISQYLSRDLPYELSADDVYLTSGCTQAIEIVCSVLARHGANVLLPRPGYLFYEARAVLNGMEARYFDLVAERGWEVDLDGVQALADRNTVAMVIVNPGNPCGNVYTYEHLAKVAEMARKLGIFVIADEVYAHLTFGE

SEQ ID NO: 89759 - protein, 67 aa, Setaria italica
  Transcript Sequence Number=SeqID_23785
LLDWLSIKHALVCKSNLYGELRLVLVPLCHKRLRHGCVGGCYIHVELFVAGPKAFGIGKLCSCSCCE

SEQ ID NO: 89760 - protein, 55 aa, Setaria italica
  Transcript Sequence Number=SeqID_23786
GTFYSMRPLASPPTHCAAAAAGAGGARAAASPASEPPVPLVAGPTEPRRGHRRGR

SEQ ID NO: 89761 - protein, 173 aa, Setaria italica
  Transcript Sequence Number=SeqID_23787
VGFHTSDYYKIRAVIADLRVRFVQVYQATDFRNTDAAREILKEIKGVMELSKKMRLKLGATSEPVKPTEKPAAGLVKDEPVKQSEKLSAGPVTEEPVKPAEKPSAGPVKDEPVKPLEKPSAEPVKDVPMKPTEPAPAPAGENNQVPGVGQTTISPNNAGVDSAVKNDNSDVQQ

SEQ ID NO: 89762 - protein, 83 aa, Setaria italica
  Transcript Sequence Number=SeqID_23788
ERVGRWVGGWAGGSRAARSHGLGARDLSGAGHGDRWGCLRGGIAIGAKELVARAANWLDSRRRLRGFRLLAQSRRRGEGSGET

SEQ ID NO: 89763 - protein, 31 aa, Setaria italica
  Transcript Sequence Number=SeqID_23789
RLAKLVEKVLVGDGPTGPKMHGNWRNDEREA

SEQ ID NO: 89764 - protein, 86 aa, Setaria italica
  Transcript Sequence Number=SeqID_23790
  Pfam annotation: Domain name=zf-CCHC; Domain location=2-19; Score =35.4; E_value=2.3e-07; Accession=PF00098.15; Description=Zinc knuckle
PPTCYKCGVAGHIARNCPQGIDDNFKARRDGLNFREKWQLRQRRFGSPSRRRPEVHVHPLDQTNHRVQDGRKPFSERNMRLPRLSN

SEQ ID NO: 89765 - protein, 103 aa, Setaria italica
  Transcript Sequence Number=SeqID_23791
AARGGGDVAASWRHDDPLPVVDVLRREDRDHREDEQEHGGDDGGENGRRRRAPLPGAAGWGRSTPRVGRREQRRASGALQHRRISNGRDHGCLRKHQAGFLDI

SEQ ID NO: 89766 - protein, 131 aa, Setaria italica
  misc_feature (105)..(105): Xaa can be any naturally occurring amino acid
  misc_feature (125)..(125): Xaa can be any naturally occurring amino acid
  Transcript Sequence Number=SeqID_23792
  Gene Ontology: Cellular component=endoplasmic reticulum membrane
  Homolog annotation: Hit_ID=Q9FZ33; Match level="QueryCoverage=87%, HitCoverage=23%, E-value=1e-10, Identity=35%"; Hit description =Protein AUXIN RESPONSE 4
PAEAAAAVARAVEALGVAPVHLVLHDSSLAAGAAFASANPGAVRSVTLIDATASVPAFPAAVFDVPVLGRLVLRVPALFRGLVRLCCVRGMGAEEVEAHRETMAXGEGRTHEVIEAWKAMNHSFXLGEWEG

SEQ ID NO: 89767 - protein, 261 aa, Setaria italica
  misc_feature (145)..(145): Xaa can be any naturally occurring amino acid
  Transcript Sequence Number=SeqID_23793
  Gene Ontology: Mol. function=nucleoside-triphosphatase activity; Cellular component=cytoplasm; Biological process=protein metabolic process
  Homolog annotation: Hit_ID=Q9SYS9; Match level="QueryCoverage=100%, HitCoverage=44%, E-value=1e-133, Identity=90%"; Hit description=101 kDa heat shock protein (Fragment)
  Pfam annotation: Domain name=AAA_2; Domain location=131-261; Score =271.0; E_value=2.7e-78; Accession=PF07724.6; Description=ATPase family associated with various
  Pfam annotation: Domain name=AAA_5; Domain location=135-261; Score= -6.4; E_value=0.0032; Accession=PF07728.6; Description=ATPase family associated with various
  Pfam module annotation: Pfam domain module=AAA_2::AAA_5; Domain location=131-261::135-261
KKERIDEIRKLKQRREELMFSLQEAERRMDLARVADLKYGALQEIDAAIARLEGETGENLMLTENVGPEQIAEVVSRWTGIPVTRLGQNDKERLVGLADRLHQRVVGQAEAVSAVAEAVLRSRAGLGRPQQPTGSFLFLGPTGVXGKTELAKALAEQLFDDENLLVRIDMSEYMEQHSVARLIGAPPGYVGHEEGGQLTEQVRRRPYSVILFDEVEKAHVSVFNTLLQVLDDGRLTDGQGRTVDFRNTVIIMTSNLGAEHL

SEQ ID NO: 89768 - protein, 236 aa, Setaria italica
  Transcript Sequence Number=SeqID_23794
  Gene Ontology: Mol. function=microtubule motor activity; Cellular component=microtubule associated complex; Biological process =microtubule-based movement
  Homolog annotation: Hit_ID=B9T3J4; Match level="QueryCoverage=100%, HitCoverage=22%, E-value=8e-88, Identity=67%"; Hit description =Bipolar kinesin KRP-130, putative
KTCIIATIAPSVHCLEETLSTLDYAHRAKHIKNKPEVNQKMMKSALIKDLYFEMDRLKQELFATREKNGVYIPREQYLADEAEKKAMSEKLDRLELVLESKDKQLDELQGLNESQKLLSADLTDKIQRLQKKMKETECTLADLEERYMHANDKIKEKQYLIENLLKSEKVLVGEAQTLRSELENTAGDLYGLFSKLERKEKIEDANRSIVQQFHSQLTQDMSLLHRTVSTSVYQQE

SEQ ID NO: 89769 - protein, 83 aa, Setaria italica
  Transcript Sequence Number=SeqID_23795
  Subcellular localization annotation: CTP_CleavageSite=9; ConfidenceScore=5.53e-01
RRRHWHTATATATSTTTTLSLSPSPGTQRSDEPSRALLLPHLRIKNGLNSRKANTTASGQPAYTPRTDTQTRREKGESAEEQL

SEQ ID NO: 89770 - protein, 64 aa, Setaria italica
  Transcript Sequence Number=SeqID_23796
YKIVKHESSYEIIRICHCYCFVWRLERVISYGLDMASDIITLQNNLASSQSNDTTLWDVHEYSI

SEQ ID NO: 89771 - protein, 89 aa, Setaria italica
  Transcript Sequence Number=SeqID_23797
TKQAASRRTQANTFEGFEEEREASKGERQRELLLLLLPPHCIESPIPSPLRSSPLPIQQGGSKQALAWCIVHCPSPKHRAVFHAAAVAI

SEQ ID NO: 89772 - protein, 180 aa, Setaria italica
  Transcript Sequence Number=SeqID_23798
  Gene Ontology: Mol. function=voltage-gated potassium channel activity; Cellular component=integral to membrane; Biological process=potassium ion transport
  Homolog annotation: Hit_ID=Q69KL7; Match level="QueryCoverage=99%, HitCoverage=26%, E-value=1e-76, Identity=74%"; Hit description =Putative cyclic nucleotide and calmodulin-regulated ion channel
DKGAAYNLLLYMIASHVLGALWYLLSVDRQFACWKKYCNETEIRYLYCGVIPDPSWNGTLVFSRCNASSKPDFDFGMFQPLLYNETPNQSFLKKYVYCLWWGLQNLSCYGQTLTVSTFLGETLYAIFLAMVGLVLFAHLIGKVQTYLQSITARVEEWRIKQKDTEEWMRHRQLPHELREE

SEQ ID NO: 89773 - protein, 541 aa, Setaria italica
  misc_feature (200)..(200): Xaa can be any naturally occurring amino acid
  Transcript Sequence Number=SeqID_23799
  Gene Ontology: Mol. function=ion channel activity; Cellular component= integral to membrane; Biological process=ion transport
  Homolog annotation: Hit_ID=Q69KL7; Match level="QueryCoverage=100%, HitCoverage=77%, E-value=0.0, Identity=75%"; Hit description =Putative cyclic nucleotide and calmodulin-regulated ion channel
  Pfam annotation: Domain name=Ion_trans; Domain location=2-238; Score =0.6; E_value=0.022; Accession=PF00520.23; Description=Ion transport protein
  Pfam annotation: Domain name=cNMP_binding; Domain location=339-439; Score=36.8; E_value=8.5e-08; Accession=PF00027.21; Description =Cyclic nucleotide-binding domain
  Pfam module annotation: Pfam domain module=Ion_trans::cNMP_binding; Domain location=2-238::339-439
VFGRGDLVTNPKEIAWKYLRSDFAVDVVAALPLPQIIIWFVIPAIKYSTSEHNNNILVLIVLAQYLPRLYLIFPLTYEIVKTTGVVAKTAWEGAAYNLVLYLIASHVLGALWYLLSVDRQTACWKKNCRDETGCDIKFLDCDDTPDSTWANTTTIFSNCNASNTSISFDFGMFLPALTNQAPAERFVMKYFYSLWWGLQXLSCYGQTLTVSTYLGETLYCIFLAVLGLVLFAHLIGNVQTYLQSITVRVEEWRLKQRDTEEWMRHRQLPHELRERVRRFIQYKWLATRGVNEESILQALPADLRRDIKRHLCLGLVRRVPFFSQMDDQLLDAICERLVSSLCTKGTHIVREGDPVTEMLFIIRGKLESSTTNGGRSGFFNSITLKPGDFCGEELLGWALAPKPTTNLPSSTRTVKALIEVEAFALQAEDLKFVANQFRRLHSKKLQHTFRYYSHHWRTWASCFIQAAWRRYKRRKMAKDLSMRESFNSVRLDEVDEEDESPPKNSLALKFIARTRKAPQRTKELPKLRKPDEPDFSAEPDD

SEQ ID NO: 89774 - protein, 109 aa, Setaria italica
  misc_feature (37)..(37): Xaa can be any naturally occurring amino acid
  misc_feature (77)..(77): Xaa can be any naturally occurring amino acid
  Transcript Sequence Number=SeqID_23800
  Pfam annotation: Domain name=Spindle_Spc25; Domain location=3-76; Score=69.7; E_value=1.1e-17; Accession=PF08234.4; Description =Chromosome segregation protein (Spc25,
FLGFQVVGGEGVKFVFSKIDVQSPDREYSFCHKSLLXERYILVHCVPFVDGSKELVKDLNCNNDLYKFVRTMRERFXGNLSAISFCPDMSSITSSSLSALSLDSRSENS

SEQ ID NO: 89775 - protein, 165 aa, Setaria italica
  Transcript Sequence Number=SeqID_23801
  Pfam annotation: Domain name=Spindle_Spc25; Domain location=27-99; Score=79.7; E_value=1e-20; Accession=PF08234.4; Description =Chromosome segregation protein (Spc25,
LVPFVSFSASRDKNLEKAIMWYDKFLGFQVVGGEGVKFVFSKIDVQSPDREYSFCIKLIEERYILVHCVPFVDGSKELVKDLNCNNDLYKFVRTMRERFQVATISGNLSAISFCPDMSSITSSSLSALSLDSRSENSTNQRHTRSRSKNLKIPTKKGLSSQSAAS

SEQ ID NO: 89776 - protein, 242 aa, Setaria italica
  Transcript Sequence Number=SeqID_23802
  Gene Ontology: Mol. function=nucleoside-triphosphatase activity; Cellular component=membrane; Biological process=transport
  Homolog annotation: Hit_ID=Q7XML5; Match level="QueryCoverage=99%, HitCoverage=25%, E-value=2e-89, Identity=64%"; Hit description =OSJNBa0040D17.13 protein
  Pfam annotation: Domain name=ABC2_membrane; Domain location=2-190; Score=-24.2; E_value=0.042; Accession=PF01061.16; Description=ABC-2 type transporter
YLGRVAKQRLRESTQQAADYIILCIAGICIGTIARVRDDSFGSDSYGYTIMAVSLLCQLAALRSFSPEKLQYWRERESGMSSLAYFLARDTMDHFNTAVKPIIFLSTFYFFNNPRSTLRDNYLVLLALIYCVTGIGYTFAIWFELGLAQLCSAIVPVVLVLVGTKPDLPRVIKELSYPKWALEAFIIAGAKEYSGVWLITRCGALLKGGFDINDFGLCITIIMLYGVLFRLISFVSLLKMKN

SEQ ID NO: 89777 - protein, 289 aa, Setaria italica
  Transcript Sequence Number=SeqID_23803
  Gene Ontology: Mol. function=hydrolase activity, hydrolyzing O -glycosyl compounds; Cellular component=cell wall; Biological process= carbohydrate metabolic process
  Homolog annotation: Hit_ID=B6TH17; Match level="QueryCoverage=88%, HitCoverage=88%, E-value=2e-67, Identity=49%"; Hit description =Xyloglucan endotransglucosylase/hydrolase protein 15
  Pfam annotation: Domain name=Glyco_hydro_16; Domain location=31-215; Score=285.8; E_value=9.5e-83; Accession=PF00722.13; Description =Glycosyl hydrolases family 16
  Pfam annotation: Domain name=XET_C; Domain location=239-286; Score =44.1; E_value=5.5e-10; Accession=PF06955.4; Description=Xyloglucan endo-transglycosylase (XET)
  Pfam module annotation: Pfam domain module=Glyco_hydro_16::XET_C; Domain location=31-215::239-286
MGQARTQLLASLAAIYLILAITHVTGGQTDDLDDLEIMWGNAKMVTDSSGQKAIALTLDRSTSSAFRSKKTCQFCRIDVEIKLVPRNSAGTVTTFYMITEGAWQYHDEIDIEFLGNSTGQPYTMHTNMYARGQGGREKQYKFDFDPTQDYHKYTIIWNKDWILFLVDDKLYRQIKNNQMYGAPYPYYYPMRVYATIWNADDWATQGGRVKTDWSQEPFTAYFRNYRAISCPQFGNNPMCLPGSGWFNQQLDESRKQQMSQVDSNNKIYDYCKDPKRYKNGPPPRECGLQ

SEQ ID NO: 89778 - protein, 62 aa, Setaria italica
  Transcript Sequence Number=SeqID_23804
MTGGTRPRRLLLLLLLVGVAARAASGVVTDGLLPNGNFEQGPDASQMNGTRVTSPNAMPKWE

SEQ ID NO: 89779 - protein, 150 aa, Setaria italica
  misc_feature (26)..(26): Xaa can be any naturally occurring amino acid
  misc_feature (130)..(130): Xaa can be any naturally occurring amino acid
  Transcript Sequence Number=SeqID_23805
  Gene Ontology: Mol. function=nucleotide binding; Cellular component =cytoplasm; Biological process=response to stress
  Homolog annotation: Hit_ID=B9SAC7; Match level="QueryCoverage=99%, HitCoverage=20%, E-value=2e-55, Identity=66%"; Hit description=Heat -shock protein 105 kDa, putative
GPLRLMHDLAATALGYGLYRSDLGSXGPSHVAFVDVGQCDTQVAVVAFDASGMRVLSHGFDADLGGRDFDEVLFEHFAEEFRDRYKIDVVGNVKASMRLRAACEKAKKVLSANAEAVVNIECLMEEKDVXRGVIRREEFEKLCAGLLERI

SEQ ID NO: 89780 - protein, 417 aa, Setaria italica
  Transcript Sequence Number=SeqID_23806
  Gene Ontology: Mol. function=electron carrier activity; Cellular component=integral to membrane; Biological process=brassinosteroid biosynthetic process
  Homolog annotation: Hit_ID=Q6F4F5; Match level="QueryCoverage=100%, HitCoverage=85%, E-value=0.0, Identity=89%"; Hit description =Cytochrome P450 724B1
  Pfam annotation: Domain name=p450; Domain location=1-412; Score=54.1; E_value=2.9e-14; Accession=PF00067.14; Description=Cytochrome P450
ARYGRVFKSHLFCTPTVVSCDQDLNHFILQNEERLFQCSYPRPIHGILGKSSMLVVLGEDHKRLRNLALALVTSTKLKPSYLGDIEKIALHVVGSWRQAAGGKECGGGGCVKVITFCEEARKFAFSVIVKQVLGLSPEEPVTARILEDFLAFMKGLISFPLYIPGTPYAKAVQARERISSTVKGIIEERRSAGSCKKGDFLDVLLSSNELSDEEKVSFVLDSLLGGYETTSLLISMVVYFLGQSAEDLDLVKREHDSIRSNKGKEECLTSEDYKKMEYTQHVINEALRCGNIVKFVHRKALKDVRYKEYLIPSGWKVLPVFSAVHLNPSLHGNAQHFQPCRWEGSSQGASKRFTPFGGGPRLCPGSELAKVEAAFFLHHLVLNYRWRIDGDDVPMAYPYVEFQRGLPIEIEPICPES

SEQ ID NO: 89781 - protein, 97 aa, Setaria italica
  Transcript Sequence Number=SeqID_23807
  Gene Ontology: Mol. function=electron carrier activity; Cellular component=cytoplasmic vesicle membrane; Biological process=oxidation reduction
  Homolog annotation: Hit_ID=Q7XU38; Match level="QueryCoverage=100%, HitCoverage=18%, E-value=3e-49, Identity=92%"; Hit description =Cytochrome P450 87A3
GETLQFFAPNPTCDVSPFVKERVRRYGSIFKTSIVGRQVVVSADPDMNYFVFQQEGKLFESWYPDTFTEIFGRDNVGSLHGFMYKYLKTLVLRLYGQ

SEQ ID NO: 89782 - protein, 99 aa, Setaria italica
  Transcript Sequence Number=SeqID_23808
QQLIRRTSTFSMHRLATSDISLIRSHTYTHGPRSTERMENLLPVTTTSMCDCAIQLQWSTITNQERATFQESRKKGKKSYRINLHLNCSLKVVSTAGGD

SEQ ID NO: 89783 - protein, 325 aa, Setaria italica
  misc_feature (296)..(296): Xaa can be any naturally occurring amino acid
  Transcript Sequence Number=SeqID_23809
  Homolog annotation: Hit_ID=B6U9Q3; Match level="QueryCoverage=96%, HitCoverage=66%, E-value=7e-67, Identity=47%"; Hit description=F-box domain containing protein
MPMRDAARAACVSRSFLYSWRSHPNLNFSKDTFGLIENACQKDESGRFFYIKVDHILKKHSGIGVKKLKLQIDSDYSAKDSRYLNKWLQKAVTPGIEELTLIFAPFGANYNFPCSLLLNGSGDSIRCLHLGCCSFRPKVTLGFRSLIRLHLCFVRTTGDALGFVLSHSLALERLELRCCYGIVYLKVPRLLQHLNYLEVSGCIDLRVIDNEAPNISSFSYGGYSAVQLSLGKTLQMEGSVSYARTEPPSSMPNLEALALNSQTERAHAPMLQSKFLRLRHLSIALTAANYDYLSLXSFLMLLLLWETFDLNVSRHSYCYDLVAMV

SEQ ID NO: 89784 - protein, 211 aa, Setaria italica
  Transcript Sequence Number=SeqID_23810
  Gene Ontology: Mol. function=transcription regulator activity; Cellular component=nucleus; Biological process=regulation of transcription
  Homolog annotation: Hit_ID=B9T2A6; Match level="QueryCoverage=88%, HitCoverage=24%, E-value=5e-15, Identity=31%"; Hit description=Basic helix-loop-helix-containing protein, putative
MSGWILTWGDGYVDKVIKDRQVGDLSAGPTVSKIQMVSSSCYNKCYPFCPIEAALLRMTSHLYPLGEGIIGKVALTGQHCLISANELCSRSMPKYREDWELQFAAGIKTVLLVPVVPHGVLQLGSLHKVFESSALVALIKDLFHELYDDPVSHTSLSVGPAYSNTLRSPTATLSNEHPDVNLFEIDSSAELLNDHLSLTHAFSSPEFPISE

SEQ ID NO: 89785 - protein, 140 aa, Setaria italica
  Transcript Sequence Number=SeqID_23811
  Subcellular localization annotation: CTP_CleavageSite=37; ConfidenceScore=5.25e-01
VIPLTGGPRKKFSPTCHRHFGCRKQVRGTIWVKQAQRAAHGPRGTRRPPSPIRFPAPAPKLPLTCGPKSFERALRPNSVSDIACHRVYTSARCPILSHLHHPILCCPAIKTGGARVSASESVAIALRVPRPHANRRRLRL

SEQ ID NO: 89786 - protein, 255 aa, Setaria italica
  Transcript Sequence Number=SeqID_23812
  Homolog annotation: Hit_ID=Q8YY98; Match level="QueryCoverage=45%, HitCoverage=83%, E-value=1e-21, Identity=41%"; Hit description =Alr0953 protein
  Pfam annotation: Domain name=DUF2358; Domain location=70-182; Score =204.5; E_value=2.9e-58; Accession=PF10184.1; Description =Uncharacterized conserved protein (DUF2358)
VAASGARVKQGEAGKRRVIRVADPVREDRLPVPPTPPLFAAPVTPSESPAASRRREEDEEERQRYYLNMGYAIRTLREELPDVLYKEPSFDIYRDDIVFKDPLNTFKGLENYKRIFWALRFTGRIFFKALWVDIVSIWQPAENLIMIRWIAHGIPRVPWDGLGRFDGASVYKLDKNGKIYEHKVHNVAMNPPTKFKVLPVHELIRSLDCPSTAKPTYFEASSQYLCTAPSYLRLAWIKCYISLCRMLSLANLGEG

SEQ ID NO: 89787 - protein, 223 aa, Setaria italica
  Transcript Sequence Number=SeqID_23813
  Gene Ontology: Mol. function=aspartic-type endopeptidase activity; Cellular component=cell wall; Biological process=xylan catabolic process
  Homolog annotation: Hit_ID=B6UHL4; Match level="QueryCoverage=99%, HitCoverage=54%, E-value=2e-80, Identity=69%"; Hit description =Xylanase inhibitor TAXI-IV
  Subcellular localization annotation: CTP_CleavageSite=58; ConfidenceScore=5.11e-01
QKVANKFALCLPSGGQGVAIFGGGPLFLLPPGRPDVTTTLAGTTPLRRNPGHPGYFISAKGIAVNQEKVQQGPLVVGLSSRIPYTELRSDVYGPVVKAFDKATAERKRVTPPVPPFELCYDSRELGSTRLGYAVPQVDLMLESGATWMLFGANSMVQVNDNTACFGFVKMAKEEKGAPAVVIGGFQMENNLLVFDEEKKQLGFSSLLFGRQTTCSNFNFTLGA

SEQ ID NO: 89788 - protein, 125 aa, Setaria italica
  Transcript Sequence Number=SeqID_23814
  Gene Ontology: Mol. function=electron carrier activity; Cellular component=integral to membrane; Biological process=oxidation reduction
  Homolog annotation: Hit_ID=B6UA52; Match level="QueryCoverage=99%, HitCoverage=23%, E-value=1e-42, Identity=69%"; Hit description =Cytochrome P450 CYP71C36
YDFIHVLLSVREEYGLTREQMKALLLDVFFAGIETSAAVLEFTIAELMRRPHLMKKLQAEVRSSVPKEADAVTEPDLAGMTYLRAVIKESHRLHNVTPLLAPRVSMASCNIDGYTIPAGVQVLIN

SEQ ID NO: 89789 - protein, 81 aa, Setaria italica
  Transcript Sequence Number=SeqID_23815
GNHSFAGQHPSDEWEEQQRYWSSPRAPPASPTESPRTPGGSQKKAVLGKVKSKAKKWMHMLHHKKKPAQEEMMWTPRAGTQ

SEQ ID NO: 89790 - protein, 87 aa, Setaria italica
  misc_feature (62)..(62): Xaa can be any naturally occurring amino acid
  Transcript Sequence Number=SeqID_23816
  Gene Ontology: Mol. function=hydrolase activity; Cellular component =mitochondrion
  Homolog annotation: Hit_ID=B6TZ49; Match level="QueryCoverage=91%, HitCoverage=33%, E-value=8e-33, Identity=86%"; Hit description=Nudix hydrolase 13
GVKGIIQATPLGEWIFKSKSKQNSCGLQGACKGFMFGLQVTELLEIWPEQVTHGRRWVSMSXPQLQLNGLCRYDWMREALRNKTRKV

SEQ ID NO: 89791 - protein, 86 aa, Setaria italica
  misc_feature (41)..(41): Xaa can be any naturally occurring amino acid
  misc_feature (52)..(52): Xaa can be any naturally occurring amino acid
  Transcript Sequence Number=SeqID_23817
  Gene Ontology: Mol. function=RNA-directed DNA polymerase activity
  Homolog annotation: Hit_ID=Q94GP2; Match level="QueryCoverage=94%, HitCoverage=4%, E-value=3e-12, Identity=43%"; Hit description =Putative reverse transcriptase
KGDQTLRHTWTLPGEAYFRYTGPNWILVLLNRVSKDLRSKXLKLLFWRVWHXRNDAIFRKGDCPISASVNFLENYLDSLNPERKES

SEQ ID NO: 89792 - protein, 142 aa, Setaria italica
  misc_feature (36)..(36): Xaa can be any naturally occurring amino acid
  Transcript Sequence Number=SeqID_23818
PGIWITDMHVMRCPKCNLNSCRGNMQILDARHSELXLEEAYWDQTWEYEELGEHFQDEEVADAFCAIINAKHLASPSTAVVLSKSWAGKRDDLLTKQCASATGAAIHTNLQSNAGLVSQFEAMRDTARDGQIVSVRISQVLL

SEQ ID NO: 89793 - protein, 86 aa, Setaria italica
  misc_feature (31)..(31): Xaa can be any naturally occurring amino acid
  Transcript Sequence Number=SeqID_23819
MRGGSRPTPAALFLLAAAGICAQFATVSDNXLPTTFAVLAGDPKDDKKTEAQPKGHTGKTVLFVLLGVGAVILLSFFIFKYWQKKK

SEQ ID NO: 89794 - protein, 101 aa, Setaria italica
  Transcript Sequence Number=SeqID_23820
MRGGSRPTPAALFLLAAAGICAQFATVLAGDPKDDKKTEAQPKGHTGKTVLFVLLGVGAVILLSFFIFKYWQKKKREEQHARLLKLFEEDDDIEVELGLRD

SEQ ID NO: 89795 - protein, 88 aa, Setaria italica
  Transcript Sequence Number=SeqID_23821
VEAGLELEEGLCFHADLAGRAQEEGEECDEADKNLCSHCEVMWCWQISEDVDYMGSWCWPECLWFRRPAVLDEVAPASAFPLRLCLFL

SEQ ID NO: 89796 - protein, 155 aa, Setaria italica
  misc_feature (41)..(41): Xaa can be any naturally occurring amino acid
  misc_feature (64)..(64): Xaa can be any naturally occurring amino acid
  Transcript Sequence Number=SeqID_23822
  Gene Ontology: Cellular component=intracellular; Biological process =intracellular protein transport
LPEALLYYRDEELLGQALDLNDKLQILLEKHDAMASGSPLXPAEVTDVVSELPAGTTPNLGERXAPTAAVTPTMVSTNVLNDEEEEDEDDEFSLLARRNSRFRPTNSESASPSLGTYSSTIHEGTSSSAASVPSTTSYVPSNALSLPDPPAPVRT

SEQ ID NO: 89797 - protein, 430 aa, Setaria italica
  misc_feature (235)..(235): Xaa can be any naturally occurring amino acid
  misc_feature (416)..(416): Xaa can be any naturally occurring amino acid
  Transcript Sequence Number=SeqID_23823
  Gene Ontology: Cellular component=intracellular; Biological process =intracellular protein transport
  Homolog annotation: Hit_ID=B9T6F7; Match level="QueryCoverage=92%, HitCoverage=54%, E-value=1e-109, Identity=50%"; Hit description =Protein transporter, putative
  Pfam annotation: Domain name=ENTH; Domain location=3-113; Score= -24.9; E_value=0.0052; Accession=PF01417.12; Description=ENTH domain
  Pfam annotation: Domain name=GAT; Domain location=181-280; Score =78.4; E_value=2.6e-20; Accession=PF03127.6; Description=GAT domain
  Pfam annotation: Domain name=VHS; Domain location=1-135; Score=130.5; E_value=5.3e-36; Accession=PF00790.11; Description=VHS domain
  Pfam module annotation: Pfam domain module=ENTH::GAT::VHS; Domain location=3-113::181-280::1-135
MAAAVRVDKATNELLLGPDWTLNIDICDAVNSDHGQAKEVIKALKKRIQHKNANVQFLALTLLETLIKNCGDRVHVQVIERNILDEMMKIVKKKADMQVRDKILTLLDSWQEAFGGPGGKHPHYYWAYAELKRAGVEFPKRSPDAAPVFTPPVTRPASLPSYLQAGYGMQVDSSLTLDEVMSSNGASLSMPDLERMLGAAELLGEMLRAVDPNDHDAVNDEIITELVNQCRSDQXKILSLVSSLRDEELLGQALDLNDKLQILLEKHDAMASGSPLPAEVTDVVSELPAGTTPNLGEKVAPTAAVTPTMVSTNVLNDEEEEDEDDEFSLLARRNSRFRPTNSESASPSLGTYSSTIHEGTSSSAASVPSTTSYVPSNALSLPDPPAPVRTSPEDQVMSDLLALTISSNPSPPYTPXTPEPALNQGAQQLV

SEQ ID NO: 89798 - protein, 117 aa, Setaria italica
  Transcript Sequence Number=SeqID_23824
  Gene Ontology: Mol. function=electron carrier activity; Cellular component=integral to membrane; Biological process=oxidation reduction
  Homolog annotation: Hit_ID=C0KHM0; Match level="QueryCoverage=97%, HitCoverage=21%, E-value=1e-49, Identity=71%"; Hit description =Putative ferulate 5-hydroxylase
RESMRLHAPGALLIPHLSMAECDVEGYTIPSGTRVIVNAWALGRDTTYWESAEEFMPERFMEEAVDAASDFQGNDFRFLPFGSGRRMCPGINFTTASFEIILANLIYHFNWELPPGS

SEQ ID NO: 89799 - protein, 50 aa, Setaria italica
  misc_feature (39)..(39): Xaa can be any naturally occurring amino acid
  Transcript Sequence Number=SeqID_23825
SSVAVPPRHVVAKKFSRPATTILRSDSDILHDDDKPPKXSYRKKGNKKGK

SEQ ID NO: 89800 - protein, 84 aa, Setaria italica
  Transcript Sequence Number=SeqID_23826
VLQKRDQTISTNMKKCCLTTVNFYYPIYYLGMVFHSGLLLMNSVGMLYSLHNQYYHGQVLHRGGHSIRPNRTGWFFGLFLKFLV

SEQ ID NO: 89801 - protein, 89 aa, Setaria italica
  Transcript Sequence Number=SeqID_23827
  Gene Ontology: Mol. function=metal ion binding; Cellular component =nucleus; Biological process=regulation of transcription, DNA -dependent
  Homolog annotation: Hit_ID=Q8LHP0; Match level="QueryCoverage=100%, HitCoverage=100%, E-value=4e-35, Identity=82%"; Hit description =Transcription elongation factor 1 homolog
  Pfam annotation: Domain name=Elf1; Domain location=2-81; Score=169.6; E_value=9.3e-48; Accession=PF05129.5; Description=Transcription elongation factor Elf1 like
MGKRKSAAKPPPKKRMDKLDTVFSCPFCNHGSSVECRIDMKNLIGEASCRICQENFSTTVNALTEPIDIYSEWIDECERVNTVEGDDDA

SEQ ID NO: 89802 - protein, 170 aa, Setaria italica
  Transcript Sequence Number=SeqID_23828
VLMVDYGIRECQYITQLQVTVSSAWGQSSRIIITFHSVDTLTLINPFTIYINRLSECCKKRDQTISTNMKKCCLTTVNFYYPIYYLGMVFHSGLLLMNSVGMLYSLHNQYYHGQVLHRGGHSIRPNRTGWFFGLFQNSVSKKREPIGSFKFLEPRTSVSVSLVRSSVPTK

SEQ ID NO: 89803 - protein, 89 aa, Setaria italica; identical to SEQ ID NO: 89801
  Transcript Sequence Number=SeqID_23829
  Gene Ontology: Mol. function=metal ion binding; Cellular component =nucleus; Biological process=regulation of transcription, DNA -dependent
  Homolog annotation: Hit_ID=Q8LHP0; Match level="QueryCoverage=100%, HitCoverage=100%, E-value=4e-35, Identity=82%"; Hit description =Transcription elongation factor 1 homolog
  Pfam annotation: Domain name=Elf1; Domain location=2-81; Score=169.6; E_value=9.3e-48; Accession=PF05129.5; Description=Transcription elongation factor Elf1 like

SEQ ID NO: 89804 - protein, 194 aa, Setaria italica
  Transcript Sequence Number=SeqID_23830
  Gene Ontology: Mol. function=binding
  Homolog annotation: Hit_ID=UPI0001A7B1EE; Match level="QueryCoverage =88%, HitCoverage=7%, E-value=1e-56, Identity=56%"; Hit description =SWEETIE (SWEETIE); binding
YPLCALPPLLRFSSLRSKQLPDVKSALDLFATRTLMAYQSLSNPLVYKSEHQQMLELCSSPFCDPSGWEESSCLKFLLDKRDASLGPWIPGRDSFEDELRAFDGGADGFLPCVWDDEISNFPQPESVRKMLVNQMLLCYGSIFACQENAVKIRLLNNLDQCLKSGKKYPWFTCLITNACVAILSGFEGISLYFY

SEQ ID NO: 89805 - protein, 103 aa, Setaria italica
  misc_feature (38)..(38): Xaa can be any naturally occurring amino acid
  Transcript Sequence Number=SeqID_23831
EWFSRQFLVFGELIETTSATVPDTLSPRFGTADNALTXWEFQPAYYYQLAATYLREKRYAIECSSSTANLTTEANGIPESVMPSVYVGQYVRLFEQGDTVSVL

SEQ ID NO: 89806 - protein, 42 aa, Setaria italica
  Transcript Sequence Number=SeqID_23832
RNGSHPILTPFQIVDRFNFSRLIDIIMHLDTLYHRYLIVSMN

SEQ ID NO: 89807 - protein, 109 aa, Setaria italica
  Transcript Sequence Number=SeqID_23833
  Gene Ontology: Mol. function=hydrolase activity; Cellular component =cell wall
  Homolog annotation: Hit_ID=Q2I313; Match level="QueryCoverage=82%, HitCoverage=33%, E-value=8e-32, Identity=71%"; Hit description =Cyclase
NGGAGPALLVDVPRDKNITAGVMASLHIPKGVRRVLFRTLNTDRKLMWKKEFDTSYVGFMKDGAQWLVDNTGIKLVGVDYLSVGAFDECIYMFLFHCHTCHKIVQSLLR

SEQ ID NO: 89808 - protein, 66 aa, Setaria italica
  Transcript Sequence Number=SeqID_23834
  Gene Ontology: Mol. function=hydrolase activity; Cellular component =cell wall
  Homolog annotation: Hit_ID=C0L2U1; Match level="QueryCoverage=96%, HitCoverage=22%, E-value=8e-19, Identity=65%"; Hit description =Putative cyclase family protein
AGVDYLSVGAFDECIPAHLVFLEKREVILVEALNLEHVTPGIYTLHCLPLRLRGAEGSPARCILIK

SEQ ID NO: 89809 - protein, 269 aa, Setaria italica
  Transcript Sequence Number=SeqID_23835
  Gene Ontology: Mol. function=hydrolase activity; Cellular component =cell wall
  Homolog annotation: Hit_ID=C0L2U1; Match level="QueryCoverage=87%, HitCoverage=84%, E-value=2e-79, Identity=64%"; Hit description =Putative cyclase family protein
  Pfam annotation: Domain name=Cyclase; Domain location=54-255; Score =137.1; E_value=5.4e-38; Accession=PF04199.5; Description=Putative cyclase
LLPAAAVASGGEPAAAHPGYAHGVEDACGVAEDEAEAAVLPAPERREEFDGGRIVDISHYYREDMPAWESAEGTGGFLRLARSMRNGSDIANFSELRLTAHSGTHVDAPGHVFEHYYDAGFDVDTLDLAVLNGPALLVDVPRDKNITAGVMASLHIPKGVRRVLFRTLNTDRKLMWKKEFDTSYVGFMKDGAQWLVDNTGIKLVGVDYLSVGAFDECIPAHLVFLEKREVILVEALNLEHVTPGIYTLHCLPLRLRGAEGSPARCILIK

SEQ ID NO: 89810 - protein, 91 aa, Setaria italica
  Transcript Sequence Number=SeqID_23836
APPHLPPPSALVHAEESLARSAIGILACMDAAQWHQGLGLGKPMEEMLMAGNTNPNQNPNPPPAAPSAAPAAQRAPGAPAAAAPAPAAAGA

SEQ ID NO: 89811 - protein, 54 aa, Setaria italica
  Transcript Sequence Number=SeqID_23837
LSPIRSRCLFGLAYLVPLRRIHACKDPNCAPRQRFFRVNKGRGRRKMRRSLLDG

SEQ ID NO: 89812 - protein, 90 aa, Setaria italica
  misc_feature (13)..(13): Xaa can be any naturally occurring amino acid
  Transcript Sequence Number=SeqID_23838
  Gene Ontology: Mol. function=protein kinase activity; Biological process=protein amino acid phosphorylation
  Homolog annotation: Hit_ID=Q8H5R5; Match level="QueryCoverage=87%, HitCoverage=17%, E-value=1e-20, Identity=66%"; Hit description =Haploid germ cell-specific nuclear protein kinase-like protein
KMKEITQEHWEGXSFPKTNVVWIIYLVDMVLHKMKALALGAKVDRELRSFKKRLASCESARDCLADPFFSDLLLEEDPQVTPMPQLEYDL

SEQ ID NO: 89813 - protein, 78 aa, Setaria italica
  Transcript Sequence Number=SeqID_23839
  Subcellular localization annotation: CTP_CleavageSite=51; ConfidenceScore=5.71e-01
SNWSPLPLCSAPSLQFVTLLLVPSSSSLLLRQFSRARAQQQQWRWRLATTMASSLQTEAGTSHHHHHPTRQKMVSCGS

SEQ ID NO: 89814 - protein, 121 aa, Setaria italica
  misc_feature (104)..(104): Xaa can be any naturally occurring amino acid
  Transcript Sequence Number=SeqID_23840
  Gene Ontology: Mol. function=metal ion binding
  Homolog annotation: Hit_ID=B6TCR8; Match level="QueryCoverage=96%, HitCoverage=36%, E-value=3e-38, Identity=67%"; Hit description =Protein binding protein
  Pfam annotation: Domain name=zf-C3HC4; Domain location=91-121; Score =3.2; E_value=0.044; Accession=PF00097.17; Description=Zinc finger, C3HC4 type (RING finger)
PDASLEVVTETFKVLSVCAWSLPLFYQKNSMDSLLEAWQEVDPDEYSYEELVALGEVVGTESRGLSADTLASLPSVKYKAQNVQDGNTEQCVICRVEFEDGESXLPSCKHSYHPECINQWL

SEQ ID NO: 89815 - protein, 78 aa, Setaria italica
  Transcript Sequence Number=SeqID_23841
KVTPSIPSALWLFQHVLQKHDVNTSNRNSICWPKILQNISDYCRYALCAAQKFQPQATRRRKRDRSLIWPFSALDGNN

SEQ ID NO: 89816 - protein, 231 aa, Setaria italica
  misc_feature (15)..(15): Xaa can be any naturally occurring amino acid
  Transcript Sequence Number=SeqID_23842
  Gene Ontology: Mol. function=metal ion binding
  Homolog annotation: Hit_ID=B6TCR8; Match level="QueryCoverage=67%, HitCoverage=47%, E-value=5e-80, Identity=92%"; Hit description =Protein binding protein
  Pfam annotation: Domain name=PHD; Domain location=178-222; Score=3.9; E_value=0.0097; Accession=PF00628.21; Description=PHD-finger
  Pfam annotation: Domain name=zf-C3HC4; Domain location=179-219; Score= 41.4; E_value=3.5e-09; Accession=PF00097.17; Description=Zinc finger, C3HC4 type (RING finger)
  Pfam module annotation: Pfam domain module=PHD::zf-C3HC4; Domain location=178-222::179-219
GKTTVAGSYEYDEEXEEDYEEELEHHLRVHHHEHPAGDVDGEGEGAEGSEGAEGSDYEEEFEEDEEGEPEVDPADFEDDEAYARALQDAEEREVAARLMALAGLSDWRAVDVEHEEDHVNDPQEAWQEVDPDEYSYEELVALGEVVGTESRGLSADTLASLPSVKYKAQNVQDGNTEQCVICRVEFEDGESLIALPCKHSYHPECINQWLQINKVCPMCSAEVSTSGNKEA

SEQ ID NO: 89817 - protein, 274 aa, Setaria italica
  Transcript Sequence Number=SeqID_23843
  Homolog annotation: Hit_ID=Q7XVC5; Match level="QueryCoverage=92%, HitCoverage=39%, E-value=7e-22, Identity=34%"; Hit description =OSJNBa0072D21.15 protein
RERLQKVCDELARGGTAVEEEDELRREAEAAALEELEREREMLQLADELREERVRMKLAEARIQFEEKNAAVDRLRQELEAFLGTNSTNDRQESPVHDEHRHAVDDHRSLQLVLASEFGVDGIDRVITDKTGQEEDGNDGEADDDGSEGSDIELNMDGNSWSYMTTASRATTAKNAAASVHGSLSDRGTECGAFDRGSHGVRDALELKEWDDGCSDDDTRDLDEDAERYEAIKNLREQMLAGNGFVFLSQGEPDADRDRHRQGLVSQIEDGGLW

SEQ ID NO: 89818 - protein, 112 aa, Setaria italica
  Transcript Sequence Number=SeqID_23844
  Gene Ontology: Mol. function=protein tyrosine kinase activity; Cellular component=integral to membrane; Biological process=protein amino acid phosphorylation
  Homolog annotation: Hit_ID=Q5QM36; Match level="QueryCoverage=92%, HitCoverage=28%, E-value=3e-48, Identity=84%"; Hit description =Serine/threonine-specific protein kinase NPK15-like
TFMRMMVMEYAPNGTLYEHLHVEGFDPIDWNGRMRIIMGVAYCTQHMHELNPPITHPDIKSSAILLSEDGAAKIADLSVWHEVYSKGNMPKDDDFVHHHEPVAADIRLRENK

SEQ ID NO: 89819 - protein, 79 aa, Setaria italica
  Transcript Sequence Number=SeqID_23845
  Gene Ontology: Mol. function=2 iron, 2 sulfur cluster binding; Cellular component=chloroplast; Biological process=electron transport chain
  Homolog annotation: Hit_ID=P94044; Match level="QueryCoverage=100%, HitCoverage=53%, E-value=6e-23, Identity=73%"; Hit description =Ferredoxin-6, chloroplastic
  Subcellular localization annotation: CTP_CleavageSite=50; ConfidenceScore=5.80e-01
MSTATAPRLSVPKSGVSFQTAAPAARAPSFVGFTRQAPHASGLRLSSRFVASAAAVHMVKLVGPDGVEHEFEAPEDTYI

SEQ ID NO: 89820 - protein, 151 aa, Setaria italica
  Transcript Sequence Number=SeqID_23846
  Gene Ontology: Mol. function=2 iron, 2 sulfur cluster binding; Cellular component=chloroplast; Biological process=electron transport chain
  Homolog annotation: Hit_ID=P94044; Match level="QueryCoverage=100%, HitCoverage=100%, E-value=3e-66, Identity=83%"; Hit description =Ferredoxin-6, chloroplastic
  Pfam annotation: Domain name=Fer2; Domain location=62-137; Score =114.5; E_value=3.6e-31; Accession=PF00111.19; Description=2Fe-2S iron-sulfur cluster binding domain
  Subcellular localization annotation: CTP_CleavageSite=50; ConfidenceScore=5.81e-01
MSTATAPRLSVPKSGVSFQTAAPAARAPSFVGFTRQAPHASGLRLSSRFVASAAAVHMVKLVGPDGVEHEFEAPEDTYILEAAENAGVELPFSCRAGSCSTCAGKMSAGEVDQSEGSFLDDNQMAEGYLLTCISYPKADCVIHTHKEEELY

SEQ ID NO: 89821 - protein, 90 aa, Setaria italica
  Transcript Sequence Number=SeqID_23847
  Gene Ontology: Mol. function=transferase activity, transferring glycosyl groups; Biological process=metabolic process
  Homolog annotation: Hit_ID=C4MF35; Match level="QueryCoverage=87%, HitCoverage=17%, E-value=2e-16, Identity=60%"; Hit description=UDP -glycosyltransferase UGT710E5
MTPSDAPGGCPRVVLFPLPYQGHIEPMLRLAAAFHARGLAITVVHTETRAPDRRKLPVDYDFVSIRDGVPPELAESSDVAPFVLTLNRSC

SEQ ID NO: 89822 - protein, 204 aa, Setaria italica
  Transcript Sequence Number=SeqID_23848
  Gene Ontology: Mol. function=structural constituent of cell wall
  Homolog annotation: Hit_ID=Q9ZQT1; Match level="QueryCoverage=99%, HitCoverage=58%, E-value=1e-92, Identity=83%"; Hit description=Root cap protein 2
  Pfam annotation: Domain name=Root_cap; Domain location=134-190; Score= 128.5; E_value=2.1e-35; Accession=PF06830.3; Description=Root cap
DRDLHINAHFIGKRGADGMSRDFTWIQAIAVLFDGHRLYVGARKTAAWDDDVDRMELALDGVPVSLPQEVDATWTSSAVPMLSITRTKAANGVLVVLDGKFKIRANAVPITEEESRVHRYGVTTDDCLAHLDLAFKFDTLTGDVHGVVGQTYRSDYVNGFDVKASMPTMGGESNFATSSLFAPDCAVARYHAPAGHRGDGVAMA

SEQ ID NO: 89823 - protein, 188 aa, Setaria italica
  misc_feature (19)..(19): Xaa can be any naturally occurring amino acid
  misc_feature (36)..(36): Xaa can be any naturally occurring amino acid
  Transcript Sequence Number=SeqID_23849
  Gene Ontology: Cellular component=ribosome
  Homolog annotation: Hit_ID=B6SM91; Match level="QueryCoverage=59%, HitCoverage=62%, E-value=7e-30, Identity=56%"; Hit description=18S subunit ribosomal protein
  Pfam annotation: Domain name=FYVE; Domain location=66-120; Score= -15.7; E_value=0.032; Accession=PF01363.13; Description=FYVE zinc finger
  Pfam annotation: Domain name=zf-LSD1; Domain location=111-135; Score =54.8; E_value=3.3e-13; Accession=PF06943.4; Description=LSD1 zinc finger
  Pfam annotation: Domain name=zf-LSD1; Domain location=149-173; Score =58.4; E_value=2.7e-14; Accession=PF06943.4; Description=LSD1 zinc finger
  Pfam annotation: Domain name=zf-LSD1; Domain location=72-96; Score =43.6; E_value=7.7e-10; Accession=PF06943.4; Description=LSD1 zinc finger
  Pfam module annotation: Pfam domain module=FYVE::zf-LSD1::zf-LSD1::zf- LSD1; Domain location=66-120::111-135::149-173::72-96
  Subcellular localization annotation: CTP_CleavageSite=35; ConfidenceScore=5.11e-01
MHAAAISIAIRVSCRSNKXGFRRLIAAGICKVSTSXSTDKAAGTAMPVPLAPYPTPPVPFTPPNGAQSQLVCTGCRNLLMYPAGATSVCCAVCSTVTAVPAPGTEMAQLVCGGCHTLLMYIRGATSVQCSCCHTVNLAMEANQVAHVNCGNCRMLLMYQYGARSVKCAVCNFVTSVGASPGAEQKPSS

SEQ ID NO: 89824 - protein, 52 aa, Setaria italica
  Transcript Sequence Number=SeqID_23850
MLHRRSRTLGGSSDRAAARRAVAAMKGGRSSNGAATDLLVCFPSRAHLALMP

SEQ ID NO: 89825 - protein, 105 aa, Setaria italica
  Transcript Sequence Number=SeqID_23851
KLPRDKVLNVCETMNLNSKNITLTARLCLRAFGRVTCHESCGCNHLVSLLTCSHRARHAIEASVCHSPRDDSSLSSSASKGLKNLPSSRYMPAARRTAQTSLGFR

SEQ ID NO: 89826 - protein, 81 aa, Setaria italica
  misc_feature (12)..(12): Xaa can be any naturally occurring amino acid
  misc_feature (51)..(51): Xaa can be any naturally occurring amino acid
  Transcript Sequence Number=SeqID_23852
  Pfam annotation: Domain name=Ctr; Domain location=20-80; Score=-38.2; E_value=0.042; Accession=PF04145.7; Description=Ctr copper transporter family
AAPIPPQPPPPXTPQPATMMHMTFYWGKSATILFDGWRTSTWLGYLLSLVXLLLAAAFYQYLEALRIRVKLAAGGDAGKQQ

SEQ ID NO: 89827 - protein, 113 aa, Setaria italica
  Transcript Sequence Number=SeqID_23853
  Gene Ontology: Mol. function=translation initiation factor activity; Cellular component=mitochondrion
  Homolog annotation: Hit_ID=Q7XN79; Match level="QueryCoverage=82%, HitCoverage=16%, E-value=6e-41, Identity=81%"; Hit description =OSJNBa0089N06.3 protein
RMIPVAEEVMRAREIVTEGVSTLLKAVPVHSCKFCPEVHIGATGHEMKTCHGFKRMIKDRPHKWGPGNLNDILIPVQAFHLREMFQDEIKHDQCCLTDISELIWQNRSRLLAV

SEQ ID NO: 89828 - protein, 148 aa, Setaria italica
  Transcript Sequence Number=SeqID_23854
  Gene Ontology: Mol. function=translation initiation factor activity; Cellular component=mitochondrion
  Homolog annotation: Hit_ID=Q7XN79; Match level="QueryCoverage=99%, HitCoverage=25%, E-value=4e-64, Identity=78%"; Hit description =OSJNBa0089N06.3 protein
  Pfam annotation: Domain name=DUF794; Domain location=2-147; Score= -187.0; E_value=1.6e-06; Accession=PF05634.3; Description=Arabidopsis thaliana protein of unknown function (DUF794)
FQDEIKHDQRFDYARVPAVHELCHQAGADIPDEVLYRSEQLSTTVRGHSQQPAPILPDQLRYIGQTTLDAWESLRLGVTKLLLVYPSKVCEHCSEVHVGPSGHKARMCGVFKFEGWKGMHKWKKAGVDDLVPQKIVWHRRPHDPPVLG

SEQ ID NO: 89829 - protein, 92 aa, Setaria italica
  misc_feature (86)..(86): Xaa can be any naturally occurring amino acid
  Transcript Sequence Number=SeqID_23855
  Subcellular localization annotation: CTP_CleavageSite=36; ConfidenceScore=5.04e-01
SFFPSPKLVANFFFHNPRELHTMAVVTVTRKETTIVAMSIVLILCWLGQSATATYCSDYCASMCMSVCNNAASSSCGNVKNTVMQXCVPSAP

SEQ ID NO: 89830 - protein, 55 aa, Setaria italica
  Transcript Sequence Number=SeqID_23856
IFLNSRVILVPLPFFRKSILRVWRCCNPLTDKCGCSYCLSSIAYYQQVLFVLQPN

SEQ ID NO: 89831 - protein, 88 aa, Setaria italica
  Transcript Sequence Number=SeqID_23857
  Gene Ontology: Mol. function=transporter activity; Cellular component= membrane; Biological process=oligopeptide transport
  Homolog annotation: Hit_ID=B9RUG8; Match level="QueryCoverage=78%, HitCoverage=12%, E-value=3e-15, Identity=55%"; Hit description=Amino acid permease, putative
EKGKVKGMFFNWWYFGLCSGSLLGNSTMSYVQDNFGWVLGFAIPTGVMALSVAAFFCCTPLYRQTQPKGASTSSKPSQNKIFKVFKSI

SEQ ID NO: 89832 - protein, 105 aa, Setaria italica
  Transcript Sequence Number=SeqID_23858
  Subcellular localization annotation: CTP_CleavageSite=62; ConfidenceScore=5.79e-01
SAAPTSSFLPPPSPPNLSSSPARPQGRTRPCALASTSPTAPFFNGASLTNTHSHHRCGDHTAASSLPRLSPPSPPPPGDCERSRGHGARAGAGAVRGAVARLRGA

SEQ ID NO: 89833 - protein, 138 aa, Setaria italica
  Transcript Sequence Number=SeqID_23859
  Gene Ontology: Mol. function=carbohydrate binding; Biological process= carbohydrate metabolic process
  Homolog annotation: Hit_ID=Q7XV01; Match level="QueryCoverage=92%, HitCoverage=33%, E-value=2e-46, Identity=69%"; Hit description =OSJNBa0036B21.18 protein
LYYHGSDGFEGFPGDLDVYVTYQLSCPYQLSARMNATALNKATPVNLANHAYWNVGGHGSGDVLGQVIQVFASRYTPVDRNMIPTGEVAPVSGTPYDLRAPTPLGTRIGLVSGAGMAGFDINYAVDGGGGFRKVARLS

SEQ ID NO: 89834 - protein, 212 aa, Setaria italica
  misc_feature (27)..(27): Xaa can be any naturally occurring amino acid
  Transcript Sequence Number=SeqID_23860
SGATFSFRSPHEQAIFEIARNIWRPTXHGRDPSADSDDEDAAANTSPNGEVKSPSGRQRRRRRATDFAAAAGTAPATSMVQPPQPVQLPVSVPVKMEDSLPALPQTQMPVTVTMDGSEPLRLPVMSPQSGVSDAEKSCLTPLLKEMIRAVINVGTNPFGTKLPEPPLGLPMEGEKWRKQRILELEVYLKRIELLQDQAKATLEELKSSTPGT

SEQ ID NO: 89835 - protein, 52 aa, Setaria italica
  Transcript Sequence Number=SeqID_23861
  Gene Ontology: Mol. function=kinase activity
  Homolog annotation: Hit_ID=Q1KL28; Match level="QueryCoverage=100%, HitCoverage=14%, E-value=3e-16, Identity=77%"; Hit description =Choline kinase
YTKYPDTNEQKQFVQTYLSSSGDKSDAEEVENLIKSIEKYTLASHLVWGLWG

SEQ ID NO: 89836 - protein, 63 aa, Setaria italica
  Transcript Sequence Number=SeqID_23862
  Subcellular localization annotation: CTP_CleavageSite=27; ConfidenceScore=5.50e-01
MEAAAAAAAASSASASASAGRSRPSTSAAQVTSITAVGAEEENAASPYVLSVIDSLKKRITSD

SEQ ID NO: 89837 - protein, 126 aa, Setaria italica
  Transcript Sequence Number=SeqID_23863
  Gene Ontology: Mol. function=metal ion binding; Cellular component =integral to membrane; Biological process=multicellular organismal development
  Homolog annotation: Hit_ID=Q5TKN4; Match level="QueryCoverage=80%, HitCoverage=44%, E-value=3e-33, Identity=67%"; Hit description =Putative zinc finger DHHC domain containing protein
RPIFQYFLYSIALLTSDISVSTNQTTYENFRYRSDGRPNVYDRGCPSNFQEVVFAKIQPSKHKFRAYVQEEVRAPPANNSGEMEEEQVGGPRAKVGDDLDIDDLFKISQRHDHGDNDIEMGGGNAN

SEQ ID NO: 89838 - protein, 170 aa, Setaria italica
  misc_feature (132)..(132): Xaa can be any naturally occurring amino acid
  Transcript Sequence Number=SeqID_23864
  Gene Ontology: Mol. function=inositol or phosphatidylinositol phosphatase activity
  Homolog annotation: Hit_ID=B9SDQ6; Match level="QueryCoverage=64%, HitCoverage=29%, E-value=6e-25, Identity=52%"; Hit description=Myo inositol monophosphatase, putative
  Subcellular localization annotation: CTP_CleavageSite=51; ConfidenceScore=5.62e-01
MARYLLAPTTTASSSSALLPKDAAKNLPPSRTLRLRALGSRSGKARPIMAVASEQAAPAAGYPKVAAPTTGPIPAAELLGVIEAAAKAGADVIMEAVNKPRNIHYKGVADLVTDTDKLSESVILEVVMKNFXNHLILGEEGGLIGDSLSEYLWCIDPLGLGPHSVPTSYF

SEQ ID NO: 89839 - protein, 93 aa, Setaria italica
  Transcript Sequence Number=SeqID_23865
  Gene Ontology: Mol. function=DNA binding; Biological process =regulation of transcription
  Homolog annotation: Hit_ID=B9SHH4; Match level="QueryCoverage=93%, HitCoverage=21%, E-value=1e-35, Identity=85%"; Hit description =Transcription factor, putative
EISSPASHINLGTQTNKSVHIGEALQMQIEVQRRLHEQLEVQRHLQLRIEAQGKYLQSVLEKAQETLAKQNAGSVGLETAKMQLSELVSKVST

SEQ ID NO: 89840 - protein, 310 aa, Setaria italica
  Transcript Sequence Number=SeqID_23866
  Gene Ontology: Mol. function=acyltransferase activity; Cellular component=integral to membrane; Biological process=triacylglycerol biosynthetic process
  Homolog annotation: Hit_ID=B0LF77; Match level="QueryCoverage=99%, HitCoverage=62%, E-value=1e-160, Identity=87%"; Hit description =Diacylglycerol acyltransferase
  Pfam annotation: Domain name=MBOAT; Domain location=35-310; Score =55.3; E_value=2.3e-13; Accession=PF03062.11; Description=MBOAT family
RRKLIGEHVVILLHIIVTTSVIVYPVVVILKCDSAVLSGFVLMFLASIMWMKLVSYAHTNYDIRVLSKSTLKGASYGNHVDPENMKDPTIKSLVYFMLAPTLCYQPTYPRTTCIRKGWVIRQLVKCLVFTGLMGFIIEQYINPIVKNSKHPLKGNFLNAIERVLKLSVPTLYVWLCMFYCFFHLWLNILAELLRFGDREFYKDWWNAKTVEEYWRMWNMPVHKWIIRHIYFPCIRKGLPRGVAILIAFLVSAVFHEICVAVPCHIFKFWAFFGIMVQIPLVFLTRYLQEKFQNIMVGNMIFWFFFSILGQ

SEQ ID NO: 89841 - protein, 135 aa, Setaria italica
  misc_feature (50)..(50): Xaa can be any naturally occurring amino acid
  Transcript Sequence Number=SeqID_23867
  Gene Ontology: Mol. function=protein binding; Cellular component =plasma membrane; Biological process=ubiquitin-dependent protein catabolic process
  Homolog annotation: Hit_ID=Q9LW29; Match level="QueryCoverage=99%, HitCoverage=23%, E-value=6e-54, Identity=72%"; Hit description =Protein AUXIN SIGNALING F-BOX 2
ITALMTVAKNCPNFIRFRLCILEPKKPDAITNQPLDEGFGAIVRECRGLXRLSISGLLTDKVFMYIGKYAKQLEMLSIAFAGDSDKGMMHVMNGCKNLRKLEIRDSPFGDVALLGNVAKYETMRSLWMSSCNVTI

SEQ ID NO: 89842 - protein, 171 aa, Setaria italica
  misc_feature (95)..(95): Xaa can be any naturally occurring amino acid
  Transcript Sequence Number=SeqID_23868
  Gene Ontology: Mol. function=protein binding; Cellular component =plasma membrane; Biological process=ubiquitin-dependent protein catabolic process
  Homolog annotation: Hit_ID=Q9LW29; Match level="QueryCoverage=99%, HitCoverage=29%, E-value=9e-60, Identity=66%"; Hit description =Protein AUXIN SIGNALING F-BOX 2
AKNCPNFIRFRLCILEPKKPDAITNQPLDEGFGAIVRECRGLRRLSISGLLTDKVFMYIGKYAKQLEMLSIAFAGDSDKGMMHVMNGCKNLRKLXEIRDSPFGDVALLGNVAKYETMRSLWMSSCNVTLKGCQVLASKMPMLNVEIMNELDGSSEMEENHGDPSKSRNKVK

SEQ ID NO: 89843 - protein, 147 aa, Setaria italica
  Transcript Sequence Number=SeqID_23869
  Gene Ontology: Mol. function=protein binding; Cellular component =plasma membrane; Biological process=ubiquitin-dependent protein catabolic process
  Homolog annotation: Hit_ID=B9GFH2; Match level="QueryCoverage=75%, HitCoverage=19%, E-value=1e-28, Identity=58%"; Hit description=F-box family protein
LNASSFSCNNWYVIQNVLTLFSTFYLLSRLLRELDLQENDVEDHGPRWLSCFPDSCTSLVSLNFACIKGEVNSGALERLVARSPNLRSLRLNRSVSVDTLSKILARTPNLEDLGTGNLTDESESYLRLSSALEKCKMLRSLSGFWDA

SEQ ID NO: 89844 - protein, 573 aa, Setaria italica
  Transcript Sequence Number=SeqID_23870
  Gene Ontology: Mol. function=protein binding; Cellular component =plasma membrane; Biological process=ubiquitin-dependent protein catabolic process
  Homolog annotation: Hit_ID=B9RH07; Match level="QueryCoverage=100%, HitCoverage=100%, E-value=0.0, Identity=65%"; Hit description =TRANSPORT INHIBITOR RESPONSE 1 protein, putative
MTYFPEEVVEHIFSFLPSHSDRNTVSLVCKVWYEVERLSRRAVFVGNCYAVRPERVVLRFPNVRALTVKGKPHFADFNLVPPDWGGYAGPWIEAAARRCMGLEELRMKRMVVLDENLELLARSFPRFKALVLISCEGFSTDGLAAIASHCKLLRELDLQENDVEDHGPRWLSCFPDSCTSLVSLNFACIKGEVNSGALERLVARSPNLRSLRLNRSVSVDTLSKILARTPNLEDLGTGNLTDESESYLRLSSALEKCKMLRSLSGFWDASPICVPFIYPLCHHLTGLNLSYTPTLDYSDLTKMISRCVKLQRLWVLDCISDKGLQVVASSCKDLQELRVFPSDFYVAGYSAVTEEGLVAISSGCPKLSSLLYFCHQMTNDALMTVAKNCPNFIRFRLCILEPKKPDAITNQPLDEGFGAIVRECRGLRRLSISGLLTDKVFMYIGKYAKQLEMLSIAFAGDSDKGMMHVMNGCKNLRKLEIRDSPFGDVALLGNVAKYETMRSLWMSSCNVTLKGCQVLASKMPMLNVEIMNELDGSSEMEENHGDPSRVDKLYVYRTTAGARDDAPNFVKIL

SEQ ID NO: 89845 - protein, 228 aa, Setaria italica
  Transcript Sequence Number=SeqID_23871
  Gene Ontology: Mol. function=protein serine/threonine phosphatase activity; Cellular component=protein serine/threonine phosphatase complex; Biological process=protein amino acid dephosphorylation
  Homolog annotation: Hit_ID=Q9FYN7; Match level="QueryCoverage=90%, HitCoverage=53%, E-value=2e-91, Identity=78%"; Hit description =Probable protein phosphatase 2C 2
  Pfam annotation: Domain name=PP2C; Domain location=1-177; Score =122.8; E_value=1.2e-33; Accession=PF00481.13; Description=Protein phosphatase 2C
FRKAFLRADLALADDSLINLSSGTTALTALVLGRQLLIANAGDCRAVLCRKGEAVEMSKDHRPTYDAERQRVIESGGYIEDGYLNGVLSVTRALGDWDMKLPHGSPSPLIAEPEIRWTTLTEDDEFLIIGCDGIWDVMTSQHAVSTVRRGLRRHDDPERCARELAMEAKRLKTFDNLTVIVVCFVSELSGGSAPLEPAASNSNSRLRCCKSLSPEALSKLRRWLDSDE

SEQ ID NO: 89846 - protein, 115 aa, Setaria italica
  misc_feature (93)..(93): Xaa can be any naturally occurring amino acid
  Transcript Sequence Number=SeqID_23872
  Gene Ontology: Mol. function=metal ion transmembrane transporter activity; Cellular component=membrane; Biological process=metal ion transport
  Homolog annotation: Hit_ID=A9NIW8; Match level="QueryCoverage=99%, HitCoverage=31%, E-value=2e-23, Identity=55%"; Hit description =Putative zinc transporter
VGFLLTTARRLRHAAVTNRGRDRDRVISEEEDAQAAQHRKDDAAAAQAQHHPVFVRTSSFEDAILLIFALCFHSVFEGIAIGVSATRSDAWRXLWTIGLHKIFAAVPVGIALLRM

SEQ ID NO: 89847 - protein, 171 aa, Setaria italica
  Transcript Sequence Number=SeqID_23873
  Gene Ontology: Mol. function=nucleotide binding; Cellular component =nucleus; Biological process=DNA replication initiation
  Homolog annotation: Hit_ID=Q2R482; Match level="QueryCoverage=100%, HitCoverage=17%, E-value=2e-98, Identity=98%"; Hit description=DNA replication licensing factor MCM2, putative, expressed
DEEDEMNMYRVQGTLREWVTRDEVRRFIAKKFKEFLLTYVNPKNEQGEFEYVRLINEMVLANKCSLEIDYKQFIYIHPNIAIWLADAPQSVLEVMEEVAKNVIFDLHKNYRNIHQKIYVRITNLPVYDQIRNIRQIHLNTMIRIGGVVTRRSGVFPQLQQVKYDCSKCGTI

SEQ ID NO: 89848 - protein, 61 aa, Setaria italica
  Transcript Sequence Number=SeqID_23874
  Gene Ontology: Mol. function=transporter activity; Cellular component= membrane; Biological process=oligopeptide transport
PAPCQPGDGAGPCQPASAGQMAALYAGVFLMCVSAAGSRFNQATMGADQFDDPADRDVLFN

SEQ ID NO: 89849 - protein, 216 aa, Setaria italica
  Transcript Sequence Number=SeqID_23875
  Gene Ontology: Cellular component=nucleus
  Homolog annotation: Hit_ID=B9RWA1; Match level="QueryCoverage=69%, HitCoverage=29%, E-value=6e-38, Identity=54%"; Hit description =Protein SET DOMAIN GROUP, putative
HVNVLILHGYATNEKISIHLLPSFNHKTDGEHVHFTSASDDSDSDGEDHDEQSDASADEQSTIENPSNSPSGSRVDDEDLEMIVVRDANEGEEVYNTYGTMGNAALLHRYGFTELDNQYDIVNIDLAMVNKWCTSIFSSRHARARVLLWRNLGYSGCTSQDAEYFEISYDGEPQLELLILLYIISLKPDVYDKLICVARDLVGDEEHDGIRNYVKR

SEQ ID NO: 89850 - protein, 105 aa, Setaria italica
  Transcript Sequence Number=SeqID_23876
  Subcellular localization annotation: CTP_CleavageSite=43; ConfidenceScore=5.26e-01
DQKFRNPQISRTNFPPLMAAHGISAAARGRRRTLFDRPHQRTRARHQDRRTHPPTAAGPPFRRHPELQRTSGMAAGALQLDVSRADPLTPSGFRPARRRHQTASP

SEQ ID NO: 89851 - protein, 97 aa, Setaria italica
  Transcript Sequence Number=SeqID_23877
  Gene Ontology: Mol. function=protein serine/threonine kinase activity; Biological process=protein amino acid phosphorylation
  Homolog annotation: Hit_ID=B6SYS4; Match level="QueryCoverage=92%, HitCoverage=12%, E-value=3e-34, Identity=78%"; Hit description=ATP binding protein
  Subcellular localization annotation: CTP_CleavageSite=36; ConfidenceScore=5.32e-01
PSASSSAFVSMRSTPSGLLNPYGLWSPRNSQSDASSSEMEFGTARQYDTTDLFFQEGWLYDDHLFPSMLDDEDDEGKEEDKFVLGAHEGSERVEIGK

SEQ ID NO: 89852 - protein, 41 aa, Setaria italica
  Transcript Sequence Number=SeqID_23878
  Gene Ontology: Cellular component=membrane; Biological process=proton transport
  Homolog annotation: Hit_ID=Q33AF5; Match level="QueryCoverage=92%, HitCoverage=4%, E-value=5e-12, Identity=81%"; Hit description=V-type ATPase 116kDa subunit family protein, expressed
MVMQVAKNAFVIFYSGERSKAKILKICDAFNANRYPFPEDV

SEQ ID NO: 89853 - protein, 162 aa, Setaria italica
  misc_feature (66)..(66): Xaa can be any naturally occurring amino acid
  misc_feature (69)..(69): Xaa can be any naturally occurring amino acid
  Transcript Sequence Number=SeqID_23879
  Gene Ontology: Mol. function=hydrolase activity; Cellular component =membrane; Biological process=proton transport
  Homolog annotation: Hit_ID=Q33AF5; Match level="QueryCoverage=98%, HitCoverage=19%, E-value=2e-79, Identity=86%"; Hit description=V -type ATPase 116kDa subunit family protein, expressed
VSGRISELKATIDMGLAHRDSILKSIASDFEQWNHLAKREKAIYHTLNMLSVDVTKKCLVAEGWSXVFXASVQIQDALQRATVDSKSQVGSIFQILNTKESPPTYFQTNKFTTAFQEIVDAYGVAKYQEANPGVFTIVTFPFLFAVMFGDWGHGICLLLGNN

SEQ ID NO: 89854 - protein, 214 aa, Setaria italica
  Transcript Sequence Number=SeqID_23880
  Gene Ontology: Mol. function=hydrolase activity; Cellular component =membrane; Biological process=proton transport
  Homolog annotation: Hit_ID=Q33AF5; Match level="QueryCoverage=100%, HitCoverage=25%, E-value=1e-94, Identity=80%"; Hit description=V -type ATPase 116kDa subunit family protein, expressed
MARGGGGGCCPPMDLMRSEAMQLVQVIIPAESAHLTVSYLGDLGLIQFKDLNAEKSPFQRTYAAQIKRCSEMARKLRFFKEQMSKANISPSPTQLNEAHLEFDDLEIKLGELEAELTEVNANNEKLQRTYNELLEYNTVLQKAGEFFYSAQRSAAAQQREMEANQSSQTSLESPLLEQEMSTDPSKQVKLGSLSGLVPKEKAMAFERILFRATR

SEQ ID NO: 89855 - protein, 149 aa, Setaria italica
  misc_feature (12)..(12): Xaa can be any naturally occurring amino acid
  misc_feature (142)..(142): Xaa can be any naturally occurring amino acid
  Transcript Sequence Number=SeqID_23881
  Gene Ontology: Mol. function=protein serine/threonine kinase activity; Biological process=protein amino acid phosphorylation
  Homolog annotation: Hit_ID=Q66MH6; Match level="QueryCoverage=67%, HitCoverage=29%, E-value=4e-40, Identity=73%"; Hit description=MAPKK
  Pfam annotation: Domain name=Pkinase; Domain location=1-134; Score= -39.0; E_value=3.6e-06; Accession=PF00069.17; Description=Protein kinase domain
GLLRRLGRPMGXRPIAAVARQALLGLAALHALRVVHRDLKPSNLLVGSDGEVKIADFGAGKVLRRRLDPCASYVGTAAYMSPERFDPEAYSGDYDPYAADVWSLGVDILELYLGHFPLLPEGQRPDWAALMCAICFGEAPEXPAAASGG

SEQ ID NO: 89856 - protein, 35 aa, Setaria italica
  Transcript Sequence Number=SeqID_23882
LSYMSCYLVVILVVGDLSKAFEPINRGKPQVCKMV

SEQ ID NO: 89857 - protein, 83 aa, Setaria italica
  misc_feature (14)..(14): Xaa can be any naturally occurring amino acid
  Transcript Sequence Number=SeqID_23883
  Gene Ontology: Mol. function=sequence-specific DNA binding; Cellular component=cytoplasm; Biological process=regulation of transcription, DNA-dependent
  Homolog annotation: Hit_ID=Q67TP9; Match level="QueryCoverage=75%, HitCoverage=20%, E-value=9e-24, Identity=92%"; Hit description=Heat stress transcription factor B-1
  Pfam annotation: Domain name=HSF_DNA-bind; Domain location=2-69; Score=-76.3; E_value=0.0019; Accession=PF00447.9; Description=HSF -type DNA-binding
CNFSSFVRQLNTYXGFRKVVPDRWEFANENFRRGEQGLLSGIRRRKSTTPQSSKSGGSGAVNVAFPPPLPPAPPASATTSGGG

SEQ ID NO: 89858 - protein, 104 aa, Setaria italica
  Transcript Sequence Number=SeqID_23884
HGESDADACFSSVCHLASAPATYGRISAHHCFKSKLPKSWQLANRSRELPGTSRVKPNELLKSLLSLALGTFVMVPWRSTCLLIYSNMSSTEMGRKLDNITMEQ

SEQ ID NO: 89859 - protein, 261 aa, Setaria italica
  Transcript Sequence Number=SeqID_23885
  Gene Ontology: Mol. function=protein dimerization activity; Cellular component=nucleus; Biological process=regulation of transcription, DNA-dependent
  Homolog annotation: Hit_ID=Q01IQ5; Match level="QueryCoverage=77%, HitCoverage=42%, E-value=2e-76, Identity=75%"; Hit description =OSIGBa0159F11.9 protein
  Pfam annotation: Domain name=bZIP_1; Domain location=99-160; Score =33.0; E_value=1.2e-06; Accession=PF00170.13; Description=bZIP transcription factor
  Pfam annotation: Domain name=bZIP_2; Domain location=97-151; Score =33.4; E_value=9.3e-07; Accession=PF07716.7; Description=Basic region leucine zipper
  Pfam module annotation: Pfam domain module=bZIP_1::bZIP_2; Domain location=99-160::97-151
DEDEEDYDEDEEAGGGAGGSRMFEMFLENGGTLPGTPVPSAHPHPAATPPPRPRHQHSMSMDGSTSLLGSASAGTPGRAGADAKKAISDAKLAELALVDPKRAKRILANRQSAARSKERKMRYIAELERKVQTLQSEATTLSAQLAMLQRDTSGLTSENSDLKIRVQTMEQQVRLQDALNDRLRDEIQQLKIATGQVNANIGKMGSFGLSTFGGNPQSFQRSHIQSLLAAQQLQQLQIHSQHQQQQTHLQKQQQQQHLSTA

SEQ ID NO: 89860 - protein, 208 aa, Setaria italica
  misc_feature (12)..(12): Xaa can be any naturally occurring amino acid
  misc_feature (33)..(33): Xaa can be any naturally occurring amino acid
  Transcript Sequence Number=SeqID_23886
  Gene Ontology: Mol. function=carbohydrate binding; Biological process= carbohydrate metabolic process
  Homolog annotation: Hit_ID=B9SMY3; Match level="QueryCoverage=100%, HitCoverage=32%, E-value=8e-84, Identity=72%"; Hit description=Lyase, putative
  Pfam annotation: Domain name=Rhamnogal_lyase; Domain location=1-164; Score=280.2; E_value=4.6e-81; Accession=PF06045.3; Description =Rhamnogalacturonate lyase family
GVDNLMEILNKXEDNRGYWDLVWNPPGQKTGIXFDVIKGTEFRIINHDENQAEVSFTRNWDPSLEGKAVPLNIDKRFIVLRGSSGFYTYGIYEHKEGWPDFGLGETRVAFKLRKDKFHYMALADNRQRIMPMPDDRLPPRGQPLAYPEAVLLVDPINPDLRGEVDDKYQYSCEDQCNNVHGWMSFDPPIGFWQITPSDEFRTGGPLKQ

SEQ ID NO: 89861 - protein, 112 aa, Setaria italica
  Transcript Sequence Number=SeqID_23887
  Gene Ontology: Mol. function=heat shock protein binding; Cellular component=plasma membrane; Biological process=protein folding
  Homolog annotation: Hit_ID=B9RNG7; Match level="QueryCoverage=72%, HitCoverage=23%, E-value=1e-29, Identity=79%"; Hit description =Chaperone protein dnaJ, putative
  Pfam annotation: Domain name=DnaJ_C; Domain location=17-111; Score= -7.3; E_value=8.5e-06; Accession=PF01556.10; Description=DnaJ C terminal region
LVSLPLLYFGLRFFFLVKLVKVLNCTLSIATATISLLQALVGFEKTIKHLDNHLVEIGTKSITKPKEIRKFKGEGMPLYQSNKKGDLYVTFEVLFPKTLTDDQKAKLKDILV

SEQ ID NO: 89862 - protein, 53 aa, Setaria italica
  misc_feature (23)..(23): Xaa can be any naturally occurring amino acid
  Transcript Sequence Number=SeqID_23888
  Gene Ontology: Mol. function=heat shock protein binding; Cellular component=plasma membrane; Biological process=protein folding
  Homolog annotation: Hit_ID=B9RNG7; Match level="QueryCoverage=98%, HitCoverage=15%, E-value=1e-19, Identity=84%"; Hit description =Chaperone protein dnaJ, putative
CNCRNEVYHRQIGPGMYQQMTEXVCDQCPNVKFVREGEFLTVDIEKGMQDGQV

SEQ ID NO: 89863 - protein, 218 aa, Setaria italica
  Transcript Sequence Number=SeqID_23889
  Gene Ontology: Mol. function=heat shock protein binding; Cellular component=plasma membrane; Biological process=protein folding
  Homolog annotation: Hit_ID=B9RNG7; Match level="QueryCoverage=87%, HitCoverage=55%, E-value=3e-75, Identity=72%"; Hit description =Chaperone protein dnaJ, putative
  Pfam annotation: Domain name=DnaJ; Domain location=30-92; Score =135.1; E_value=2.3e-37; Accession=PF00226.23; Description=DnaJ domain
MAAPGKGGAARIAAAFLVLLHLVAAIAGKSYYDVLQVPKGASEDQIKRSYRKLALKYHPDKNPDNEEATKRFAEINNAYEVLTDQEKRKIYDRYGEEGLKQFQGRGGGGGGMNIQDIFSSFFGGGGGMEEEEEQILKGDEVVVELDASLEDLYMGGSLKVWREKNVIKPAAGKRQCNCRNEVYHRQIGPGMYQQMTEQVCDQCPNVKFVREGEFLTVV

SEQ ID NO: 89864 - protein, 321 aa, Setaria italica
  misc_feature (205)..(205): Xaa can be any naturally occurring amino acid
  Transcript Sequence Number=SeqID_23890
  Gene Ontology: Mol. function=hydrolase activity, hydrolyzing O -glycosyl compounds; Cellular component=anchored to membrane; Biological process=carbohydrate metabolic process
  Homolog annotation: Hit_ID=B6U0V2; Match level="QueryCoverage=97%, HitCoverage=69%, E-value=1e-101, Identity=62%"; Hit description =Hydrolase, hydrolyzing O-glycosyl compounds
  Pfam annotation: Domain name=Glyco_hydro_17; Domain location=1-227; Score=41.6; E_value=3.2e-13; Accession=PF00332.10; Description =Glycosyl hydrolases family 17
  Pfam annotation: Domain name=X8; Domain location=240-319; Score =159.0; E_value=1.4e-44; Accession=PF07983.5; Description=X8 domain
  Pfam module annotation: Pfam domain module=Glyco_hydro_17::X8; Domain location=1-227::240-319
HLANDVKVSTPIAFDALKDPTFPPSAARFKDDIAQSVMKPMIDFLQRTGSSLTMNIYPFFAYATQKPGTMSLDYALGNSNPGVLDDKANVTYYNLLDAQRDAAYYAVEALGQSSVASTMKASGQDVGVTMTYTESGWPNQGTIKHGGGRKLLDTEGAASIANAQAYNNNLINRVLSGKTGTPHRPYAGMDVYIFALFNENGKGQXDDIEQNFGLFYPNMQKVYAFSFQGSGAPPGGQTASWCVANAAVGDSRLQAALDWACSHGADCGAIQPGASCFEPDTKLAHASYAFNSYYQRNKKASGSCDFAGAASVVYQEPSMCS

SEQ ID NO: 89865 - protein, 265 aa, Setaria italica
  Transcript Sequence Number=SeqID_23891
  Gene Ontology: Mol. function=hydrolase activity, hydrolyzing O -glycosyl compounds; Biological process=carbohydrate metabolic process
  Homolog annotation: Hit_ID=B6U0V2; Match level="QueryCoverage=86%, HitCoverage=39%, E-value=1e-72, Identity=61%"; Hit description =Hydrolase, hydrolyzing O-glycosyl compounds
  Pfam annotation: Domain name=Glyco_hydro_17; Domain location=29-264; Score=165.1; E_value=2.1e-46; Accession=PF00332.10; Description =Glycosyl hydrolases family 17
MALARFLVVLLGAALASLLLSSCADASEVGVSYGRVANDLPDPAKVTQLLKDNGITMVRIYDAKQEVLRSLANTGIKVMVMVPNENIAEAARNPSYALQWVRDNVKAYYPATQIHGVAVGNEVFDSRPDLTRQLVPAMTNVQAALAQLGLADAVKVSTPIAFTAVENTFPPSRGRFKDEIAEPVMKPMLQFLKRTGSYLTMNMYPFWAYYNQPHDINLDYALGNSNPGVPDDDTSLKYYNLLDAERDAAHSAMDDLVPGVSLSLT

SEQ ID NO: 89866 - protein, 160 aa, Setaria italica
  Transcript Sequence Number=SeqID_23892
RPDGRPDVPKTQYAGAGAASTSPAGYHPGAAQGVDYLRYQMLLQGAARNQGTLLPFYAGGGGGMSNPYGGGGGAPSNPYGGGGGGGNTSGFLGSYYSFPPSSVSVATVPSSTSSAPGYYYSSPHDTQQSESSAAAAEDWNWASSLIHWANSGYPTPPHTQ

SEQ ID NO: 89867 - protein, 317 aa, Setaria italica
  Transcript Sequence Number=SeqID_23893
  Gene Ontology: Mol. function=transporter activity; Cellular component= integral to membrane; Biological process=transport
  Homolog annotation: Hit_ID=B6U0S4; Match level="QueryCoverage=99%, HitCoverage=74%, E-value=1e-174, Identity=93%"; Hit description =Patellin-5
  Pfam annotation: Domain name=CRAL_TRIO; Domain location=41-225; Score= 75.2; E_value=2.4e-19; Accession=PF00650.12; Description=CRALTRIO domain
RDFRVRDAHAMLLRCAAWRAEFGADAVLDEDLGFKDLEGVVAYMHGWDRDGHPVCYNAYGVFKDRGMYERVFGDGDRLARFLRWRVQVMERGVRALSLRPGGVNAIIQVTDLKDMPKRELRAASNQILSLFQDNYPEMVARKVFINVPWYFSVLFSMISPFLTERTKSKFVIAREGNVAETLYKFIRPELVPVQYGGLSRAGDLENGPPKPASEFTIKGGEKVFLEIDGIEAGATITWDLVVGGWDLEYGAEYVPAAEESYTLCVEKTRMVLATAEEPVHNAFTAREAGKMVLSIDNSGSRKRKVAAYRYFVRKPSA

SEQ ID NO: 89868 - protein, 82 aa, Setaria italica
  Transcript Sequence Number=SeqID_23894
ETSLSGGRRKKLPAHLKNLTLHRSAILDRSKDVRNMSLSLAKSSISLGEAVRVAPRIASANRKGVTSNEHMVPLTATATEHK

SEQ ID NO: 89869 - protein, 96 aa, Setaria italica
  Transcript Sequence Number=SeqID_23895
  Gene Ontology: Mol. function=hydrolase activity, acting on ester bonds; Cellular component=vacuole; Biological process=lipid metabolic process
  Homolog annotation: Hit_ID=B6TB52; Match level="QueryCoverage=89%, HitCoverage=21%, E-value=2e-16, Identity=49%"; Hit description=Alpha- L-fucosidase 2
DPTVTVVYGDYYGTILEITRSRDLAGFRKDVALTACCGDGGTHNSGTLFSCNATSILCPDPSKHISWDGLHLTEAAYQFVARGILDGLIGSSKCRC

SEQ ID NO: 89870 - protein, 68 aa, Setaria italica
  Transcript Sequence Number=SeqID_23896
MAVPSPSPTPRSPRRPEAIVAPDPSSADAQPSLDFGDPASLAALRALTDAGAATRLLHECVAYQRALD

SEQ ID NO: 89871 - protein, 239 aa, Setaria italica
  Transcript Sequence Number=SeqID_23897
  Homolog annotation: Hit_ID=B5XC70; Match level="QueryCoverage=82%, HitCoverage=79%, E-value=1e-10, Identity=30%"; Hit description =Transmembrane protein 53
  Pfam annotation: Domain name=DUF829; Domain location=1-230; Score =171.7; E_value=2.1e-48; Accession=PF05705.6; Description=Eukaryotic protein of unknown function (DUF829)
PVRELLGLDLGRRVERRVADLSAEIAAWCDADRRRTLLFHTFSNTGWLAYGAVLENLQSRADITERIRGCIVDSAPVLEIRPEVWAAGFSAAMLKKSSSMTGPSTESLDGPIVNGSLNRVSSNVMRPSWGECFILSTLQKFFEIVLYVPDINTRLRKVLSVLSDKQPPCPQFYLYSSADRVIPGECVESFMDLQRSLGRSVFAHNFVTSPHVDHYRSFPHVYSAKIDEFLKICSTVKVS

SEQ ID NO: 89872 - protein, 41 aa, Setaria italica
  Transcript Sequence Number=SeqID_23898
YRILTNHSFTQNIKGKLGYEESKSLILCPISVRCCCASSCI

SEQ ID NO: 89873 - protein, 81 aa, Setaria italica
  Transcript Sequence Number=SeqID_23899
  Subcellular localization annotation: CTP_CleavageSite=70; ConfidenceScore=5.20e-01
PDLSADLFTLLSCCIHIASLGFLSTTYLKFFHFPTAKKTLPRTSTQMIIAVSLSLFPLLFGTTCDGLDLNLMISRSQLNAC

SEQ ID NO: 89874 - protein, 377 aa, Setaria italica
  misc_feature (146)..(146): Xaa can be any naturally occurring amino acid
  Transcript Sequence Number=SeqID_23900
  Pfam annotation: Domain name=F-box; Domain location=20-67; Score =29.9; E_value=1.1e-05; Accession=PF00646.25; Description=F-box domain
MASPQRRRPCIPQERRGSASAWPDLPPELLERIVAVLGPRDRVAVRLVCVSWRACVRERFPSDLPFEAPRLLLRRPGVGGGLAFFSLHRRKVLPFALPASVGAGRCCGHTGGWLAMAFDADRSMALCNLVTGQSVAVPPPPVFPVXPKVVLSGPPTSPCWIAAALGRTGTVALLQPAVSGAWMTIGVEEGARHGGFRDMAFWSGRLCALGYDGAVLAFRGDLRARAAAVSVLREADYPVDDLHGIWRRRRDRLYLVESDGELLVVRKLYRVWGNGAVDAQVEVQVLLSAGERKWGLMDETPGRAVFVGSVASAVVAVELYPAAGLRESCVYLAQREVEMLAPHAICEYSMEEEEMRGVPIAGGHSADVEPVWIIPFV

SEQ ID NO: 89875 - protein, 144 aa, Setaria italica
  misc_feature (128)..(128): Xaa can be any naturally occurring amino acid
  Transcript Sequence Number=SeqID_23901
  Homolog annotation: Hit_ID=B6SXP2; Match level="QueryCoverage=100%, HitCoverage=26%, E-value=8e-71, Identity=86%"; Hit description =Pentatricopeptide repeat protein PPR986-12
  Pfam annotation: Domain name=PPR; Domain location=18-52; Score=13.6; E_value=0.22; Accession=PF01535.12; Description=PPR repeat
  Pfam annotation: Domain name=PPR; Domain location=53-87; Score=8.6; E_ value=0.85; Accession=PF01535.12; Description=PPR repeat
  Pfam module annotation: Pfam domain module=PPR::PPR; Domain location =18-52::53-87
HCINLLKQMEEHIIPDAISFLGVLSSCRHACLVTEGRRCFRAMIEHGIEPELDHYSCMVDLLGRAGLLDEAWDLIQTMSMPPNGVIWGSLLASCRVHGSVSIGIQAAEHRLKLEPSCAATHVQLANLXASIGCWSDVARVRKVM

SEQ ID NO: 89876 - protein, 67 aa, Setaria italica
  Transcript Sequence Number=SeqID_23902
GTYHDFRCTAYHDLKSLIIRSKLVMCTSKQFRIWFPTNCLHELSYRLGRSLFSFMLELDINSTMSQL

SEQ ID NO: 89877 - protein, 209 aa, Setaria italica
  Transcript Sequence Number=SeqID_23903
  Homolog annotation: Hit_ID=B9RDF9; Match level="QueryCoverage=92%, HitCoverage=6%, E-value=2e-81, Identity=73%"; Hit description =Nucleotide binding protein, putative
PPPTIAGLQRRRRQCPLFTEMGPIYIFKEPIGPDRMRRLAFRGGDTLPSFGNGAGLPWKATNDHVKSMAEESFALNNELAGGLHLLYHPSLLTGRFCPDASPSGSSGTQRRPAEVLGLVHVSSRVRPAESLWALAYGGPMALLPLTISNVQMDSLEPIPGDLSLSLATVSLSAPVFRIISLAIQHPGNNEELCWYYFVYLVVFFVHVVF

SEQ ID NO: 89878 - protein, 65 aa, Setaria italica
  Transcript Sequence Number=SeqID_23904
  Homolog annotation: Hit_ID=O24582; Match level="QueryCoverage=66%, HitCoverage=30%, E-value=1e-15, Identity=88%"; Hit description=Novel protein
  Pfam annotation: Domain name=C2; Domain location=1-65; Score=4.1; E _value=0.062; Accession=PF00168.22; Description=C2 domain
MVCSDAGRELDANLIVNLTLADSGAGSEPEWNETFIFTVSDDTPQLHLKIMDSDVTDDDFVGEAT

SEQ ID NO: 89879 - protein, 140 aa, Setaria italica
  Transcript Sequence Number=SeqID_23905
  Gene Ontology: Mol. function=protein serine/threonine kinase activity; Biological process=protein amino acid phosphorylation
  Homolog annotation: Hit_ID=O24582; Match level="QueryCoverage=99%, HitCoverage=99%, E-value=3e-68, Identity=90%"; Hit description=Novel protein
  Pfam annotation: Domain name=C2; Domain location=6-86; Score=81.6; E _value=2.9e-21; Accession=PF00168.22; Description=C2 domain
MVHGKLEVLLVSAKGLEDTDFLNNMDPYVILTCRTQEQKSSAANGAGSEPEWNETFIFTVSDDTPQLHLKIMDSDVTDDDFVGEATIPLEALFQEGSLPPTVHPVVKEEKYCGEIKIALTFTPAETRRPDNEEGTYSSWD

SEQ ID NO: 89880 - protein, 136 aa, Setaria italica
  Transcript Sequence Number=SeqID_23906
  Homolog annotation: Hit_ID=B6U7T3; Match level="QueryCoverage=87%, HitCoverage=82%, E-value=5e-11, Identity=45%"; Hit description =Common plant regulatory factor 7
  Pfam annotation: Domain name=bZIP_1; Domain location=32-94; Score =43.0; E_value=1.2e-09; Accession=PF00170.13; Description=bZIP transcription factor
  Pfam annotation: Domain name=bZIP_2; Domain location=31-92; Score =20.5; E_value=0.0036; Accession=PF07716.7; Description=Basic region leucine zipper
  Pfam module annotation: Pfam domain module=bZIP_1::bZIP_2; Domain location=32-94::31-92
  Subcellular localization annotation: CTP_CleavageSite=32; ConfidenceScore=5.32e-01
MASPASVVSAVTMSPPTGSEAPGCDPQLAAVTAERKRKRKESNRLSAQRSRARKQRQLDELTDQVAALRARNGAMAAAAYDIERRCAAVQAENTLLQAMNLELGERLQSLTELIQWMEGAMYHQPQPQPQLLDANM

SEQ ID NO: 89881 - protein, 248 aa, Setaria italica
  Transcript Sequence Number=SeqID_23907
  Gene Ontology: Mol. function=nucleotidyltransferase activity; Cellular component=intracellular; Biological process=DNA repair
  Homolog annotation: Hit_ID=B9RY76; Match level="QueryCoverage=72%, HitCoverage=14%, E-value=2e-33, Identity=45%"; Hit description =Terminal deoxycytidyl transferase rev1, putative
VKTRREGAGEPIKYMGCGDCETTSRSMTIAGATDSFVTLQRIAKQLFSALHLDVKEVRGVGLAMSKLEHADLARGAPQGNMLESWLASPAAKLKKRRDEMPGNVDVAGTSVQQDLRRSGPLSIGATSQSSERNLRSDRSTGVHNVELPPLSQLDLEVLKNLPPEIMSEMNDMYKGELQGLLDTLNSDKGKESSSKSLSLPAVTQNSVPAGDAKLQGYRDHKDSMHLEEDTKVKSDKQLSEVKAANDAS

SEQ ID NO: 89882 - protein, 78 aa, Setaria italica
  Transcript Sequence Number=SeqID_23908
  Gene Ontology: Mol. function=oxidoreductase activity; Cellular component=chloroplast envelope; Biological process=auxin mediated signaling pathway
  Homolog annotation: Hit_ID=B6TD84; Match level="QueryCoverage=98%, HitCoverage=22%, E-value=8e-31, Identity=77%"; Hit description=Auxin- induced protein PCNT115
FGIVAYSPLGRGFFSSGAKLMDSLSEQDIRKNWPRFQPDNLDKNKQIFERVSEMAKRKGCTPSQLALAWVHHQGSDVC

SEQ ID NO: 89883 - protein, 98 aa, Setaria italica
  Transcript Sequence Number=SeqID_23909
  Gene Ontology: Mol. function=hydrolase activity, acting on glycosyl bonds; Cellular component=vacuole; Biological process=cell wall organization and biogenesis
  Homolog annotation: Hit_ID=B9RCR5; Match level="QueryCoverage=68%, HitCoverage=15%, E-value=4e-18, Identity=64%"; Hit description =Polygalacturonase, putative
MAAPSSRGSSLAVFVVLLGALALLQSAAGAATCVGVAPAKRRPEVISITDFGGVGDGRTLNTWAFRKAVYRIQNQRRRGGTELRVPAGTWLTGSFNLT

SEQ ID NO: 89884 - protein, 92 aa, Setaria italica
  Transcript Sequence Number=SeqID_23910
  Gene Ontology: Mol. function=DNA binding; Biological process =regulation of transcription
  Homolog annotation: Hit_ID=B6U2D4; Match level="QueryCoverage=100%, HitCoverage=27%, E-value=1e-18, Identity=55%"; Hit description=NAC domain transcription factor
MRLDDWVLCRIYRKSGQASPMVPPLADYEHLDHDDPNSSGGFDDLCGFAYAPTSSSGATSTTASSAMIPQPPALLPRLPKIPSISELLDEYA

SEQ ID NO: 89885 - protein, 69 aa, Setaria italica
  Transcript Sequence Number=SeqID_23911
  Homolog annotation: Hit_ID=B6UA74; Match level="QueryCoverage=49%, HitCoverage=10%, E-value=6e-09, Identity=82%"; Hit description=SAM -dependent methyltransferase
RAPDLTFSSTSTSADAADSSSSSVEEQLLGLPHSFPLHGRPFDCYASPQASPVVANLVEGVPHPFFYSL

SEQ ID NO: 89886 - protein, 311 aa, Setaria italica
  misc_feature (16)..(16): Xaa can be any naturally occurring amino acid
  Transcript Sequence Number=SeqID_23912
  Gene Ontology: Mol. function=receptor activity; Biological process =GPI anchor biosynthetic process
  Homolog annotation: Hit_ID=Q6Z027; Match level="QueryCoverage=98%, HitCoverage=14%, E-value=1e-145, Identity=81%"; Hit description =Putative death receptor interacting protein
  Pfam annotation: Domain name=DUF2428; Domain location=46-311; Score =236.1; E_value=8.9e-68; Accession=PF10350.1; Description=Putative death-receptor fusion protein
VVEEGERDLSEACKKXFVHGVLLTLRYTFDELDWNSEVVQSGVSEMRCLVERVLQLIMRVTSLALWVVSSDAWYMPYDMDDMIDDGSFLSDIYEEDQRTTGSEKEEKNAKPGSNGKPADQVVMVGCWLAMKEVSLLFGTIIRKIPLPGCSHSNSSQDGLLDSTEETSMSEEILDVGQLETMGDHFLQVLLKMKHNGAIDKTRAGLTALCNRLLCSNDSRLCQMTESWMVLLMDRTIAKGQTVDDLLRRSAGIPAAFIALFLAEPEGTPKKLLPRALEWLIEFAKTSLANFQKDNHQKSGITRDGVGELIVV

SEQ ID NO: 89887 - protein, 87 aa, Setaria italica
  Transcript Sequence Number=SeqID_23913
  Subcellular localization annotation: CTP_CleavageSite=65; ConfidenceScore=5.41e-01
RFFNWNKIHLRQSQRTKKDHQLSLKRRSRSLHCSGPKAQGLGRRDGGKASRRLPTLPAGVNPSLRRSSGGQVNKEESVRRNQSPLFY

SEQ ID NO: 89888 - protein, 63 aa, Setaria italica
  Transcript Sequence Number=SeqID_23914
YPYGVHPQALSGGPVHGHGQVSNVTYDYSRQEFGSVLNIAHRGPVMNAFAQGAANQPIMYPSY

SEQ ID NO: 89889 - protein, 239 aa, Setaria italica
  Transcript Sequence Number=SeqID_23915
  Gene Ontology: Mol. function=microtubule motor activity; Cellular component=microtubule associated complex; Biological process =microtubule-based movement
  Homolog annotation: Hit_ID=Q2HU33; Match level="QueryCoverage=100%, HitCoverage=22%, E-value=1e-46, Identity=45%"; Hit description =Kinesin, motor region
ENTAGDLYGLFSKLERKEKIEDANRSIVQQFHSQLTQDMSLLHRTVSTSVYQQESLLKSLEEEMKSFLSSKGKVAGGLQEHVRKLKETFNSRITELHGFANELKQKYQLSFENLNSQVITHTSGLEDCMKGLLVDADQLLAELQNGLSQQEMNFCTFIDQQHEEISRNLERTKSVSATTMNFFRTIDSHALELKKVLEESQMAHQKQLFQLQEKFEAIVADEEKYLMEKVAGLLAESNA

SEQ ID NO: 89890 - protein, 319 aa, Setaria italica
  Transcript Sequence Number=SeqID_23916
  Gene Ontology: Mol. function=oxidoreductase activity; Cellular component=extracellular region; Biological process=oxidation reduction
  Homolog annotation: Hit_ID=Q2QYS3; Match level="QueryCoverage=88%, HitCoverage=48%, E-value=1e-127, Identity=77%"; Hit description =Laccase-23
  Pfam annotation: Domain name=Cu-oxidase; Domain location=179-316; Score=171.9; E_value=1.8e-48; Accession=PF00394.14; Description =Multicopper oxidase
  Pfam annotation: Domain name=Cu-oxidase_3; Domain location=45-161; Score=234.0; E_value=3.9e-67; Accession=PF07732.7; Description =Multicopper oxidase
  Pfam module annotation: Pfam domain module=Cu-oxidase::Cu-oxidase_3; Domain location=179-316::45-161
MSRSSSMSSPSYSSSLLFTTALALLLWSSLMIQPTIAKEQYHEFVIQEASVTRLCREHSIMTVNGQFPGPAVEIGEGDSLIVRVINRGRYNMTVHWHGVRQMRTGWSDGPEFVTQCPIRPGQSYTYRFTVAGQEGTLWWHAHSSWLRATVHGALIIRPRAGVTAYPFNAVAGGGKPPAGEIPILLGEWWDMNPIDVVRTATRTGAAPNISDALTVNGQPGDLYRCSSKDTTTFPVKSGETNLLRFINAALNTELFVSLAGHTMTVVGADASYTKPYSTSVLMIAPGQTTDVLVTFDQPPGRYYLAARAYASAQGVPFDN

SEQ ID NO: 89891 - protein, 76 aa, Setaria italica
  Transcript Sequence Number=SeqID_23917
  Subcellular localization annotation: CTP_CleavageSite=39; ConfidenceScore=5.66e-01
SSQAPSRSFPSGSAPSPRSTPRRPNRHGSSPLPRPEPTRGAASFAPEPSDARCPPCPRYHRRFLFLFPPASAVSPP

SEQ ID NO: 89892 - protein, 97 aa, Setaria italica
  Transcript Sequence Number=SeqID_23918
  Gene Ontology: Mol. function=protein serine/threonine phosphatase activity; Cellular component=protein serine/threonine phosphatase complex; Biological process=protein amino acid dephosphorylation
  Homolog annotation: Hit_ID=Q8H063; Match level="QueryCoverage=100%, HitCoverage=25%, E-value=2e-35, Identity=79%"; Hit description =Probable protein phosphatase 2C 29
EAAVGIVAGSPRKGVAMRLVRAAQLEAARKKEVRYEKIRTIEKGHRRHFHDDITVVVLFLDRCRSGPEDIDGTYAPVDVFSCSPAGDHEDPTRPVLR

SEQ ID NO: 89893 - protein, 238 aa, Setaria italica
  Transcript Sequence Number=SeqID_23919
  Gene Ontology: Mol. function=metal ion binding; Cellular component =nucleus
  Homolog annotation: Hit_ID=Q0VBD2; Match level="QueryCoverage=49%, HitCoverage=13%, E-value=6e-15, Identity=36%"; Hit description =Protein MCM10 homolog
  Pfam annotation: Domain name=zf-primase; Domain location=68-113; Score=61.5; E_value=3.2e-15; Accession=PF09329.3; Description =Primase zinc finger
GTSYSIWKMGALDETEVSLFLFGDAHVHYSGAAVGSVFALLNGNVRMDNGGKGFSVSVASVGQMFKMGVAADFSLCKGKRKDGVACTMAINKSKGAYCKFHSSKTSQKYTTGRVELKGGNFQFASKLRSEGIYMVNRSSEQPNPRKPFQPVKVMSIDGLKRALSNADRVTTKNQSQGIRFLSHVTANMDNRRSTVQSNGSTNQQQQKSKFSLNKSSSSSGAKGPPMQGLGKPEQDFKR

SEQ ID NO: 89894 - protein, 58 aa, Setaria italica
  misc_feature (46)..(46): Xaa can be any naturally occurring amino acid
  Transcript Sequence Number=SeqID_23920
WSKRPYLLFVLLVVALAAIASAYVAVLAVLAPGSVSPFWLGLWSSXRHIISPESWRRI

SEQ ID NO: 89895 - protein, 211 aa, Setaria italica
  Transcript Sequence Number=SeqID_23921
  Gene Ontology: Mol. function=nucleoside-triphosphatase activity; Cellular component=integral to membrane; Biological process=transport
  Homolog annotation: Hit_ID=Q6ZIV9; Match level="QueryCoverage=100%, HitCoverage=19%, E-value=2e-74, Identity=70%"; Hit description =Putative ABC transporter
YNNNTAIVPIALLRVPRLVNMASNAYIKFLRGSGVDMLLEYIKEMPKVGTELKFDLSSLLGALFFTWIVELLFPVILTYLVYEKQQKLKIMMKMHGLKDGPYWLISYGYFFALSAAYMILFVIFGSLIGLKFFKLNNYSIQFVFYFIYINLQIALAFFVASFFSSVKIATVVGYIYVFGSGLLGAFLLRFFVEDNGFPKGWIVVMEIIPGF

SEQ ID NO: 89896 - protein, 169 aa, Setaria italica
  misc_feature (148)..(148): Xaa can be any naturally occurring amino acid
  Transcript Sequence Number=SeqID_23922
  Gene Ontology: Mol. function=sodium:dicarboxylate symporter activity; Cellular component=membrane
  Homolog annotation: Hit_ID=UPI0001A7B14A; Match level="QueryCoverage =95%, HitCoverage=19%, E-value=6e-39, Identity=51%"; Hit description =aminopeptidase
TFCALFKQVMEKSNFKLLSDEEYDIAQSGKYLLNLPIKVDESKLDKKLLTKYFKEHPHENLPEFADKYIIFRRGVGIDRTTDYFFMEKVDVMISRAWRSLLRFTRIDRLFSKKQHLQPKKDTKKTDEINEDEEEPGNYLVERIRLEKXELSMKILMSKMTIQEPTFDRT

SEQ ID NO: 89897 - protein, 210 aa, Setaria italica
  Transcript Sequence Number=SeqID_23923
  Gene Ontology: Mol. function=sodium:dicarboxylate symporter activity; Cellular component=plasma membrane
  Homolog annotation: Hit_ID=UPI0001A7B14A; Match level="QueryCoverage =77%, HitCoverage=19%, E-value=2e-42, Identity=53%"; Hit description =aminopeptidase
MAAAEGRMPEGEGKRKEAEKMDARKDGVAREVIRMEREAVIPILKPKLFMRLAYLIEHEVDRNEFLKLCKKVEYTIRAWYLLQFEDLMQLYSLFDPVSGEKRLEQQNLTPDEIETLEFNFMTYLFQVMEKSNFKLLSDEEYDIAQSGKYLLNLPIKVDESKLDKKLLTKYFKEHPHENLPEFADKYIIFRRGRRFSRFLFTFCCGSLAVA

SEQ ID NO: 89898 - protein, 369 aa, Setaria italica
  Transcript Sequence Number=SeqID_23924
  Gene Ontology: Mol. function=sodium:dicarboxylate symporter activity; Cellular component=plasma membrane
  Homolog annotation: Hit_ID=UPI0001A7B14A; Match level="QueryCoverage =90%, HitCoverage=41%, E-value=1e-109, Identity=57%"; Hit description= aminopeptidase
RTVFLLSRLRNIILFIKLDESKLDKKLLTKYFKEHPHENLPEFADKYIIFRRGVGIDRTTDYFFMEKVDVMISRAWRSLLRFTRIDRLFSKKQHLQPKKDTKKTDEINEDEEEPELFVERIRLEKIELSMKNLMSKMTIQEPTFDRMIVVYRRAGTKTKPDRGIFVKHFKNIPMADMEIVLPEKKNPTLTPMDWVKFLISAVIGLVTLVGSLEMPKADVWVVIAILSGVIGYCAKIYFTFQQNMTIYQNLITKSMYDKQLDSGKGTLLHLCDDVIQQEVKEVIICYYILMEQGKATVQDLDLRCEELIKDEFGAECNFDVHDAIQKLEKLSIVHRDSIGRILCVPLKRANEIIGTTTEELVMRAQSPTS

SEQ ID NO: 89899 - protein, 94 aa, Setaria italica
  Transcript Sequence Number=SeqID_23925
  Gene Ontology: Mol. function=Rho guanyl-nucleotide exchange factor activity
  Homolog annotation: Hit_ID=Q6QP47; Match level="QueryCoverage=89%, HitCoverage=21%, E-value=1e-43, Identity=96%"; Hit description =Putative heme oxygenase 1
ALRKLDHMLLEILESFRDPEFWYVEQGIAAPDCDGSASFRAAFHRRDEKWWLPVPRVPPGGLHDKTRKQLQHKRDCANQILKAAMAINSNSLAE

SEQ ID NO: 89900 - protein, 147 aa, Setaria italica
  Transcript Sequence Number=SeqID_23926
  Gene Ontology: Cellular component=chloroplast
  Homolog annotation: Hit_ID=Q9AUN8; Match level="QueryCoverage=80%, HitCoverage=73%, E-value=2e-48, Identity=75%"; Hit description =Dehydration stress-induced protein
  Pfam annotation: Domain name=PLAT; Domain location=30-146; Score=0.7; E_value=0.014; Accession=PF01477.15; Description=PLATLH2 domain
MKSSSSSIALTCCLLLALVASHAAFAAAQCTFEIIVKTGGREDAGTDSRVSLQVSAARGRTLTITNLESWGKMPAGHDYFERGHLDRFSGKGRCLPSEPCKMVLKSDGQGHKPGWYVDYVKVTQLGSGSPKERKWAVDQWLAIDEAP

SEQ ID NO: 89901 - protein, 230 aa, Setaria italica
  misc_feature (39)..(39): Xaa can be any naturally occurring amino acid
  misc_feature (56)..(56): Xaa can be any naturally occurring amino acid
  misc_feature (149)..(149): Xaa can be any naturally occurring amino acid
  Transcript Sequence Number=SeqID_23927
  Gene Ontology: Mol. function=DNA binding; Cellular component=nuclear matrix
  Homolog annotation: Hit_ID=B9SQC4; Match level="QueryCoverage=96%, HitCoverage=33%, E-value=1e-29, Identity=36%"; Hit description=ATP binding protein, putative
HVEPQEEVSQSDVKVPHARNPLAGLLNAIAVIASGCFRXGFLGTSQQEKNTLQSTXSSMEAKLVENEATMSMLRENYEKRILDEQAELKKQARKFQEEEALLQDQLVSSRRTVTSLTDEVQKEKELVEQLNLEIDRLKRSIAEAEEDKXHVSEGKLNEKMEMLDILHDKVNLLSQEVNGKDEHIRELSSSLSAKEKNYQNLNAIYNQAKENLEQANSQIKQLEKDVLADK

SEQ ID NO: 89902 - protein, 90 aa, Setaria italica
  Transcript Sequence Number=SeqID_23928
  Gene Ontology: Mol. function=carboxylesterase activity
HGGLSLALALERFPRKVAAAVFVAAALPCVGKHMGVTTEEFMRRTASGGLLMDCQTVAINSSNSNNGVAIVMGPRFMEEKYYQQSPAEDL

SEQ ID NO: 89903 - protein, 105 aa, Setaria italica
  Transcript Sequence Number=SeqID_23929
LDLRKIKTLRILVLAIVLSHLNIFAADSSSISQISSARLPERVKLIIEEIEKEEAHLLEDLASMDRKFAEHYNVLEQILAVLIQFVKDKKLEHQHQYDDLKKTWL

SEQ ID NO: 89904 - protein, 548 aa, Setaria italica
  misc_feature (48)..(48): Xaa can be any naturally occurring amino acid
  misc_feature (62)..(62): Xaa can be any naturally occurring amino acid
  misc_feature (457)..(457): Xaa can be any naturally occurring amino acid
  Transcript Sequence Number=SeqID_23930
  Gene Ontology: Mol. function=nucleic acid binding; Cellular component= nucleus; Biological process=nuclear-transcribed mRNA catabolic process, nonsense-mediated decay
  Homolog annotation: Hit_ID=Q7XJW2; Match level="QueryCoverage=86%, HitCoverage=67%, E-value=1e-161, Identity=62%"; Hit description =OSJNBa0016O02.8 protein
  Pfam annotation: Domain name=CAF1; Domain location=1-344; Score= -50.5; E_value=7.2e-07; Accession=PF04857.12; Description=CAF1 family ribonuclease
PFLLGRHNFFIFPRKELSDCSSHEFLCQTTSIDFLAKYQFDFNTCFRXRAQEEEALQKLNFXHQDRPFSSSATSEGDGDMPLKRTADILFTERMKMNFKVWRDVIISQPDSHLSGNIKCTAGQFQTAFFKMRPAVILNGFSSHQLQLIQQVLRKNFRDLVYVCTFGEDDTSEKRVVYSDTDEDKILLMKDVHEDLLKSREARVKSAIGIRHVIDLLSSERKLIVGHSCFLDIAQVYSKFVGPLPSSIKEFALSIHKIFPHIADTRHLMNVNQAVQKLMKHKSKSLSSAFSLLCPSSHSYAEKPSSLSPVRIEVGGDETTSSCFVSGAKHEAGYDAYMTGCVFAQLCAYLDVKFEQLSPQDNLATNNKLQKHINLLSPSWNSGTVLDLSSGQERPDPGYMRRYPAAVYDNIVLIWGFMSKVRPKEIKDCICKVFGSGSIKTVFSIDSTAALVQFKKQXTVNEFLDLKALLEKTDSAISILHPLSTILEGGQTRAVKYDTYRDICSSSELKYLFADQAEAFCATSKNQLQENVDHSLISGVHQTVLTSVN

SEQ ID NO: 89905 - protein, 106 aa, Setaria italica
  Transcript Sequence Number=SeqID_23931
GIASGPRIEGVKPSQPKFGSGTRSTEQQFLLRSDSIPSHSNPSELGCIPGHSDQNKRTLRAVRFLGNRCLERFLASFDQLERFLDGFQANRTGPKLAIGSHIGAPG

SEQ ID NO: 89906 - protein, 279 aa, Setaria italica
  misc_feature (1)..(4): Xaa can be any naturally occurring amino acid
  Transcript Sequence Number=SeqID_23932
  Gene Ontology: Mol. function=structural constituent of ribosome; Cellular component=ribonucleoprotein complex; Biological process =translation
  Homolog annotation: Hit_ID=B6TB66; Match level="QueryCoverage=98%, HitCoverage=66%, E-value=1e-130, Identity=85%"; Hit description=50S ribosomal protein L1
  Pfam annotation: Domain name=Ribosomal_L1; Domain location=40-258; Score=301.2; E_value=2.2e-87; Accession=PF00687.13; Description =Ribosomal protein L1pL10e family
XXXXGEGERIQMDAARATRSVFGVPVEEEQVPYPTIIPVVKRPQKVTIDLVDAIRLVKTSTNEKKRNFVETVEAHVMLGVDPRRGDQMVRGALTLPHGTGKTVRVAVFAEGPAADEARAAGADVVGGDELIEEIRKGGGKLSFDKCIATPMFMPRLSKVARILGPRGLMPNPKLGSVTNDVSGAVKAAKSGRVDFKIDKTAIVHVGLGKVNFSEESLRENVGAFVHALLLAKPVGLKKTSKYVGYVKKFTLSSTMGPGFPVTIPSLSVAADHYNKVQVS

SEQ ID NO: 89907 - protein, 58 aa, Setaria italica
  Transcript Sequence Number=SeqID_23933
KYTTYKHDSFRGNKGSALIQHKNSISDDGRKRILSNNFSSICFSKSAFILYQIFLRKH

SEQ ID NO: 89908 - protein, 218 aa, Setaria italica
  Transcript Sequence Number=SeqID_23934
  Gene Ontology: Mol. function=peptidase activity
  Homolog annotation: Hit_ID=Q10NL2; Match level="QueryCoverage=79%, HitCoverage=79%, E-value=3e-88, Identity=89%"; Hit description=OTU -like cysteine protease family protein, expressed
  Pfam annotation: Domain name=OTU; Domain location=70-214; Score=52.1; E_value=2.2e-12; Accession=PF02338.11; Description=OTU-like cysteine protease
MAAAVRPSNASLLACLREGTAKFELLEDPAPAPAPAWPRLHCFARIAPSLRGGWSAALNKVEHYGVQRVTGDGRCMFRALAKGMAKNKGIPLTPREELQDADDLRMAVKEIICDSETERQKYEEAVIAITVEQSLRRYCQRIRRPDFWGGESELLVLSRLCRQPIIIYIPEREYHGRGNGFIPIAEYGLEFAKNSKNWKKKAPVRLLYSGRNHYDLLV

SEQ ID NO: 89909 - protein, 65 aa, Setaria italica
  Transcript Sequence Number=SeqID_23935
RQAVTSFNNFHPDTLQFIDIGFITLIQNYLVLGKKCSKFERGNGARIEKLLMDFMLYHNLCRGCV

SEQ ID NO: 89910 - protein, 96 aa, Setaria italica
  Transcript Sequence Number=SeqID_23936
TDVETSSCRSLIFRGLLKELLRSTEVALSTQKVEVERNEDDLKDTVVAVALFQVFYEEIQFLCEYYHSVLPVVLSNPFFFLANYILFPIVVWAFCL

SEQ ID NO: 89911 - protein, 78 aa, Setaria italica
  Transcript Sequence Number=SeqID_23937
  Subcellular localization annotation: CTP_CleavageSite=71; ConfidenceScore=5.65e-01
LDSSQLQPSPFDSSCPKMCHSLSSTLSPSSSLAVHPIGRNRSFPQLLELHPLPPMPRRGAPCPGPPRRQLMAQMEPRS

SEQ ID NO: 89912 - protein, 73 aa, Setaria italica
  Transcript Sequence Number=SeqID_23938
  Homolog annotation: Hit_ID=Q8S7N7; Match level="QueryCoverage=71%, HitCoverage=29%, E-value=1e-20, Identity=92%"; Hit description =Nuclear protein E3-3, isoform a, putative, expressed
SLSIFKVVHPIPEILILGCGKHIHPVSPELRNFIRSTGMKLEAVDSRNAASTPDRCPPHCYHLLVFQKTRLKF

SEQ ID NO: 89913 - protein, 175 aa, Setaria italica
  Transcript Sequence Number=SeqID_23939
  Gene Ontology: Cellular component=nucleus
  Homolog annotation: Hit_ID=Q8S7N7; Match level="QueryCoverage=91%, HitCoverage=91%, E-value=1e-80, Identity=90%"; Hit description =Nuclear protein E3-3, isoform a, putative, expressed
  Pfam annotation: Domain name=DUF498; Domain location=61-169; Score =160.5; E_value=5.1e-45; Accession=PF04430.6; Description=Protein of unknown function (DUF498)
  Subcellular localization annotation: CTP_CleavageSite=22; ConfidenceScore=5.06e-01
MAAAARGQKALGALPQLVKSLRSEPVSDGARLRRLPSLRRTFSLYDQINLIDSVPEDQLRFQSYDDTGFKINNVKYEGSLLIVENKIMTWAPKTFSEITAESLSIFKVVHPIPEILILGCGKHIHPVSPELRNFIRSTGMKLEAVDSRNAASTYNILNEEGRPVAAAVLPFGVTC

SEQ ID NO: 89914 - protein, 158 aa, Setaria italica
  Transcript Sequence Number=SeqID_23940
  Homolog annotation: Hit_ID=Q6H7S8; Match level="QueryCoverage=100%, HitCoverage=5%, E-value=4e-62, Identity=73%"; Hit description =Putative LvsC
PECSALLGALEHCTYDPGLAGAIVKSFHVILQLATEQTLASFKSINVLTRVLKAACLQAQEVRKLSHPQDDLDQNGSQSRNVLTASSDERIKNACTFVELAFNLFKDYVTISDIGRIAVLHNANCIECLFDLFQEEYLRKHIVEQVLALFRLPPSSAQ

SEQ ID NO: 89915 - protein, 53 aa, Setaria italica
  Transcript Sequence Number=SeqID_23941
FLAPRGICPYCNKYIPLAYCTTLACAACYYAKASSTASGSSFLMQHFIPQSPQ

SEQ ID NO: 89916 - protein, 54 aa, Setaria italica
  Transcript Sequence Number=SeqID_23942
MARFILSLMELGVSAAVHLIFGFYVFSTAVAADISQAAAASGCLLLRRPPPSAG

SEQ ID NO: 89917 - protein, 60 aa, Setaria italica
  Transcript Sequence Number=SeqID_23943
  Subcellular localization annotation: CTP_CleavageSite=17; ConfidenceScore=5.12e-01
FISNLGTSLKVGQMRFRGSLVSNSVSFFVQFLICHRSFQIWESCSKLGKCHSEAVRQQLG

SEQ ID NO: 89918 - protein, 158 aa, Setaria italica
  Transcript Sequence Number=SeqID_23944
RLLVASPGSVSAFDLRSPRPHRLILSTPVPDAAPPGGIAVDPHTGNAFLTVGARIYKLSVDGDLGPLSSATALGSEPLASLTAHVSRGFLLVGQPSTGSLLRVDMEDGATRTVSGALTPPTPVAVAVRTDGAVAVGGAGGLRLVVSNDGWVSCGVRDE

SEQ ID NO: 89919 - protein, 47 aa, Setaria italica
  Transcript Sequence Number=SeqID_23945
PKSIHMKRHDMTSLSTKAEIQEINKFLKVQLMSVELNICTHEYLKSL

SEQ ID NO: 89920 - protein, 73 aa, Setaria italica
  Transcript Sequence Number=SeqID_23946
MDKYFPPEHHHTLGHACMCLPSQQSMPPLPLTPIFSSINKIPTSHSETNNFCPHEYEQELCRAGPAASWQEQP

SEQ ID NO: 89921 - protein, 159 aa, Setaria italica
  misc_feature (16)..(16): Xaa can be any naturally occurring amino acid
  Transcript Sequence Number=SeqID_23947
  Gene Ontology: Mol. function=receptor activity; Cellular component =endoplasmic reticulum; Biological process=intracellular protein transport
  Homolog annotation: Hit_ID=B6TG43; Match level="QueryCoverage=89%, HitCoverage=64%, E-value=3e-39, Identity=60%"; Hit description=B -cell receptor-associated protein 31-like containing protein
AKIRRRAGELGQLTPXTDQVLASRQLLEASLMGYSLFLGLIIDRLHHYIRELRTMNKNMEAVTKQSRTLEEAKLGGTEEIQGYQKEIASLKEQVELLKNQSQKKTEELKTAEANSVALQKQSEGLLMEYDRLIAENGDLRNQLQSIDLRMSHSDGKKNS

SEQ ID NO: 89922 - protein, 146 aa, Setaria italica
  Transcript Sequence Number=SeqID_23948
  Subcellular localization annotation: CTP_CleavageSite=20; ConfidenceScore=5.27e-01
ACVSIWAHPIPKAKSKYTIPASRAPRTLKLMTKTMRSILLSSSLMLPRKDEHQKLESIQYPFFPRITQYICRRSHIYKHTRHTNTCNPTLMSISEKLDRQILKIDEVTTNTSILTGTSPTIKKAPVKLWNKSKKIQASVPSQGLEY

SEQ ID NO: 89923 - protein, 96 aa, Setaria italica
  misc_feature (35)..(35): Xaa can be any naturally occurring amino acid
  misc_feature (66)..(66): Xaa can be any naturally occurring amino acid
  Transcript Sequence Number=SeqID_23949
  Subcellular localization annotation: CTP_CleavageSite=9; ConfidenceScore=5.14e-01
CGSPPSPAPAPELPYPPAPPPPKPPASPPYPPPPXLPPSPCCPPPSPPPKPPASPPPLPPPKPPPXLPERPPPPPPPPKPPWWPLITQPNRPKTKT

SEQ ID NO: 89924 - protein, 59 aa, Setaria italica
  Transcript Sequence Number=SeqID_23950
LRVSGGGLGGGGRHERGGHGGGGDELHPEAGHLRRRRRRVGSSGWLLGLPEISLGEFKL

SEQ ID NO: 89925 - protein, 175 aa, Setaria italica
  Transcript Sequence Number=SeqID_23951
  Gene Ontology: Mol. function=metal ion binding; Cellular component =cytoplasm; Biological process=ubiquitin-dependent protein catabolic process
  Homolog annotation: Hit_ID=B6T6C6; Match level="QueryCoverage=91%, HitCoverage=90%, E-value=2e-59, Identity=74%"; Hit description=RHB1A
  Pfam annotation: Domain name=zf-C3HC4; Domain location=124-164; Score= 29.1; E_value=1.8e-05; Accession=PF00097.17; Description=Zinc finger, C3HC4 type (RING finger)
  Pfam annotation: Domain name=zf-MIZ; Domain location=120-167; Score= -11.3; E_value=0.045; Accession=PF02891.12; Description=MIZ zinc finger
  Pfam module annotation: Pfam domain module=zf-C3HC4::zf-MIZ; Domain location=124-164::120-167
MGGCCCCSSRRSEVVRAPVVYRQHNLEEHEPLSSAFDGSSPASAIVAVDTNLDTSTPDTYRAPPAPLPYDVVLAVPDNPGLEKSDIKSKTDDQQESMNNQESLKVDESCKKGVLEDKPDEEDVCPICLEEYDEENPRSVTKCDHHFHLCCILEWMERSDTCPVCDQITLVDEMFE

SEQ ID NO: 89926 - protein, 119 aa, Setaria italica
  Transcript Sequence Number=SeqID_23952
  Gene Ontology: Mol. function=protein dimerization activity
  Homolog annotation: Hit_ID=B6U4H6; Match level="QueryCoverage=86%, HitCoverage=14%, E-value=3e-51, Identity=93%"; Hit description =Transposon protein
  Pfam annotation: Domain name=hATC; Domain location=11-93; Score=87.3; E_value=5.6e-23; Accession=PF05699.6; Description=hAT family dimerisation domain
ETSSGQSLKSDLDMYLEEAVYRQKEGNQDNFDILGWWKTFAAKYPVLSQMARDILAIPVSIIPLDSEARTLNEYLSTMDPSTVQGLVCAQDWLQEDPEVAGFSMSTLQCIHLFWLGTTI

SEQ ID NO: 89927 - protein, 227 aa, Setaria italica
  Transcript Sequence Number=SeqID_23953
  Gene Ontology: Mol. function=protein dimerization activity; Biological process=regulation of RNA metabolic process
  Homolog annotation: Hit_ID=B6U4H6; Match level="QueryCoverage=98%, HitCoverage=32%, E-value=1e-110, Identity=84%"; Hit description =Transposon protein
HMIVQHGYRFSMVDDVGFQKFVKNLQPQFRMVSYDMVRADSMEIYEGEKLKLQDSLLKIPCRVSISVDMWQSNTQMEYMCLTCHYIDHANDEWKIRKKILNFVHMEAPFAVDQIANLIVEKLHSWGIDRKLAAVVLDNCSGGDLVARELLRVLQPRRLLLNGDLFQVRSCAHILNLTVQESWEHASDITDRVRKMINYVKFERFQKFQDISKLLHMDQKLLVVDFFL

SEQ ID NO: 89928 - protein, 451 aa, Setaria italica
  misc_feature (16)..(16): Xaa can be any naturally occurring amino acid
  Transcript Sequence Number=SeqID_23954
  Gene Ontology: Mol. function=protein dimerization activity
  Homolog annotation: Hit_ID=B6U4H6; Match level="QueryCoverage=99%, HitCoverage=64%, E-value=0.0, Identity=83%"; Hit description =Transposon protein
  Pfam annotation: Domain name=hATC; Domain location=338-420; Score =87.3; E_value=5.6e-23; Accession=PF05699.6; Description=hAT family dimerisation domain
LNLIVEKLHSWGIDRXLAAVVLDNCSGGDLVARELLRVLQPRRLLLNGDLFQVRSCAHILNLTVQESWEHASDITDRVRKMINYVKFERFQKFQDISKLLHMDQKLLVVDSPDSWSSLYIMFESACYYHDVLVRLAEQEGHYDVFLAASDWADVKALTEILDVVYHAMEKFPVENPTANLYFNEMCEIHVLLRTWRNSPSPVVAKVAGQMLSKFEGYWDLTRPVMAFASILDPRYKMKSLEYFFRLIYADEQFTAKTMLDVIQNTFNNLYNDYKHQSSDSWKNPSVLCYSRNSSSGMGSMYSNGDDSKTFSRITLSDARRGLDQYIQETSSGQSLKSDLDMYLEEAVYRQKEGNQDNFDILGWWKTFAAKYPVLSQMARDILAIPVSIIPLDSEARTLNEYLSTMDPSTVQGLVCAQDWLQEDPEVAGLSGQTNDGAPHGDELIVVPSQNR

SEQ ID NO: 89929 - protein, 115 aa, Setaria italica
  Transcript Sequence Number=SeqID_23955
  Gene Ontology: Mol. function=protein serine/threonine kinase activity; Cellular component=integral to membrane; Biological process=protein amino acid phosphorylation
  Homolog annotation: Hit_ID=B9RY42; Match level="QueryCoverage=97%, HitCoverage=10%, E-value=4e-12, Identity=40%"; Hit description =Phytosulfokine receptor, putative
ALVFFIGCVVIAVRRARSKGSVGDGGKFAEASLFDSMTELDGDSKDTILFMSEDAGGGDTARRVTFLDILKATNNFSQASIIGTGGYGLVYLAELVDGTRLAVKRLNGDLCLVER

SEQ ID NO: 89930 - protein, 177 aa, Setaria italica
  misc_feature (14)..(14): Xaa can be any naturally occurring amino acid
  Transcript Sequence Number=SeqID_23956
  Homolog annotation: Hit_ID=A6YRS1; Match level="QueryCoverage=96%, HitCoverage=37%, E-value=3e-59, Identity=66%"; Hit description=R -interacting factor 1
VVISDYNPETGLYXLVYDINTSNETWEWVDLEKMGPEDIRWLDNDSGIDPVMYLQSQGAPSSGARKSTNCGGLMRGHGRGRSFQKNVSKKDFSPPQKNARKRGSGDIDILHTESLIERVEKVFNVSNPDHLEVEKAKKALKEQEHSLVDAIARLAEASADETDGHNRCHRKKNVRRS

SEQ ID NO: 89931 - protein, 108 aa, Setaria italica
  misc_feature (19)..(19): Xaa can be any naturally occurring amino acid
  Transcript Sequence Number=SeqID_23957
  Gene Ontology: Mol. function=sequence-specific DNA binding; Cellular component=nucleus; Biological process=regulation of transcription
  Homolog annotation: Hit_ID=Q6IEP0; Match level="QueryCoverage=100%, HitCoverage=9%, E-value=1e-20, Identity=48%"; Hit description=WRKY transcription factor 41
SLTLSIIFKMEPLSDDESXKYFFSRFPGNRSTNNQHSYEVSSEIIRKCGGFPLATITTASLLGRHQNWAEQCNWIRRSLSSNLRTDPTIERMKQVLSLCYNNLPCHLK

SEQ ID NO: 89932 - protein, 193 aa, Setaria italica
  Transcript Sequence Number=SeqID_23958
MDAKKKRNKKKKGNQGKNTADVTSNAGEAAPQNHNHESAPRDHYKGSDADDAMSSVGEGVPQYQNHEPTLPLDHNDSTNAHDTTSSIGEGISCYQNNEPTLTQNHKASNAVPADQRSIGMSESSVELDMHRLYEAKLDKLHETIKQLEDEKSLWLQKLSTMEGELEKLHSKVGFHAQNEVLLKEKLSNLQIGY

SEQ ID NO: 89933 - protein, 32 aa, Setaria italica
  Transcript Sequence Number=SeqID_23959
CAGVFTVSGIIDSFVYHGQRAIKKKMEIGKFN

SEQ ID NO: 89934 - protein, 255 aa, Setaria italica
  Transcript Sequence Number=SeqID_23960
  Gene Ontology: Mol. function=catalytic activity; Biological process =trehalose biosynthetic process
  Homolog annotation: Hit_ID=Q1W5S3; Match level="QueryCoverage=83%, HitCoverage=62%, E-value=1e-112, Identity=92%"; Hit description =Ramosa 3 (Fragment)
  Pfam annotation: Domain name=Trehalose_PPase; Domain location=6-225; Score=246.0; E_value=8.8e-71; Accession=PF02358.8; Description =Trehalose-phosphatase
IFLSSFFYLSQMRDAVRRVAEQFPTAIVSGRCRDKVFNFVKLTELYYAGSHGMDIEGPAKQSNKHVQANAEEAVHYQAGSEFLPIIEEVYRTLTAKMESIAGAKVEHNKYCLSVHFRCVQEEEWKAVEEEVRSVLKEYPDLKLTHGRKVLEIRPSIKWDKGKALEFLLKSLGYAGRSDVFPIYIGDDRTDEDAFKVLRGMGQGIGILVSKFPKETAASYSLRDPAEVKEFLRKMVKGKGDGGPVKMMNDIVHVDH

SEQ ID NO: 89935 - protein, 55 aa, Setaria italica
  Transcript Sequence Number=SeqID_23961
KRQQLKKLWTDDIENTTHTNGINSMRGGGQLTQHYNTIAKEKERLLYSAKEKTDS

SEQ ID NO: 89936 - protein, 93 aa, Setaria italica
  Transcript Sequence Number=SeqID_23962
AQERARQMMDEDFQHAVFLREPKPEPDIDVAQSLHDAQVGIVSHPFNTSSSGAADPLASRPSVQNQTEISGNKGRPVQHCRTRTSSTSFVERT

SEQ ID NO: 89937 - protein, 420 aa, Setaria italica
  misc_feature (42)..(42): Xaa can be any naturally occurring amino acid
  Transcript Sequence Number=SeqID_23963
  Gene Ontology: Mol. function=transferase activity; Cellular component= membrane
  Homolog annotation: Hit_ID=B9SL59; Match level="QueryCoverage=100%, HitCoverage=57%, E-value=0.0, Identity=72%"; Hit description =Catalytic, putative
  Pfam annotation: Domain name=Exostosin; Domain location=1-328; Score =297.6; E_value=2.7e-86; Accession=PF03016.7; Description=Exostosin family
QCVNRIYDGRNRTLWTQQLYGAQMALYESILASPHRTLNGDXADYFYVPVLDSCLITRSDDAPHLLMPRDLRLRSYHALEYYRMAYDHIAQQYPYWNRTSGRDHIWFFSWDEGACYAPREIWNSMMLVHWGNTNTKHKNSTSAYWADNWDHIPLDRRGNHPCFDPRKDLVLPAWKEPDPGAIWLKLWARPRINRTTLFYFNGNLGPAYEGGRPEDTYSMGIRQKLAAEFGSTPNKQGNLGRQYATDVTVTYLRTEKYYEELASSVFCGVLPGDGWSGRMEDSMLQGCIPVIIQDGIFLPYENVLNYNSFAVRLQEDDIPNLISTLRGINETQVEFMLGNVRQMWQRFFYRDSILLEAQRQKRLFSEEAPWSVEVSKLPDDDDVFATFMQVLHYKLYNDPWRQGLLQTKETGLPTICSRAS

SEQ ID NO: 89938 - protein, 150 aa, Setaria italica
  Transcript Sequence Number=SeqID_23964
  Gene Ontology: Mol. function=unfolded protein binding; Cellular component=plasma membrane; Biological process=response to stress
  Homolog annotation: Hit_ID=C3V133; Match level="QueryCoverage=100%, HitCoverage=37%, E-value=5e-45, Identity=66%"; Hit description=Heat shock protein 70 (Fragment)
IVTVSAKDKATGKEQNITIRSSGGLSEADIQKMVQEAELHAQKDQERKALIDIRNNADTTIYSIEKSLGEYRDKIPVEVASEIEAAIADLRKEMASDDIEQIKAKLEAANKAVSKIGQHMSGGGSGGSQAEGSHGGNDQPPEAEYEEVKK

SEQ ID NO: 89939 - protein, 196 aa, Setaria italica
  Transcript Sequence Number=SeqID_23965
  Gene Ontology: Mol. function=serine-type endopeptidase activity; Cellular component=plasma membrane; Biological process=negative regulation of catalytic activity
  Homolog annotation: Hit_ID=Q8LAE1; Match level="QueryCoverage=97%, HitCoverage=24%, E-value=4e-48, Identity=49%"; Hit description =Subtilisin-like serine protease
SSPDTIIGLLDSGIWPESPSFNDAGFGPVPGRWKGVCMAGDDFNSSNCNRKLIGARYYNESDVRGPSQSGGGSPRDDVGHGTHTSSTAAGNAVAGASYYGLAAGTAKGGSASSRVAMYRVCSEEGCSGSAILAGFDDAVADGVDVLSVSLGASPYFRPDFTSDPIAIGSFHAVAKGVTVVCSAGNSGPAAATVVNA

SEQ ID NO: 89940 - protein, 383 aa, Setaria italica
  Transcript Sequence Number=SeqID_23966
  Gene Ontology: Mol. function=translation initiation factor activity; Cellular component=eukaryotic translation initiation factor 2B complex; Biological process=cellular metabolic process
  Homolog annotation: Hit_ID=Q10G37; Match level="QueryCoverage=99%, HitCoverage=62%, E-value=0.0, Identity=84%"; Hit description =Translation initiation factor eIF-2B delta subunit, putative, expressed
  Pfam annotation: Domain name=IF-2B; Domain location=73-366; Score =322.1; E_value=1.1e-93; Accession=PF01008.9; Description=Initiation factor 2 subunit family
QPRMQFDDVHRVVKAKKRSVVNQSEAQNRVELFRHLPQYAHGTQLPDLESKFFQPDLMHPSVYKVGLQYLSGDISGGNARCIAMLLAFREAINDYSTPAEKILSRDLTAKISSYVSFLIECRPLSISMGNAIRFLKNRITKLPLALSESEAKASLQSDIDRFISEKIIVAGKVIVSHAVTKIRDDDVLLTYGSPSVVEMIFDHAHELGKKFRVVVVDSCPNLEGQGLLRRLVAKGISCTYTHINAVSYIMHEATRVFLGASSVLSNGTVYSRVGTASVAMVAHAFGVPVLMCCEAYKFHERVQLDSICFNELGDPDAISRVPRGESLSHLKNWAENENLHILNLKYDITPSDYVSMLITDYGMLPPTSVPVIVREYRREHVWI

SEQ ID NO: 89941 - protein, 47 aa, Setaria italica
  Transcript Sequence Number=SeqID_23967
NIQAEYMLKNYLHHQLPKPAVSISVIPSNLLIEKCTVPYQIWQETVA

SEQ ID NO: 89942 - protein, 67 aa, Setaria italica
  Transcript Sequence Number=SeqID_23968
ALGTSIGDFLGSQSITDQLKQLSYQHGGINLACSEIEDMDIYIEICMLEHHACGQHHMPGGGRFVST

SEQ ID NO: 89943 - protein, 217 aa, Setaria italica
  misc_feature (123)..(123): Xaa can be any naturally occurring amino acid
  Transcript Sequence Number=SeqID_23969
  Gene Ontology: Mol. function=DNA binding
PDDADYIPLELDDCNSDSDANLSTLMGIVNFHSTMESNIRCGNQAPKPFNGKHNEDDRCHPPVLNQRFISESETGQNSVIAHIMKESKSKLQAKECKRKAIVQLDELSDVLSPMRACSMAKRXSFSFGGNGVSVTSDKASHKPTLSELQQNREAVLKERKEQIGFSPRDIQSKERDASTKMSMLIAEQLRNQHAQSHARNSDLPRDIQRKERVCFDK

SEQ ID NO: 89944 - protein, 121 aa, Setaria italica
  Transcript Sequence Number=SeqID_23970
MDRARRSNGAWEIDLFRPGPSTARSDRCAKLLLLWSAAVAVPVLVFVLAGYVWGSVATAVVVVALIWFTCCYYRAAPPEPPLLPEHLGALRVDVPVGSRGLGRSTASAGSARRTSRPLPAF

SEQ ID NO: 89945 - protein, 48 aa, Setaria italica
  Transcript Sequence Number=SeqID_23971
LLFDAISLLLFLLIYQIRFLHQISTLFIKINLFSSLFWLVVTGLIVKS

SEQ ID NO: 89946 - protein, 82 aa, Setaria italica
  Transcript Sequence Number=SeqID_23972
SLSLPSSREQSTQRIAVVITRPRRPLEGANHAQNLRAPALASLRTHLPTCVVVFFASSLPPHPAAAWRHCAAPHRTAAAAAA

SEQ ID NO: 89947 - protein, 70 aa, Setaria italica
  Transcript Sequence Number=SeqID_23973
  Gene Ontology: Mol. function=transcription factor activity; Cellular component=nucleus; Biological process=regulation of transcription, DNA-dependent
  Homolog annotation: Hit_ID=B6SGM9; Match level="QueryCoverage=100%, HitCoverage=35%, E-value=2e-13, Identity=68%"; Hit description =Ethylene responsive element binding protein 2
MCGGAIIADFVPAGARRPATSSTDDTTSASVLSGDEELVKAARLPAPGRKTAYRGIRRRPWGRWAAEIRD

SEQ ID NO: 89948 - protein, 224 aa, Setaria italica
  Transcript Sequence Number=SeqID_23974
  Gene Ontology: Mol. function=protein binding; Cellular component =plasma membrane; Biological process=protein transport
  Homolog annotation: Hit_ID=O82197; Match level="QueryCoverage=65%, HitCoverage=68%, E-value=3e-62, Identity=80%"; Hit description =Vacuolar protein sorting-associated protein 32 homolog 1
  Pfam annotation: Domain name=Snf7; Domain location=22-191; Score =181.9; E_value=1.8e-51; Accession=PF03357.13; Description=Snf7
MSGVFGKVFGKSKQQSQATALASLDKLNETLEMLEKKENLLVKKANLEVEKAKNFTKAKNKRAAIQCLKRKRLYEQQIEQLGNFQLRIHDQMIMLEAAKATTETVDALRTGASAMKAMHKSTNIDDVDKTMDEINDNMENMRQIQDLLSAPMGAAADFDEDELEAELADLEGEELEAELLAPTTTAPTTAPVRVPTAQQSTRPSAQSSKAEDDELAALQAEMAM

SEQ ID NO: 89949 - protein, 110 aa, Setaria italica
  Transcript Sequence Number=SeqID_23975
  Gene Ontology: Mol. function=transferase activity, transferring glycosyl groups; Biological process=metabolic process
  Homolog annotation: Hit_ID=Q2HT79; Match level="QueryCoverage=98%, HitCoverage=22%, E-value=3e-31, Identity=54%"; Hit description=UDP -glucuronosyl/UDP-glucosyltransferase
DRCVAWLDGHAEAAGSVVYVNFGSITVVTGEQMDEFAWGLAAAGSPFLWVVRPDMVRDGGGWALPEGFAEAVAGRGLTVGWCDQEAVLEHPATGGFLSHCGWNSTLESLR

SEQ ID NO: 89950 - protein, 88 aa, Setaria italica
  Transcript Sequence Number=SeqID_23976
  Subcellular localization annotation: CTP_CleavageSite=31; ConfidenceScore=5.23e-01
NHWPSLFFSFLAKALHFMTQNWSTMLNAPMKAKMKFSFALLSLWYNIRLTVYLYISQVSFILPTTTKLPHCWPHVSTLMHLVLTATYG

SEQ ID NO: 89951 - protein, 360 aa, Setaria italica
  Transcript Sequence Number=SeqID_23977
  Gene Ontology: Mol. function=DNA-directed DNA polymerase activity; Biological process=DNA replication
  Homolog annotation: Hit_ID=Q588V7; Match level="QueryCoverage=100%, HitCoverage=18%, E-value=3e-54, Identity=35%"; Hit description =Helicase and polymerase containing protein TEBICHI
FVKGSRARALYKSGLRTPVAIAEASIPEIAKALFESSNWSGQDDSGLRRMQFGIAKKIKNGARKIVLEEAEAARVAAFSAFKSLGVEVPQFTAPSLPAIEDSPMRDTVVSPCGDQARSNKVALGINAGDDKNKNNSSDYAAPRISTYSLREEHPGSYIQMKENLANNAKITTQEAASPLSTDFIAGSSSTNLADKGPVNAYNFLGGFDCFLDQWSAVSEFCFDVHFIKKAMKPSSNLFEVFGLAVCWENSPIYYCNFPKDLVTTGAKDSSEMWGNFQRRWKKIADIMQQKSVKKMTWNLKVQIQALKSAYISCQRLARFHLDHKVLENIEVLDNSYVLLSPISVYSGLDICLMAWVLWPD

SEQ ID NO: 89952 - protein, 416 aa, Setaria italica
  misc_feature (28)..(28): Xaa can be any naturally occurring amino acid
  Transcript Sequence Number=SeqID_23978
  Gene Ontology: Mol. function=protein serine/threonine kinase activity; Cellular component=plasma membrane; Biological process =protein amino acid phosphorylation
  Homolog annotation: Hit_ID=C5IYF1; Match level="QueryCoverage=62%, HitCoverage=84%, E-value=2e-79, Identity=42%"; Hit description =Putative serine-threonine protein kinase
  Pfam annotation: Domain name=LRR_1; Domain location=102-124; Score =2.3; E_value=1.1e+02; Accession=PF00560.25; Description=Leucine Rich Repeat
  Pfam annotation: Domain name=LRR_1; Domain location=126-148; Score =7.6; E_value=11; Accession=PF00560.25; Description=Leucine Rich Repeat
  Pfam annotation: Domain name=LRR_1; Domain location=150-172; Score =9.1; E_value=5.6; Accession=PF00560.25; Description=Leucine Rich Repeat
  Pfam annotation: Domain name=LRR_1; Domain location=193-215; Score =6.0; E_value=22; Accession=PF00560.25; Description=Leucine Rich Repeat
  Pfam annotation: Domain name=LRR_1; Domain location=217-239; Score =12.8; E_value=1.1; Accession=PF00560.25; Description=Leucine Rich Repeat
  Pfam annotation: Domain name=LRR_1; Domain location=241-264; Score =19.0; E_value=0.02; Accession=PF00560.25; Description=Leucine Rich Repeat
  Pfam annotation: Domain name=LRR_1; Domain location=266-288; Score =21.1; E_value=0.0047; Accession=PF00560.25; Description=Leucine Rich Repeat
  Pfam annotation: Domain name=LRR_1; Domain location=31-53; Score =14.1; E_value=0.58; Accession=PF00560.25; Description=Leucine Rich Repeat
  Pfam annotation: Domain name=LRR_1; Domain location=54-76; Score=6.4; E_value=18; Accession=PF00560.25; Description=Leucine Rich Repeat
  Pfam annotation: Domain name=LRR_1; Domain location=7-29; Score=20.0; E_value=0.0098; Accession=PF00560.25; Description=Leucine Rich Repeat
  Pfam annotation: Domain name=LRR_1; Domain location=78-100; Score =0.6; E_value=2.3e+02; Accession=PF00560.25; Description=Leucine Rich Repeat
  Pfam module annotation: Pfam domain module=LRR_1::LRR_1::LRR_1::LRR _1::LRR_1::LRR_1::LRR_1::LRR_1::LRR_1::LRR_1::LRR_1; Domain location =102-124::126-148::150-172::193-215::217-239::241-264::266-288::31 -53::54-76::7-29::78-100
RSVTAVNLIELDLSSNKFTGEIPEDFGXLKNLTLLFLYKNQLTGTIPASIGLLPLRDVRLFNNHLSGELPPELGMHSPLGNLEVGNNNLSGPLRETLCANGKLYDIVAFNNSFSGEFPAKLGDCVTINNLMLYNNRLSGDFPVKIWSFPKLTMVMIQNNSFTGTLPSEISFNISRIEMGNNMFSGSFPALAKGLKVFHAENNRLGGELPSDMSKLGNLTDLSVPGNRITGSIPASIKLLQKLNTLDLSGNRISGVIPPGSIGTLPSLTTLDLSDNLLTGSIPSDISNLINSLNLSSNQLTGEVPVLLQIAAYDRSFLGNPGLCARAGSGTNLPTCRGGGRGAHDELSKGLITLFGMLAGIVLVGSIGIAWLLFRRRKESHEVTDWKMMAFTHLNFSESDVLSNIREENVIGSGGSG

SEQ ID NO: 89953 - protein, 98 aa, Setaria italica
  Transcript Sequence Number=SeqID_23979
  Subcellular localization annotation: CTP_CleavageSite=89; ConfidenceScore=5.58e-01
SALPPLTPPPSYYSADRGGAGGRSRKRRPGLIGAILPRIAFLRRPGRTAPCSSWSSSSWSSSSSNTSSMSPVFTVQSSPAARGSRGHRRAFSAGGAGD

SEQ ID NO: 89954 - protein, 64 aa, Setaria italica
  Transcript Sequence Number=SeqID_23980
QECFMVAHFFTILKIISEALIDIEISTTGMRCKKYCAELASLFTFLSGGGPFKLQQCKLLLFQK

SEQ ID NO: 89955 - protein, 92 aa, Setaria italica
  Transcript Sequence Number=SeqID_23981
  Gene Ontology: Mol. function=nucleoside-triphosphatase activity; Biological process=defense response
  Homolog annotation: Hit_ID=Q69KF7; Match level="QueryCoverage=85%, HitCoverage=6%, E-value=9e-15, Identity=50%"; Hit description=Pollen signalling protein with adenylyl cyclase activity-like
FIGSVSPQQWIAEGFIVTQQSTTHSSYTTVEEEAEKCYDELLGMGLLLPENGAYGAERSKMPHLFRSFALLQSQDEYFIGNPQDIGDVICKT

SEQ ID NO: 89956 - protein, 124 aa, Setaria italica
  misc_feature (25)..(25): Xaa can be any naturally occurring amino acid
  Transcript Sequence Number=SeqID_23982
  Gene Ontology: Mol. function=catalytic activity; Cellular component =membrane; Biological process=phosphatidylcholine metabolic process
  Homolog annotation: Hit_ID=Q8SAG4; Match level="QueryCoverage=91%, HitCoverage=34%, E-value=1e-50, Identity=80%"; Hit description =Phospholipase D nu-2 (Fragment)
RKNTTNRDDNNQPHYSWAGRGSPPXGQVYGYRMSLWAEHLGTVEECFRRPESEECVRRVNQMADDNWAGYVSPQMVDMKGHLMRYPVRVEQDGRVGPLPGQEIFPDVGGKVLGTHSSLPNALTT

SEQ ID NO: 89957 - protein, 144 aa, Setaria italica
  Transcript Sequence Number=SeqID_23983
  Gene Ontology: Mol. function=electron carrier activity; Cellular component=peroxisome; Biological process=metabolic process
  Homolog annotation: Hit_ID=P05414; Match level="QueryCoverage=94%, HitCoverage=36%, E-value=3e-60, Identity=80%"; Hit description =Peroxisomal (S)-2-hydroxy-acid oxidase
  Pfam annotation: Domain name=FMN_dh; Domain location=1-134; Score= -27.0; E_value=1.4e-12; Accession=PF01070.10; Description=FMN -dependent dehydrogenase
PSLPILVKGVVTAEDTRLAIEHGAAGIIVSNHGARQLDYVSATISCLEEVVREAKGRLPVFLDGGVRRGTDVFKALALGASGVFIGRPVLFSLAVDGEAGVRKVLQMLRDELELTMALSGCTSLREITRAHVITDGDRIGRSRL

SEQ ID NO: 89958 - protein, 53 aa, Setaria italica
  Transcript Sequence Number=SeqID_23984
MGNYLSCTLAKAPGGRCARVILPDGGVRQVSLPATAAELMLDAPGHFLVDARA

SEQ ID NO: 89959 - protein, 71 aa, Setaria italica
  Transcript Sequence Number=SeqID_23985
  Subcellular localization annotation: CTP_CleavageSite=21; ConfidenceScore=5.45e-01
ASPTGTASASPPSRRPPWTPSAPAARPGTSRLGALRREDDVGSPRFEREGAYLRPSGVTPRRIVASWVAPL

SEQ ID NO: 89960 - protein, 79 aa, Setaria italica
  Transcript Sequence Number=SeqID_23986
HCYLFVLFQFDICLDHLQLDYNVATCYNTIMVSLKFPGSLPSSSNLYAVVGKSGSVIVLMMCCDTMAVLLMMQYKYKLE

SEQ ID NO: 89961 - protein, 92 aa, Setaria italica
  Transcript Sequence Number=SeqID_23987
  Subcellular localization annotation: CTP_CleavageSite=79; ConfidenceScore=5.04e-01
NTTHLILISHHTSSSSLDLHTRRSLAINGGVHGNHHQQGGAPPAGGAPPSRHPRLPLRPGRAPRPRRPRPQASPLAVVVAASSSVSYTGGAP

SEQ ID NO: 89962 - protein, 65 aa, Setaria italica
  Transcript Sequence Number=SeqID_23988
KYASLTLPFVGALCTGYALYSFEFCDFQTTIVYIYCSVESSEYLSDLLKARNIPHNVLNAKNLTY

SEQ ID NO: 89963 - protein, 824 aa, Setaria italica
  misc_feature (214)..(214): Xaa can be any naturally occurring amino acid
  Transcript Sequence Number=SeqID_23989
  Gene Ontology: Mol. function=nucleotide binding; Cellular component =membrane; Biological process=intracellular protein transmembrane transport
  Homolog annotation: Hit_ID=Q0IU29; Match level="QueryCoverage=100%, HitCoverage=78%, E-value=0.0, Identity=81%"; Hit description=Protein translocase subunit secA
  Pfam annotation: Domain name=SecA_DEAD; Domain location=1-214; Score=- 5.3; E_value=4.5e-17; Accession=PF07517.6; Description=SecA DEAD-like domain
  Pfam annotation: Domain name=SecA_PP_bind; Domain location=60-171; Score=176.2; E_value=9.3e-50; Accession=PF01043.12; Description=SecA preprotein cross-linking domain
  Pfam annotation: Domain name=SecA_SW; Domain location=533-810; Score =71.7; E_value=2.6e-18; Accession=PF07516.5; Description=SecA Wing and Scaffold domain
  Pfam module annotation: Pfam domain module=SecA_DEAD::SecA_PP _bind::SecA_SW; Domain location=1-214::60-171::533-810
CDITYTNNSELGFDYLRDNLSRNKEQLVMRWPRPFHFSIVDEVDSVLIDEGRNPLLISGEDNRDAARYPVAAKVAELLMEGVHYTVELKGNNVDLTEDGVAHAEIILGTDDLWDENDPWARFVMNALKAKVFYRRDVQYIVRDGKAIIINELTGRVEPKRRWSDGIHQAVEAKEGLKIQDSVIVAQITYQSLFKLYPKLSGMTGTAKTEEKEFXKMFKIPVIEVPTNLPNIRVDLPIQAFATARGKWLYVRAEVESMFQLGRPVLVGTTSVESSEYLSDLLKARNIPHNVLNARPKYAAREAEIIAQAGRKHAITISTNMAGRGTDIILGGNPKMLAKEIVEDSILPFLTHDPPDIDMEGESTSHKGLSKIEIGPSSLGLLAKAAIMAKYVHKSERDEWSFGKAKSTIAESIEMGQTIGMEKLQEQLAEESEMYPLCDAIGLAYLSVLRDCEIHCSAEGTEVKRLGGLHVVGTSLHESRRIDNQLRGRAGRQGDPGSTRFMVSLQDEIFQKFNLDTEWAVRLISSITNGEDIAIESNVVVKQLLGLQINAEKYYFGIRKSLVEFDEVLEVQRKHVYNLRQVILSGDSESCSEQIFQYMQAVADEIVLLNVDPQKPPKTWNLARLLDEFVSLQGKLLIESFKDIQEENLQSALEQMHGSGSVKADRFALPNMPVPPDSFRGIRKKRSSIMRWFAICVDDTSKKGRYTNTVNLLRKYFGDFLIATYLNAVQESRYDDAYISGIEREVLLKTLDALWKDHLVNMNKLSSAVNVRSFGHRNPLEEYKIDGCRFFISMLSATRRLTVEALLHYWSSPMESDEIFNTEDQ

SEQ ID NO: 89964 - protein, 114 aa, Setaria italica
  Transcript Sequence Number=SeqID_23990
VHLLQCCQDSAHLQLCQHLKLIFLLEKNLVGMILPVYRKIRKATKTPNWQKTTIVVPRKLEITSADDRFHISWAHISGTTHVVNNLALRGVLLVILLTAASDDSGDLHRLYALG

SEQ ID NO: 89965 - protein, 306 aa, Setaria italica
  Transcript Sequence Number=SeqID_23991
  Gene Ontology: Mol. function=transporter activity; Cellular component= membrane; Biological process=oligopeptide transport
  Homolog annotation: Hit_ID=Q53JI5; Match level="QueryCoverage=91%, HitCoverage=45%, E-value=1e-117, Identity=79%"; Hit description =Nitrate transporter NTL1, putative, expressed
  Pfam annotation: Domain name=PTR2; Domain location=1-214; Score= -113.8; E_value=0.055; Accession=PF00854.13; Description=POT family
MINLRLQIPRFLDKACVKAQDGPGGASSAGKESPWRLCTPAEVEQVKVLLCVVPIFACTIVFNTILAQLQTFSVQQGSAMDTRLAASFHVPPASLQAIPYAMLVALVPAYEAAFVPAVRRLTGVATGITPLQRIGVGLFAVTFSMVAAALVEARRLHAAADGNGHLLSILWIAPQFLVFGLSEMFTAVGLIEFFYKQSLAGMQAFLTSMTYCSYSFGFYLSSVLVSLVNRVTSTSAAGDGGWLANNDLNKDRLDLFYWLLAGLSILNFFNYLFWARWYSKSVETVQVAGVVRGGGEQDDEKDTSEC

SEQ ID NO: 89966 - protein, 136 aa, Setaria italica
  Transcript Sequence Number=SeqID_23992
  Gene Ontology: Mol. function=nutrient reservoir activity
  Homolog annotation: Hit_ID=Q43557; Match level="QueryCoverage=94%, HitCoverage=34%, E-value=6e-34, Identity=54%"; Hit description =Unidentified
  Pfam annotation: Domain name=DUF642; Domain location=1-127; Score= -9.0; E_value=8.9e-10; Accession=PF04862.4; Description=Protein of unknown function, DUF642
KVVKYVDAAHHAVPRGARAVELVAGMECALVQEVRTVPGRWYRLSFSVGDGANGCGGSLGVDAYAGKATTKVSYESRGTGGHRRVDLDFAAAENLTRIVFHSSNYHMKFDGTLCGPVVDDVSLVAVHKHAARRLRM

SEQ ID NO: 89967 - protein, 53 aa, Setaria italica
  Transcript Sequence Number=SeqID_23993
AAVNAWTGTEMVLPLAGAAAADSRLGRYRAVLIAGVLYLLVSNRNYLGSQPCS

SEQ ID NO: 89968 - protein, 424 aa, Setaria italica
  Transcript Sequence Number=SeqID_23994
  Gene Ontology: Mol. function=transporter activity; Cellular component= membrane; Biological process=oligopeptide transport
  Homolog annotation: Hit_ID=B6ST62; Match level="QueryCoverage=96%, HitCoverage=81%, E-value=1e-121, Identity=58%"; Hit description=POT family protein
  Pfam annotation: Domain name=MFS_1; Domain location=14-368; Score= -14.3; E_value=0.082; Accession=PF07690.8; Description=Major Facilitator Superfamily
  Pfam annotation: Domain name=PTR2; Domain location=76-424; Score =143.6; E_value=6.1e-40; Accession=PF00854.13; Description=POT family
  Pfam module annotation: Pfam domain module=MFS_1::PTR2; Domain location=14-368::76-424
LADGRGGWRAACFLLAISFLELVGFCGVQSNLIMYLTRHLGMSTAAAAAAVNAWTGTEMVLPLAGAAAADSRLGRYRAVLIAGVLYLLSLGMLTVSSTLRVPEPHAASSPSFAQLAFFYVALYQLAAARGFHRPCAEALGADQFAPSDGEDPSSRASRSSYFNWFHFSISCGYGIATTGLSYVEDNVSWTAGFAACWATMVLYLAVFLLGTPTYRAERPVDGIRLAETVRTWAARVFRRKDAGDTERLLTGEPEDGKGKGLVVKLLPIWVTSLIFAAIVAQVSTLFTKQGSTLDRRLGMGTGLVVPPAALQFFLSVTMIATLPVYDRLFVPLVRRITGHHAGLTTLRRIGAGMATAGAAMVVAALVEARRLRVAREAGLVDEPDAVLPMRLWWMLPQYVLIGVAVVLAEIGLQEFFYDQVPDAF

SEQ ID NO: 89969 - protein, 213 aa, Setaria italica
  Transcript Sequence Number=SeqID_23995
  Gene Ontology: Mol. function=nucleoside-triphosphatase activity; Cellular component=membrane; Biological process=transport
  Homolog annotation: Hit_ID=B6SWU8; Match level="QueryCoverage=97%, HitCoverage=32%, E-value=6e-98, Identity=87%"; Hit description =ATPase, coupled to transmembrane movement of substances
  Pfam annotation: Domain name=ABC_tran; Domain location=1-101; Score= -1.0; E_value=4.8e-06; Accession=PF00005.19; Description=ABC transporter
EAVIAELGLAACADTVVGNAFVRGVSGGERKRVSIGHELLVNPSLLILDEPTSGLDSTAAARLVATLSALARKGRTVVMSVHQPSSRVYRMFDSVLLLAEGSCLYFGAGRDAMDYFASVGFAPGFHVNPADFMLDLANGFAQADCNFTAEGGNVKQSLISSYNKVLSPRVKASINAATTEHAQDGAEPLPLPPAESCSGCTSWANQFTILLRR

SEQ ID NO: 89970 - protein, 32 aa, Setaria italica
  Transcript Sequence Number=SeqID_23996
  Gene Ontology: Mol. function=nucleoside-triphosphatase activity; Cellular component=intracellular; Biological process=response to DNA damage stimulus
  Homolog annotation: Hit_ID=Q67EU8; Match level="QueryCoverage=100%, HitCoverage=9%, E-value=9e-10, Identity=93%"; Hit description=DNA repair protein RAD51 homolog A
EERICKVISSPCLAEAEARFQIASEGVADVKD

SEQ ID NO: 89971 - protein, 113 aa, Setaria italica
  Transcript Sequence Number=SeqID_23997
  Subcellular localization annotation: CTP_CleavageSite=56; ConfidenceScore=5.01e-01
VLCVWKKGKGKKAKVLMPLLAAAVPALLYSATGAAFAAGADMSYCSAYGKRVSVCTGSAAGSSSNFCSQVHIAVYLSLAAAIVVSAAEVVRALGGSGSDGGSDSDSSSSSESG

SEQ ID NO: 89972 - protein, 114 aa, Setaria italica
  Transcript Sequence Number=SeqID_23998
  Gene Ontology: Mol. function=substrate-specific transmembrane transporter activity; Cellular component=integral to membrane; Biological process=transmembrane transport
  Homolog annotation: Hit_ID=B6TAG3; Match level="QueryCoverage=50%, HitCoverage=12%, E-value=3e-16, Identity=59%"; Hit description =Arabinose-proton symporter
MESVKMRPATAATKQEYRRMELVGGEEGEELDEAEWLHRAEAQSQRRRRGQRYAFSCALFASLNGILLGYDVGVMSGCIIYIQKDLHITEFQQEILVGCLSVVSLLGSLSGGRT

SEQ ID NO: 89973 - protein, 104 aa, Setaria italica
  misc_feature (86)..(86): Xaa can be any naturally occurring amino acid
  misc_feature (92)..(92): Xaa can be any naturally occurring amino acid
  Transcript Sequence Number=SeqID_23999
  Gene Ontology: Mol. function=structural constituent of cell wall
  Homolog annotation: Hit_ID=Q9ZQT2; Match level="QueryCoverage=100%, HitCoverage=31%, E-value=1e-31, Identity=72%"; Hit description=Root cap protein 1
DGNNFYFHGKKDQDFCILSDAGLHINAHFIGKRNPAMSRDFTWIQALGIRFAHHRLYVGAARTAQWDAAADHLTIAFDDEDVELPXSVGARXWATPHAPALSVT

SEQ ID NO: 89974 - protein, 65 aa, Setaria italica
  Transcript Sequence Number=SeqID_24000
MAGRRTTSLVVVAALVAVCAAAASVAAQQTDPPPPPLPSNYHIMTPGKYKRDQQLACKDDKTNKP

SEQ ID NO: 89975 - protein, 100 aa, Setaria italica
  Transcript Sequence Number=SeqID_24001
  Homolog annotation: Hit_ID=Q9ZQT2; Match level="QueryCoverage=43%, HitCoverage=12%, E-value=3e-18, Identity=93%"; Hit description=Root cap protein 1
  Subcellular localization annotation: CTP_CleavageSite=80; ConfidenceScore=5.43e-01
MASTTVMRLVLVMVCLAAFAVVQSASQAPRLAVATPSKNKNTQHKCTNTRTNKTTCTASCNNRCPHKCLIHCPSCKTFCLCDFYPGVSCGDPRFTGADGN

SEQ ID NO: 89976 - protein, 323 aa, Setaria italica
  Transcript Sequence Number=SeqID_24002
  Gene Ontology: Mol. function=structural constituent of cell wall
  Homolog annotation: Hit_ID=Q9ZQT2; Match level="QueryCoverage=84%, HitCoverage=81%, E-value=1e-108, Identity=69%"; Hit description=Root cap protein 1
  Pfam annotation: Domain name=Root_cap; Domain location=256-312; Score= 147.5; E_value=4e-41; Accession=PF06830.3; Description=Root cap
MAPAWVVAALVGLCAAAASVAAQQTDPPPRRPLPSNYHIMTPGRYKRDQQLACNDDKTNKPSCSAKCNKRCPNQCIVLCPGCKTFCMCDFYPGVSCGDPRFTGADGNNFYFHGKKDQDFCILSDANLHINAHFIGKRNPAMSRDFTWIQALGIRFADHRLYMGAAKTAKWSNDVDRLELALDDEAVSIPAEAGARWVSAAVPGLSVTRTTAANGVRVQLAGVLDIIASVVPITEEDSRVHNYGVTDDDSLAHLDLGFKFYDLTDNVHGVLGQTYRSDYVNQLSVSANMPIMGGAPKYVSSDIFATDCAVARFAGISMVTAKAY

SEQ ID NO: 89977 - protein, 223 aa, Setaria italica
  Transcript Sequence Number=SeqID_24003
  Gene Ontology: Mol. function=structural constituent of cell wall
  Homolog annotation: Hit_ID=Q9ZQT2; Match level="QueryCoverage=88%, HitCoverage=58%, E-value=2e-61, Identity=59%"; Hit description=Root cap protein 1
  Subcellular localization annotation: CTP_CleavageSite=56; ConfidenceScore=5.45e-01
MARWSAPTAAAVATVLGASLLYMALVASAQPPLPGNVQVISMNGKRNSKFTCTDTRKNSKRPGCTATCPNRCPKKCLVLCPTCKTFCLCDFYPGVSCGDPRFTGADGNNFYFHGKKDQDFCILSDAGLHINAHFIGKRNPSMSRDFTWIQALGIRFADHRLYMGAAKTAKWSNDVDRLELAFDGAPIDIPTEIGAVWQSTAVPGLTVARTATTNGVRVHLKGA

SEQ ID NO: 89978 - protein, 44 aa, Setaria italica
  Transcript Sequence Number=SeqID_24004
  Homolog annotation: Hit_ID=B6TJS7; Match level="QueryCoverage=70%, HitCoverage=7%, E-value=4e-09, Identity=93%"; Hit description =Mov34/MPN/PAD-1 family protein
WGASPQMRCERKKDRVEVNPELLAAASAQAEISFFSLPFCFFFL

SEQ ID NO: 89979 - protein, 99 aa, Setaria italica
  Transcript Sequence Number=SeqID_24005
  Subcellular localization annotation: CTP_CleavageSite=44; ConfidenceScore=5.39e-01
TKWIATRFLFQNYIAKTPLSLPAPETSRLSNSTSGRESTVYRLQAQASHEKDLKPRSFGRRIRNPSTTKQSQTVGSFHSSTALKGDGYVQFHCLSLPPS

SEQ ID NO: 89980 - protein, 167 aa, Setaria italica
  misc_feature (156)..(156): Xaa can be any naturally occurring amino acid
  Transcript Sequence Number=SeqID_24006
  Gene Ontology: Mol. function=enzyme regulator activity; Cellular component=nuclear ubiquitin ligase complex; Biological process =ubiquitin-dependent protein catabolic process
  Homolog annotation: Hit_ID=B6TJS7; Match level="QueryCoverage=98%, HitCoverage=38%, E-value=1e-83, Identity=92%"; Hit description =Mov34/MPN/PAD-1 family protein
  Pfam annotation: Domain name=Mov34; Domain location=1-122; Score =63.0; E_value=1.1e-15; Accession=PF01398.13; Description=Mov34MPNPAD- 1 family
MSLTSVKIGEEVWLTCLSHALTTETEEVMGLLLGDIEPSSKGGATAVIWGASPQMRCERKKDRVEVNPELLAAASAQAERMTATIKKTTRVIGWYHSHPHITVLPSHVDVRTQAMFQLLDTGFVGLIFSCFSEDAQKVGKIQVIAFQSQGGQQRAXPSLAIAPVIDL

SEQ ID NO: 89981 - protein, 358 aa, Setaria italica
  Transcript Sequence Number=SeqID_24007
  Gene Ontology: Mol. function=enzyme regulator activity; Cellular component=nuclear ubiquitin ligase complex; Biological process =ubiquitin-dependent protein catabolic process
  Homolog annotation: Hit_ID=B6TJS7; Match level="QueryCoverage=93%, HitCoverage=78%, E-value=1e-159, Identity=83%"; Hit description =Mov34/MPN/PAD-1 family protein
RNDKDPERMTATIKKTTRVIGWYHSHPHITVLPSHVDVRTQAMFQLLDTGFVGLIFSCFSEDAQKVGKIQVIAFQSQGGQQRAALPLAIAPVIDLDSSWSSSENAFTPHSAFEGIEQDTGDSRASKNSKAWGRSPDMDFYSHPDTNHSAKHQPRENAVIPYNPDNTQEVSMDPYDSDMTPSIQEALHRSNMDISGAEYVRKEVPLIVLPTRHLLKLDTTMTSYCDMQRVLFEEEQTAYNQAMQQNICDGKIHPLTSIHHTSTYNSSLCKLMEYCLSPAITVLQDRVKENELRLSMLQEEAKQLEAETLGMRNVSPRRFMNHGSVGSSSPMAQNRHPFSNQGSPRSPRSPSGGSRRRAC

SEQ ID NO: 89982 - protein, 68 aa, Setaria italica
  Transcript Sequence Number=SeqID_24008
ELERVGGNGVYLLACPTANLALAATYPIRSYLVCFNFSDRRSWSSAAADQDRRLPPCARSRGAETELL

SEQ ID NO: 89983 - protein, 90 aa, Setaria italica
  Transcript Sequence Number=SeqID_24009
  Gene Ontology: Mol. function=3'-5'-exoribonuclease activity; Biological process=RNA processing
  Homolog annotation: Hit_ID=B6THH8; Match level="QueryCoverage=92%, HitCoverage=34%, E-value=1e-30, Identity=74%"; Hit description =Exosome complex exonuclease RRP46
GILDMNTAEEQQLKSYVHLVFPNSRKLVDSKESKQKDEEFERGLITSITHGVMSEDDYFNCIERGLAASSRVSDFMRKTLKKAVPSIVDA

SEQ ID NO: 89984 - protein, 93 aa, Setaria italica
  Transcript Sequence Number=SeqID_24010
  Homolog annotation: Hit_ID=A5H450; Match level="QueryCoverage=87%, HitCoverage=48%, E-value=7e-40, Identity=100%"; Hit description=RTCN
  Pfam annotation: Domain name=DUF260; Domain location=10-93; Score =148.5; E_value=2e-41; Accession=PF03195.6; Description=Protein of unknown function DUF260
GSGGGTPGSPCGACKFLRRKCAAECVFAPHFCAEDGAAQFAAIHKVFGASNAAKLLQQVAPADRSEAAATVTYEAQARLRDPIYGCVAHIFAL

SEQ ID NO: 89985 - protein, 323 aa, Setaria italica
  Transcript Sequence Number=SeqID_24011
  Gene Ontology: Mol. function=metal ion transmembrane transporter activity; Cellular component=integral to membrane; Biological process=metal ion transport
  Homolog annotation: Hit_ID=B6TG88; Match level="QueryCoverage=100%, HitCoverage=79%, E-value=1e-117, Identity=69%"; Hit description=ZIP zinc/iron transport family protein
  Pfam annotation: Domain name=Zip; Domain location=1-320; Score=134.8; E_value=2.7e-37; Accession=PF02535.14; Description=ZIP Zinc transporter
PDAQAALADCAVATRRPWRDFPFAGLFTLVGALLALLVDLSASSHLEAHGHGGGGGDGHGHGHQETTYAPIPKKAPVFELTGEMSPKKRAFLDDDQGDPAPHVFRNGADTDRDDVALFGAKKGAALVRSDEVAVVGGGCHGGGHEVLEVVGEGAGEEEEARRKQKMVSKVLEIGIVFHSVIIGVTMGMSQDVCAIRPLVVALSFHQVFEGMGLGGCIAQAGFGMATVGYMCIMFSVTTPLGILLGMLIFHMTGYDDSNPNALIMEGILGSLSAGVLIYMALVDLISLDFFHNKMMSASNKLKKACYIALVLGSASMSILALWA

SEQ ID NO: 89986 - protein, 72 aa, Setaria italica
  Transcript Sequence Number=SeqID_24012
  Gene Ontology: Mol. function=phosphoglycerate kinase activity; Cellular component=chloroplast; Biological process=reductive pentose- phosphate cycle
  Homolog annotation: Hit_ID=B8AAV9; Match level="QueryCoverage=100%, HitCoverage=16%, E-value=2e-31, Identity=95%"; Hit description =Phosphoglycerate kinase
AFSSALETTQTVIWNGPMGVFEFKKFAVGTEAIAKKLAELSGKGVTTIIGGGDSVAAVEKVGVADVMSHIST

SEQ ID NO: 89987 - protein, 75 aa, Setaria italica
  misc_feature (71)..(71): Xaa can be any naturally occurring amino acid
  Transcript Sequence Number=SeqID_24013
  Gene Ontology: Mol. function=microtubule motor activity; Cellular component=microtubule associated complex; Biological process =microtubule-based movement
  Homolog annotation: Hit_ID=Q6K990; Match level="QueryCoverage=92%, HitCoverage=6%, E-value=6e-10, Identity=72%"; Hit description =Putative phragmoplast-associated kinesin
VKMEEKMLRQQEELAALKQRLQEVEREKTDACQPVQQDLIGSRLLARLSEMPAGFDQSMSMVMSMELDSGXISHK

SEQ ID NO: 89988 - protein, 106 aa, Setaria italica
  Transcript Sequence Number=SeqID_24014
  Gene Ontology: Cellular component=vacuole
  Pfam annotation: Domain name=DUF538; Domain location=21-106; Score =72.4; E_value=1.6e-18; Accession=PF04398.4; Description=Protein of unknown function, DUF538
PPPPARPRRPAPAAAPYEPPTVPELMDRFGLPRALLPETARRYLLHNDGTFELFLDDGCVVEVGGYRVGYDIKLSGTVSPGAVTGLEGVRVRVLFAWVPITGVEVA

SEQ ID NO: 89989 - protein, 77 aa, Setaria italica
  Transcript Sequence Number=SeqID_24015
  Homolog annotation: Hit_ID=B6SXM0; Match level="QueryCoverage=100%, HitCoverage=12%, E-value=6e-18, Identity=66%"; Hit description =ATBRCA1
LITAAGGSDLVEDRASSTSLILYSVEPPQGSNLDSLNEIIKKREAEAQESAAAVGCRAIPHTWLLDSIASCTLQLTV

SEQ ID NO: 89990 - protein, 79 aa, Setaria italica
  Transcript Sequence Number=SeqID_24016
PGVRQRRLSSVGEVVVFLPGLRVPRNIDFSQTLGDHLDKSIVERLTALRARIVAMATQESTTALKPRRRAAAQHGGSST

SEQ ID NO: 89991 - protein, 123 aa, Setaria italica
  misc_feature (19)..(19): Xaa can be any naturally occurring amino acid
  Transcript Sequence Number=SeqID_24017
MATQESTTALKPRRSTSLXSGGSSTANLLQALEEYLPALLGLVKGGSELRNKVQFVWANQEDVAEETSMADPWYEVLSVLHLMAMVCFLQANNLLLPRSYADGHGPRVSEESRQATVDLFLKA

SEQ ID NO: 89992 - protein, 158 aa, Setaria italica
  Transcript Sequence Number=SeqID_24018
  Homolog annotation: Hit_ID=B6T951; Match level="QueryCoverage=100%, HitCoverage=39%, E-value=6e-46, Identity=62%"; Hit description =Calmodulin binding protein
IRSHESNRCNHNLNYLEGWMATKPWETRLVEQNDTDSQFAKNCEDLNLAVSNASSVKIRRNNVTTRVAAKPPSVLSASSSDLVCEESSPSTSSVTPVSATTTILASEARSDSGHIGGPNYMSLTKSAKARLHGCSSHRGSFQRQRSGDMSRVALSSID

SEQ ID NO: 89993 - protein, 150 aa, Setaria italica
  misc_feature (133)..(133): Xaa can be any naturally occurring amino acid
  Transcript Sequence Number=SeqID_24019
  Gene Ontology: Mol. function=protein serine/threonine kinase activity; Cellular component=integral to membrane; Biological process=protein amino acid phosphorylation
  Homolog annotation: Hit_ID=B9SQH2; Match level="QueryCoverage=98%, HitCoverage=13%, E-value=1e-34, Identity=50%"; Hit description =Phytosulfokine receptor, putative
  Pfam annotation: Domain name=LRR_1; Domain location=31-53; Score=9.3; E_value=5.1; Accession=PF00560.25; Description=Leucine Rich Repeat
  Pfam annotation: Domain name=LRR_1; Domain location=55-77; Score =18.6; E_value=0.027; Accession=PF00560.25; Description=Leucine Rich Repeat
  Pfam annotation: Domain name=LRR_1; Domain location=79-101; Score =15.2; E_value=0.28; Accession=PF00560.25; Description=Leucine Rich Repeat
  Pfam module annotation: Pfam domain module=LRR_1::LRR_1::LRR_1; Domain location=31-53::55-77::79-101
LPNLTSLVLTKNFHGGEEMPSDDAGIAGFPSIQVLVIANCELHGAIPSWIAGLRKLRVLDLSWNRLAGPIPPWIGQLDRLFYLDISNNSLQGEIPGSLTRMPGFIAAGTHGGGDDEDARVQDFPFFMRRNTSXRGRQYNQVDSFPPSLFL

SEQ ID NO: 89994 - protein, 818 aa, Setaria italica
  Transcript Sequence Number=SeqID_24020
MNFLYRTAAQPAPPAELPQIPEDALPKPATTLEGLIIAEDSYQPSPARSEDGAVNNGPGDVGADSAPLASKSPVQLGTHTDVAEDEGWITIPYKRLPDNWNDVSEMVQLRPLDRSFLFPGEQVHVLACLSASKQDTQVISPFRIAAVMSKNGNSLQHSTDKSSPVNANGRDNGTTGENGCQDVDSDMQSVELNGEASPSEHDILETQSRLQMEDQKQQIELMLRRFRESNFFVRIAESDEPLWSKKRATATKMADGRSDSQGISKASRSNVYNTISDKGIFDGSTSGGVARDTVKCYSLQNGDIVVVLQVNVGVNKLEDPVLEVLQFEKSISSSCMPENLVDGLSDSNDDPCRELLSWLLPLDRTLPPRSLAPPTLNPSASHKQSYSAPGSQIFNFRSYSMPSASSVQTANNTRPPPISENQEFMPENPAKTPDIINDGQLSFRGVPLEPERYSVRCGLEGVYLPGKRWQRKVEIIQPIEVHSFAAKCTMENLLCVTVKNIAPTHAKDIVVFIDAITIVFEEASKGGAPLSLPIASIEGGHGHNLPNLALRRGEEHSFILKPATKSSSERRTNNDAPPALSLPMMTGSTLNTTPKVGEPYVALGDQYAVLVSYRCNYTESKLFFKQATTWRPSAASDIMISVSSELSMRNPSLGARVPKLPVQVLTLEATNMTSENLTLTVLAPEASGSSSVVSLNSAPTTPNGSFDGVNESAKRSGLGKQEIGFRRLNSVLATSPKESDNGGNRISNASGCTHLWLQSAVPLGCVPPRSSTTVKLELLPLSDGIITLDTLQITAREKGLAYIPEHSLEIHATSGISS

SEQ ID NO: 89995 - protein, 114 aa, Setaria italica
  Transcript Sequence Number=SeqID_24021
  Subcellular localization annotation: CTP_CleavageSite=75; ConfidenceScore=5.73e-01
SGYGFFFTLSRPSVSGAAAAALLVGSTGAVPVLRVGRGTGGSRAAQMGRKSPLSPSLPPSHARALPSGGGSCNSRAAAEHGALETLSAGCCGLTTGGSAQRRCETDPGWKSSLP

SEQ ID NO: 89996 - protein, 183 aa, Setaria italica
  Transcript Sequence Number=SeqID_24022
  Gene Ontology: Mol. function=helicase activity; Cellular component =chloroplast
  Homolog annotation: Hit_ID=B5RHT1; Match level="QueryCoverage=96%, HitCoverage=22%, E-value=7e-69, Identity=67%"; Hit description =Pentatricopeptide (PPR) repeat-containing protein
  Pfam annotation: Domain name=PPR; Domain location=113-147; Score =17.8; E_value=0.044; Accession=PF01535.12; Description=PPR repeat
  Pfam annotation: Domain name=PPR; Domain location=5-39; Score=42.6; E_ value=1.6e-09; Accession=PF01535.12; Description=PPR repeat
  Pfam annotation: Domain name=PPR; Domain location=77-111; Score=0.8; E_value=7.1; Accession=PF01535.12; Description=PPR repeat
  Pfam module annotation: Pfam domain module=PPR::PPR::PPR; Domain location=113-147::5-39::77-111
ERNSVSYNVMIKGYVEATKMEEAVALFTEMGEKGLRLSEKTFAALMPGLCDDQGRVAEARKAVDDMAERRLTPKDKSVFLRLVRTLCTAGDLDGALEVHRKSGQFKHVLVDPRQYGVLMEGLCAGGKCDSAVEVLDELMEKGTLLSPKSPVLEASAYNPVIEYLCNNGSTTKAETFFRHTFFC

SEQ ID NO: 89997 - protein, 166 aa, Setaria italica
  Transcript Sequence Number=SeqID_24023
  Subcellular localization annotation: CTP_CleavageSite=47; ConfidenceScore=5.07e-01
MACINMYNPDGAAGFGGGPQPPAAALGPRISFSSDFAVEPPPPVQNRAMSLRCQEEDLNFEFSVGSHPMMAADQLFSKGRILPLKDNGAFAGRPPTTLRDELRGGDDNERASAAGKGSSRWREMLGLRKALCVGGGGNGPAKEDKGGVPDADMVTADMAASNQQEL

SEQ ID NO: 89998 - protein, 372 aa, Setaria italica
  Transcript Sequence Number=SeqID_24024
  Gene Ontology: Mol. function=electron carrier activity; Biological process=response to oxidative stress
  Homolog annotation: Hit_ID=B6TSH0; Match level="QueryCoverage=74%, HitCoverage=80%, E-value=4e-56, Identity=47%"; Hit description =Peroxidase
  Pfam annotation: Domain name=peroxidase; Domain location=88-331; Score=297.2; E_value=3.5e-86; Accession=PF00141.15; Description =Peroxidase
MAASKKLATAAVLVSLLALLVGPSAGLLDLCPVFVGWGALQSLLNSLICGLPGGNYTPPTVPSNPLGFGYYNNSNNNASYCPDAEAAVTAAVEKAIKQQGRGVGAGIIRLFFHDAFVRGCDASVLLNNTVAAGNNTEREGPPNKDSLRGFDVIDAAKEATKAACGGRNVVSCADILALAARDASHILSNGRIKFAMPTGRFDGRESFARETIQLPGPDSTLEDLVRMFKVQGLNETDVVTLSGAHSIGRARCLFLTKDRLSAMNSTYAGQLNETCKINDTVNQDPFSPDRDPNNLDNQYYKNIDKFVLFKSDAVLLSSETTKKQVEANAANATKFEADFAAAMVKMGNIGVKTTHVPGVTEIREVCWRVNNA

SEQ ID NO: 89999 - protein, 61 aa, Setaria italica
  Transcript Sequence Number=SeqID_24025
AGRSSTVVVVVVVDAIPGPALSFYGRRCKLAAGPTTTGSIDRVAPSHGCGKSSKAQASDKR

SEQ ID NO: 90000 - protein, 145 aa, Setaria italica
  Transcript Sequence Number=SeqID_24026
  Gene Ontology: Mol. function=metal ion binding
  Homolog annotation: Hit_ID=B6T9B8; Match level="QueryCoverage=100%, HitCoverage=27%, E-value=3e-40, Identity=61%"; Hit description =Protein binding protein
MSDQQSHSSSYGLLNTQPDVQCLVCTRPFTLDTEIADSFEALAICRECKMTVLSDNNRDEPTRTNRQTRWRRQRSRVSRHEPIEDAFSQQFSQLINLARQGHEADVDSPTVARQHASYSSTPNRPQRWHGSDDESDGFSYADSVF

SEQ ID NO: 90001 - protein, 60 aa, Setaria italica
  Transcript Sequence Number=SeqID_24027
  Homolog annotation: Hit_ID=B6T9B8; Match level="QueryCoverage=98%, HitCoverage=11%, E-value=3e-15, Identity=71%"; Hit description =Protein binding protein
EETSYEPEVEGISNTAGGTMEETNAHEHAVYSAQEPNGAHGRHRWLFIAAAPVSLVSCQL

SEQ ID NO: 90002 - protein, 425 aa, Setaria italica
  Transcript Sequence Number=SeqID_24028
  Gene Ontology: Mol. function=metal ion binding; Cellular component =cell wall; Biological process=cell redox homeostasis
  Homolog annotation: Hit_ID=B6T9B8; Match level="QueryCoverage=93%, HitCoverage=78%, E-value=1e-154, Identity=68%"; Hit description =Protein binding protein
  Pfam annotation: Domain name=zf-C3HC4; Domain location=251-291; Score= 45.3; E_value=2.4e-10; Accession=PF00097.17; Description=Zinc finger, C3HC4 type (RING finger)
LPKLEYIVFVLRQRGHEADVDSPTVARQHASYSSTPNRPQRWHGSDDESDGFSYADSVFGEIESNISFGDDGGESDASLEHQTTMGREIVIQLDSESYMNTDTDIDPMNAGLDQWDSDDPEDDEDEQSEESDLDEAGNAMQERWQPWHDIAPSELNEQESEDTVWTWRIAGNQGINGTNLNADTEGREIRRHFTGNPGDYVDARQFEMLLEQFAEDNNTTRGPPPAATSSVENLASVVISTSNEINGDLMCPVCKDEMPIKTVAKQLPCMHLYHSSCILPWLSSRNTCPVCRYELPTDDMEYERSKRATANEGGIHGVERNHLQETVEETSYELEIEGISNTAGDTIEETNAHEHAVYSAQEPNGANGRHRWLFIAAAPVVSLVSLALVLCFTNPAGNVRRQLYHRSQSTTTTRVDTRRSWWSMF

SEQ ID NO: 90003 - protein, 105 aa, Setaria italica
  Transcript Sequence Number=SeqID_24029
  Gene Ontology: Cellular component=extracellular region; Biological process=plant-type cell wall organization and biogenesis
  Homolog annotation: Hit_ID=Q75I75; Match level="QueryCoverage=95%, HitCoverage=39%, E-value=2e-36, Identity=69%"; Hit description =Expansin-A31
  Pfam annotation: Domain name=DPBB_1; Domain location=1-62; Score =61.2; E_value=3.9e-15; Accession=PF03330.10; Description=Rare lipoprotein A (RlpA)-like double
RQGGQYCKPGTSITVSATNLCPPNYALPNGGWCGPGRPHFDMSQPAFENIGIAQAGIIPVQYQRVQCKRSGGVRFSIAGSNYFLLVNIQNLGGSGSVGAAWVKGE

SEQ ID NO: 90004 - protein, 82 aa, Setaria italica
  Transcript Sequence Number=SeqID_24030
  Gene Ontology: Mol. function=GABA-B receptor activity; Cellular component=integral to membrane; Biological process=G-protein coupled receptor protein signaling pathway
  Homolog annotation: Hit_ID=Q653Y6; Match level="QueryCoverage=100%, HitCoverage=10%, E-value=2e-13, Identity=44%"; Hit description =Putative ionotropic glutamate receptor ortholog GLR6
VLVLRQHVTVSEIQHALLPKWNNLTRNGIAYSMRAYDSVWLVAHAIERFLSEGNAISFSADPNLVTTKGSSLQLDSLRIFNN

SEQ ID NO: 90005 - protein, 163 aa, Setaria italica
  misc_feature (147)..(147): Xaa can be any naturally occurring amino acid
  Transcript Sequence Number=SeqID_24031
  Gene Ontology: Mol. function=nucleotide binding; Biological process =defense response
  Homolog annotation: Hit_ID=Q2QU55; Match level="QueryCoverage=98%, HitCoverage=30%, E-value=6e-42, Identity=52%"; Hit description =Disease resistance protein RPM1, putative
EDYEIYTEELIWRWVAKGFITKVKDQSADQVTENYFNELVNRSLIQPIYIQYDGRACACRVHDMVLELIVSLSKDGNFSSIVEDQSYKVGGHTIRRLSVQSEHLGDEVIQEIMDKWSQVRSISFYGLQEQGIPHLQELYSLRVLGFXYYSSHLGNQHVKHIGS

SEQ ID NO: 90006 - protein, 437 aa, Setaria italica
  misc_feature (411)..(411): Xaa can be any naturally occurring amino acid
  Transcript Sequence Number=SeqID_24032
  Gene Ontology: Mol. function=transporter activity; Cellular component= integral to membrane; Biological process=transport
  Homolog annotation: Hit_ID=Q53P54; Match level="QueryCoverage=99%, HitCoverage=100%, E-value=0.0, Identity=83%"; Hit description=Major Facilitator Superfamily protein, expressed
  Pfam annotation: Domain name=MFS_1; Domain location=16-384; Score =170.3; E_value=5.6e-48; Accession=PF07690.8; Description=Major Facilitator Superfamily
  Pfam annotation: Domain name=Sugar_tr; Domain location=12-436; Score=- 137.4; E_value=0.0014; Accession=PF00083.16; Description=Sugar (and other) transporter
  Pfam module annotation: Pfam domain module=MFS_1::Sugar_tr; Domain location=16-384::12-436
MMRMKFPKRYVIVLLTFICTNVCYIERVGFSIAYTVAADAISVNQANKGMILSMFYYGYVLSQIPGGWAAQRIGGRRVLLLSFILWSLICGLMPLDPNRVTILVLSRLFVGVAQGFIFPAIHTVLAQWVPPQERSRSVSLTTSGMYLGAACGMLFFPSLVKNMGPQSVFFVEAVLGVVWSVIWLKFSSDPPRTDLPKVSMPKVASRDMIKAQAGGVVAPRTVKIPWRRIIFSLPVWAIVVNNFTFHYALYVLMNWLPTYFELGLRLRLQDMGSSKMLPYFNMFIFSNIGGVVADHLITRRILSVTKTRKLLNTIGFVVSAFALMALPFFSTPSGTVTCSAISLGFLALGRAGFAVNHMDVAPKFAGIVMGVSNTAGTLAGIVGVGLTGNILEGAKASNKDLTNTETWKTVXFFVPAYLCIFSSVIFLAFSTGEKVFE

SEQ ID NO: 90007 - protein, 636 aa, Setaria italica
  misc_feature (122)..(122): Xaa can be any naturally occurring amino acid
  Transcript Sequence Number=SeqID_24033
  Gene Ontology: Cellular component=integral to membrane
  Homolog annotation: Hit_ID=B9SMG7; Match level="QueryCoverage=99%, HitCoverage=46%, E-value=0.0, Identity=65%"; Hit description =Nucleotide binding protein, putative
  Pfam annotation: Domain name=WD40; Domain location=38-74; Score=6.5; E_value=6.7; Accession=PF00400.24; Description=WD domain, G-beta repeat
  Pfam annotation: Domain name=WD40; Domain location=77-121; Score =12.6; E_value=1.3; Accession=PF00400.24; Description=WD domain, G -beta repeat
  Pfam module annotation: Pfam domain module=WD40::WD40; Domain location=38-74::77-121
PGAENSDETCESFAFALVNGALGVFEVHGRRIRDFRPKWPSSSFASSDGLVTAMAYRLPHVVMGDRSGNIRWWDVTTGLSSSFSTHREGIRRIKFSPVVHGDRSRGRIAVLFYDNTFSIFDXDPLANALLQPQSPGTLVLELDWLSTRTKKDEPLVLCIAGADSSFRLIEVNIDSKGGSVSKPVAMKERFRPMPFCLPVLFPTAHALALRMILQLGVKPSWFECNNNDKLGSSSFKVAPAFGDLRSYMIETTLPPIGDAVVAELLLKVLEPYRKEGCILDDGRARLYSAVVNKGAYARFAFAAAIFGDFEEALFWLQLPQALRHFLDKSASRSRDNISQSSLHRDSEQGSALNRIVSRERSASGKFAKNAANYGQLSSMAFKQEQLWFNANERIPWHDKLDGEEALQKRVHELVSLGNLEAAVSLLLSTPPEGSNFYPNALRAVVLSSAVSQSLHELAVKVVAANMVRTDKSLSGTHLLCAVGRYQEACSQLQDAGCWIDAATLAASHLHGSDYARVLQRWADYVLRGEHNMWRALILYVAAGALPEALDTLRKNQRPDTAAMFLLACHEIYSQITAEAEPADDTSGSELTPEQNEKLRFPSKNVADEDLIAVSEVFGQYQQKLVHLCMDTEPSAD

SEQ ID NO: 90008 - protein, 63 aa, Setaria italica
  Transcript Sequence Number=SeqID_24034
  Subcellular localization annotation: CTP_CleavageSite=40; ConfidenceScore=5.39e-01
RSRTSPVTSTLLYATAQQHSSVRLISPSPLVALLPVPSPRHTARRCPHHPPVAGPSPPGPRLL

SEQ ID NO: 90009 - protein, 104 aa, Setaria italica
  misc_feature (92)..(92): Xaa can be any naturally occurring amino acid
  Transcript Sequence Number=SeqID_24035
  Gene Ontology: Mol. function=transporter activity; Cellular component= integral to membrane; Biological process=response to antibiotic
  Homolog annotation: Hit_ID=Q2RAW8; Match level="QueryCoverage=96%, HitCoverage=20%, E-value=1e-35, Identity=72%"; Hit description=Major facilitator superfamily antiporter, putative, expressed
SRGNGVVADRIGRKPIIVFSVLSVVIFNTLFGVSTKYWMAITTRLVLGALNGMLAPIKAYSIEICRPEHHALGLSVVSTAWGIALVVGPSIXGGYLARPAQQYP

SEQ ID NO: 90010 - protein, 130 aa, Setaria italica
  Transcript Sequence Number=SeqID_24036
  Gene Ontology: Mol. function=transporter activity; Cellular component= integral to membrane; Biological process=response to antibiotic
  Homolog annotation: Hit_ID=Q2RAW8; Match level="QueryCoverage=83%, HitCoverage=23%, E-value=4e-46, Identity=78%"; Hit description=Major facilitator superfamily antiporter, putative, expressed
MGEQMPIGMGEEAPPTPPVTSLYVDGCPGCAIERKKESNKGIPYKELFFVAITTIASALPISSLFPFLYYMIEDLHVAKTEQDIGLYAGFLGASYFVGRFLSSLFWGVVADRIGRKPIIVFSVLSVVIFN

SEQ ID NO: 90011 - protein, 199 aa, Setaria italica
  Transcript Sequence Number=SeqID_24037
ELHLDLMRLDIVEGISMKKIRFDGVRQTANEVVIHAHPASIIEVLDSITIEGQRIARVANLLGFGGAGLEETKLMDDDLEWLLEDVFEAGEVGDVEAVYFEEDMVSVEDREAGLPVGSGDEGALSNRLDALHLGVDQRGVFYPVVGKGKILTGLADQDNALHLASGLEAGEHNLGDDIGQVNPVAKDGAHLLGLRVYLA

SEQ ID NO: 90012 - protein, 166 aa, Setaria italica
  Transcript Sequence Number=SeqID_24038
  Gene Ontology: Mol. function=galactosyltransferase activity; Cellular component=membrane; Biological process=protein amino acid glycosylation
  Homolog annotation: Hit_ID=B6UCA7; Match level="QueryCoverage=100%, HitCoverage=50%, E-value=1e-71, Identity=77%"; Hit description=Hypro1
  Pfam annotation: Domain name=Galactosyl_T; Domain location=1-164; Score=-63.4; E_value=0.03; Accession=PF01762.13; Description =Galactosyltransferase
IVRMAYALQPPASRARVDVRFVFCNVTDPVDAALLALEIRRHGDVVVLNCAENMNDGKTYAYLSSVPRLFASRPYDYVMKTDDDTYLRVAELADELRGKPRDDVYLGYGYAMGGQPMPFMHGMGYVVSWDVASWVAGADEILARNDTLGPEDLMVGKWLNLAGRGR

SEQ ID NO: 90013 - protein, 139 aa, Setaria italica
  misc_feature (18)..(18): Xaa can be any naturally occurring amino acid
  misc_feature (34)..(34): Xaa can be any naturally occurring amino acid
  misc_feature (63)..(63): Xaa can be any naturally occurring amino acid
  misc_feature (84)..(84): Xaa can be any naturally occurring amino acid
  Transcript Sequence Number=SeqID_24039
  Gene Ontology: Mol. function=hydrolase activity, acting on glycosyl bonds; Cellular component=vacuole; Biological process=cell wall organization and biogenesis
  Homolog annotation: Hit_ID=B6TXJ8; Match level="QueryCoverage=87%, HitCoverage=27%, E-value=4e-51, Identity=80%"; Hit description =Glycoside hydrolase, family 28
MTGNYKSHPDDGFDPNAXPVVENISYQDVVATGXVYKSAARLEGIDGAPFRGICLANVTAEFXKSRKYPWTCTDVEGVSSADVXPRAPCEALQGKHDGACPFPTDTLPIDQVTVQQCAYDVPTPKGELKLTQTHIQTGN

SEQ ID NO: 90014 - protein, 486 aa, Setaria italica
  Transcript Sequence Number=SeqID_24040
  Gene Ontology: Mol. function=hydrolase activity, acting on glycosyl bonds; Cellular component=vacuole; Biological process=cell wall organization and biogenesis
  Homolog annotation: Hit_ID=B6TXJ8; Match level="QueryCoverage=89%, HitCoverage=99%, E-value=0.0, Identity=86%"; Hit description =Glycoside hydrolase, family 28
  Pfam annotation: Domain name=Glyco_hydro_28; Domain location=88-447; Score=30.1; E_value=1.3e-10; Accession=PF00295.9; Description =Glycosyl hydrolases family 28
  Subcellular localization annotation: CTP_CleavageSite=51; ConfidenceScore=5.13e-01
MASPIMLSPFLHQLVLLLVAASGTVVAARHHHSSPAESRTGQSMYLAPSCRAHTASLADFGGVGDGTTSNTAAFRSAVDHLSQYSGEGGGGAMLYVPAGKWLTGPFNLTSHFTLFLHSDAVILGSQNISEWPVIAPLPSYGRGRDKIGGRYASLIGGSNLTDVVITGNNGTIDGQGAMWWSKFHQNKLKYTRGYLVELMWSDTIFISNVTLVNSPAWNIHPVYSSNIVVQGVTILAPTRSPNTDGINPDSCSHVRIEDCYVVSGDDCVAIKSGWDEYGIAYGMPSEHIVVRRLTCVSPTSAVIALGSEMSGGIRDVRAEDITAINSESGVRIKTAVGRGNYVRDVFVRGMKLDGMKYVFWMTGNYKSHPDDGFDPNAIPVVENISYQDVVATGVYKSAARLEGIDGAPFRGICLANVTAEFDKSRKYPWTCTDVEGVSSADVSPAPCEALQGKHDGACPFPTDTLPIDQVTVQQCAYDVPNPKGGN

SEQ ID NO: 90015 - protein, 107 aa, Setaria italica
  Transcript Sequence Number=SeqID_24041
  Gene Ontology: Mol. function=protein serine/threonine phosphatase activity; Cellular component=protein serine/threonine phosphatase complex; Biological process=protein amino acid dephosphorylation
  Homolog annotation: Hit_ID=Q7XUC5; Match level="QueryCoverage=100%, HitCoverage=28%, E-value=8e-44, Identity=80%"; Hit description =Probable protein phosphatase 2C 43
MWPWLERIASACWDRVRRYGLTRKDEEDGDAGAGADDLLWSRDLARHAAGEFSFAVVQANDVLEDHSQVETGAAATFVGVYDGHGGAEASRFISNHLSAHIVRLAQE

SEQ ID NO: 90016 - protein, 119 aa, Setaria italica
  Transcript Sequence Number=SeqID_24042
  Gene Ontology: Mol. function=amino acid transmembrane transporter activity; Cellular component=integral to membrane; Biological process=amino acid transport
  Homolog annotation: Hit_ID=B9GYF7; Match level="QueryCoverage=78%, HitCoverage=15%, E-value=1e-30, Identity=64%"; Hit description =Cationic amino acid transporter
FVALLAVVIASSVGIAAYWGRSPERWKGYVVLVPAWVAGTWGIQLLVPAARAPKVWGVPLVPWMPSLSIATNLFLMGSLGKDAFIRFGFCTAIMLVYYVLVGLHATYDVAHGACAGEDD

SEQ ID NO: 90017 - protein, 134 aa, Setaria italica
  misc_feature (112)..(112): Xaa can be any naturally occurring amino acid
  Transcript Sequence Number=SeqID_24043
  Gene Ontology: Mol. function=nucleoside-triphosphatase activity; Cellular component=membrane; Biological process=transport
  Homolog annotation: Hit_ID=Q8GU82; Match level="QueryCoverage=97%, HitCoverage=9%, E-value=3e-49, Identity=68%"; Hit description=PDR -like ABC transporter
NLPMSLTETGLWTCSTYYAIGYAPSPIRFFQQLLVLFAMHQMALSLYRLIASIGRTQVMTNMLGVQALIAMLILGGFVISKDDLQPWMRWGYWASPFTYSLNAVALNEFIDXRWGYGVHFEDVNTTGRGCLEVP

SEQ ID NO: 90018 - protein, 165 aa, Setaria italica
  Transcript Sequence Number=SeqID_24044
  Gene Ontology: Mol. function=protein serine/threonine kinase activity; Cellular component=cytoplasm; Biological process=protein amino acid phosphorylation
  Homolog annotation: Hit_ID=B9S6V7; Match level="QueryCoverage=99%, HitCoverage=36%, E-value=3e-71, Identity=74%"; Hit description=Srpk, putative
  Pfam annotation: Domain name=Pkinase; Domain location=1-164; Score= -93.8; E_value=0.0066; Accession=PF00069.17; Description=Protein kinase domain
SLKCKIVDFGNACWADQQLAGEIQTRQYRAPEVIIGSGYSYSADMWSFACIAFELATGDLLFAPKNCQGCSEDEDHLALMMETLGKMPRKIASSGTRSKDYFDRHGDLKRIRRLKFWPLDCVLVERYNFTEPDAQGFADFLRPILDFTPENRPSAAQCLKHPWLS

SEQ ID NO: 90019 - protein, 100 aa, Setaria italica
  Transcript Sequence Number=SeqID_24045
  Gene Ontology: Mol. function=metal ion binding; Cellular component =plasma membrane
  Homolog annotation: Hit_ID=B9RRE6; Match level="QueryCoverage=86%, HitCoverage=22%, E-value=2e-31, Identity=74%"; Hit description =Copine, putative
  Pfam annotation: Domain name=Copine; Domain location=1-96; Score =70.3; E_value=7e-18; Accession=PF07002.8; Description=Copine
SLHAINGNPNPYEQAISIIGRTLSPFDDDNLIPCFGFGDASTHDHSVFSFYQDNHPCRGFEEVLVRYRQIVPHLNLSGNKACSPLLYSRYCAQIEGWIFQ

SEQ ID NO: 90020 - protein, 387 aa, Setaria italica
  Transcript Sequence Number=SeqID_24046
  Gene Ontology: Mol. function=metal ion binding; Cellular component =plasma membrane
  Homolog annotation: Hit_ID=B9RRE6; Match level="QueryCoverage=86%, HitCoverage=88%, E-value=1e-122, Identity=67%"; Hit description =Copine, putative
  Pfam annotation: Domain name=Copine; Domain location=80-227; Score =281.8; E_value=1.6e-81; Accession=PF07002.8; Description=Copine
  Pfam annotation: Domain name=zf-C3HC4; Domain location=343-375; Score= 12.0; E_value=0.0043; Accession=PF00097.17; Description=Zinc finger, C3HC4 type (RING finger)
  Pfam module annotation: Pfam domain module=Copine::zf-C3HC4; Domain location=80-227::343-375
MWGEKTHHKHWHQGHGPSGSSKGEKHGKQQPKFIPDNYSSVDEVITALREAGLESSNLILGIDFTKSNEWSGRHSFGRKSLHAINGNPNPYEQAISIIGRTLSPFDDDNLIPCFGFGDASTHDHSVFSFYQDNHPCRGFEEVLVRYRQIVPHLNLSGPTSFAPLIYAAISVVENSNWQYHVLVIIADGQVTAANTNDGRLSPQEQATIQAIVDASYYPLSIVMVGVGDGPWDAMQHFDDCIPERAFDNFQFVNFTGIMSTSKDMSKKEAAFALAALMEIPSQYKATQGLRPSEKHAQRIGSPRILPPPNKVLEHDNAAASHPPPTASSRSTGIGKSAADEQVCPICLTNPKDMAFQCGHLTCKECGPTLPTCPLCRKPITMRVRIYS

SEQ ID NO: 90021 - protein, 69 aa, Setaria italica
  Transcript Sequence Number=SeqID_24047
SCSYAAAYCSHRMICCICLMPISSSGVLLRVVPKALMLALMPCRTIGATCFSELNATSLNFHYGLDTVT

SEQ ID NO: 90022 - protein, 86 aa, Setaria italica
  Transcript Sequence Number=SeqID_24048
  Homolog annotation: Hit_ID=B1ZSN4; Match level="QueryCoverage=93%, HitCoverage=6%, E-value=6e-26, Identity=70%"; Hit description =ASPIC/UnbV domain protein
  Pfam annotation: Domain name=FG-GAP; Domain location=6-30; Score =17.9; E_value=0.038; Accession=PF01839.15; Description=FG-GAP repeat
PPLFINAGAVAAADFDHDGRLDVFIGGRVANGQYPYAPPSALLHNGGGRFEEVTDSVAPLLKEVGMVTSALWSDVDNDGWVTCSSR

SEQ ID NO: 90023 - protein, 85 aa, Setaria italica
  Transcript Sequence Number=SeqID_24049
  Gene Ontology: Mol. function=protein serine/threonine kinase activity; Cellular component=integral to membrane; Biological process=protein amino acid phosphorylation
  Homolog annotation: Hit_ID=Q9M2Z1; Match level="QueryCoverage=98%, HitCoverage=34%, E-value=4e-30, Identity=56%"; Hit description =Leucine-rich repeat receptor-like protein kinase
  Pfam annotation: Domain name=LRR_1; Domain location=22-45; Score=6.8; E_value=15; Accession=PF00560.25; Description=Leucine Rich Repeat
  Pfam annotation: Domain name=LRR_1; Domain location=47-69; Score =12.1; E_value=1.5; Accession=PF00560.25; Description=Leucine Rich Repeat
  Pfam module annotation: Pfam domain module=LRR_1::LRR_1; Domain location=22-45::47-69
YLALSGNELTGEIPPELGNLSTLRELYLGYFNSFTGGIPPELGRLRALVRLDMANCGISGEIPPEVANLTSLDTLFLQINALTGR

SEQ ID NO: 90024 - protein, 132 aa, Setaria italica
  misc_feature (98)..(98): Xaa can be any naturally occurring amino acid
  Transcript Sequence Number=SeqID_24050
  Gene Ontology: Mol. function=ubiquinol-cytochrome-c reductase activity; Cellular component=mitochondrial respiratory chain; Biological process=electron transport chain
  Homolog annotation: Hit_ID=P49727; Match level="QueryCoverage=81%, HitCoverage=39%, E-value=1e-49, Identity=92%"; Hit description =Cytochrome b-c1 complex subunit Rieske, mitochondrial
  Pfam annotation: Domain name=UCR_TM; Domain location=63-127; Score= -3.8; E_value=0.042; Accession=PF02921.6; Description=Ubiquinol cytochrome reductase transmembrane region
  Subcellular localization annotation: CTP_CleavageSite=29; ConfidenceScore=5.41e-01
AAAAARGPLAGAGAPGGDDDSARARSQPRFSVESPFFAAARGFSTETLVPRNQDAGLADLPATVAAVKNPNPKVVYDEYNHERYPPGDPSKRAFAYFXVLSGGRFIYASLLRLLILKFVLSMSASKDVLALA

SEQ ID NO: 90025 - protein, 112 aa, Setaria italica
  misc_feature (11)..(11): Xaa can be any naturally occurring amino acid
  misc_feature (24)..(24): Xaa can be any naturally occurring amino acid
  Transcript Sequence Number=SeqID_24051
  Gene Ontology: Mol. function=phosphatidylinositol phosphate kinase activity; Biological process=phosphatidylinositol metabolic process
  Homolog annotation: Hit_ID=Q94LF4; Match level="QueryCoverage=59%, HitCoverage=3%, E-value=1e-30, Identity=91%"; Hit description =Putative phosphoinositide kinase
DDDDDECIADXEQCRIRSSSSFGXSGEFRSRDRSGEEHKKVMKNVIDGHFRALISQLLEVENISLHEDDDMGWLEIVTSVSWEAANFLKPDTSQGGGMDPGGYVIVLRFKLF

SEQ ID NO: 90026 - protein, 37 aa, Setaria italica
  Transcript Sequence Number=SeqID_24052
WLCCMLTLACVCTGASFVLIYFLSIEVTLLIFDFPFH

SEQ ID NO: 90027 - protein, 87 aa, Setaria italica
  Transcript Sequence Number=SeqID_24053
  Gene Ontology: Mol. function=aspartic-type endopeptidase activity; Cellular component=chromatin; Biological process=chromatin assembly or disassembly
  Homolog annotation: Hit_ID=Q7X7I2; Match level="QueryCoverage=93%, HitCoverage=5%, E-value=8e-19, Identity=55%"; Hit description =OSJNBa0013A04.20 protein
  Pfam annotation: Domain name=Retrotrans_gag; Domain location=13-85; Score=7.2; E_value=0.012; Accession=PF03732.9; Description =Retrotransposon gag protein
FRSQGTPEDQKVWTATFYLEDAAGQWYYRLEKNRGVPTWPAFVEGVNKRFGPLVRSNPLGELTHLRRTGSVDSYQEQFLKLPARYEG

SEQ ID NO: 90028 - protein, 81 aa, Setaria italica
  Transcript Sequence Number=SeqID_24054
  Gene Ontology: Mol. function=protein serine/threonine kinase activity; Biological process=protein amino acid phosphorylation
  Homolog annotation: Hit_ID=UPI000016287E; Match level="QueryCoverage =100%, HitCoverage=31%, E-value=1e-21, Identity=60%"; Hit description= protein kinase family protein
MLSNSTTGQESPRELEDRGSSLWIEGPGRKSMISASGIPKYAYKELQKATSNFTTVLGQGAFGPVYKADMSSGEILAVKVL

SEQ ID NO: 90029 - protein, 84 aa, Setaria italica
  misc_feature (14)..(14): Xaa can be any naturally occurring amino acid
  Transcript Sequence Number=SeqID_24055
  Gene Ontology: Cellular component=chloroplast
  Homolog annotation: Hit_ID=Q7XN08; Match level="QueryCoverage=100%, HitCoverage=14%, E-value=3e-23, Identity=75%"; Hit description =OSJNBa0008M17.9 protein
QPQNVDLPELQPKXKKPFPVPIKKMLQDSRRDKRLAQMRIEKPLEAPKNGLLVPELVPVAYEVLDNWKVLIRGLSQLLNVVTVY

SEQ ID NO: 90030 - protein, 57 aa, Setaria italica
  Transcript Sequence Number=SeqID_24056
FGSTVGVPLPLFFEGPTSWVSRDLMDPLLVVFHMWVLLSVVTGSRCSCALLFTRIQA

SEQ ID NO: 90031 - protein, 106 aa, Setaria italica
  Transcript Sequence Number=SeqID_24057
  Gene Ontology: Mol. function=transferase activity, transferring nitrogenous groups; Cellular component=apoplast; Biological process =cellular amino acid and derivative metabolic process
  Homolog annotation: Hit_ID=Q2R2Q2; Match level="QueryCoverage=96%, HitCoverage=25%, E-value=2e-49, Identity=90%"; Hit description =Tyrosine/nicotianamine aminotransferases family protein
INACQGAIPQLIENTKQEFFDKTVEVLRQTADICWEKLKGISCITCPSKPEGSMFVMVKLDLSCLEDIKDDMDFCCRLAKEELVLELICPGCAVGYKNWLRITFAI

SEQ ID NO: 90032 - protein, 226 aa, Setaria italica
  Transcript Sequence Number=SeqID_24058
  Gene Ontology: Mol. function=transferase activity, transferring nitrogenous groups; Cellular component=apoplast; Biological process =cellular amino acid and derivative metabolic process
  Homolog annotation: Hit_ID=B9MYE9; Match level="QueryCoverage=98%, HitCoverage=53%, E-value=3e-93, Identity=68%"; Hit description =Aminotransferase family protein
NVYTYEHLAKVAEMARKLGIFVIADEVYAHLTFGERKFVPMGVFGSVAPVLTLGSISKRWVVPGWRLGWIVTNDPNGVFRKTKVVDSIKSYLDISTDPVTFVQGAIPQLIENTKQEFFDKTVEVLRQTADICWEKLKGISCITCPSKPEGSMFVMVKLDLSCLEDIKDDMDFCCRLAKEELVVVLPGCAVGYKNWLRITFAIAPSSLHDGLDRLKLFCLRHSKPEM

SEQ ID NO: 90033 - protein, 126 aa, Setaria italica
  misc_feature (30)..(30): Xaa can be any naturally occurring amino acid
  misc_feature (117)..(117): Xaa can be any naturally occurring amino acid
  Transcript Sequence Number=SeqID_24059
  Gene Ontology: Mol. function=structural molecule activity; Cellular component=protein complex; Biological process=microtubule-based movement
  Homolog annotation: Hit_ID=P11139; Match level="QueryCoverage=75%, HitCoverage=21%, E-value=4e-44, Identity=91%"; Hit description =Tubulin alpha-1 chain
  Pfam annotation: Domain name=Tubulin; Domain location=3-101; Score= -54.0; E_value=0.0036; Accession=PF00091.17; Description=TubulinFtsZ family, GTPase domain
LFLLSLITKACKGGLPVIVKYKYSVLKPFXLQISTAVVEPYNSVLSTHSLIEHTDVVVLLDNEAIYDICKRSLDIERPTYTNLNRLISQVISSLTTSLRFDGAINVDITEFQTNLCXPRIHFMLSS

SEQ ID NO: 90034 - protein, 90 aa, Setaria italica
  Transcript Sequence Number=SeqID_24060
  Gene Ontology: Mol. function=voltage-gated potassium channel activity; Cellular component=integral to membrane; Biological process=potassium ion transport
  Homolog annotation: Hit_ID=Q5EEQ2; Match level="QueryCoverage=86%, HitCoverage=10%, E-value=5e-39, Identity=97%"; Hit description =Potassium outward rectifying channel (Fragment)
  Pfam annotation: Domain name=cNMP_binding; Domain location=14-90; Score=37.5; E_value=5.3e-08; Accession=PF00027.21; Description =Cyclic nucleotide-binding domain
SAEFIQQIVIRLQEEFFLPGEVILEQGSAVDQLYFVCHGALEGVGIGQDGQEETLLMLTPESSFGEISILCNIPQPYTVRVCELCRLLRL

SEQ ID NO: 90035 - protein, 57 aa, Setaria italica
  Transcript Sequence Number=SeqID_24061
  Gene Ontology: Mol. function=oxidoreductase activity; Biological process=oxidation reduction
  Homolog annotation: Hit_ID=P93796; Match level="QueryCoverage=73%, HitCoverage=12%, E-value=2e-15, Identity=88%"; Hit description=Short- chain alcohol dehydrogenase
MQASLASYAAAAMPTLDLRPEMAHAHQPAMSPSHHAWDGNGAAVAPTPMPKRLDGKV

SEQ ID NO: 90036 - protein, 134 aa, Setaria italica
  Transcript Sequence Number=SeqID_24062
  Gene Ontology: Mol. function=substrate-specific transmembrane transporter activity; Cellular component=integral to membrane; Biological process=transmembrane transport
  Homolog annotation: Hit_ID=Q7XMZ1; Match level="QueryCoverage=100%, HitCoverage=37%, E-value=7e-34, Identity=56%"; Hit description =OSJNBa0027G07.4 protein
NYFTNRIPDWGWRVSLGLAAVPGAVVVLGAFFVSDTPVSLVMRGQPERARAALQRIRGAEADVDAEFKDIVCAVGVARQNDEGAFRRLFSREYRHYLAIGVAIPVFYEFTGMIVISVFSPVLFRTVGFSSQRAI

SEQ ID NO: 90037 - protein, 79 aa, Setaria italica
  misc_feature (71)..(71): Xaa can be any naturally occurring amino acid
  Transcript Sequence Number=SeqID_24063
  Homolog annotation: Hit_ID=Q6H7S8; Match level="QueryCoverage=100%, HitCoverage=3%, E-value=8e-21, Identity=68%"; Hit description =Putative LvsC
SDELAGQVIELVASVLDGNIANQQQMHLLSGFSILGFLFQSVSPQLLNFKTLSASKYMFTVLKNSEVLLKXALSQFYWN

SEQ ID NO: 90038 - protein, 66 aa, Setaria italica
  Transcript Sequence Number=SeqID_24064
EDCAEIYKRVTVQILHVAFGKVEGLAYQLFLVLRSHNKMLTSMVDPSCHLPQLQEGDKIRRNNLRS

SEQ ID NO: 90039 - protein, 92 aa, Setaria italica
  misc_feature (79)..(79): Xaa can be any naturally occurring amino acid
  Transcript Sequence Number=SeqID_24065
  Gene Ontology: Mol. function=oxidoreductase activity; Cellular component=cytoplasm; Biological process=metabolic process
  Homolog annotation: Hit_ID=Q49HE0; Match level="QueryCoverage=95%, HitCoverage=23%, E-value=6e-42, Identity=94%"; Hit description=12 -oxo-phytodienoic acid reductase
MWCVGFDGVEIHGAHGYLIDQFLKDQVNDRTDKYGGSLENRCRFALEVVQAVVDEIGADKVGIRLSPFASYSEAPDSNXEALGLYMANALNK

SEQ ID NO: 90040 - protein, 371 aa, Setaria italica
  Transcript Sequence Number=SeqID_24066
  Gene Ontology: Mol. function=oxidoreductase activity; Cellular component=cytoplasm; Biological process=metabolic process
  Homolog annotation: Hit_ID=Q49HE0; Match level="QueryCoverage=100%, HitCoverage=100%, E-value=0.0, Identity=90%"; Hit description=12-oxo- phytodienoic acid reductase
  Pfam annotation: Domain name=Oxidored_FMN; Domain location=10-345; Score=304.6; E_value=2.2e-88; Accession=PF00724.12; Description =NADH:flavin oxidoreductase  NADH oxidas
MSNSGANAIPLLTPYKMGKFDLSHRVVLAPLTRQRSYGNVPQPHAILYYQQRATKGGLLIAEATGVSDTAQGYKDTPGIWSNEQVEAWKPIVHGVHEKGGIFFCQFWHVGRVSNSTFQPNGQAPISSTDKPLKPQVRANGVDVATFAPPRRLETDEIPLIVNDFRVAARNAVEAGFDGVEIHGAHGYLIDQFLKDQVNDRTDKYGGSLENRCRFALEVVQAVVDEIGADKVGIRLSPFASYSEAPDSNPEALGLYMANALNKFGILYCHVVEPRMVKLGEKFETPYSLRPMRDAFKGTFIVAGGYNREDGNNAISTGYADLVAYGRIFLSNPDLPRRFEIDAPLNKYNRETFYLPDPVIGYTDYPFLPTDV

SEQ ID NO: 90041 - protein, 48 aa, Setaria italica
  Transcript Sequence Number=SeqID_24067
NFNRREELSLDQEIILYTYFSNMRGVDMYGYSYYKLYTKSQIIERVVS

SEQ ID NO: 90042 - protein, 69 aa, Setaria italica
  Transcript Sequence Number=SeqID_24068
  Gene Ontology: Mol. function=catalytic activity
  Homolog annotation: Hit_ID=Q70AG5; Match level="QueryCoverage=100%, HitCoverage=19%, E-value=4e-26, Identity=73%"; Hit description =Putative spermine synthase
ARAELERSRERFDVIVGDLADPVEGGPCYQLYTKPFYEHVVKPRLSDGRGVFVTQAGPAGVLTHREVFS

SEQ ID NO: 90043 - protein, 57 aa, Setaria italica
  Transcript Sequence Number=SeqID_24069
NSDHGSKGVSTTGGKSSVDDHEDIIMDYSMGNQEAKCGSSFLRESVAKMHFSTAEAS

SEQ ID NO: 90044 - protein, 77 aa, Setaria italica
  Transcript Sequence Number=SeqID_24070
MDGRSCCLESVPVVTSGDDSPTSAAHTGLPLPIEKRCASVDKTCEATEFGNGLLETKICTCFSKSISLEAFIHLQTD

SEQ ID NO: 90045 - protein, 144 aa, Setaria italica
  misc_feature (123)..(123): Xaa can be any naturally occurring amino acid
  misc_feature (137)..(137): Xaa can be any naturally occurring amino acid
  Transcript Sequence Number=SeqID_24071
PTLKLISALKGGREKNGMTSPTENRHVKWAPDVYDPPVTSVCHSVNSSYQRRSKSRKEKNKQKKKQKQKGKSKKNHQNSIQSSSAMEVSDHGSKGVSTTGGKSSVDDHEDIIMDYSMGNQEAXCGSSFLRESVAKMXFSTAEAS

SEQ ID NO: 90046 - protein, 89 aa, Setaria italica
  Transcript Sequence Number=SeqID_24072
  Gene Ontology: Mol. function=sulfotransferase activity; Cellular component=cytoplasm
  Homolog annotation: Hit_ID=P52835; Match level="QueryCoverage=100%, HitCoverage=28%, E-value=4e-22, Identity=53%"; Hit description =Flavonol 3-sulfotransferase
LFLKYEEMMADPVKEVKRLAEFIGAPFTDAEERSGVVDEVVRLCSFEHLTSLEVNSTGVADRIGGFPMENSTYFRRGKVGDWPNHLSAE

SEQ ID NO: 90047 - protein, 76 aa, Setaria italica
  Transcript Sequence Number=SeqID_24073
  Gene Ontology: Mol. function=metal ion binding
  Homolog annotation: Hit_ID=Q53MN0; Match level="QueryCoverage=97%, HitCoverage=25%, E-value=7e-24, Identity=66%"; Hit description=PHD -finger family protein, expressed
  Pfam annotation: Domain name=PHD; Domain location=4-53; Score=35.8; E_ value=1.7e-07; Accession=PF00628.21; Description=PHD-finger
DVNVCDICGDVGVEDKLAICSRCNDGAEHTYCMKVKIEEVPVGEWLCEECQAEVQIEIEKKKLEISQAKAGTISSE

SEQ ID NO: 90048 - protein, 88 aa, Setaria italica
  Transcript Sequence Number=SeqID_24074
  Subcellular localization annotation: CTP_CleavageSite=23; ConfidenceScore=5.03e-01
PQTTIPSFVTNFQSRCGGKSINRQMAAKHGLFVALNLLLFAAAVYGCANNCEPSYPTPPVEPPSSTYVPEPPAPIAPATDGHSHRPAG

SEQ ID NO: 90049 - protein, 101 aa, Setaria italica
  Transcript Sequence Number=SeqID_24075
NNLYGTRVSHIKIPCYMSTKGRSLRFYRSKEHLQMKQIIQKKFDGRCYNRRRTSALQFSAYMKHVVTTPSKQNLNHMVSTLTIQPMILGCLNQPKPKLPKL

SEQ ID NO: 90050 - protein, 242 aa, Setaria italica
  Transcript Sequence Number=SeqID_24076
  Gene Ontology: Mol. function=acireductone synthase activity; Biological process=methionine salvage
  Homolog annotation: Hit_ID=Q7F2F8; Match level="QueryCoverage=52%, HitCoverage=28%, E-value=1e-15, Identity=34%"; Hit description =P0402A09.8 protein
  Pfam annotation: Domain name=PPR; Domain location=22-56; Score=26.9; E_value=8.3e-05; Accession=PF01535.12; Description=PPR repeat
YKCGCIASACRFFHSMKSWNINSYAMLMLGYIQNRCSDEALQLFSKMQHSGLRANRVTFARILRGCADLCAIDLGRQLHASIIKMGLLSEVYVTNALVGMYTKSNVWTESRRSSQETLAGNVPEQDTTDNFSSEQRYASSTLEEVGLFTLDEENDHVSLADAWKIYIAAASQFNGSPLPTHMVGHELGIKTNIGNGKNANYNGSKLWLNYKDGNYQGNRYGSVKLFNLFQEGGTKSDHLVLV

SEQ ID NO: 90051 - protein, 45 aa, Setaria italica
  Transcript Sequence Number=SeqID_24077
SAFNNMIDTSGTTAQSKDRTIQIPGAIMKNYAIGDLQSITTSGNI

SEQ ID NO: 90052 - protein, 321 aa, Setaria italica
  misc_feature (28)..(28): Xaa can be any naturally occurring amino acid
  Transcript Sequence Number=SeqID_24078
  Gene Ontology: Mol. function=sequence-specific DNA binding; Cellular component=nucleus
  Homolog annotation: Hit_ID=Q9LQJ8; Match level="QueryCoverage=92%, HitCoverage=16%, E-value=2e-40, Identity=36%"; Hit description =F28G4.7 protein
MVVYSDAIPTHSTQLRPYIEEPIPRIFXSSQLNNHRKIRHESVPQKQEYVDAYWETLECCYLTAGLAEPLSAFPGCSVPEVSHPRSWSSLRVMTTEQRLELQQRIMNVSEKGKIPFKDCVRIARELNLSVEQVLRLSYERQSRLREQPSITAKQKQQKVSSRLTSEKRKRSADEITQKFFKRKVQASGSVEQIPDQSTLDEEVPETISSSPTDQTNRSDQPVSRTSSSSTNHADEDKESSPVISRSTILRKSCMRSKRFLWTYESDRKLLMIYIRMRAILGARYYRVAWNSLSDLPAPPNTCRRRNGNTIEGKRKHKRSCD

SEQ ID NO: 90053 - protein, 314 aa, Setaria italica
  Transcript Sequence Number=SeqID_24079
  Gene Ontology: Mol. function=histamine receptor activity; Cellular component=integral to membrane; Biological process=G-protein coupled receptor protein signaling pathway
  Homolog annotation: Hit_ID=B9RYU6; Match level="QueryCoverage=89%, HitCoverage=58%, E-value=1e-110, Identity=63%"; Hit description =Valacyclovir hydrolase, putative
  Pfam annotation: Domain name=Abhydrolase_1; Domain location=63-305; Score=63.9; E_value=6e-16; Accession=PF00561.12; Description =alphabeta hydrolase fold
TWSAAPRSASHLYVHVQAPPPGAPAAEGVAVEDVVFIHGFISSSVFWTETVFPAFSAAARGRYRMFAVDLLGFGRSPKPAESLYTLREHVEMIERSVLQRYRLGSFHVVAHSLGSVLALALAVKYPDAVKSLTLLAPPYFPVPESEAGAATQYVMRRVAPRRVWPPIAFGASMACWYEHVSRTICLTICRHHRVWDRLFRILTRNRVRTFLIEAFMCHTHNAAWHTLHNIICGSAARMDAYLDVLSSELSCKVSIFHGRDDELLPVECTLAVGARVPRARVTVYDRKDHITIIVGQEELFAAELEAIWRSAAAE

SEQ ID NO: 90054 - protein, 66 aa, Setaria italica
  Transcript Sequence Number=SeqID_24080
CLCPWLAALVCLRLLNDTMIFYCDCFTIFDNLSFQHQGEAKQVSKWCAWCLSEQLLNDKMIVYCKF

SEQ ID NO: 90055 - protein, 56 aa, Setaria italica
  Transcript Sequence Number=SeqID_24081
SSCKWKCMNWYSSPVCFCNLIDHQVNELHRLYRIQRQLMSDLTRDVPVLTNRRRSK

SEQ ID NO: 90056 - protein, 374 aa, Setaria italica
  misc_feature (106)..(106): Xaa can be any naturally occurring amino acid
  Transcript Sequence Number=SeqID_24082
  Gene Ontology: Mol. function=protein tyrosine kinase activity; Cellular component=plasma membrane; Biological process=protein amino acid phosphorylation
  Homolog annotation: Hit_ID=Q8LRD7; Match level="QueryCoverage=99%, HitCoverage=52%, E-value=0.0, Identity=91%"; Hit description=CLV1 receptor kinase-like protein
  Pfam annotation: Domain name=Pkinase; Domain location=75-367; Score =41.9; E_value=5.5e-11; Accession=PF00069.17; Description=Protein kinase domain
  Pfam annotation: Domain name=Pkinase_Tyr; Domain location=75-367; Score=25.0; E_value=2.2e-15; Accession=PF07714.9; Description =Protein tyrosine kinase
  Pfam module annotation: Pfam domain module=Pkinase::Pkinase_Tyr; Domain location=75-367::75-367
RLIFFYCYWRAVSSKGRKGHSAAAGSKGSRCGKDCGCFSRDESGTPSEHAEQYDLVALDQQVRFDLDELLKASAFVLGKSGIGIVYKVVLEDGLTMAVRRLGEGGXLQRFKEFQTEVEAIGKVRHPNIVTLRAYYWSFDEKLLIYDYIPNGSLSAAIHGKPGTMTFTPLPWEARLKIMKGVAKGMSFLHEFSPKKYVHGDLRPNNVLLGTNMEAYISDFGLGRLANIAGASPITQSDRVGLEKAQSQQSDASVSPLMSKGSCYQAPEALKTLKPSQKWDVYSYGVVLLEMITGRSPAVLLETMQMDLVQWVQFCIEDKKPSADVLDPFLARDSEREDEMIAVLKVALACVQANPERRPSMRHVAETLDRLNGSS

SEQ ID NO: 90057 - protein, 131 aa, Setaria italica
  Transcript Sequence Number=SeqID_24083
  Gene Ontology: Mol. function=hydrolase activity, hydrolyzing O -glycosyl compounds; Cellular component=extracellular region; Biological process=cell wall organization and biogenesis
  Homolog annotation: Hit_ID=Q67UW5; Match level="QueryCoverage=81%, HitCoverage=20%, E-value=2e-40, Identity=74%"; Hit description =Endoglucanase 5
  Pfam annotation: Domain name=Glyco_hydro_9; Domain location=1-131; Score=-160.8; E_value=2.3e-07; Accession=PF00759.11; Description =Glycosyl hydrolase family 9
GVDLVGGYYDAGDHVKFGLPMAFTVTLLSWGVLEYGAGVAAAGELAHALQAIKWGTDYFVKAHTAPNELWAQVGDGDSDHYCWQRPEDMTTSRRAYKVDAENPGSEVAAETAAAMAAASAVFRRAGDAHYA

SEQ ID NO: 90058 - protein, 153 aa, Setaria italica
  Transcript Sequence Number=SeqID_24084
  Gene Ontology: Mol. function=protein serine/threonine kinase activity; Cellular component=integral to membrane; Biological process=protein amino acid phosphorylation
  Homolog annotation: Hit_ID=Q9LJF3; Match level="QueryCoverage=100%, HitCoverage=13%, E-value=5e-54, Identity=67%"; Hit description =Receptor-like protein kinase BRI1-like 3
  Pfam annotation: Domain name=LRR_1; Domain location=138-152; Score =0.2; E_value=2.8e+02; Accession=PF00560.25; Description=Leucine Rich Repeat
  Pfam annotation: Domain name=LRR_1; Domain location=22-44; Score=9.3; E_value=5.1; Accession=PF00560.25; Description=Leucine Rich Repeat
  Pfam annotation: Domain name=LRR_1; Domain location=46-68; Score =14.4; E_value=0.46; Accession=PF00560.25; Description=Leucine Rich Repeat
  Pfam module annotation: Pfam domain module=LRR_1::LRR_1::LRR_1; Domain location=138-152::22-44::46-68
WVSLSGNRLTGTMPRGFGKLQKLAILQLNKNQLSGRVPAELGSCNNLIWLDLNSNGFTGTIPPELAAQAGLVPGGIVSGKQFAFLRNEAGNICPGAGVLFEFFGIRPERLAAFPNVHLCPSTRIYTGTTVYTFGSNGSMIFLDLSYNGLTGAI

SEQ ID NO: 90059 - protein, 133 aa, Setaria italica
  Transcript Sequence Number=SeqID_24085
  Subcellular localization annotation: CTP_CleavageSite=49; ConfidenceScore=5.62e-01
ISTVVCLFRLYRCCCASSPPSPPTCHFPYTTMPLLSCSQCSSSFSVPPCCKVTRARLCAARAHLPMCRLLALIELLFPLQHNSSYDTLELVFYPYGMHVDPSRMTSSARFKGIWPHPIYGENICGGTVRLKLA

SEQ ID NO: 90060 - protein, 98 aa, Setaria italica
  Transcript Sequence Number=SeqID_24086
  Gene Ontology: Mol. function=oxidoreductase activity, acting on single donors with incorporation of molecular oxygen, incorporation of two atoms of oxygen; Cellular component=cytoplasm; Biological process=fatty acid biosynthetic process
  Homolog annotation: Hit_ID=Q0DJB6; Match level="QueryCoverage=100%, HitCoverage=11%, E-value=1e-33, Identity=69%"; Hit description =Lipoxygenase
SSITPARIEGQLEGRTVEKAIEQNRLYILDHHDYLMPYLRRINTLGVCIYASRTLLFLKDDGTLKPVVIELSLPSDGAGDDDISRIFLPASQGMDGHL

SEQ ID NO: 90061 - protein, 145 aa, Setaria italica
  misc_feature (119)..(119): Xaa can be any naturally occurring amino acid
  Transcript Sequence Number=SeqID_24087
  Gene Ontology: Biological process=cell wall catabolic process
  Homolog annotation: Hit_ID=B6TKT2; Match level="QueryCoverage=100%, HitCoverage=40%, E-value=9e-67, Identity=85%"; Hit description=LysM domain containing protein
DLQMFAHKTLRIPLPGRHPPSSYQQNGSDESDDRECTPRRIHDDILDSILKTPKPKVSPAMSLLQGYYGLAPPPKRDQTGEGTEMAVYGKGKSAFLDVEPWLEPPNSEPFSLQNRKPKXTIGSSLLDGDTDENGDSEGLIRRRQK

SEQ ID NO: 90062 - protein, 50 aa, Setaria italica
  Transcript Sequence Number=SeqID_24088
LLIISFSYVQCLLQNIIRTLHPAAYVSVPSFKSQNFMHFVACNVFSCCEV

SEQ ID NO: 90063 - protein, 79 aa, Setaria italica
  misc_feature (75)..(75): Xaa can be any naturally occurring amino acid
  Transcript Sequence Number=SeqID_24089
  Subcellular localization annotation: CTP_CleavageSite=43; ConfidenceScore=5.78e-01
MASCSVVTAPALSASAPSSRRRATAAVSLPGVRRSRLPSRGVRCSAGQGGVKVPAKLAELWEAAKGAPPLAVLAXVAAA

SEQ ID NO: 90064 - protein, 69 aa, Setaria italica
  Transcript Sequence Number=SeqID_24090
GCQALTVPRPPLWRTGSTDRVASAEDSERCLVHFIQMFVKIWLFHHFGVYMLGISVPFQRIDVLTLTVG

SEQ ID NO: 90065 - protein, 271 aa, Setaria italica
  misc_feature (242)..(242): Xaa can be any naturally occurring amino acid
  Transcript Sequence Number=SeqID_24091
  Gene Ontology: Mol. function=electron carrier activity; Biological process=response to oxidative stress
  Homolog annotation: Hit_ID=Q9FEQ8; Match level="QueryCoverage=80%, HitCoverage=65%, E-value=1e-113, Identity=89%"; Hit description =Peroxidase 2
  Pfam annotation: Domain name=peroxidase; Domain location=57-269; Score=291.1; E_value=2.3e-84; Accession=PF00141.15; Description =Peroxidase
MPSTSLANMATAATSSKMPVLAALTLLLLAVACRASPYYPLELGYYRYKCPQAEAIVKAVMEKAIGQNPGNGAAVIRMLFHDCFVEGCDASILLDPTPFSPTPEKLSPPNNPSLRGFELIDAIKHALEAACPGVVSCADIIAFAARDASCFLSHGRVSFDMPAGRLDGTFSNASEPLKFLVPPTSNLSDLISSFVVKGMSVEDLVVLSGAHTVGQSHCSSFVSDRLDVPSDINPGLAGFLRXRCPANATSGSGDDPTVVQDVVTPNDMDSQ

SEQ ID NO: 90066 - protein, 181 aa, Setaria italica
  Transcript Sequence Number=SeqID_24092
  Gene Ontology: Mol. function=electron carrier activity; Biological process=oxidation reduction
  Homolog annotation: Hit_ID=Q8H3L0; Match level="QueryCoverage=95%, HitCoverage=32%, E-value=1e-81, Identity=86%"; Hit description =Putative cytochrome P450 monooxygenase
WAIMLLATNPSWQDKARAEVAAVCGGAPPTADHLPKLTVLQMVIKETLRLYPPATLLPRMAFEDITLGGGELRVPRGASVWIPVLAIHHDEAVWGADAHEFRPDRFAPGRARPWAGRFLPFASGPRNCVGQAYAMVEAKVVLAMMLASFRFGISDEYRHAPVTVLTLRPRHGVPVRLLPLK

SEQ ID NO: 90067 - protein, 326 aa, Setaria italica
  Transcript Sequence Number=SeqID_24093
  Gene Ontology: Mol. function=serine-type endopeptidase activity; Biological process=negative regulation of catalytic activity
  Homolog annotation: Hit_ID=Q9LJ20; Match level="QueryCoverage=100%, HitCoverage=41%, E-value=1e-163, Identity=86%"; Hit description =Putative subtilisin-like protein
  Pfam annotation: Domain name=PA; Domain location=83-186; Score=75.7; E_value=1.7e-19; Accession=PF02225.14; Description=PA domain
  Pfam annotation: Domain name=Peptidase_S8; Domain location=37-314; Score=-63.5; E_value=0.0026; Accession=PF00082.14; Description =Subtilase family
  Pfam module annotation: Pfam domain module=PA::Peptidase_S8; Domain location=83-186::37-314
  Subcellular localization annotation: CTP_CleavageSite=29; ConfidenceScore=5.02e-01
MSSAFQSDFLSDPIALGALHAHQRGVLVVCSGGNDGPNPYTVVNSAPWLLTVAASSIDRSFQSTIALGNGAVVKGVAINFSNQSLSGGQYPLVFGAQAAARYAPVAEASNCYPGSLDAQKVAGKIVVCVSTDPMVSRRVKKLVAEGSGARGLVLINDAEKDVPFVAGGFALSQVGTDAGAQILEYINSTKDPTAVILPTEDVKDFKPAPVVASFSARGPGMTESILKPDLMAPGVSILAATIPSADTDDVPPGRKPSAYAIKSGTSMACPHVAGAAAFVKSAHPGWTPSMIRSALMTTATTMNNLGKPLASSTGAAATGHDMGAGE

SEQ ID NO: 90068 - protein, 167 aa, Setaria italica
  Transcript Sequence Number=SeqID_24094
  Subcellular localization annotation: CTP_CleavageSite=48; ConfidenceScore=5.12e-01
GAKPGWRFFRVSFFSDLFPALFRLIFISFFYSTSRAACLLAENPYFARLERGWIFTANTQPVSEPTFFHHSGENNSVSLQQKKRFSLVLKAHKFPPISLQLTPITPRGEHSDTGGCLLNPVCATSPTNTASLLLSCKEQRAKASAPLLVLASIRHQSWILLHGLCFF

SEQ ID NO: 90069 - protein, 149 aa, Setaria italica
  misc_feature (16)..(16): Xaa can be any naturally occurring amino acid
  Transcript Sequence Number=SeqID_24095
  Gene Ontology: Mol. function=protein tyrosine kinase activity; Cellular component=integral to membrane; Biological process=protein amino acid phosphorylation
  Homolog annotation: Hit_ID=B9SG04; Match level="QueryCoverage=61%, HitCoverage=11%, E-value=2e-14, Identity=49%"; Hit description=LIM domain kinase, putative
LSSNRIAGAIPPEMAXSNLPTNVTIDLSYNNLTGAIPAVPPFLAQRPTAFEGNAELCGKPLDSLCAFTSSSAVEPPNGTAKSPPAIAAIPRDPTEALPGDDTGSATAGGPASGEQRGRMRLATIVAIAAGDVGGIAVLFVVVLYVYQVM

SEQ ID NO: 90070 - protein, 299 aa, Setaria italica
  Transcript Sequence Number=SeqID_24096
  Gene Ontology: Mol. function=oxidoreductase activity; Cellular component=cytoplasm; Biological process=oxidation reduction
  Homolog annotation: Hit_ID=Q84TC2; Match level="QueryCoverage=97%, HitCoverage=78%, E-value=1e-62, Identity=46%"; Hit description=1 -aminocyclopropane-1-carboxylate oxidase
  Pfam annotation: Domain name=2OG-FeII_Oxy; Domain location=221-299; Score=54.9; E_value=3.1e-13; Accession=PF03171.12; Description=2OG -Fe(II) oxygenase superfamily
MSLTEAVAVAVADGYNRRRELQAFDDTKAGVKGLLDAGATSILAIFHHPPDSLPQPRDHHAATPVTTDGGAAVPVIDLLAAPREEVVRLVRSAAETAGFFQVVNHGVPGEAMAAMIAAARRFNEQPAEAKRPYYTRDTAARKVRFYSNLDLFQSLAACWRDTVFCDMAPELPLPEELPEPLRGVMFEYADAVRKLAVWVFELLSESLGLGGDHLSKMGCGESLKVAINYYPACPEPHLTLGNTRHTDPTFLTVLLQDGVGGLQVLLDHAGAGSGWVDVPPVPGALIINIGDLLLASIHL

SEQ ID NO: 90071 - protein, 197 aa, Setaria italica
  Transcript Sequence Number=SeqID_24097
  Gene Ontology: Mol. function=protein tyrosine kinase activity; Cellular component=plasma membrane; Biological process=protein amino acid phosphorylation
  Homolog annotation: Hit_ID=Q69IN5; Match level="QueryCoverage=99%, HitCoverage=52%, E-value=1e-102, Identity=89%"; Hit description =Putative Pto kinase interactor 1
  Pfam annotation: Domain name=Pkinase; Domain location=12-197; Score= -29.0; E_value=9.2e-07; Accession=PF00069.17; Description=Protein kinase domain
  Pfam annotation: Domain name=Pkinase_Tyr; Domain location=12-191; Score=-16.8; E_value=1.3e-12; Accession=PF07714.9; Description =Protein tyrosine kinase
  Pfam module annotation: Pfam domain module=Pkinase::Pkinase_Tyr; Domain location=12-197::12-191
LFDELKEKTDDFGSKTLVGEGSYGRVYYAVLENGKHAAVKKLDASADPEPDNEFLAQVSVVSRLKHENFVDMLGYCIEGDQRLLAYEFATMGSLHDILHGRKGVAGAQPGPALDWMQRVRIAVDAAKGLEYLHEKVQPSIVHRDIRSSNVLLFEDYKAKIADFNLSSQSPDMAARLHSTRVLGTFGYHAPEYAMTGQ

SEQ ID NO: 90072 - protein, 88 aa, Setaria italica
  Transcript Sequence Number=SeqID_24098
RIAPPPPSTRLGCFTCFARRRIVGCCRRGRSVGRRSGDGATHGAAGQGDCGKIARPRAVGASLPADGDETSSGSNGRRAHTEPVPRAV

SEQ ID NO: 90073 - protein, 189 aa, Setaria italica
  Transcript Sequence Number=SeqID_24099
  Gene Ontology: Mol. function=binding; Cellular component=integral to membrane; Biological process=transport
  Homolog annotation: Hit_ID=B9S3Y0; Match level="QueryCoverage=82%, HitCoverage=76%, E-value=2e-45, Identity=66%"; Hit description =Mitochondrial uncoupling protein, putative
  Pfam annotation: Domain name=Mito_carr; Domain location=4-79; Score =23.1; E_value=2.3e-05; Accession=PF00153.19; Description =Mitochondrial carrier protein
  Pfam annotation: Domain name=Mito_carr; Domain location=83-170; Score= 87.5; E_value=4.6e-23; Accession=PF00153.19; Description =Mitochondrial carrier protein
  Pfam module annotation: Pfam domain module=Mito_carr::Mito_carr; Domain location=4-79::83-170
VYYHHFRTADVIKVRLQMQLAGQRGNLVGMGTIFTQLVEREGPRSLYLGLAPALTRSVVYGGLRLGLYEPCKHVCSYAFASTNFAFKFASGVIAGALATALTNPMEVLKVRLQMSTSNTSAIGEMRKILAQEGLKALWKGVGPAMARAGCLTASQMATYDEAKQALMKWTPLEEGFHLHLISSCIAGTA

SEQ ID NO: 90074 - protein, 113 aa, Setaria italica
  Transcript Sequence Number=SeqID_24100
  Gene Ontology: Mol. function=serine-type endopeptidase activity; Biological process=proteolysis
  Homolog annotation: Hit_ID=Q5N8I9; Match level="QueryCoverage=100%, HitCoverage=8%, E-value=2e-20, Identity=53%"; Hit description=P69E protein-like
VNPVSALDPGLVYDTTLADYTNFLCSLKLTQNPLQDLQGNLPVGLPNLPVNVSVPVDLLLPLFDAAGEPCVCSKSQGPYGRPEDLNYPSIAVPCLSGSGSTTVRRRVKNVGDA

SEQ ID NO: 90075 - protein, 108 aa, Setaria italica
  Transcript Sequence Number=SeqID_24101
FFFFFLSRRNLFVLSIPECTELTRFSCFSFFEKKRKVKINTMYSRRDHLARPSWGSFTHHGGCLTPKLSYKMSVQFSEAQFMSTAKGTQIQAGHRVYIQNRANFARGK

SEQ ID NO: 90076 - protein, 80 aa, Setaria italica
  Transcript Sequence Number=SeqID_24102
  Gene Ontology: Mol. function=transferase activity, transferring groups other than amino-acyl groups
MSFFYTAWATAVRTASATLPSPFTDHTAIAVPRDPPAPKFDHRNIEFRGEHSPSHSYGVLPGDRIKNLVVHFPEEFIAGL

SEQ ID NO: 90077 - protein, 97 aa, Setaria italica
  Transcript Sequence Number=SeqID_24103
  Gene Ontology: Cellular component=chloroplast
  Homolog annotation: Hit_ID=Q9SF24; Match level="QueryCoverage=75%, HitCoverage=46%, E-value=9e-13, Identity=44%"; Hit description =F26K24.3 protein
  Pfam annotation: Domain name=DUF567; Domain location=1-86; Score= -22.5; E_value=0.0068; Accession=PF04525.4; Description=Protein of unknown function (DUF567)
STLLQLRTELEVFLAGNNTAQQACDFKLKGSYFDRDCAFYLGDSNTMIAQISRKYTASNVLLGKDTFNVTVFPDVDHVFVAVLVVVLDEVHSRDRNY

SEQ ID NO: 90078 - protein, 391 aa, Setaria italica
  Transcript Sequence Number=SeqID_24104
  Gene Ontology: Mol. function=peptidyl-prolyl cis-trans isomerase activity; Cellular component=cytoplasm; Biological process=protein folding
  Homolog annotation: Hit_ID=B9S777; Match level="QueryCoverage=91%, HitCoverage=99%, E-value=1e-149, Identity=69%"; Hit description =Peptidyl-prolyl cis-trans isomerase d, ppid, putative
  Pfam annotation: Domain name=Pro_isomerase; Domain location=22-190; Score=371.0; E_value=2.2e-108; Accession=PF00160.13; Description =Cyclophilin type peptidyl-prolyl cis-tr
  Pfam annotation: Domain name=TPR_1; Domain location=315-348; Score =36.8; E_value=8.8e-08; Accession=PF00515.20; Description =Tetratricopeptide repeat
  Pfam annotation: Domain name=TPR_2; Domain location=229-262; Score =9.5; E_value=2.3; Accession=PF07719.9; Description=Tetratricopeptide repeat
  Pfam annotation: Domain name=TPR_2; Domain location=315-348; Score =36.0; E_value=1.5e-07; Accession=PF07719.9; Description =Tetratricopeptide repeat
  Pfam module annotation: Pfam domain module=Pro_isomerase::TPR_1::TPR _2::TPR_2; Domain location=22-190::315-348::229-262::315-348
MEGGGAEPAPVAAAAAEVKNPRCFMDITIGGEMEGRIVIELYASVVPRTAENFRALCTGEKGVGAASGKPLHFKGSCFHRVIKGFMVQGGDITAGDGTGGESIYGSKFEDENFILKHERKGMLSMANSGPDTNGSQFFITTTRTPHLDGKHVVFGRVIKGMGVVRSMEHVPVGEADCPTLDVKIVDCGELPEGSDDGVVNFFKDGDKYPDWPNDLEEKPAEVSWWMDAVESAKAYGNENFKKQDYKAALRKYRKALRYLDVCWEKEEIDEEKSTALRKTKSIILTNSSACKLKLGDLKGALLDADFALREREGNAKAFFRQGQAHIALNDIDAAVESFKHALELEPNDGGIKRELAAAKKKIADRRNQERKAFARMFQPSGKSDKSSEENN

SEQ ID NO: 90079 - protein, 70 aa, Setaria italica
  Transcript Sequence Number=SeqID_24105
  Gene Ontology: Cellular component=cytosol
  Homolog annotation: Hit_ID=Q6GNT9; Match level="QueryCoverage=92%, HitCoverage=21%, E-value=2e-12, Identity=52%"; Hit description =Protein MEMO1
MEVVRRAAYAGSWYTSDARKLEEELDGWLREAGITKNPDVRAIIAPHAGYMHAGSYAAYAFGNINPSSLF

SEQ ID NO: 90080 - protein, 452 aa, Setaria italica
  Transcript Sequence Number=SeqID_24106
  Gene Ontology: Mol. function=nucleoside-triphosphatase activity; Cellular component=mitochondrial inner membrane; Biological process =protein catabolic process
  Homolog annotation: Hit_ID=Q8S2A7; Match level="QueryCoverage=100%, HitCoverage=56%, E-value=0.0, Identity=88%"; Hit description=Cell division protease ftsH homolog 3, mitochondrial
  Pfam annotation: Domain name=AAA; Domain location=6-196; Score=309.0; E_value=9.8e-90; Accession=PF00004.21; Description=ATPase family associated with various cellular activities (AAA)
  Pfam annotation: Domain name=AAA_2; Domain location=3-135; Score= -28.6; E_value=0.0019; Accession=PF07724.6; Description=ATPase family associated with various
  Pfam annotation: Domain name=AAA_3; Domain location=6-138; Score= -22.0; E_value=0.096; Accession=PF07726.3; Description=ATPase family associated with various
  Pfam annotation: Domain name=AAA_5; Domain location=6-141; Score= -8.3; E_value=0.0047; Accession=PF07728.6; Description=ATPase family associated with various
  Pfam annotation: Domain name=Peptidase_M41; Domain location=203-406; Score=395.0; E_value=1.3e-115; Accession=PF01434.10; Description =Peptidase family M41
  Pfam module annotation: Pfam domain module=AAA::AAA_2::AAA_3::AAA _5::Peptidase_M41; Domain location=6-196::3-135::6-138::6-141::203-406
  Subcellular localization annotation: CTP_CleavageSite=22; ConfidenceScore=5.22e-01
AKIPKGALLVGPPGTGKTLLAKATAGESDVPFLSVSGSDFMEMFVGVGPSRVRNLFQEARQCAPSIVFIDEIDAIGRARGRGGFSGGNDERESTLNQLLVEMDGFGTTSGVVVLAGTNRPDILDKALLRPGRFDRQIAIDKPDINGRDQIFRIYLKKLKLDKEPSFYSQRLAALTPGFAGADIANVCNEAALIAARSEDAQITIQHFEAAIDRVIGGLEKKNKVISKLERQTVAYHESGHAVAGWFLEHAEPLLKVTIVPRGTAALGFAQYVPSENLLMTKEQLFDMTCMTLGGRAAEEVLIGKISTGAQNDLEKVTKMTYAQVAVYGFSEKVGLLSFPQREDGFGMSKPYGGETASIIDTEVREWVAKAYEKTLDLIKTHKEQVAQIAELLLEKEVLHQDDLVRVLGERPFKTAEPTNYDRFKQGFQVEESDKSAEVSDANPSSLGNVVPT

SEQ ID NO: 90081 - protein, 241 aa, Setaria italica
  misc_feature (146)..(146): Xaa can be any naturally occurring amino acid
  misc_feature (153)..(153): Xaa can be any naturally occurring amino acid
  misc_feature (168)..(168): Xaa can be any naturally occurring amino acid
  Transcript Sequence Number=SeqID_24107
  Gene Ontology: Mol. function=calmodulin binding; Cellular component =integral to membrane; Biological process=cell death
  Homolog annotation: Hit_ID=Q94CG7; Match level="QueryCoverage=99%, HitCoverage=47%, E-value=1e-80, Identity=65%"; Hit description=MLO -like protein 1
  Pfam annotation: Domain name=Mlo; Domain location=2-241; Score=-1.9; E_value=3.9e-18; Accession=PF03094.7; Description=Mlo family
SSLIVVISLAAERCLHHLGKTFKGKNQKALFEALLKVKEELMLLGFISLLLTVSQGMIQRICIPPVWTIYMLPCHSAREQAELSPSEAHGLAAGILGLTRRRLLAEGVPRAQHCQKKGEVPLLSVEALHQLHIFIFILAIAHVIFXCFLTMLXLGSARIRQWKHWRMXISEGCYENGQRNVTYVHQCEFIREHFKGIGRDLAILSWLHSFVKQFYGSVTKSDYTTMRLGFIMTHCRANPKF

SEQ ID NO: 90082 - protein, 55 aa, Setaria italica
  Transcript Sequence Number=SeqID_24108
  Gene Ontology: Mol. function=transferase activity, transferring glycosyl groups; Biological process=biosynthetic process
  Homolog annotation: Hit_ID=A1SKG6; Match level="QueryCoverage=100%, HitCoverage=13%, E-value=1e-21, Identity=89%"; Hit description =Glycosyl transferase, group 1
GGKTEKLIDKLSIQDSVRFVHGISDAELVELMGSAEVACVPSLYEGFSLPTAELM

SEQ ID NO: 90083 - protein, 67 aa, Setaria italica
  Transcript Sequence Number=SeqID_24109
  Subcellular localization annotation: CTP_CleavageSite=26; ConfidenceScore=5.05e-01
SAGQAAQLPPGPGGGPPLMGGMADPSAMPMFGGVPPNLMPGGGGASGAGLQLGHDGLAWAHARPPPY

SEQ ID NO: 90084 - protein, 67 aa, Setaria italica
  Transcript Sequence Number=SeqID_24110
  Subcellular localization annotation: CTP_CleavageSite=28; ConfidenceScore=5.39e-01
PRFPPSKSNQATALHPVRARETTNTDSMAMAPSSHAVSFPATPAGGAAVFRPRGAAAGAGVVRAAAG

SEQ ID NO: 90085 - protein, 92 aa, Setaria italica
  Transcript Sequence Number=SeqID_24111
  Subcellular localization annotation: CTP_CleavageSite=46; ConfidenceScore=5.61e-01
KTFFPFSFSSTNPSRNVSPLPAGRRIPFAHAFYQLCFLRPNSGPVPAQLINSNNASAVPPCSVLHFLPKSPHHEHHLNPSVGSSITFRVRPF

SEQ ID NO: 90086 - protein, 184 aa, Setaria italica
  Transcript Sequence Number=SeqID_24112
  Gene Ontology: Mol. function=N-acetyltransferase activity; Biological process=metabolic process
  Homolog annotation: Hit_ID=C1FD65; Match level="QueryCoverage=89%, HitCoverage=42%, E-value=4e-12, Identity=32%"; Hit description=Gcn5 -related n-acetyltransferase family protein
  Pfam annotation: Domain name=Acetyltransf_1; Domain location=84-164; Score=48.5; E_value=2.7e-11; Accession=PF00583.16; Description =Acetyltransferase (GNAT) family
IAAWLRAEDHYEDQSGNRYVESFKRKFASQEFHALKKRCSKQHGEKYICFVAVKNDDLRRTVLNSVVGTLDVCVRHPLHGEKFPEEPGSGRSSLHCRIYQPDQPKFGYLTNVCVAKYARRQGIASNMLLLAIDAARLNGAENIYIHVHKDNLPAWRLYNQIGFKMVDQDGARHSSDLCLLSFSS

SEQ ID NO: 90087 - protein, 99 aa, Setaria italica
  Transcript Sequence Number=SeqID_24113
  Subcellular localization annotation: CTP_CleavageSite=78; ConfidenceScore=5.01e-01
RLRPPVRPRRIQIRARFSRAAARRLALLARASPFAGFHRSGMPNCPVVAGAAPLAAPTAHDMHVRSVASDRDYSRRAVASRLASSLVTLPCFVLRCLGV

SEQ ID NO: 90088 - protein, 95 aa, Setaria italica
  Transcript Sequence Number=SeqID_24114
  Gene Ontology: Mol. function=heat shock protein binding; Biological process=protein folding
  Homolog annotation: Hit_ID=B9S2N8; Match level="QueryCoverage=74%, HitCoverage=18%, E-value=2e-22, Identity=70%"; Hit description =Chaperone protein dnaJ, putative
IATEQDVDLQMRMNKDLMMSSLWKLNVVDIEMTLLHVCEMVLYENNVKKEDLKARATALKILGKIFQREKEALPAPGPGPSGPSKRTVLDDDSSS

SEQ ID NO: 90089 - protein, 183 aa, Setaria italica
  Transcript Sequence Number=SeqID_24115
  Homolog annotation: Hit_ID=Q5DVL6; Match level="QueryCoverage=77%, HitCoverage=42%, E-value=8e-61, Identity=82%"; Hit description=C2 domain-containing protein
  Pfam annotation: Domain name=C2; Domain location=7-97; Score=55.2; E _value=2.5e-13; Accession=PF00168.22; Description=C2 domain
MGSRYEVEVTVGSASNLKNVNWRNGDLKPYAVLWVDDGPKCSTRVDLDNGENPVWDDKLVVPLPPPSAARLDDAVLCIDVVHANAAEGVKPLVGSARLPLRDVLDDAGIGAKVSRTLTLKRPSGRPQGRLDVRVAVREAARYYDPNPYPAPGYGNPAGAGSRDPYYAGGGQAPYGQPAYAAPP

SEQ ID NO: 90090 - protein, 291 aa, Setaria italica
  misc_feature (253)..(253): Xaa can be any naturally occurring amino acid
  misc_feature (258)..(258): Xaa can be any naturally occurring amino acid
  Transcript Sequence Number=SeqID_24116
  Homolog annotation: Hit_ID=B6SND5; Match level="QueryCoverage=54%, HitCoverage=48%, E-value=2e-78, Identity=90%"; Hit description=SRC2
  Pfam annotation: Domain name=C2; Domain location=7-95; Score=46.5; E _value=1.1e-10; Accession=PF00168.22; Description=C2 domain
MGSRYEVEVTVGSARDLKNVNWRNGDLKPYAVVWVDSGAKCSTRVDLDNGESPSWDEKLLVPLPPSSRLDDAVLYLDVVHANAAEGVKPLVGSARLPLRDVLDDAGIGGKASRNLRLKRPSGRPHGRLDVRVAIKEPARYYDPNPYPAPAGYAQHGTRDPYGSGSGGYYGSGGGYGGGAYGSGGYGAAQPYAAAPPAGYPSAYGSAPLPPQPAYGAPPAATAAYGAAAPAAYSGAAPTYGAAAPVAGADGKKXNKIGXWGTGLAVGAAAGVLGGLALAGGASLLENKLEER

SEQ ID NO: 90091 - protein, 59 aa, Setaria italica
  Transcript Sequence Number=SeqID_24117
  Gene Ontology: Mol. function=transporter activity; Cellular component= membrane; Biological process=oligopeptide transport
  Homolog annotation: Hit_ID=O48542; Match level="QueryCoverage=98%, HitCoverage=10%, E-value=1e-26, Identity=91%"; Hit description =Peptide transporter
MGEVADMYTQDGTVDIKGNPAVKKGTGNWRACPYILANECCERLAYYGMSTNLVNYMKT

SEQ ID NO: 90092 - protein, 180 aa, Setaria italica
  Transcript Sequence Number=SeqID_24118
  Gene Ontology: Mol. function=transferase activity, transferring glycosyl groups
  Homolog annotation: Hit_ID=Q339E2; Match level="QueryCoverage=85%, HitCoverage=22%, E-value=8e-64, Identity=78%"; Hit description =Glycosyltransferase QUASIMODO1, putative, expressed
TKSVDPIKLKRQVFRRRRKVQRVQELLQMDKKVELEMRNAAINSSRNFDNKVRGSYNIWRQEFRLINTDSTLRLMKDQIIMAKLYATIALTEKEPDMYALLMKCTKQSQTAIGDALIDSELDSSALDRAKAMGHVLSSARDVLYSSSEVSRKLRVMLQSTELNIDAVKKQNSFLVQHAAK

SEQ ID NO: 90093 - protein, 91 aa, Setaria italica
  Transcript Sequence Number=SeqID_24119
  Gene Ontology: Mol. function=nucleoside-triphosphatase activity; Biological process=maintenance of fidelity during DNA-dependent DNA replication
  Homolog annotation: Hit_ID=Q259B3; Match level="QueryCoverage=98%, HitCoverage=10%, E-value=4e-41, Identity=84%"; Hit description =H0901F07.7 protein
  Pfam annotation: Domain name=Smr; Domain location=20-91; Score=61.0; E_value=4.4e-15; Accession=PF01713.13; Description=Smr domain
QSQDGSVSFGPVVQTSKNTVDLRGKRVSEVSYELEMAIDACRPYQVLFVVHGMGTGAVKECAMDVLRNHPRVVKFEDESPLNYGCTVAYIQ

SEQ ID NO: 90094 - protein, 85 aa, Setaria italica
  Transcript Sequence Number=SeqID_24120
  Gene Ontology: Mol. function=catalytic activity; Biological process =cellular metabolic process
  Homolog annotation: Hit_ID=B6TQB4; Match level="QueryCoverage=94%, HitCoverage=22%, E-value=2e-37, Identity=92%"; Hit description=3 -beta hydroxysteroid dehydrogenase/isomerase
CYCSWRAPQLDPPAAMATNVPSSLVNWLLSFGNDDSLLIHLSTDQVYEGMKSFYKEEDETLPVNMYGRSKVAAEKFIVEKCSNYA

SEQ ID NO: 90095 - protein, 76 aa, Setaria italica
  misc_feature (54)..(54): Xaa can be any naturally occurring amino acid
  Transcript Sequence Number=SeqID_24121
QNISSDKMEGLDEKNRGSIQDNTSTQDDQSSNSPKDDEPLRKEAIETTIFQPKXIALVSTTIEDVTRNKDSSVSSE

SEQ ID NO: 90096 - protein, 260 aa, Setaria italica
  misc_feature (242)..(242): Xaa can be any naturally occurring amino acid
  Transcript Sequence Number=SeqID_24122
  Gene Ontology: Mol. function=microtubule motor activity; Cellular component=microtubule associated complex; Biological process =microtubule-based movement
  Homolog annotation: Hit_ID=B9RZY0; Match level="QueryCoverage=71%, HitCoverage=8%, E-value=1e-45, Identity=51%"; Hit description=ATP binding protein, putative
LSVEKASKCDAAGELCQGKCHLEKLQAEILAHQDVRKRIEHLTLEVKHKDDEIRQYKEHIAELVLHSEAQSLLYQEKYHEMEHMVSRQKFVPHESSSDIVHAKTEKPSGRARGSGSPFRCISSIIQQMNSEKDQEISVARQRIEELEGLVSGKQKEICLLTSRLAAVDTMTHDIIRELLGVKLDMTNYANLLDQEELQKLLIASQQQIEQSKAKDTELEVLREELGRLILERDSLLDDMDQXRKTDLLETQLLVEQLEQR

SEQ ID NO: 90097 - protein, 63 aa, Setaria italica
  Transcript Sequence Number=SeqID_24123
  Gene Ontology: Mol. function=DNA binding; Biological process =regulation of transcription
  Subcellular localization annotation: CTP_CleavageSite=33; ConfidenceScore=5.02e-01
LLVITHNFLLLQVNNTMYTYSPTQKVLEPNFVVGAPSSARLPEAGSQLNCVVLPGNLLWKILQ

SEQ ID NO: 90098 - protein, 171 aa, Setaria italica
  misc_feature (110)..(110): Xaa can be any naturally occurring amino acid
  Transcript Sequence Number=SeqID_24124
  Gene Ontology: Mol. function=DNA binding; Biological process =regulation of transcription
WKTPNSLEGQHWRLISYYQDSLPNGSTVWPSDGWAWKTPNSLEAVNGANNDIPPLPDDQTFQPDELEQLLQSIQEDSHFGSSIIDPSHSSITNSVMPEDDSLMFYDAPVXPIITDGGIKGCIIEHQRIILCDDGFRQVNGILSSPATNLSGIGMVDDGMPYYHPLHHNMAY

SEQ ID NO: 90099 - protein, 91 aa, Setaria italica
  Transcript Sequence Number=SeqID_24125
RNTFITQKKQEGQRTILFNNPCSVTSCGFHTVQLKIEMTTQNPNLLMPRHEYYDIMTLVVMISYNLLPNPGGKKQQDLCQKKTKQVSVLAR

SEQ ID NO: 90100 - protein, 133 aa, Setaria italica
  Transcript Sequence Number=SeqID_24126
GVAEELAAVTDAVSPSCRMDAPVDELCHGEGGNEQVAGAVLELLEKKDLCSSNLVSVDAGDKQPLKESSIINQDITDSAKKRRLQMSSLLQKPTKFRSPPSGKKGQSSSVKRRSPLHSAKENTSPPGTTITCK

SEQ ID NO: 90101 - protein, 108 aa, Setaria italica
  misc_feature (6)..(6): Xaa can be any naturally occurring amino acid
  Transcript Sequence Number=SeqID_24127
  Gene Ontology: Mol. function=nucleoside-triphosphatase activity
  Homolog annotation: Hit_ID=Q2QSF2; Match level="QueryCoverage=36%, HitCoverage=7%, E-value=1e-11, Identity=87%"; Hit description=Cell Division Protein AAA ATPase family, putative, expressed
LLEETXMSPADVAENLMPMSKKKKRDTDACLAALVEALNKAKEEAAAAKAKEEAEAKEKAEAEAKEAKEKAAKEAKGEEDKGKGKLSLSTEAEMSNGDTKGSDATNDN

SEQ ID NO: 90102 - protein, 51 aa, Setaria italica
  Transcript Sequence Number=SeqID_24128
MEYGYPYNGCGSNKEKRPPLKRGQLKLQIARTLFGSLVAPGAKNRERSFGR

SEQ ID NO: 90103 - protein, 69 aa, Setaria italica
  Transcript Sequence Number=SeqID_24129
QFDTLLCCNSSVLLHHKGPPNAKEVTCLSCSRRCCPGLERNLGISAQGIKVSGLAFHQAIIEHAGDQHS

SEQ ID NO: 90104 - protein, 150 aa, Setaria italica
  Transcript Sequence Number=SeqID_24130
  Gene Ontology: Mol. function=serine-type peptidase activity; Cellular component=chloroplast; Biological process=proteolysis
  Homolog annotation: Hit_ID=B6UHC0; Match level="QueryCoverage=98%, HitCoverage=21%, E-value=2e-75, Identity=85%"; Hit description=Acyl -peptide hydrolase-like
MSSLNPTTTIAAINLSGEQVHEPKVLISGSDFYAFPRIDRNKRRMAWIEWSHPNMPWDKSELWVGYFSESGDLETRICVAGANQMLVESPTEPKWSLKGELFFITDRGSGFWNIYKWVEQTNEVVPIYTLDAEFTRPLWVFGISSYEFLG

SEQ ID NO: 90105 - protein, 68 aa, Setaria italica
  Transcript Sequence Number=SeqID_24131
  Gene Ontology: Mol. function=binding
MECCYAGLNRELEVQVLELALLANLLGLSKIGACSKVVLGKLLWVINRLEGLCADGSCELSDFLSLSK

SEQ ID NO: 90106 - protein, 50 aa, Setaria italica
  Transcript Sequence Number=SeqID_24132
MSGKRSFFASKKKATNPFDSDSDDGDKQQQQRPARASSVPAPDRTAGLPL

SEQ ID NO: 90107 - protein, 52 aa, Setaria italica
  Transcript Sequence Number=SeqID_24133
HNARVFQRKFKSLDQLLGKIKEEARCWILAGARHLGSICIWRSDCFSFLFHP

SEQ ID NO: 90108 - protein, 46 aa, Setaria italica
  Transcript Sequence Number=SeqID_24134
FSDTIRSFCRVGFRQHTNIFDLQFLLDGIFGPGKEVYPAHSGRGKT

SEQ ID NO: 90109 - protein, 225 aa, Setaria italica
  Transcript Sequence Number=SeqID_24135
  Gene Ontology: Cellular component=mitochondrion
  Homolog annotation: Hit_ID=Q9SH46; Match level="QueryCoverage=83%, HitCoverage=57%, E-value=4e-21, Identity=32%"; Hit description =F2K11.2
  Pfam annotation: Domain name=PPR; Domain location=110-144; Score =34.9; E_value=3.3e-07; Accession=PF01535.12; Description=PPR repeat
  Pfam annotation: Domain name=PPR; Domain location=7-41; Score=30.2; E_ value=8.3e-06; Accession=PF01535.12; Description=PPR repeat
  Pfam annotation: Domain name=PPR; Domain location=74-108; Score=12.4; E_value=0.3; Accession=PF01535.12; Description=PPR repeat
  Pfam module annotation: Pfam domain module=PPR::PPR::PPR; Domain location=110-144::7-41::74-108
MACAAVAAYNTVMSRLCDTDRCSAVLELLVDMIKKGIIPNTRTYNILIQSLCMDGKLSVAKNLVYNQRFHANVVTYNTLIHWFYYSGIVSEAEYLFAYMTKVANIAPDEVTYTIMVDGLCRQGKFDQATDFFKESLKNRLSKDLLTALINRLARSNRIGNILVAFEEIERQGFVRDYMIFSDTIRSFCRVGFRQHTNIFDLQFLLDGIFGPGKEVYPAHSGRGKT

SEQ ID NO: 90110 - protein, 72 aa, Setaria italica
  Transcript Sequence Number=SeqID_24136
  Subcellular localization annotation: CTP_CleavageSite=57; ConfidenceScore=5.44e-01
MTSFTNTSTTNHSGLSMDSSVPGGSKGSSEGKKKRSEEQQGSDGNTKKSKNEASSPTSSLKASQVPKVKLGD

SEQ ID NO: 90111 - protein, 96 aa, Setaria italica
  Transcript Sequence Number=SeqID_24137
  Gene Ontology: Mol. function=DNA binding; Cellular component=nucleus; Biological process=regulation of transcription, DNA-dependent
  Homolog annotation: Hit_ID=A8CCM9; Match level="QueryCoverage=79%, HitCoverage=25%, E-value=4e-36, Identity=85%"; Hit description=MYB -related transcription factor
  Pfam annotation: Domain name=Myb_DNA-binding; Domain location=30-77; Score=50.2; E_value=8.2e-12; Accession=PF00249.23; Description=Myb -like DNA-binding domain
METTKAAITPADSKLIDGRQPCCDKLGVKRGPWTAEEDKKLISFILTHGRCCWRAVPKLAGLLRCGKSCRLRWTNYLRPDLKRGLLSTAEEQLGME

SEQ ID NO: 90112 - protein, 91 aa, Setaria italica
  Transcript Sequence Number=SeqID_24138
  Subcellular localization annotation: CTP_CleavageSite=42; ConfidenceScore=5.04e-01
QKEERARGGDGMRSMPAAAPGARSLLSISSGPLNLTHACVFSCNNQMTTDAEGTCTEEQAIGREASRSIGRPFFLDPVSIGGGRSWSRRRK

SEQ ID NO: 90113 - protein, 394 aa, Setaria italica
  misc_feature (192)..(192): Xaa can be any naturally occurring amino acid
  Transcript Sequence Number=SeqID_24139
  Gene Ontology: Mol. function=protein binding; Biological process =defense response
  Homolog annotation: Hit_ID=B9V0H5; Match level="QueryCoverage=98%, HitCoverage=35%, E-value=1e-101, Identity=47%"; Hit description=NBS -LRR disease resistance protein family-3
  Pfam annotation: Domain name=LRR_1; Domain location=118-143; Score =6.6; E_value=17; Accession=PF00560.25; Description=Leucine Rich Repeat
  Pfam annotation: Domain name=LRR_1; Domain location=275-298; Score =4.1; E_value=49; Accession=PF00560.25; Description=Leucine Rich Repeat
  Pfam annotation: Domain name=LRR_1; Domain location=336-360; Score =5.3; E_value=30; Accession=PF00560.25; Description=Leucine Rich Repeat
  Pfam annotation: Domain name=LRR_1; Domain location=70-92; Score =18.2; E_value=0.035; Accession=PF00560.25; Description=Leucine Rich Repeat
  Pfam annotation: Domain name=LRR_1; Domain location=94-113; Score =6.9; E_value=15; Accession=PF00560.25; Description=Leucine Rich Repeat
  Pfam module annotation: Pfam domain module=LRR_1::LRR_1::LRR_1::LRR _1::LRR_1; Domain location=118-143::275-298::336-360::70-92::94-113
LGGLTNIQYLNLSMQIGYVLGQFLEGLPEVIGNLIGLRYLGLSHTTRSIFWNSSSDELFSFIDRICTLSNLQHLDLSNNDSIVSVPESIGNLRNLHTLDLSCCSHLVRLPECLVRMDNVKILNVTGCRKLEKSALSRSKIFDLLPHFVVQADEGESSSNIGLLQYANPNELHITCLDNVKSAEEVQSIKLIXKQGINDLKLQWTSDACRSVEDMEVMASLVPPSTLREFNMTGYNNVSFPPWLINIKLYLPELSKIELWDICKCNSLPALGQLQNLRELIIGEMDSITIIEEDFCGGARAFPQLKRFCLYHMENLEAWKTMYSNGKDVEKEFMFPNLKELSINDCPKLRMEPCLPRAKKWEIENSNNVLSLCGETRATSSVAPMDVSVTVRSDK

SEQ ID NO: 90114 - protein, 86 aa, Setaria italica
  misc_feature (24)..(24): Xaa can be any naturally occurring amino acid
  misc_feature (39)..(39): Xaa can be any naturally occurring amino acid
  Transcript Sequence Number=SeqID_24140
  Subcellular localization annotation: CTP_CleavageSite=60; ConfidenceScore=5.16e-01
SPQPSEESTSRSFWISQKGEGRGXKAKPWDPGSRVSLGXMASAKSSRSRPAGHSGVFPVNAAAGSGGGDGGVQLADKLKIFKTDNF

SEQ ID NO: 90115 - protein, 86 aa, Setaria italica
  Transcript Sequence Number=SeqID_24141
  Gene Ontology: Cellular component=plasma membrane
  Homolog annotation: Hit_ID=Q9SY82; Match level="QueryCoverage=89%, HitCoverage=9%, E-value=6e-20, Identity=62%"; Hit description =F14N23.28
DEPAYMSELVTWATKQAMSFSLLVKRHALASCAAGGGLRAAAECVKIALGYSELLEARGLSLSAVLMKQFSPSVEQAYVSLGGLFS

SEQ ID NO: 90116 - protein, 74 aa, Setaria italica
  Transcript Sequence Number=SeqID_24142
MASAKSSRSRPSGHSGVFPVNAAAGSGGGDGGVQLADKLKIFKTDNFDPDAYVQSKCRSMDEKEIRHLCSYLQD

SEQ ID NO: 90117 - protein, 751 aa, Setaria italica
  misc_feature (206)..(206): Xaa can be any naturally occurring amino acid
  Transcript Sequence Number=SeqID_24143
  Gene Ontology: Cellular component=plasma membrane; Biological process= protein transport
  Homolog annotation: Hit_ID=Q9SY82; Match level="QueryCoverage=95%, HitCoverage=89%, E-value=0.0, Identity=56%"; Hit description =F14N23.28
  Pfam annotation: Domain name=Vps51; Domain location=25-111; Score =84.8; E_value=3e-22; Accession=PF08700.3; Description=Vps51Vps67
QPGVGRSRLGGGDGGVQLADKLKIFKTDNFDPDAYVQSKCRSMDEKEIRHLCSYLQDLKKASAEEMRRSVYANYAAFIRTSKEIPDLEGELLSVRNLLSTQSALIHGLSEGVQIDSLSTGHEGSAEEDISTVEDQEPSEIWKWSTDFPDMLDVLLAERRVDEALDALDEAEQIAADAKQKGTLTTADILALKRAISENRQKLADQXAEAACQSSTCGVELRTAASALKRLGDGPRAHSLLLSAHNQRLQLNMQTIQPSSTSYGGAYTASLAQLVFRVIAQALSDSAEVFGDEPAYMSELVTWATKQAMSFSLLVKRHALASCAAGGGLRAAAECVKIALGYSELLEARGLSLSAVLMKQFSPSVEQAYVSNLRRIEESTAALAAADDWVLTYPPTGIRPFARSSAGNLALQPKLSSSAHRFNSMVQDFFEDVGPLVSLQLGGSAMDGLLKIFDSYVNLLISALPGSVDDEVNLEGLGNKIVRMAEMEDQQLALLANASLLAEELLPRAAMKLYSMNPARGPDRQNRAAEQREWKRKLHRTVDKLRDSFCRQHALDLIFTDDGDTHLSAEMYINMDNTVEDPEWAPSLIFQELYGKLNKMAGIAADMFIGRERFSTLLMMRLTETVMLWLSEDQSFWEEIEEGPRALGPLGLQQFYLDMQFVILFGQGRFLSRHVHQVILNIIDRAMAAFSATGMDPDRVLPSDDWFIDVAQESISRISGKPRVANGEREVNSPTASVSAQSVSSVKSHGSS

SEQ ID NO: 90118 - protein, 76 aa, Setaria italica
  Transcript Sequence Number=SeqID_24144
  Gene Ontology: Mol. function=transferase activity, transferring glycosyl groups; Cellular component=integral to membrane; Biological process=cell wall organization and biogenesis
  Homolog annotation: Hit_ID=Q7PC69; Match level="QueryCoverage=100%, HitCoverage=11%, E-value=3e-31, Identity=84%"; Hit description =Probable xyloglucan glycosyltransferase 3
MAPPSSWWGGEEQRGTPVVVKMDNPYSLVEIDGPGMPASDKARGKNAKQFTWVLLLRAHRAVGCVAWLAAGFWGVL

SEQ ID NO: 90119 - protein, 59 aa, Setaria italica
  Transcript Sequence Number=SeqID_24145
  Subcellular localization annotation: CTP_CleavageSite=29; ConfidenceScore=5.66e-01
RSKEAPPRTSRRPPSACPAPPPSRRPATRSSRYVNVTDRSARPSRFLSRYHSNSINLLL

SEQ ID NO: 90120 - protein, 94 aa, Setaria italica
  Transcript Sequence Number=SeqID_24146
  Gene Ontology: Mol. function=metal ion binding; Cellular component =chloroplast; Biological process=metal ion transport
  Homolog annotation: Hit_ID=B9SYN0; Match level="QueryCoverage=67%, HitCoverage=21%, E-value=9e-20, Identity=76%"; Hit description =Chloroplast-targeted copper chaperone, putative
  Pfam annotation: Domain name=HMA; Domain location=32-92; Score=46.5; E_value=1e-10; Accession=PF00403.18; Description=Heavy-metal -associated domain
QGGPAKDLAAAAKRVSSAAAVAAPGDQVLQVVVMKVAIHCQGCAGKVRKHISKMEGVTSFSIDLESKKVTVMGHVSPAGVLESISKVKKAELLA

SEQ ID NO: 90121 - protein, 85 aa, Setaria italica
  Transcript Sequence Number=SeqID_24147
  Gene Ontology: Mol. function=aspartic-type endopeptidase activity; Cellular component=chromatin; Biological process=RNA-dependent DNA replication
  Homolog annotation: Hit_ID=Q8SA93; Match level="QueryCoverage=98%, HitCoverage=3%, E-value=3e-19, Identity=50%"; Hit description =Putative polyprotein
EVVLQPEVDDVHIWRFSSDGKYSTKSAYDNQFHGAVAFKSRERIWKTWAPGKCRFFMWLVVRDRCWAADRLAKRNPPHPASCPHC

SEQ ID NO: 90122 - protein, 179 aa, Setaria italica
  Transcript Sequence Number=SeqID_24148
  Gene Ontology: Mol. function=ubiquitin-protein ligase activity; Cellular component=ubiquitin ligase complex; Biological process =ubiquitin-dependent protein catabolic process
  Homolog annotation: Hit_ID=B6TC79; Match level="QueryCoverage=100%, HitCoverage=64%, E-value=1e-89, Identity=87%"; Hit description=STIP1 homology and U box-containing protein 1
  Pfam annotation: Domain name=U-box; Domain location=101-175; Score =146.5; E_value=8.5e-41; Accession=PF04564.7; Description=U-box domain
IKEFEKALNLLKSANSTDKMAEDIWQVLAKAKYLDWEKHSTERVWRIQSLKEACESALQEHHFLSGTLVEDSDGSSNEYSEQIKMLSEVFSKATLADTPVDVPDYLCCQITFEIFRDPVITPSGVTYERAVLLEHLDKVGNFDPVTREPLKEHQLVPNLAIKEAVQAYLKEHSWAYRLN

SEQ ID NO: 90123 - protein, 78 aa, Setaria italica
  Transcript Sequence Number=SeqID_24149
  Gene Ontology: Mol. function=ubiquitin-protein ligase activity; Cellular component=ubiquitin ligase complex; Biological process =ubiquitin-dependent protein catabolic process
  Homolog annotation: Hit_ID=B6TC79; Match level="QueryCoverage=98%, HitCoverage=27%, E-value=7e-38, Identity=94%"; Hit description=STIP1 homology and U box-containing protein 1
  Pfam annotation: Domain name=U-box; Domain location=2-74; Score =135.2; E_value=2.1e-37; Accession=PF04564.7; Description=U-box domain
TPDYLCCQITFEIFRDPVITPSGVTYERAVLLEHLDKVGNFDPVTREPLKEHQLVPNLAIKEAVQAYLKEHSWAYRLN

SEQ ID NO: 90124 - protein, 87 aa, Setaria italica
  Transcript Sequence Number=SeqID_24150
  Homolog annotation: Hit_ID=Q2RB27; Match level="QueryCoverage=100%, HitCoverage=14%, E-value=3e-45, Identity=95%"; Hit description=CDC45- like protein, expressed
IEIQRAILRQGSSAITKTGFIRSAKKFRWVKLDDPVDTNKLCHPQALTKFCFFLMDALKERGARMKPLICACLAKEPEKVLVVGVCG

SEQ ID NO: 90125 - protein, 137 aa, Setaria italica
  Transcript Sequence Number=SeqID_24151
  Subcellular localization annotation: CTP_CleavageSite=14; ConfidenceScore=5.42e-01
TKPTGFPPGSPCLLACYPSSLPSLGSSIRRTGPRLGVWIRQSLADAPQIRTNPSLPGALGFLLGFFFPSIHSRSHCPSVLTLVARRPHVAASLALGLDSLGACSTVSGRWSHLHAIFGVLDAQDHQELWCCCGMALL

SEQ ID NO: 90126 - protein, 125 aa, Setaria italica
  Transcript Sequence Number=SeqID_24152
  Gene Ontology: Mol. function=protein dimerization activity; Cellular component=nucleus; Biological process=regulation of transcription, DNA-dependent
  Homolog annotation: Hit_ID=Q84UA5; Match level="QueryCoverage=100%, HitCoverage=22%, E-value=3e-25, Identity=53%"; Hit description =Liguleless2-like protein
MVHGEESSWRMERAALPLNQALAYGVQAHAAAAAAPPSCFLDFQPAAAAAAYFGFGELEEALIHGGGGASANAGGGVDPGVIIKSDAPAQTKPAAAGYLAGAGGGRPPTLEIFPSWPMRHQQQLH

SEQ ID NO: 90127 - protein, 158 aa, Setaria italica
  Transcript Sequence Number=SeqID_24153
  Gene Ontology: Cellular component=integral to membrane
  Homolog annotation: Hit_ID=B6U361; Match level="QueryCoverage=96%, HitCoverage=76%, E-value=2e-48, Identity=65%"; Hit description =UPF0497 membrane protein 4
  Pfam annotation: Domain name=DUF588; Domain location=1-141; Score =87.7; E_value=4e-23; Accession=PF04535.4; Description=Domain of unknown function (DUF588)
TVSNVLAGLVVLATAKQTVLIPVPLLRTVLAMDAKFKDSPALIYLLVALCVTCLYSLLTALGSMRLISGSASAAKTVFLLLLLDVFYAAVMASATGSAGGVAWIGLKGNSHTRWAKICDTYGKFCRHIGASVFLGLVASIVLVLLAVLNAYSLYRRSR

SEQ ID NO: 90128 - protein, 92 aa, Setaria italica
  Transcript Sequence Number=SeqID_24154
  Subcellular localization annotation: CTP_CleavageSite=36; ConfidenceScore=5.29e-01
MQRAAVLRPLVGSPLLPARPLAARRRCRFRGGVRVRSATGEGGSGPGGGVGEGDGAAASWLSSAVGEKVDELLRREENRALLEGVQDAERRV

SEQ ID NO: 90129 - protein, 114 aa, Setaria italica
  misc_feature (96)..(96): Xaa can be any naturally occurring amino acid
  Transcript Sequence Number=SeqID_24155
  Gene Ontology: Cellular component=integral to membrane
  Homolog annotation: Hit_ID=B9RF35; Match level="QueryCoverage=93%, HitCoverage=25%, E-value=9e-30, Identity=57%"; Hit description =Cation:cation antiporter, putative
LPSEWNKVYICANICLCPLLLLYSFSSFIPLDTGIVFILPQIRFPIWCVVLFASFCLAISHFLLEKESPESENISSTLISFIMSVFWISTMAGELXLNCLAAIGVIMDYNTIGI

SEQ ID NO: 90130 - protein, 95 aa, Setaria italica
  Transcript Sequence Number=SeqID_24156
  Gene Ontology: Mol. function=electron carrier activity; Cellular component=extracellular region; Biological process=response to oxidative stress
  Homolog annotation: Hit_ID=A4UN76; Match level="QueryCoverage=96%, HitCoverage=28%, E-value=1e-26, Identity=61%"; Hit description =Peroxidase
  Subcellular localization annotation: CTP_CleavageSite=41; ConfidenceScore=5.27e-01
VRCLLTIAVVLAPFLAGATAGGPLSTSFYSKKCPNVQGIVRAGVASAVAAERRMGASILRMFFHDCFVNGCDGSILLDDTSTFTGEKNAGPNANS

SEQ ID NO: 90131 - protein, 62 aa, Setaria italica
  Transcript Sequence Number=SeqID_24157
  Gene Ontology: Cellular component=cytoplasm; Biological process =response to stress
  Homolog annotation: Hit_ID=B4F976; Match level="QueryCoverage=95%, HitCoverage=37%, E-value=8e-16, Identity=69%"; Hit description=17.4 kDa class I heat shock protein 3
  Pfam annotation: Domain name=HSP20; Domain location=2-61; Score=47.0; E_value=7.4e-11; Accession=PF00011.13; Description=Hsp20alpha crystallin family
SRSNDKWHRVERSSGKFLRRFRLPENAKTEQIKASMENGVLTVTVPKEEVKKPEVKPVQITG

SEQ ID NO: 90132 - protein, 156 aa, Setaria italica
  misc_feature (56)..(56): Xaa can be any naturally occurring amino acid
  Transcript Sequence Number=SeqID_24158
  Gene Ontology: Cellular component=nucleus; Biological process =response to stress
  Homolog annotation: Hit_ID=Q84Q77; Match level="QueryCoverage=100%, HitCoverage=100%, E-value=2e-47, Identity=65%"; Hit description=17.4 kDa class I heat shock protein 3
  Pfam annotation: Domain name=HSP20; Domain location=52-155; Score =148.3; E_value=2.4e-41; Accession=PF00011.13; Description=Hsp20alpha crystallin family
  Subcellular localization annotation: CTP_CleavageSite=44; ConfidenceScore=5.24e-01
MSLIRRSNVFDPFSLDWDPFQGFAFGSGSSSLFPSFASTNSETAAFAGARIDWKDXPEAHVFKADVPGLKNEEVKVEVEDGNVLQISGERNKEQEEKTDTWHRVERSSGKSCAGSGLPENAKTEQIKASMENGVLTVTVPKEEVKKPDVKSIQISG

SEQ ID NO: 90133 - protein, 160 aa, Setaria italica
  misc_feature (72)..(72): Xaa can be any naturally occurring amino acid
  Transcript Sequence Number=SeqID_24159
  Gene Ontology: Cellular component=nucleus; Biological process =response to stress
  Homolog annotation: Hit_ID=Q84Q77; Match level="QueryCoverage=100%, HitCoverage=100%, E-value=9e-49, Identity=65%"; Hit description=17.4 kDa class I heat shock protein 3
  Pfam annotation: Domain name=CS; Domain location=52-145; Score=-0.1; E_value=0.031; Accession=PF04969.8; Description=CS domain
  Pfam annotation: Domain name=HSP20; Domain location=55-159; Score =177.9; E_value=2.8e-50; Accession=PF00011.13; Description=Hsp20alpha crystallin family
  Pfam module annotation: Pfam domain module=CS::HSP20; Domain location= 52-145::55-159
  Subcellular localization annotation: CTP_CleavageSite=41; ConfidenceScore=5.12e-01
MSLIRRSNVFDPFSLDLWDPFEGFPFGSGSSSGSLFPSFPRTSSETAAFAGARIDWKETPEAHVFKADVPGXLKKEEVKVEVEDGNVLQISGERNKEQEEKTDTWHRVERSSGKFLRRFRLPENAKTEQIRASMENGVLTVTVPKEEVKKPEVKSIQISG

SEQ ID NO: 90134 - protein, 81 aa, Setaria italica
  misc_feature (19)..(19): Xaa can be any naturally occurring amino acid
  Transcript Sequence Number=SeqID_24160
  Homolog annotation: Hit_ID=B6U206; Match level="QueryCoverage=58%, HitCoverage=5%, E-value=2e-10, Identity=79%"; Hit description=NIN -like protein 1
MEEGGGDPQPSFSLQARTXSEGGAAVDLDLLEQLLSGDNGWFDVVSRSPNSLASPPPAAFFSADVTAAAVTTTSSSTQAAS

SEQ ID NO: 90135 - protein, 80 aa, Setaria italica
  Transcript Sequence Number=SeqID_24161
KISGNRFDVDNRWTMTFFLKKVDLKTSLGFLVRAAENCKRMRKRKVCFQQRGLIYLYTRLRPIIEHVLLVPASVWCVPLH

SEQ ID NO: 90136 - protein, 135 aa, Setaria italica
  Transcript Sequence Number=SeqID_24162
  Gene Ontology: Mol. function=transporter activity; Cellular component= membrane; Biological process=transport
  Homolog annotation: Hit_ID=Q9SRK7; Match level="QueryCoverage=85%, HitCoverage=20%, E-value=6e-32, Identity=56%"; Hit description =Adenine/guanine permease AZG1
AGIREGGRRVSAAITVAACFLASLFFGPLLMSVPPWAVGPSLVLVGAMMMRVAKEIEWGDMKEGVPAFVTMALMPLSFSIANGIIGGLGVYVALHWYDWARHGYGKVRNVLDERRNQVAAAAGEVGPAAAAQDAV

SEQ ID NO: 90137 - protein, 119 aa, Setaria italica
  Transcript Sequence Number=SeqID_24163
  Gene Ontology: Mol. function=cyclin-dependent protein kinase activity; Cellular component=cytoplasm; Biological process=protein amino acid phosphorylation
  Homolog annotation: Hit_ID=Q2QSL4; Match level="QueryCoverage=99%, HitCoverage=35%, E-value=9e-49, Identity=81%"; Hit description =Putative cyclin-dependent kinase F-2
  Pfam annotation: Domain name=Pkinase; Domain location=1-116; Score= -113.1; E_value=0.094; Accession=PF00069.17; Description=Protein kinase domain
GVKICDFGLSRAAADAGGAPLTPGVATLWYRAPELILGSRDYDAGVDTWALGCIMAELLAGAPLFPGRSEMDQLNRVFDTLGMQDMASWPGFARLPRAGSGLCHRARPPSRLREMFPAL

SEQ ID NO: 90138 - protein, 381 aa, Setaria italica
  Transcript Sequence Number=SeqID_24164
  Gene Ontology: Mol. function=binding; Cellular component=cytoplasm; Biological process=regulation of translation
  Homolog annotation: Hit_ID=B6TK50; Match level="QueryCoverage=97%, HitCoverage=99%, E-value=0.0, Identity=88%"; Hit description =Armadillo/beta-catenin-like repeat family protein
  Pfam annotation: Domain name=Arm; Domain location=131-172; Score =22.2; E_value=0.0022; Accession=PF00514.15; Description =Armadillobeta-catenin-like repeat
  Pfam annotation: Domain name=Arm; Domain location=216-256; Score =13.2; E_value=0.26; Accession=PF00514.15; Description=Armadillobeta -catenin-like repeat
  Pfam annotation: Domain name=Arm; Domain location=89-129; Score=4.3; E_value=3.5; Accession=PF00514.15; Description=Armadillobeta-catenin- like repeat
  Pfam annotation: Domain name=Fes1; Domain location=7-100; Score= -35.5; E_value=0.044; Accession=PF08609.2; Description=Nucleotide exchange factor Fes1
  Pfam annotation: Domain name=HEAT; Domain location=100-131; Score =2.1; E_value=27; Accession=PF02985.14; Description=HEAT repeat
  Pfam annotation: Domain name=HEAT; Domain location=142-174; Score =8.3; E_value=4.7; Accession=PF02985.14; Description=HEAT repeat
  Pfam annotation: Domain name=HEAT; Domain location=221-258; Score =10.9; E_value=2.2; Accession=PF02985.14; Description=HEAT repeat
  Pfam module annotation: Pfam domain module=Arm::Arm::Arm::Fes1::HEAT:: HEAT::HEAT; Domain location=131-172::216-256::89-129::7-100::100 -131::142-174::221-258
MAKDGAPDWNGLLKWSIAHGDGTNPPRALSEEDRKWFMEAMQANTIDVVKRMKEITQVMKTPEDVLESQGVTPENIEDMLDELQEHVESIDMANDLHSIGGLDPLLSYLKNSHAGIRARAAEVVSTIVQNNPKSQQLVMESNGLEPLLTNFKSDPSASARTKALGAISSLIRHNQPGISAFRLGNGYAGLKDALSSDDARLQRKALNLTQYLLHNNKADRSIATELGLPKLMMHLASSDDSLVREAALSGLLELAQDKTSGNTLPDQDKLKDILKSRIEGISAMDADDLHAAREERQLVDSLWKECYNEPSSLREKGLVVLPGEDAPQQPPPDVAGKMFEPPLRAWAAARPAPKDDSDTGSEKKDAPQLLLGPGPSSNSNS

SEQ ID NO: 90139 - protein, 88 aa, Setaria italica
  Transcript Sequence Number=SeqID_24165
  Gene Ontology: Mol. function=zinc ion binding; Cellular component =intracellular
  Homolog annotation: Hit_ID=B6U450; Match level="QueryCoverage=50%, HitCoverage=17%, E-value=2e-13, Identity=75%"; Hit description=Salt tolerance-like protein
  Pfam annotation: Domain name=zf-B_box; Domain location=3-40; Score =25.0; E_value=0.00031; Accession=PF00643.16; Description=B-box zinc finger
VQEKRGLLFCKEDRAILCRDCDVSVHTASELTMRHTRFLLTGVRLSAEPAACPAPPSEDENSSGSFCCGSAGDAAPPSSAPATSHGSD

SEQ ID NO: 90140 - protein, 97 aa, Setaria italica
  Transcript Sequence Number=SeqID_24166
LFFLFDQRGKLITISLLVHAHYNCPIRIHLFADSLYKLVHQTLQKQKLLSLLSTLSDSNSIIHFCYLLQHHEMPPPHIAFSSFRVGHLSVGSSRPLS

SEQ ID NO: 90141 - protein, 88 aa, Setaria italica
  Transcript Sequence Number=SeqID_24167
  Gene Ontology: Mol. function=nucleic acid binding; Cellular component= ribonucleoprotein complex; Biological process=embryonic development ending in birth or egg hatching
  Homolog annotation: Hit_ID=A8IYZ2; Match level="QueryCoverage=97%, HitCoverage=98%, E-value=3e-33, Identity=75%"; Hit description=Small nuclear ribonucleoprotein E
  Pfam annotation: Domain name=LSM; Domain location=19-85; Score=79.8; E_value=9.6e-21; Accession=PF01423.14; Description=LSM domain
MASTKVQRIMTQPINLIFRFLQSKARIQIWLFEQKDLRIEGRIIGFDEYMNLVLDDAEEINVKKNIRKSLGRILLKGDNITLMMNTGK

SEQ ID NO: 90142 - protein, 79 aa, Setaria italica
  Transcript Sequence Number=SeqID_24168
EKEEEEEVVKAAVAWTADDEHSIQSIGSLELERDARLEKLMSRRSIHRNLIDLDVHIPAVLTKNPFDLHHHHHHHCDDT

SEQ ID NO: 90143 - protein, 559 aa, Setaria italica
  Transcript Sequence Number=SeqID_24169
  Gene Ontology: Mol. function=serine-type endopeptidase activity; Cellular component=chloroplast; Biological process=proteolysis
  Homolog annotation: Hit_ID=B9S3X1; Match level="QueryCoverage=92%, HitCoverage=83%, E-value=0.0, Identity=74%"; Hit description=Serine endopeptidase degp2, putative
  Pfam annotation: Domain name=Trypsin; Domain location=73-260; Score =94.7; E_value=3.3e-25; Accession=PF00089.18; Description=Trypsin
QQPRGRRALRRFDEVEGVSKKRRGIGGGAGGAVGSQASSPRRDRGLAVDFKESQVAEFDDLEEDKFLNAVVKVYCTHIAPDYGLPWQKQRQHSSSGSAFMIGDGKLLTNAHCVEHDTQVKVKRRGDDKKYIAKVLARGIECDLALLSVENEEFWRGTEALSFGRLPCLQDSVTVVGYPLGGDTISVTKGVVSRIEVTPYAHGTSDLLGIQIDAAINPGNSGGPAFNEQGECIGVAFQVYRSDEAENIGYVIPTTVVSHFLNDFQKNGKYTGFPCLGVLLQKLENPALRESLKVPSSEGVLVRRVEPTAPASSVLRKGDVIVSFDGVAVGCEATVPFRSTERIAFRYLTSQKYAGDIAQLGIIRDGNSMKVQTILQPRKHLVPFHVEGGQPSYLIVAGLVFTPLTEPFIEEECEDTLGLKLLAKARYSLATFEGEQIVIVSQVLAHEVNIGYEHMGNQQLIKLNGTAVKNIHHLAHLVDTCKDKFLTFEFEDDFLVVLNREEATAASSDILKEHAIPSVRSSDLSEPYVETKTEVQKTSEDFGESPVTNFEMGIDCLLWA

SEQ ID NO: 90144 - protein, 46 aa, Setaria italica
  Transcript Sequence Number=SeqID_24170
AFSETILMGPCMHYGLGLHNTKISRCHEWTGSNFLLSIALLILTWY

SEQ ID NO: 90145 - protein, 302 aa, Setaria italica
  Transcript Sequence Number=SeqID_24171
  Gene Ontology: Mol. function=electron carrier activity; Biological process=response to oxidative stress
  Homolog annotation: Hit_ID=Q5U1S9; Match level="QueryCoverage=100%, HitCoverage=83%, E-value=1e-123, Identity=75%"; Hit description =Class III peroxidase 14
  Pfam annotation: Domain name=peroxidase; Domain location=1-235; Score= 352.8; E_value=6.7e-103; Accession=PF00141.15; Description=Peroxidase
AAGLIRLHFHDCFVRGCDASVLLTSPNNTAERDAAPNNPSLRGFQVIDAAKAAVEQSCPRTVSCADIVAFAARDSINLTGNLPYQVPSGRRDGNVSTNTDAVNNLPQPTFNASQLVANFAAKNLTAEEMVILSGAHTVGRSFCTSFLKRIYNQSTSAPIVDSGLSSGYAALLQALCPSNASSSTPTTTAVDPSTPAVLDNNYYKLLPLNMGLFFSDNQLRVNSTLNASVNSFAANETLWKEKFVAAMIKMGSIEVLTGSQGQIRLNCSIVNNGSSSASVAAPRIETAIYSGSTAYLDEIATS

SEQ ID NO: 90146 - protein, 121 aa, Setaria italica
  Transcript Sequence Number=SeqID_24172
  Subcellular localization annotation: CTP_CleavageSite=63; ConfidenceScore=5.10e-01
RRKRRKKGKGNDQHKNNGNAGKPTGNSNSGGRNKRTRDNDSSGGLQGQRKKACNDRSHGGPARMSEEAGDAGGGSSHARQPREAVDADSGGGSASQTEEDGDGSDSCQPWEVDSDHTSEED

SEQ ID NO: 90147 - protein, 90 aa, Setaria italica
  Transcript Sequence Number=SeqID_24173
  Gene Ontology: Mol. function=zinc ion binding; Cellular component =intracellular
  Homolog annotation: Hit_ID=B6TRZ6; Match level="QueryCoverage=100%, HitCoverage=22%, E-value=8e-15, Identity=53%"; Hit description=Zinc finger, C2H2 type family protein
VDEEMLRSCTFPEFGEDQEDEQGEEFRLDWDTSDLDDVVDDIVGMRTSLHGAAAISAFADEDITDGIFGLELKGDSMFWSSDDEEEDGYL

SEQ ID NO: 90148 - protein, 116 aa, Setaria italica
  Transcript Sequence Number=SeqID_24174
  Gene Ontology: Mol. function=nutrient reservoir activity; Cellular component=extracellular region
  Homolog annotation: Hit_ID=B6UGC5; Match level="QueryCoverage=99%, HitCoverage=50%, E-value=3e-48, Identity=82%"; Hit description =Germin-like protein subfamily 1 member 8
  Pfam annotation: Domain name=Cupin_1; Domain location=37-114; Score =2.3; E_value=0.00038; Accession=PF00190.14; Description=Cupin
GPLQDFCVADKYSPVRVNGLPCKDVKDVKVDDFFLAANLDKPGDTTKSKVKSNVTLINAMKLPGLNTLGISMARIDYAPQGQNPPHTHPRATEILTVLEGSLYVGFVTSNPDNKFF

SEQ ID NO: 90149 - protein, 724 aa, Setaria italica
  misc_feature (12)..(12): Xaa can be any naturally occurring amino acid
  misc_feature (335)..(335): Xaa can be any naturally occurring amino acid
  misc_feature (681)..(681): Xaa can be any naturally occurring amino acid
  Transcript Sequence Number=SeqID_24175
  Gene Ontology: Biological process=vesicle docking during exocytosis
TLLVQDHEEAFXKSSEKSNKYKDNISNTGNDFTTDADKYSEWGSGVHYGSNAESSPTKRNLFDSDLGQLVASGKRLSVTVSHFPMIFSPISPRTFVLPSEGIIADSSLSNQHEDSLGPGLPSISTGKPFDSDEVPPGVTLTAQFLYHLANKMDLKLDIFSLGDTSKVIGKLMMDMSSLYDVGRNKRSAGLLIVDRTVDLLTPCFHGDSFLDRMLSSLPRKEKISSSYSVAKNPQNPSKHSHTAVKRVPLDIKVPFETVFKKEEPKSRTSMLSEGIMSFMSGWNSADVDSEVTWLPDYSDKAQDDRLDSDLGTLNGSLLSNYAGVHYLEALLDRGXKDGLMLIKKWLIEALQHEKLSSASKGRQGATSVSEIRSMVQILSQDQLSLLRNRGVIQLALAAEMTLLEPQSSHWDAFTSAERILSVTSAETTQSLASELRDFINTSTSVDSHKQATTMESSQGLLSFQDVLLLTIIGYILAGENFPTSIAGGPFSWEDERSLKDVVVDSILERPSSVKLRFLDGLDNELEAKARSKDVERNNKDSTEPSSTDDFDDEWGNWDDNDNADDQKEEAYGDMQLKLEVRDRVDQLFKFFHKLSSMRLRNHALGEGLAALSRFETDGYSRKGLLYKLLLALLSRYDVPGLEYHSSAVGRLFKSGLGRFGLGQSKPSFGDQSVLILLFWGXLSTLEVREVMKAISESSRPDVESILGGTTLLTPDDMFELMLGS

SEQ ID NO: 90150 - protein, 108 aa, Setaria italica
  Transcript Sequence Number=SeqID_24176
RKKTTKNCSSSSSRRHYRNLRHPSTCMHPQDMGRFASGKPLLQKLKAGVDSSREASSEGIRQQWSITLMSYIIVASSVQGATLALLQANIPSIVVEGPLYLSAQLMNF

SEQ ID NO: 90151 - protein, 178 aa, Setaria italica
  Transcript Sequence Number=SeqID_24177
MARRSRPCGMQLAVVLALLVAGAAVVADDDEKCGNPCGNPCGVPCIYASPPPPPAPVYSPPPAPVYSPPPAPEYYPPPTPEKPGCPPPPEGGGGGYNPTPYTPGGGYNPSPYTPGGGGYNPTPSGWYTPPNQLPSYNTPPGTLYPQDPGFRPNGAPGRGAAAWRAVAAFLAVAGALAL

SEQ ID NO: 90152 - protein, 55 aa, Setaria italica
  Transcript Sequence Number=SeqID_24178
SAATAAATPWTQLLFEEPVSSTWPGSFRMRTQPEPPSSEQQPSEQSKKIDLDLRL

SEQ ID NO: 90153 - protein, 154 aa, Setaria italica
  Transcript Sequence Number=SeqID_24179
  Gene Ontology: Mol. function=catalytic activity; Biological process =guanosine tetraphosphate metabolic process
  Homolog annotation: Hit_ID=Q84KS9; Match level="QueryCoverage=94%, HitCoverage=21%, E-value=7e-37, Identity=53%"; Hit description=RelA homolog
  Pfam annotation: Domain name=RelA_SpoT; Domain location=1-51; Score= -0.6; E_value=0.0017; Accession=PF04607.9; Description=Region found in RelA  SpoT proteins
LNILLNCRYQSLHTVVLTKEMLPLEIQIRTRDMHLQAEFGIAAHWRYKEGVRNCSSSVPEMVEWVRKVVTCQCETLHIEHPSSLAPDTSPSNIHTIRSHSDVCPFSYAKQCDHSGPVLVILLEDEKMSVQELPKNSTISDLLKRSSNSGVPLRL

SEQ ID NO: 90154 - protein, 158 aa, Setaria italica
  Transcript Sequence Number=SeqID_24180
  Gene Ontology: Mol. function=catalytic activity; Biological process =guanosine tetraphosphate metabolic process
  Homolog annotation: Hit_ID=Q67UU0; Match level="QueryCoverage=85%, HitCoverage=21%, E-value=3e-23, Identity=39%"; Hit description =Putative plastid (P)ppGpp synthase
GCFVNLSSFYSCFLVNWEMVEWVRKVVTCQCETLHIEHPSSLAPDTSPSNIHTIRSHSDVCPFSYAKQCDHSGPVLVILLEDEKMSVQELPKNSTISDLLKRSSNSGVPLRLNCQAVYNWNQALKMGDVLELIPSTPCKSESYTREFHQMFDHRLPVS

SEQ ID NO: 90155 - protein, 77 aa, Setaria italica
  Transcript Sequence Number=SeqID_24181
  Subcellular localization annotation: CTP_CleavageSite=30; ConfidenceScore=5.20e-01
IFVITSSFYFVGLNPKYISIAPHHSYFLVRSCMFDKKRQTVTTTTLVVRVLVDFAVYFPKNNVLLKIELSNVQVCNS

SEQ ID NO: 90156 - protein, 79 aa, Setaria italica
  Transcript Sequence Number=SeqID_24182
GGRSDDPACHWLYDTLLSADPDLRLAALAFLPLLAALYLRRLPPELPSSLSGFEAVLLAVYSSEAKNRQGKPVLVQVPD

SEQ ID NO: 90157 - protein, 189 aa, Setaria italica
  Transcript Sequence Number=SeqID_24183
  Gene Ontology: Mol. function=nucleotidyltransferase activity; Biological process=RNA processing
  Homolog annotation: Hit_ID=Q2QX33; Match level="QueryCoverage=76%, HitCoverage=24%, E-value=3e-50, Identity=68%"; Hit description=TRNA -nucleotidyltransferase, putative, expressed
SSLESCIFYWQLGVRTIAEHRAANRRCKIPSCFKCDGQCVSHIEAAWNLASSIGSSVFSNGSDTKLQDEQRRLCLYSALFIPLRNMFYLDKRSKKVPVCSYIIKESLKLKASDAEAVVNIHAASEKFAELILLLESNDDVGTLKEKLEDEYLEIPTDSLKRVFAGLILREIKYFGGGTAYIHSVQPRSW

SEQ ID NO: 90158 - protein, 507 aa, Setaria italica
  misc_feature (152)..(152): Xaa can be any naturally occurring amino acid
  misc_feature (192)..(192): Xaa can be any naturally occurring amino acid
  Transcript Sequence Number=SeqID_24184
  Gene Ontology: Mol. function=nucleotidyltransferase activity; Cellular component=mitochondrial matrix; Biological process=RNA processing
  Homolog annotation: Hit_ID=Q2QX33; Match level="QueryCoverage=99%, HitCoverage=83%, E-value=0.0, Identity=77%"; Hit description=TRNA -nucleotidyltransferase, putative, expressed
  Pfam annotation: Domain name=PolyA_pol; Domain location=13-151; Score= 187.3; E_value=4.4e-53; Accession=PF01743.12; Description=Poly A polymerase family
LEVVRHFGLGTQLRVAGGWVRDKLLGKDSADIDIALDNMTGQNFCEKVNEYLELIGEEQKGIGVIQCNPDQSKHLETARMLILDIWIDFVNLRSEKYAENSRIPTMEVGTAEEDAYRRDLTINSLFFNINNNSVEDLTGRGIEDLKEGLIVXPLPAKATFLDDPLRVLRAIRFAARFNFTLAEDLKEAASDXEKVKSELGTKISRERIGHEIDLMMSDKHPVKAMCDIRDLGLFYVVFSFPVNSNPPVFDKCDGQCVSHIEAAWNLASSIGSSVFSNGSDTKLQDEQRRLCLYSALFIPLRNMFYLDKRSKKVPVCSYIIKESLKLKASDAEAVVNIHAASEKFAELILLLESNDDVGTLKEKLEDEYLEIPTDSLKRVFAGLILREIKDFWRVALLISILSNPEAGNAADNLNKQDELHLRKEKYIRVERAITDLDLDGVWKLKPVLDGKSIMGVLQVKSGGPLIGKWQQRALKWQLAHPNGTMDECIEWMKQSQQSKRQKVETGA

SEQ ID NO: 90159 - protein, 55 aa, Setaria italica
  Transcript Sequence Number=SeqID_24185
  Subcellular localization annotation: CTP_CleavageSite=49; ConfidenceScore=5.00e-01
SDEPLVCSARALVGSLNVLNQYHPMSASLHCIQMSCPTFTSSTSMNSIWLSMPSA

SEQ ID NO: 90160 - protein, 84 aa, Setaria italica
  Transcript Sequence Number=SeqID_24186
  Subcellular localization annotation: CTP_CleavageSite=74; ConfidenceScore=5.23e-01
IYLQVNLLNAGDTTDLVLSLGAQDRGLTATFYFKKNGSVTSTAKNCASLAVLRLQTRAICITPFYEQETLTFLRVQEKETLAFL

SEQ ID NO: 90161 - protein, 51 aa, Setaria italica
  Transcript Sequence Number=SeqID_24187
LPACCVQRFAGESATTRRAAAPFAGDGYPPGSDGVRCHGGRMLRPSGARLL

SEQ ID NO: 90162 - protein, 175 aa, Setaria italica
  misc_feature (18)..(18): Xaa can be any naturally occurring amino acid
  Transcript Sequence Number=SeqID_24188
VPGLPRFCIYEAPRDLRXPGCLDSLRAQLTGSKCRDAAKNLVKLLGPNLEDQWMQTMNLAVTNWIIELRSSNHSFGAPSPLFSHALSANGLWKVQLYCPVIAMGMEEPAEATQDERLLFSLVYQQVESVIQLAYRTVRRDNWIDVEVKVDNIRCDVDSLVSETLMAERGYGSEEK

SEQ ID NO: 90163 - protein, 102 aa, Setaria italica
  Transcript Sequence Number=SeqID_24189
  Subcellular localization annotation: CTP_CleavageSite=44; ConfidenceScore=5.27e-01
LNQSNPLELSVPRIPISRSLRHQSSARASRSLDRSGSPDPPRIPCSSISPPFHTRPAMAPPPPVTEEEDDEVEERPWPPRMKMKLAPYAMYCVFSGAGAPGA

SEQ ID NO: 90164 - protein, 117 aa, Setaria italica
  Transcript Sequence Number=SeqID_24190
EAARDAPFDPRPRALAYHLCLADGRQDESVRWSAAYRRLVPVIDGESLVPGLESDETRQLVRELLVAATLGGVCGLGHPEDRAVVMRVACGAVDQGLVAALQDKAPPATERLRLRAL

SEQ ID NO: 90165 - protein, 174 aa, Setaria italica
  Transcript Sequence Number=SeqID_24191
MAPALPRAALLLVLSLLLASAARSQEEASSPVSEPPTSAASPLPRDSVADDTESELSPISQPPTASASAPAAADAAARSSPPAPTETSPIPAPSDSPAQAPSSLPPTHPHSAAPAPAPAADKEADGRKGQGEGRRGGRPQVLRPRSGPAAEEIKAASAAAEQGSGDGEDHEDME

SEQ ID NO: 90166 - protein, 72 aa, Setaria italica
  Transcript Sequence Number=SeqID_24192
  Gene Ontology: Mol. function=translation elongation factor activity; Cellular component=cytoplasm; Biological process=translation
  Homolog annotation: Hit_ID=O23755; Match level="QueryCoverage=100%, HitCoverage=8%, E-value=9e-33, Identity=95%"; Hit description =Elongation factor 2
  Pfam annotation: Domain name=GTP_EFTU; Domain location=1-72; Score= -53.4; E_value=2.8e-05; Accession=PF00009.19; Description=Elongation factor Tu GTP binding domain
LIDSPGHVDFSSEVTAALRITDGALVVVDCIEGVSVQTETVLRQALGKRIRPVLTVNKMDRCFLELQVEGEE

SEQ ID NO: 90167 - protein, 167 aa, Setaria italica
  Transcript Sequence Number=SeqID_24193
  Gene Ontology: Cellular component=membrane
  Homolog annotation: Hit_ID=Q8RYR7; Match level="QueryCoverage=95%, HitCoverage=42%, E-value=7e-37, Identity=48%"; Hit description =Putative MtN21
MIRLTHLVFYACRKRPAPPLNFKLTAKIFAHAFYGMAGTINLYCIGLKYASATSSSAIFNIVPVVAFILAVMFRMETLKLRSVHGIAKASGILLCVGGVIVLALYEGPELKSMNRHQLLKHHTSAAAAHAHSKEEWALGIFLMTTSIVIWSFWTVKQGPLLLEYPSK

SEQ ID NO: 90168 - protein, 219 aa, Setaria italica
  misc_feature (48)..(48): Xaa can be any naturally occurring amino acid
  misc_feature (74)..(74): Xaa can be any naturally occurring amino acid
  Transcript Sequence Number=SeqID_24194
  Gene Ontology: Cellular component=membrane
  Homolog annotation: Hit_ID=B6U1N6; Match level="QueryCoverage=69%, HitCoverage=38%, E-value=2e-41, Identity=56%"; Hit description =Nodulin-like protein
  Pfam annotation: Domain name=DUF6; Domain location=33-164; Score =38.0; E_value=3.9e-08; Accession=PF00892.12; Description=Integral membrane protein DUF6
  Pfam annotation: Domain name=TPT; Domain location=24-162; Score= -35.4; E_value=0.075; Accession=PF03151.8; Description=Triose -phosphate Transporter family
  Pfam module annotation: Pfam domain module=DUF6::TPT; Domain location= 33-164::24-162
FPFRSVVYVVYFLKVGSWVVLGLFFSSMTTSIVIWSFWTVKQGPLLLXEYPSKLLNTTLQCVFASIQSFVIALXVLERDFSRWKLAGAVSLASVLFTGIVVAAISYYLQIWVIEKKGPVFLSMSMPLSLVFTMAIASFLLGEDVSLGSIIGSVLLVAGLYNVLWGKSREEKQAAGGRDSGGGGGVDGDVERNAAAVQPADGGDGGGRRRGTSDAAAAKV

SEQ ID NO: 90169 - protein, 145 aa, Setaria italica
  Transcript Sequence Number=SeqID_24195
  Gene Ontology: Cellular component=nucleus; Biological process =regulation of transcription, DNA-dependent
  Homolog annotation: Hit_ID=B6UAV5; Match level="QueryCoverage=100%, HitCoverage=28%, E-value=1e-49, Identity=72%"; Hit description =Scarecrow-like 6
LELRLTHESLTRFAADLGIRFEFSAVGFDPFDPSSRPVGVSAAPGEAVAVHLPLGSGTSTPAPATLRVVKQLRPAVVVCIDHGCHRGDLPLSHHALNVVRSSAAFLESLDAAGAPADAVAKVEQYILRPRVERLLLLGDCRMPPW

SEQ ID NO: 90170 - protein, 58 aa, Setaria italica
  Transcript Sequence Number=SeqID_24196
GIRNRVAARQGDGIWVRGIGIREVAAADAAEVGGRICRVVSSRRGGEEATGRRRSGVS

SEQ ID NO: 90171 - protein, 415 aa, Setaria italica
  misc_feature (8)..(8): Xaa can be any naturally occurring amino acid
  Transcript Sequence Number=SeqID_24197
  Gene Ontology: Mol. function=protein-glutamine gamma-glutamyltransfera se activity
  Homolog annotation: Hit_ID=B6U0E3; Match level="QueryCoverage=40%, HitCoverage=36%, E-value=6e-21, Identity=32%"; Hit description =Transglutaminase
RGRMQKLXVENDRLAVSHGSLRKELAAAQQELQRLQAQGEAAKAAEEQDMRGLLDKVGKMEAELKACESVKVELQQAHAEAQNLVAVRQNMVADVQKLSKDLQRNLGEAQQLPALVAERDAARQEYEHLRSTYEYERKLRVDHSESLQAMKRNYDSMVTELEKLRAELRNAANIDKSGIFYNPITSQKDDGTSSHLSVGQIAYDGYGRAQARTTPTGLVDPLSGSPAGTGLHSGFDPSRGNTYDASRVASFSSSKSGTHDVSRVASGFDSLKSAGYDASKAQAAATVAHGSSAGSYGSNQATPPQYAWVQSASTYGSVQMPPSYAPGSVPSSYGVATVRPYGSAQALPSYGQAQAPAGYGHTQLPSSYGLAQAPSAFAVAQGSSPYGLATQPPVYGSGRAAGNSGSNYEAPHGRK

SEQ ID NO: 90172 - protein, 118 aa, Setaria italica
  Transcript Sequence Number=SeqID_24198
RFPNYKGKIIACPSPIITGVFGIQSKQINDPAGLTMTGTEQANQHCRPAPTAEPGRPNAARGFARASSRAHPGIDQSSRSSAPPLAGRPAPGGPAPRLDSTEFLPPSPPCPGRHAGWS

SEQ ID NO: 90173 - protein, 62 aa, Setaria italica
  Transcript Sequence Number=SeqID_24199
LHQLLVKRKCFAGNFCNFPCLLVIYYAVEALGCCSLRQEWLFNGWNIAVRVTKISFFNFLFR

SEQ ID NO: 90174 - protein, 72 aa, Setaria italica
  Transcript Sequence Number=SeqID_24200
  Gene Ontology: Mol. function=drug transporter activity; Cellular component=membrane; Biological process=multidrug transport
  Homolog annotation: Hit_ID=Q10A00; Match level="QueryCoverage=98%, HitCoverage=15%, E-value=1e-18, Identity=66%"; Hit description=MATE efflux family protein, expressed
MDEGTGVEKTGGMGEVRKQLYLAGPLIVAWLLQNSVRIISLMFVGHLGELALSSASMATSFASVTGFSLVVG

SEQ ID NO: 90175 - protein, 241 aa, Setaria italica
  Transcript Sequence Number=SeqID_24201
  Gene Ontology: Mol. function=structural constituent of ribosome; Cellular component=ribonucleoprotein complex; Biological process =translation
  Homolog annotation: Hit_ID=B9RKX2; Match level="QueryCoverage=77%, HitCoverage=59%, E-value=3e-63, Identity=60%"; Hit description =Pentatricopeptide repeat-containing protein, putative
  Pfam annotation: Domain name=PPR; Domain location=106-140; Score =37.8; E_value=4.3e-08; Accession=PF01535.12; Description=PPR repeat
  Pfam annotation: Domain name=PPR; Domain location=141-175; Score =27.6; E_value=4.9e-05; Accession=PF01535.12; Description=PPR repeat
  Pfam annotation: Domain name=PPR; Domain location=176-210; Score =10.0; E_value=0.58; Accession=PF01535.12; Description=PPR repeat
  Pfam annotation: Domain name=PPR; Domain location=71-105; Score=27.6; E_value=5.2e-05; Accession=PF01535.12; Description=PPR repeat
  Pfam module annotation: Pfam domain module=PPR::PPR::PPR::PPR; Domain location=106-140::141-175::176-210::71-105
PQPQQERPERSAQKAVGETLLEKLKLGDGPSGAAATGAGAERKQPEDEPAPAQPVDVDEIFRKMKETGLIPNAVSMLDGLCKNGLVQDAMKLFGLMREKGAIPEVVIYTAVVEAFCKVAKLDDAVRIFRKMQGNGVIPNAFSYWLLIQGLYKGGRLDDAIGFCVEMFEAGLAPNAETFVGLVDAVCKKKGVDEGEKLVRSFQDRNFAIDEKSIREHLDKKGPFSPVVWEVIFGKRKSGRPF

SEQ ID NO: 90176 - protein, 86 aa, Setaria italica
  Transcript Sequence Number=SeqID_24202
  Gene Ontology: Mol. function=structural constituent of ribosome; Cellular component=intracellular; Biological process=protein modification process
  Homolog annotation: Hit_ID=O64955; Match level="QueryCoverage=73%, HitCoverage=81%, E-value=1e-27, Identity=94%"; Hit description =Polyubiquitin (Fragment)
  Pfam annotation: Domain name=ubiquitin; Domain location=32-86; Score =75.5; E_value=1.9e-19; Accession=PF00240.15; Description=Ubiquitin family
  Subcellular localization annotation: CTP_CleavageSite=40; ConfidenceScore=5.01e-01
CLSGRAQPKSKSSPSREPPRSLARFKMQIFVKTLTGKTITLEVESSDTIDNVKAKIQDKEGIPPDQQRLIFAGKQLEDGRTLADYN

SEQ ID NO: 90177 - protein, 39 aa, Setaria italica
  misc_feature (26)..(39): Xaa can be any naturally occurring amino acid
  Transcript Sequence Number=SeqID_24203
HCDLALFSINTSWAVMPAAYTKKKKXXXXXXXXXXXXXX

SEQ ID NO: 90178 - protein, 55 aa, Setaria italica
  Transcript Sequence Number=SeqID_24204
MAASTKTVAALLAAVLLALVASAAASRKLEEDAALLGNLAPAPAPAVGAAAGIAG

SEQ ID NO: 90179 - protein, 93 aa, Setaria italica
  Transcript Sequence Number=SeqID_24205
MPISSPTSSVAHLLDMVDCSFQMMKKRHKIERDLSIGEEVGWSKNQQVAKSNPTLAAMNKKFGMIHGLSSLANIMSFGSLAMHSWYLASKIEL

SEQ ID NO: 90180 - protein, 210 aa, Setaria italica
  Transcript Sequence Number=SeqID_24206
  Gene Ontology: Mol. function=protein binding; Cellular component =integral to membrane; Biological process=regulation of exocytosis
  Homolog annotation: Hit_ID=Q6GPW4; Match level="QueryCoverage=71%, HitCoverage=81%, E-value=4e-19, Identity=33%"; Hit description =Transmembrane protein 205
MGWATRFLAAVCFFAAGVLFVPEAILGSPSGAGAVTAAKLAHLLSFATSWGAALWATFIGGIIMFKNLPRHMFGNLQSKMFPAYFMLISACAAISIAAFAYLHPWKTASTVERYQLGFLLSALGCNLSNLLVFTPMTIEMMKKRHKIERDLSIGEEVGWSKNQQVAKSNPTLAAMNKKFGMIHGLSSLANIMSFGSLAMHSWYLASKIEL

SEQ ID NO: 90181 - protein, 241 aa, Setaria italica
  Transcript Sequence Number=SeqID_24207
  Gene Ontology: Mol. function=hydrolase activity, acting on glycosyl bonds; Biological process=negative regulation of translation
  Pfam annotation: Domain name=RIP; Domain location=7-241; Score=-62.2; E_value=0.0046; Accession=PF00161.11; Description=Ribosome inactivating protein
EITSEHQHEVVYTIGDDARSYRGFIMALCRILTNHPDHKDILDGSENPNLSTRQHPLLTGSRGRWLHIKLQVAGEGTSVILAIGMDDLRVHGFRNQNGYSWYRPNDLRSRKKWLLSGQILDWGYGYHSILGVNSHEEIVGKLASETQGLGKTTAVNAVRVLSRFRPHVGLDYDARVALVCLSVMFCDSAKLNPVLKHIESGWENGTGLTKELEGCIKEWNRISSALQDWKEDSYRTWMKDE

SEQ ID NO: 90182 - protein, 87 aa, Setaria italica
  Transcript Sequence Number=SeqID_24208
  Gene Ontology: Mol. function=pyridoxal phosphate binding; Cellular component=chloroplast; Biological process=cysteine biosynthetic process from serine
  Homolog annotation: Hit_ID=Q5N761; Match level="QueryCoverage=86%, HitCoverage=19%, E-value=3e-32, Identity=89%"; Hit description =Cysteine synthase
RRILLRAFGAEIVLTDATKGLKGAFDKAEEIVLRTPNAYMFQQFNNEANSEIHFQTTGPEIWEDTLGTVDILVASIGTGGTITGQQG

SEQ ID NO: 90183 - protein, 307 aa, Setaria italica
  Transcript Sequence Number=SeqID_24209
  Gene Ontology: Mol. function=transferase activity; Biological process= glutamine metabolic process
  Homolog annotation: Hit_ID=B6TR53; Match level="QueryCoverage=78%, HitCoverage=86%, E-value=1e-125, Identity=89%"; Hit description =Defense-related protein
  Pfam annotation: Domain name=GATase; Domain location=83-258; Score =3.9; E_value=4.6e-06; Accession=PF00117.20; Description=Glutamine amidotransferase class-I
  Pfam annotation: Domain name=Peptidase_C26; Domain location=74-242; Score=-62.1; E_value=2.9e-05; Accession=PF07722.5; Description =Peptidase C26
  Pfam module annotation: Pfam domain module=GATase::Peptidase_C26; Domain location=83-258::74-242
  Subcellular localization annotation: CTP_CleavageSite=43; ConfidenceScore=5.15e-01
RSHLATSESATPARSPPPPPFPGPETASPRRRQPWEWGRLESAAAAVAAVPVAAGSYAVLQCGDDSEYVRKAYNGYFQVFRALLEEDGETWRVYRALRGELPTDAEAAGFDGFVISGSCADAHGDEPWILALVDLIRRLHAAGKRILGVCFGHQLLCRALGGRTGRSTKGWDIGVSCIHPTAAAARLFAPLKLPVHMPVIEFHQDEVWELPPNAEVLARSDKTRVEMFRYGDRVMGVQGHPEYSKDILMSIADRLLQRSLILDCQVDVAKASFDVRQPDKELWKKVCRGFLKGRLQSQQEQQQVVVL

SEQ ID NO: 90184 - protein, 85 aa, Setaria italica
  Transcript Sequence Number=SeqID_24210
  Gene Ontology: Mol. function=nucleoside-triphosphatase activity; Cellular component=membrane; Biological process=transport
  Homolog annotation: Hit_ID=Q8GU84; Match level="QueryCoverage=100%, HitCoverage=5%, E-value=4e-32, Identity=77%"; Hit description=PDR -like ABC transporter
  Subcellular localization annotation: CTP_CleavageSite=62; ConfidenceScore=5.11e-01
LTVEADVVAAGRELPTLSNAATNFLQGLIGRFGSSNKRNITILKNVNGVLKPSRMTLLLGPPSSGKSTFMRALTGKLDKNLKVSG

SEQ ID NO: 90185 - protein, 39 aa, Setaria italica
  Transcript Sequence Number=SeqID_24211
VGISIAFYVCILPKCSCLSNTCSIWYLRIYIVDLIIGII

SEQ ID NO: 90186 - protein, 190 aa, Setaria italica
  Transcript Sequence Number=SeqID_24212
  Gene Ontology: Mol. function=metal ion binding
  Subcellular localization annotation: CTP_CleavageSite=77; ConfidenceScore=5.19e-01
FVQTAPLSSRTHGQKEKEVNLGIPGACSSYFTNRSTMPRNSTTGVRPAYGHANGVQRRGLKNPGCTSVPDVQPSGCSSDSVYSRRFEFMRKRASDPESSSRSRSFSGPSFSGHSPPTDIHDAGPRIRTNEQSLSQQIIRSSNRNQQESAVSVRTRRPSHATTLRAPDERADGMLSLHESSTRMGCQRSIL

SEQ ID NO: 90187 - protein, 236 aa, Setaria italica
  Transcript Sequence Number=SeqID_24213
  Gene Ontology: Mol. function=metal ion binding
RRRGSRLSYENQSPEERTNHNNDGLGSSARLNPTKAGITDNQEGPRYLRDSFKSSSSKVVPASSSKFPLRKFEEKRRQPLLAGVDIAQSGRRKAEAKQLEGSKKIVVDDESSDTLRTESEGSTTEQGRLLTPGSEGSHFTGPSGVYRNRSESFVQTAPLSSRTHGQKEKEVNLGIPGACSSYFTNRSTMPRNSTTGVRPAYGHANGVQRRGLKNPGCTSVPDVQPSGCSSDSVYSR

SEQ ID NO: 90188 - protein, 86 aa, Setaria italica
  Transcript Sequence Number=SeqID_24214
PRDRGRDDLRRRRRRRCLWLHRGRRRPLGIGMWEDGAEARGAQEDDEAEPPHERQPSAAAATHWPLFCPRLLLAARLPGGQGMQQR

SEQ ID NO: 90189 - protein, 55 aa, Setaria italica
  Transcript Sequence Number=SeqID_24215
MWTENPVVRDAGAAVLTGVAAAVVLRFWEEVANRALLDQIVAPLSSFFVMLTTLL

SEQ ID NO: 90190 - protein, 115 aa, Setaria italica
  Transcript Sequence Number=SeqID_24216
LGEMWIQVLLIVVQWLLLVVLPWAFDVNIVEFKLDDVCVVDLGMAGLCSLAYEIDPVGRSIRLYSTHEIMLLSEVELARQQAWSNRFTCKIREWLLEAHQDCTQHKFSLHSVNCD

SEQ ID NO: 90191 - protein, 112 aa, Setaria italica
  Transcript Sequence Number=SeqID_24217
  Gene Ontology: Mol. function=protein serine/threonine kinase activity; Cellular component=plasma membrane; Biological process =protein amino acid phosphorylation
  Homolog annotation: Hit_ID=Q8GX06; Match level="QueryCoverage=96%, HitCoverage=15%, E-value=8e-20, Identity=47%"; Hit description =Putative leucine-rich receptor protein kinase
NRLSGQVPVELGELTALQIALNVSHNMLSGEIPMQLGNLHMLQYLYLDNNELEGRVPSSFSELSSLLECNLSYNNLFGPLPSTPLFEHLDSSNFLGNNGLCGIKGKACPASS

SEQ ID NO: 90192 - protein, 108 aa, Setaria italica
  Transcript Sequence Number=SeqID_24218
WVRKHLKRAAMLPACSVSLICMTASALSDPADYLYIASASYAASTHGDPHFTFIPELKKRQNVLQCTVATRQLGLLRAQVQPASVSVTTRTHVVSDRIAVVFLLPGTV

SEQ ID NO: 90193 - protein, 244 aa, Setaria italica
  Transcript Sequence Number=SeqID_24219
  Gene Ontology: Mol. function=protein serine/threonine kinase activity; Cellular component=cell surface; Biological process =protein amino acid phosphorylation
  Homolog annotation: Hit_ID=B9V0L1; Match level="QueryCoverage=99%, HitCoverage=29%, E-value=1e-116, Identity=79%"; Hit description=S -domain receptor-like protein kinase
  Pfam annotation: Domain name=Pkinase; Domain location=1-222; Score =48.2; E_value=2.3e-11; Accession=PF00069.17; Description=Protein kinase domain
  Pfam annotation: Domain name=Pkinase_Tyr; Domain location=1-222; Score=-40.9; E_value=5.2e-11; Accession=PF07714.9; Description =Protein tyrosine kinase
  Pfam module annotation: Pfam domain module=Pkinase::Pkinase_Tyr; Domain location=1-222::1-222
IQHINLVKLIGFCCEGDKRLLVYEHMSNGSLDAHLFQGNAAALNWNTRYQIVLGVARGMSYLHQSCRECIIHCDIKPQNILLDGSFVPKIADFGMAAFVGRDFSRVLTTFRGTAGYLAPEWLGGVAITSKVDVYSFGMVLLGIISGKRNTPEVNSKSSYQVAFFPVQAISKLHEGDVQSLMDPQLQGDFNLEEAERVCKVGCWCIQDNELHRPTMGEVVRVLEGLQEIDMPPVPRLLAAITQGP

SEQ ID NO: 90194 - protein, 104 aa, Setaria italica
  misc_feature (49)..(49): Xaa can be any naturally occurring amino acid
  Transcript Sequence Number=SeqID_24220
  Gene Ontology: Mol. function=oxidoreductase activity, acting on other nitrogenous compounds as donors, with NAD or NADP as acceptor; Biological process=nitrate assimilation
  Homolog annotation: Hit_ID=P27968; Match level="QueryCoverage=100%, HitCoverage=11%, E-value=6e-28, Identity=67%"; Hit description =Nitrate reductase [NAD(P)H]
MAASVERHLTPHPWPSNAPPKSFDMFKPGGPGKRRTGSDSDSDDDDNIXPPDWRSLYHPRLEVEPPVHDPRDEATSDAWVRRHPALVRLTGKHPFNSEPPVPRL

SEQ ID NO: 90195 - protein, 71 aa, Setaria italica
  Transcript Sequence Number=SeqID_24221
  Homolog annotation: Hit_ID=B6UBH3; Match level="QueryCoverage=84%, HitCoverage=17%, E-value=5e-21, Identity=82%"; Hit description=Beta -1,3-galactosyltransferase 6
YPLCALPFPCCVSQTRCPDSSRPLSVSVAWDRRPGDSSAADLPAHLATGSRGRHKVMAFVGIFTGFSSIGR

SEQ ID NO: 90196 - protein, 61 aa, Setaria italica
  Transcript Sequence Number=SeqID_24222
SQGAPAVKRERFRRFPQKSCAFREKNPNAERDLVDTPSETRPPIPRRCRLPQNLFSLSRLP

SEQ ID NO: 90197 - protein, 151 aa, Setaria italica
  Transcript Sequence Number=SeqID_24223
  Gene Ontology: Mol. function=transferase activity
  Homolog annotation: Hit_ID=Q5EXL9; Match level="QueryCoverage=100%, HitCoverage=27%, E-value=2e-27, Identity=41%"; Hit description=HGA1
  Pfam annotation: Domain name=DUF563; Domain location=1-151; Score =30.6; E_value=3.1e-11; Accession=PF04577.6; Description=Protein of unknown function (DUF563)
VVCDFADPRSDVCELEGAIRIRGSTSEVFVVAPGGGGAANVTGLGAGMNATSWRIQPYTRKGEARVMRGITELTVRVVAAGEAPACTVRHDVPAVVYSNGGYCGNYYHDFNDNIIPLFITSRHLGGEVQLLVAQKQQWWFHKYREIVDGLT

SEQ ID NO: 90198 - protein, 158 aa, Setaria italica
  misc_feature (136)..(136): Xaa can be any naturally occurring amino acid
  Transcript Sequence Number=SeqID_24224
  Gene Ontology: Mol. function=transferase activity; Biological process= metabolic process
  Homolog annotation: Hit_ID=Q9SAA1; Match level="QueryCoverage=100%, HitCoverage=34%, E-value=7e-30, Identity=43%"; Hit description =F25C20.9
QRSKECYGGQTAFTLVLHCWNQDVCANTKSPHCSHGGMVMECLSGSDGKEAIAKAANLLYSASSKGCNSYTTYTRGYDKMDTVFTEAHMASALRAVGCGGPEPDLILVYGPVRCHLGFPAWRLRYTEIMHMGPLKXMKYSSIVKVLCQFAQKHQNYGT

SEQ ID NO: 90199 - protein, 263 aa, Setaria italica
  misc_feature (253)..(253): Xaa can be any naturally occurring amino acid
  Transcript Sequence Number=SeqID_24225
  Gene Ontology: Mol. function=nucleoside-triphosphatase activity
  Homolog annotation: Hit_ID=Q945C8; Match level="QueryCoverage=100%, HitCoverage=32%, E-value=1e-106, Identity=74%"; Hit description =Origin recognition complex subunit 1
  Pfam annotation: Domain name=BAH; Domain location=93-263; Score=-2.1; E_value=0.023; Accession=PF01426.10; Description=BAH domain
  Pfam annotation: Domain name=PHD; Domain location=120-167; Score =44.5; E_value=4.2e-10; Accession=PF00628.21; Description=PHD-finger
  Pfam annotation: Domain name=zf-C3HC4; Domain location=121-164; Score= 1.5; E_value=0.069; Accession=PF00097.17; Description=Zinc finger, C3HC4 type (RING finger)
  Pfam module annotation: Pfam domain module=BAH::PHD::zf-C3HC4; Domain location=93-263::120-167::121-164
  Subcellular localization annotation: CTP_CleavageSite=40; ConfidenceScore=5.83e-01
TPSKPTPRRKSKSATSPAPMSPVTPSTVRRSRRLLYTPTKAAPEVPVKATPTPAARGKRAAPSPKTPAQREPKRQRRQRRKRAYYRKVVYDGGEFEVGDDVYVKRREESESDAEDPDEEECRVCFRAGGGVMVECDACLGGFHLRCVRPPLRRVPEGDWACPYCEAERAGKAVERPRPPEGKRIVRTAKEKLLSSDLWAARIESLWREPDGTFWAKVRWYIIPEETAAGRQPHNLRRELYRTNDLGDIEMETXLRHCSVMCPK

SEQ ID NO: 90200 - protein, 176 aa, Setaria italica
  Transcript Sequence Number=SeqID_24226
  Subcellular localization annotation: CTP_CleavageSite=10; ConfidenceScore=5.18e-01
MGMAFMASGRAMTSTRPSFVTPRSFFNWGKGAGGAESPPPPQLKFQYHDVELPFPMSLVANTHLRGRELKCCYKATVDGFSATDFHRRCDFKGPCVVVGYTDGGFRFGGFSPEGYRSTDDYYDTLDAFLFYWPEAAAEAPVVLPKVGGSGAALFDYSRGGPQFGADGLLVGPPLTA

SEQ ID NO: 90201 - protein, 201 aa, Setaria italica
  Transcript Sequence Number=SeqID_24227
  Pfam annotation: Domain name=F-box; Domain location=128-175; Score =21.4; E_value=0.0038; Accession=PF00646.25; Description=F-box domain
IKAGNTKTLCAGAATSHSHGRDYSCERNMKTPPAGAGVAASCSHEEDSSCERNMKTPPADAGVATSPLRKDSSDQPLYGADDGGYSSVPSMKPPTSSENGIPAAKRCRVADVNALVQHKEVPPITRRGPSVNLNVDVLMEIFARLQPDVLLRMATACSFFREVIRSSDFRHCYRSNQKGKMLGFLYERKRDVGKTRVMYPY

SEQ ID NO: 90202 - protein, 117 aa, Setaria italica
  Transcript Sequence Number=SeqID_24228
  Gene Ontology: Mol. function=transporter activity; Cellular component= integral to membrane; Biological process=RNA metabolic process
  Homolog annotation: Hit_ID=Q53Q54; Match level="QueryCoverage=70%, HitCoverage=7%, E-value=9e-23, Identity=64%"; Hit description=Major Facilitator Superfamily protein, expressed
MYKLMDILLMTSLELTPLFVTFLSFCVYSQTLRRISYVAFFYKLGMIAISDVLMYYLKSVFGFDKDQFSVIQLRLCGNVFKLQILILPFLSHIIGEKGVLCISILASIAYVSSKLFN

SEQ ID NO: 90203 - protein, 341 aa, Setaria italica
  Transcript Sequence Number=SeqID_24229
  Gene Ontology: Mol. function=transporter activity; Cellular component= integral to membrane; Biological process=RNA metabolic process
  Homolog annotation: Hit_ID=Q53Q54; Match level="QueryCoverage=94%, HitCoverage=28%, E-value=1e-124, Identity=67%"; Hit description =Major Facilitator Superfamily protein, expressed
VIGDVFVWLFANNRQGTIFCLSIAYTADAVEPSRRAAAFGFMTGIFSASHTLGSVFSRFLPEKLIFEVSIALLICSILYMKIYLIETVQKAPSTSSHHSSMSALLAKLPQQRWESIKENISIVKNSQTLRRISYVAFFYKLGMIAISDVLMYYLKSVFGFDKDQFSEILMVVGVGSIFSQILILPFLSHIIGEKGVLCISILASIAYALLYGVAWASWVPYFSSSLGVIYVLAKPAIYAIISGEVLSTDQGKAQGFIATVQSVAILLAPLFMSPLTSYFISPEAPFDCKGFSFIVASFFLAISFCLAWTLNPESKDDKRRKLVVSDEEAVQAPLLAHRPKP

SEQ ID NO: 90204 - protein, 401 aa, Setaria italica
  Transcript Sequence Number=SeqID_24230
  Gene Ontology: Mol. function=protein serine/threonine kinase activity; Cellular component=integral to membrane; Biological process=protein amino acid phosphorylation
  Homolog annotation: Hit_ID=Q2L3U3; Match level="QueryCoverage=100%, HitCoverage=72%, E-value=1e-145, Identity=44%"; Hit description =CLAVATA-like kinase
  Pfam annotation: Domain name=LRR_1; Domain location=106-128; Score =16.8; E_value=0.089; Accession=PF00560.25; Description=Leucine Rich Repeat
  Pfam annotation: Domain name=LRR_1; Domain location=12-34; Score =13.3; E_value=0.87; Accession=PF00560.25; Description=Leucine Rich Repeat
  Pfam annotation: Domain name=LRR_1; Domain location=130-153; Score =2.8; E_value=88; Accession=PF00560.25; Description=Leucine Rich Repeat
  Pfam annotation: Domain name=LRR_1; Domain location=155-176; Score =12.5; E_value=1.2; Accession=PF00560.25; Description=Leucine Rich Repeat
  Pfam annotation: Domain name=LRR_1; Domain location=178-199; Score =10.4; E_value=3.1; Accession=PF00560.25; Description=Leucine Rich Repeat
  Pfam annotation: Domain name=LRR_1; Domain location=36-55; Score=8.8; E_value=6.4; Accession=PF00560.25; Description=Leucine Rich Repeat
  Pfam annotation: Domain name=LRR_1; Domain location=58-80; Score =13.1; E_value=0.94; Accession=PF00560.25; Description=Leucine Rich Repeat
  Pfam annotation: Domain name=LRR_1; Domain location=82-104; Score =13.5; E_value=0.78; Accession=PF00560.25; Description=Leucine Rich Repeat
  Pfam module annotation: Pfam domain module=LRR_1::LRR_1::LRR_1::LRR _1::LRR_1::LRR_1::LRR_1::LRR_1; Domain location=106-128::12-34::130 -153::155-176::178-199::36-55::58-80::82-104
GTIPAEIGRLKNLNFLDLGSNRLVGPLPAALSGCDNLEFMDLHSNALSGALPDELPRSLQFVDISDNKLTGLLGPGIGLLPELTKLNLGKNRISGGIPPELGSCEKLQLLDLGDNALSGGIPPELGKLPSLEISLNLSCNRLSGEIPSQFGDLDKLGSLDISYNQLSGSLAPLARLENLVMLNISYNAFSGELPDTPFFQKLPLSDIAGNHLLVVGAGADEASRHAAISALKVAMTILAVVSALLLLAATYVLARSRRRDGAIHGADETWEVTLYQKLDFSVDEVVRALTSANVIGTGSSGVVYRVGLPNGDSLAVKKMWSSDEAGAFRNEITALGSIRHRNIVRLLGWGANRSTKLLFYTYLPNGSLSGFLHRGGVKGAADWGPRYEIALGVAHAVAYLH

SEQ ID NO: 90205 - protein, 158 aa, Setaria italica
  Transcript Sequence Number=SeqID_24231
  Gene Ontology: Mol. function=nucleic acid binding; Cellular component= mitochondrial matrix
  Homolog annotation: Hit_ID=Q7X745; Match level="QueryCoverage=100%, HitCoverage=21%, E-value=1e-87, Identity=97%"; Hit description =OSJNBa0072F16.4 protein
NHVACTIEMVSTEELYEVAVVDEIQMMADPVRGFAWTRAVLGLKADEIHLCGDPSVLKIVRKICADTGDDLEVHQYERFKPLVVEAKTLLGDLKNVRSGDCIVAFSRREIFEVRLAIEKFTKHKCCVIYGALPPETRRQQAKLFNEQDNEYDVLVASD

SEQ ID NO: 90206 - protein, 83 aa, Setaria italica
  Transcript Sequence Number=SeqID_24232
  Gene Ontology: Mol. function=electron carrier activity; Biological process=oxidation reduction
  Homolog annotation: Hit_ID=B6TZP1; Match level="QueryCoverage=100%, HitCoverage=15%, E-value=2e-28, Identity=83%"; Hit description=Trans- cinnamate 4-monooxygenase
GDHWRRMRRVMTLPFFTARVVQQYRGMWEAEMDAVVADISADRAVAQTAGFVVRRRLQLMLYNIMYRMMFDARFDSVDDPMFV

SEQ ID NO: 90207 - protein, 49 aa, Setaria italica
  Transcript Sequence Number=SeqID_24233
IRFKLTCNPRSSAYIRRPRATPEGNRIQSVNHALAQSNTNHQITKYVKK

SEQ ID NO: 90208 - protein, 121 aa, Setaria italica
  Transcript Sequence Number=SeqID_24234
ERQTEEQEERTHPPSRPHGCCVLPLSLSLGVVDSSPLVLEVAELLKAALGAAVTQLHASCSLPPLLVEVAVAEGTVTTVMCCFFLPCQVDKDAPLGKNGWIGASQHLFWAWVLDHRSLSNE

SEQ ID NO: 90209 - protein, 44 aa, Setaria italica
  Transcript Sequence Number=SeqID_24235
DTSLHSFIEKSDQGTSLGCIAWKIIWNGVISLVCGQNVIVLLDK

SEQ ID NO: 90210 - protein, 129 aa, Setaria italica
  Transcript Sequence Number=SeqID_24236
GAARPVVVRKSESWGNEELPRLKRVAETAATTARREMRKSVSAVSKASVPPPPPQPAAPSAVRQLGWRTRDVLVAITPDELLRRAESFIRRQHEHLRLQRQESEQRQLQLQRRLHAPRPHPRLDDDGAA

SEQ ID NO: 90211 - protein, 129 aa, Setaria italica
  Transcript Sequence Number=SeqID_24237
MPTLRRRNPDVHVKALEGIVSANTFFTVAVFIGITGTITPSAAIPPACVAGDDIARNFFLFEILSFGFYLLSSLVAQGMKLAVTLLAADDFYGDGDQKPPPSDDCEEMPAWRAAGPRERRRAVLRFAQP

SEQ ID NO: 90212 - protein, 130 aa, Setaria italica
  misc_feature (6)..(6): Xaa can be any naturally occurring amino acid
  Transcript Sequence Number=SeqID_24238
  Homolog annotation: Hit_ID=Q10PD9; Match level="QueryCoverage=83%, HitCoverage=25%, E-value=5e-14, Identity=43%"; Hit description =Microtubule associated protein family protein, putative, expressed
GGGRGXDPGGCGVLLAELKQLWGEIGKSREERERMVRDLEAECMRVYRRKVDEATGERALLHQSLAAGEAEIAALTAALGADNSPQLKVNKWTMSLTERVSSATSLLEELEGDKAERSRQFADIRLGNRE

SEQ ID NO: 90213 - protein, 120 aa, Setaria italica
  misc_feature (21)..(21): Xaa can be any naturally occurring amino acid
  Transcript Sequence Number=SeqID_24239
  Gene Ontology: Mol. function=oxidoreductase activity; Biological process=oxidation reduction
  Homolog annotation: Hit_ID=B6TCN8; Match level="QueryCoverage=99%, HitCoverage=33%, E-value=1e-52, Identity=84%"; Hit description =NAD(P)H-dependent oxidoreductase
VCKDKSIQVAAYSPLGGQRIXKMNPVRQSDVLEEIGRTRGKSVAQISLRWIYEQGASMVVKSLKRERLKENIEIFDWELSDGDRSKIGQIPQRKLITVQNLLCPEGISSVDISDVDVFEM

SEQ ID NO: 90214 - protein, 73 aa, Setaria italica
  Transcript Sequence Number=SeqID_24240
  Gene Ontology: Mol. function=hydrolase activity, acting on glycosyl bonds; Cellular component=extracellular region; Biological process =cell wall catabolic process
  Homolog annotation: Hit_ID=B6TR38; Match level="QueryCoverage=95%, HitCoverage=20%, E-value=9e-24, Identity=75%"; Hit description=Basic endochitinase A
  Pfam annotation: Domain name=Glyco_hydro_19; Domain location=2-73; Score=-50.5; E_value=2.2e-05; Accession=PF00182.11; Description =Chitinase class I
SVSNYNYGPAGRVIGVDLLNNPDLEATDAVVSFKMALWFWMTPRDNKPSCHAVITGQWTPTDADRAAGRGAPG

SEQ ID NO: 90215 - protein, 61 aa, Setaria italica
  Transcript Sequence Number=SeqID_24241
MNMTSPRLKLFGFHVSEEEHELGAPETEAEAEQEEAPACGNGGGGGGGGSDSSSSSTTTTT

SEQ ID NO: 90216 - protein, 111 aa, Setaria italica
  misc_feature (86)..(86): Xaa can be any naturally occurring amino acid
  Transcript Sequence Number=SeqID_24242
  Gene Ontology: Mol. function=hydrolase activity, acting on ester bonds; Biological process=lipid metabolic process
  Homolog annotation: Hit_ID=Q672R1; Match level="QueryCoverage=97%, HitCoverage=29%, E-value=3e-26, Identity=51%"; Hit description =Lipase 1
STLVVPGAIPSGCSPPVFTMFPDATPAEYDSRTGCLKAQNELGRHHNALLQASLKKLRAKHPHARIIYADFFGPVMEMVESPRKFXDDVLTVCCGGPGRNNYNGSVYCGDS

SEQ ID NO: 90217 - protein, 156 aa, Setaria italica
  Transcript Sequence Number=SeqID_24243
  Gene Ontology: Mol. function=zinc ion binding; Cellular component =COPII vesicle coat; Biological process=ER to Golgi vesicle-mediated transport
  Homolog annotation: Hit_ID=Q2R4A0; Match level="QueryCoverage=98%, HitCoverage=19%, E-value=5e-46, Identity=59%"; Hit description =Protein transport protein Sec24-like CEF, putative, expressed
  Pfam annotation: Domain name=Sec23_helical; Domain location=4-105; Score=117.0; E_value=6.2e-32; Accession=PF04815.7; Description =Sec23Sec24 helical domain
YADLETQFTYVVKQAANGIPSVPLSQVRDQVTSTCINILQSYRKYCASVSSSGQLILPEALKLLPLYTLALTKSVGLRNDGRLDDRSYWASIVSSISVLLAIPLVFPRMIALHVLTSRDDDDSLIPSPLTLNSENIHDDGVYLLENGEDGFYFIVR

SEQ ID NO: 90218 - protein, 153 aa, Setaria italica
  Transcript Sequence Number=SeqID_24244
  Gene Ontology: Mol. function=zinc ion binding; Cellular component =COPII vesicle coat; Biological process=ER to Golgi vesicle-mediated transport
  Homolog annotation: Hit_ID=Q2R4A0; Match level="QueryCoverage=99%, HitCoverage=18%, E-value=1e-70, Identity=87%"; Hit description =Protein transport protein Sec24-like CEF, putative, expressed
  Pfam annotation: Domain name=Sec23_trunk; Domain location=1-153; Score=69.3; E_value=1.4e-17; Accession=PF04811.7; Description =Sec23Sec24 trunk domain
RAQQQPLMLIVPDVQDVYTPLQTDLILPVSECRENLEQLLESIPNMFENNRVADSAFGAAMKAGFLAIKSTGGKLLVFQSVLPSLGVGSLSAREAEGRANVTTGDKEAHKLLQPVDNTLKTMALEFAEYQVSVDVFLTTQSYVDIASISVVPQ

SEQ ID NO: 90219 - protein, 106 aa, Setaria italica
  misc_feature (19)..(19): Xaa can be any naturally occurring amino acid
  Transcript Sequence Number=SeqID_24245
  Gene Ontology: Mol. function=zinc ion binding; Cellular component =COPII vesicle coat; Biological process=ER to Golgi vesicle-mediated transport
  Homolog annotation: Hit_ID=Q2QSF9; Match level="QueryCoverage=100%, HitCoverage=9%, E-value=6e-52, Identity=90%"; Hit description =Retrotransposon protein, putative, unclassified, expressed
GEDGFIYVGNSVNPVTLEXFGVSSLAGVPNQLVLEPFDNELSRKVNEVVNEIRRQRCSYLRLRLCKKGDPSGDFFRSLLVEDKAPGGVSYVEFLVHVHRQIQNKMT

SEQ ID NO: 90220 - protein, 157 aa, Setaria italica
  Transcript Sequence Number=SeqID_24246
  Gene Ontology: Mol. function=protein dimerization activity; Cellular component=nucleus; Biological process=regulation of transcription, DNA-dependent
  Homolog annotation: Hit_ID=B4Y1F0; Match level="QueryCoverage=88%, HitCoverage=98%, E-value=1e-17, Identity=45%"; Hit description=FD -like 15 protein
  Pfam annotation: Domain name=bZIP_1; Domain location=83-146; Score =59.1; E_value=1.7e-14; Accession=PF00170.13; Description=bZIP transcription factor
  Pfam annotation: Domain name=bZIP_2; Domain location=83-137; Score =35.3; E_value=2.5e-07; Accession=PF07716.7; Description=Basic region leucine zipper
  Pfam module annotation: Pfam domain module=bZIP_1::bZIP_2; Domain location=83-146::83-137
MAANYHHYQMAVAAAAAAWREPDSPQLSFVSGCSSLFSISTLQDDDDGAVVIAGHALPSTPVSLAGFAGDEVDMEVQQVSGGSGDDRRTIRMMRNRESALRSRARKRAYVENLEKEVRRLVDENLKLKKQCKELKLEVAALVLPTKSSLRRTSSTQF

SEQ ID NO: 90221 - protein, 51 aa, Setaria italica
  Transcript Sequence Number=SeqID_24247
ERSAQRSTSHVPHFGIGQEIPKRSFHGLKRISHKDFDHASGNHHVFVLCVK

SEQ ID NO: 90222 - protein, 308 aa, Setaria italica
  misc_feature (269)..(269): Xaa can be any naturally occurring amino acid
  Transcript Sequence Number=SeqID_24248
  Gene Ontology: Mol. function=acid-amino acid ligase activity; Cellular component=intracellular; Biological process=ubiquitin -dependent protein catabolic process
  Homolog annotation: Hit_ID=Q2L3D3; Match level="QueryCoverage=100%, HitCoverage=35%, E-value=8e-67, Identity=45%"; Hit description =Polyubiquitin-like protein
  Pfam annotation: Domain name=HECT; Domain location=169-308; Score= -92.0; E_value=3.2e-05; Accession=PF00632.17; Description=HECT-domain (ubiquitin-transferase)
RSVKDCMARFEMSLPPAPPPGHRHTSSSSALPKWTASLHSVWAVLAELDDWPDLHHAMRATLAAHARAVTALVLSAGSEFIENIRWITRHRDLLEFDARRHLAMAMLPELVRGTDARPPYELLVDRARLLPDSFGYIVHATPQELGAAMSVAFKHEQATGPGVLREWFCLVCQALFNPRVVLFSACPHDRRRFFINPSELLLALHLEYFEFAGRMIALALRHKIHVGVYFDRTLFLQLAGRPITLEDIADTDPSLHASCKKILEMDPGXVDSNTLELTFVREDEVLGSRTVTELFPGGKDIAVTSENR

SEQ ID NO: 90223 - protein, 522 aa, Setaria italica
  Transcript Sequence Number=SeqID_24249
  Gene Ontology: Mol. function=transferase activity, transferring groups other than amino-acyl groups; Cellular component=membrane; Biological process=fatty acid biosynthetic process
  Homolog annotation: Hit_ID=B6U281; Match level="QueryCoverage=95%, HitCoverage=96%, E-value=0.0, Identity=84%"; Hit description=Fatty acid elongase
  Pfam annotation: Domain name=ACP_syn_III_C; Domain location=405-489; Score=1.3; E_value=1.2e-05; Accession=PF08541.2; Description=3 -Oxoacyl-[acyl-carrier-protein (ACP)
  Pfam annotation: Domain name=Chal_sti_synt_C; Domain location=348 -491; Score=17.0; E_value=7.6e-05; Accession=PF02797.7; Description =Chalcone and stilbene synthases, C-te
  Pfam annotation: Domain name=FAE1_CUT1_RppA; Domain location=102-391; Score=803.9; E_value=1.1e-238; Accession=PF08392.4; Description =FAE1Type III polyketide synthase-like
  Pfam module annotation: Pfam domain module=ACP_syn_III_C::Chal_sti _synt_C::FAE1_CUT1_RppA; Domain location=405-489::348-491::102-391
MGTSAAEPNAAPAPPAPEPARPRPGRLPDFQQSVRLKYVKLGYHYLISHGMYLLLSPLMALVAVQLSTVSPRDLADLWEQLRFNLLSVVACSTLLVFLSTVYFLTRPRPVYLLDFACYKPEPERKCTRETFMHCSKLTGSFTDENLEFQRKILERSGLGEDTYLPPAVLRVPPNPCMDEARNEARAVMFGAIDQLLEKTGVRPKDIGVLVVNCSLFNPTPSLSAMVVNHYKLRGNIVSYNLGGMGCSAGLLSIDLAKDLLQVHPNSYALVISMENITLNWYFGNNRSMLVSNCLFRMGGAAILLSNKRSDRRRSKYELVHTVRTHKGADDKCFGCVTQEEDEIGKIGVSLSKDLMAVAGDALKTNITTLGPLVLPLSEQLLFMATLVAKKVLKMKIKPYIPDFKLAFEHFCIHAGGRAVLDELEKNLELTDWHMEPSRMTLYRFGNTSSSSLWYELAYSEAKGRIRKRDRIWQIAFGSGFKCNSAVWKALRTVNPTKEKSPWMDEIDNFPVDVPKISKVGNA

SEQ ID NO: 90224 - protein, 82 aa, Setaria italica
  Transcript Sequence Number=SeqID_24250
  Gene Ontology: Mol. function=transporter activity; Cellular component= integral to membrane; Biological process=transport
  Homolog annotation: Hit_ID=B9SGI0; Match level="QueryCoverage=97%, HitCoverage=16%, E-value=5e-28, Identity=76%"; Hit description =Carbohydrate transporter, putative
SIASPLAGVLALHYDRPAVLALGTAFWALSTGAVGVSQYFGQVAFWRAVNGFGLAIVIPALQSFIADSYKDGTRGAGFGLLA

SEQ ID NO: 90225 - protein, 81 aa, Setaria italica
  Transcript Sequence Number=SeqID_24251
  Gene Ontology: Mol. function=electron carrier activity; Cellular component=endoplasmic reticulum membrane; Biological process =oxidation reduction
  Homolog annotation: Hit_ID=A7U1X5; Match level="QueryCoverage=93%, HitCoverage=14%, E-value=3e-21, Identity=59%"; Hit description=P450
VEFLSARRVQASWYAREAEVEKLVGRLSSAGGAPVFLEDHIFGLMDGVIGTVAFGNIYGTEQFAHRKHFHDVLDEAMSAKA

SEQ ID NO: 90226 - protein, 226 aa, Setaria italica
  Transcript Sequence Number=SeqID_24252
  Gene Ontology: Mol. function=4-hydroxyphenylacetaldehyde oxime monooxygenase activity; Cellular component=endoplasmic reticulum membrane; Biological process=oxidation reduction
  Homolog annotation: Hit_ID=O48958; Match level="QueryCoverage=100%, HitCoverage=42%, E-value=8e-99, Identity=73%"; Hit description=4 -hydroxyphenylacetaldehyde oxime monooxygenase
AAAAREVMKEHDIDCCSRPVSPGPKRISYGLNDVIFAPYGEQWREMRKLFIVELLSMRRVQAASYAREQQLDRLIADLSRAGAEAAPVALNEHIFGLADGIVGTVAFGNIYGTERFAHRERFHHVMDEAVDMMASFSAEDFFPNAAGRLVDRVTGLVARRERIFRELDAFFETVIDQHTDPARVVPENGGDLVDVLVSLWKENRGTLRFTRDHVKALIMNTFIGGI

SEQ ID NO: 90227 - protein, 263 aa, Setaria italica
  Transcript Sequence Number=SeqID_24253
  Gene Ontology: Mol. function=4-hydroxyphenylacetaldehyde oxime monooxygenase activity; Cellular component=endoplasmic reticulum membrane; Biological process=oxidation reduction
  Homolog annotation: Hit_ID=O48958; Match level="QueryCoverage=98%, HitCoverage=48%, E-value=1e-116, Identity=76%"; Hit description=4 -hydroxyphenylacetaldehyde oxime monooxygenase
  Pfam annotation: Domain name=p450; Domain location=1-252; Score= -69.4; E_value=2.6e-08; Accession=PF00067.14; Description=Cytochrome P450
GSFDAFFETVIDQHTDPARVVPENGGDLVDVLVSLWKENRGTLRFTRDHVKALIMNTFIGGIDTSSVTVLWAMSELIRKPRALKKAQDEVRAVVGNKPRVEPDDVPKLPYLKMVVKETLRLHPPATLLVPRETVRDVKIGGYDVPARTRVFVNAWAIGRDPASWADAEEFHPDRFEGSDVDYNGGHFELVPFGAGRRICPGLAMGETNVSFTLANLLYCFDWALPEGMAAEDVSMEEAGGLTFHQKMPLVLVPTRYHNRTATA

SEQ ID NO: 90228 - protein, 192 aa, Setaria italica
  misc_feature (178)..(178): Xaa can be any naturally occurring amino acid
  Transcript Sequence Number=SeqID_24254
  Gene Ontology: Mol. function=transcription regulator activity; Cellular component=nucleus; Biological process=regulation of transcription
  Homolog annotation: Hit_ID=B6T4L8; Match level="QueryCoverage=100%, HitCoverage=70%, E-value=7e-71, Identity=70%"; Hit description =Amelogenin like protein
  Pfam annotation: Domain name=HLH; Domain location=37-87; Score=11.4; E_value=0.011; Accession=PF00010.18; Description=Helix-loop-helix DNA-binding domain
MVPSERGSVATAVSTAAADKLLHGPIAGKKCKKAAPRKVHKAEREKLKRDHLNDLFVELGNMLEADRQNNGKACILTDTTRILRDLLLQVESLRKEHSNLQNESHYVAIERNELQDENGVLRKEISELQDELRMRTSSNPADWGHGNAGLNPPVPHPASAVFSSQQAMQPPTIASTVXFPLQPPLAPSAVIE

SEQ ID NO: 90229 - protein, 160 aa, Setaria italica
  misc_feature (130)..(130): Xaa can be any naturally occurring amino acid
  misc_feature (142)..(142): Xaa can be any naturally occurring amino acid
  Transcript Sequence Number=SeqID_24255
  Gene Ontology: Mol. function=protein dimerization activity; Cellular component=nucleus; Biological process=regulation of transcription, DNA-dependent
MAYPSTSGMVQASSSLHGSIRRDPEGYDMPSDLDQALLLYFDGQQAKPSIQEQPQTLNIFPSQPMHIEPSPKGSISMASSAAAAQVAGPSKNSQAPPSKAGGGPLAAGKSSKGAIKREGSAGGGKRGGAXGSSSDQGGGPRXPDPKTLRRLAQNREAARK

SEQ ID NO: 90230 - protein, 63 aa, Setaria italica
  Transcript Sequence Number=SeqID_24256
YVTVLQNYRVLGHTLTIQYRCACLCMGLGVMMSRRSKWRAAEAALPMACAWLLLCVGCAVAVD

SEQ ID NO: 90231 - protein, 295 aa, Setaria italica
  Transcript Sequence Number=SeqID_24257
  Gene Ontology: Mol. function=protein serine/threonine kinase activity; Cellular component=plasma membrane; Biological process =protein amino acid phosphorylation
  Homolog annotation: Hit_ID=Q10P10; Match level="QueryCoverage=94%, HitCoverage=41%, E-value=2e-93, Identity=64%"; Hit description =Protein kinase domain containing protein, expressed
GRQDNGAPNSGVKDYVMEWIRSEIKKERPKGDWIAGTAVTNPVAERKKSKRRAREWWREDYVDELAKKQKRRALAKSKSQQVGLQWWERDIDDDLDEKGQSKWNLVKSWSRRSSNSTSNGNGSINWWVNGARSSRDWASGELIPKSGGTVSSTPSMRGTVCYVAPEYGGGGPLSEKCDIYSYGVLLLVLISGRRPLQVMASPMSEFEKASLISWARHLARASRLLDLVDPALCDVNRDEALLCITVALLCIQRSPARRPSSEEVLQMLSCEGELPNLPLEFSPSPPGGFPFQSSR

SEQ ID NO: 90232 - protein, 562 aa, Setaria italica
  Transcript Sequence Number=SeqID_24258
  Gene Ontology: Cellular component=plasma membrane
  Homolog annotation: Hit_ID=B6U178; Match level="QueryCoverage=100%, HitCoverage=100%, E-value=0.0, Identity=76%"; Hit description =Protein binding protein
  Pfam annotation: Domain name=Ank; Domain location=122-154; Score =18.7; E_value=0.025; Accession=PF00023.22; Description=Ankyrin repeat
  Pfam annotation: Domain name=Ank; Domain location=156-188; Score =12.8; E_value=0.52; Accession=PF00023.22; Description=Ankyrin repeat
  Pfam annotation: Domain name=Ank; Domain location=190-222; Score =29.4; E_value=1.5e-05; Accession=PF00023.22; Description=Ankyrin repeat
  Pfam annotation: Domain name=Ank; Domain location=224-256; Score =22.2; E_value=0.0021; Accession=PF00023.22; Description=Ankyrin repeat
  Pfam annotation: Domain name=Ank; Domain location=258-291; Score =26.3; E_value=0.00012; Accession=PF00023.22; Description=Ankyrin repeat
  Pfam annotation: Domain name=Ank; Domain location=48-79; Score=8.9; E_ value=1.9; Accession=PF00023.22; Description=Ankyrin repeat
  Pfam annotation: Domain name=Ank; Domain location=87-118; Score=14.8; E_value=0.27; Accession=PF00023.22; Description=Ankyrin repeat
  Pfam module annotation: Pfam domain module=Ank::Ank::Ank::Ank::Ank::An k::Ank; Domain location=122-154::156-188::190-222::224-256::258 -291::48-79::87-118
MEKQSSTRHGPLEKLKSFRGIEKQRSFKFLSMEKQQSFKRNKDSPGKRGDTELHLAARAGNVAHVQKILAECDPELVAELAARPNQDGETALYVSAEKGHIEVVCEILKACDVQSAGIKASNSFDAFHIAAKQGHLDVLKELLQAFPALAMTTNSVNATALDTAATQGHIDIVNLLLETDASLARIARNNGKTVLHSAARMGHVEVVTALLNKDPGIGFRTDKKGQTALHMASKGQNAEILLELLKPDVSVIHVEDSKGNRPLHVATRKGNTIMVQTLISVEGIEINAVNRAGETAFAIAEKQGNEELINILKEVGGVTAKEQVNPPNPAKQLKQTVSDIRHDVQSQIKQTRQTKMQFQKIKKRIQKLHIGGLNNAINSNTVVAVLIATVAFAAIFQLPGNFLESMPPQPDPNLTLGQALIASDPAFIIFLVFDALALFISLAVVVVQTSLIVVEQKAKKKMVFVINKLMWLACLCISAAFIALTYVVVGRDDEWLAWCTMAIGTVIMVATLGSMCYCIVTHRMEEKSMRKIRRTSTSQSWSISIDSETELMNSEYKKMYAL

SEQ ID NO: 90233 - protein, 100 aa, Setaria italica
  Transcript Sequence Number=SeqID_24259
  Gene Ontology: Cellular component=membrane
  Homolog annotation: Hit_ID=A9S0N5; Match level="QueryCoverage=92%, HitCoverage=15%, E-value=2e-14, Identity=43%"; Hit description=MscS -Like mechanosensitive ion channel MSCL14
GALRSKIKGYLESKPTHWHPVHTVNLKDILDVNKINMSLSVQHTMNFQNIREKNIRRSELVMELKKMFEEMSIRYHLLPQKVELTYVGPNPLPMAVAQAR

SEQ ID NO: 90234 - protein, 208 aa, Setaria italica
  Transcript Sequence Number=SeqID_24260
  Gene Ontology: Cellular component=membrane
  Homolog annotation: Hit_ID=Q9LPG3; Match level="QueryCoverage=100%, HitCoverage=23%, E-value=7e-51, Identity=49%"; Hit description =T3F20.21 protein
  Pfam annotation: Domain name=MS_channel; Domain location=19-207; Score=-3.3; E_value=1e-05; Accession=PF00924.10; Description =Mechanosensitive ion channel
RKSLAHSLNDTKTAVMQLHNLISVIVVIIIIIITLLLMGIATTKILVVISSQLLVVVFIFGNACKTVFEALIFVFIMHPFDVGDRCVIDGTQMTVEEMNILTTVLLKNDNEKVYYPNSVLSTKPISNFYRSPNMYDTIDFAIHVSTSVESIGALRSKIKGYLESKPTHWHPVHTVNLKDILDVNKINMCILILVTRQQQIETYQKQLQ

SEQ ID NO: 90235 - protein, 69 aa, Setaria italica
  Transcript Sequence Number=SeqID_24261
LRSYGFRFAMSFLAPKVEEFSLEMECGLSRVGFGEKWHLLWLSMATAWTNRYGQFPRVRVHTLSLTIAA

SEQ ID NO: 90236 - protein, 342 aa, Setaria italica
  Transcript Sequence Number=SeqID_24262
  Gene Ontology: Mol. function=transferase activity; Cellular component= cell wall
  Homolog annotation: Hit_ID=B9RCA4; Match level="QueryCoverage=100%, HitCoverage=34%, E-value=1e-170, Identity=82%"; Hit description =Synaptotagmin, putative
  Pfam annotation: Domain name=PRT_C; Domain location=187-342; Score =439.4; E_value=5.6e-129; Accession=PF08372.2; Description=Plant phosphoribosyltransferase C-ter
NGQLGERSGEKTSSGKDGKIGKVRIRLSTLETGRVYTHSYPLLVLHSSGVKKMGELHLAIRFSSTSLVNMLYLYSRPLLPKMHYVRPIPVLQVDMLRHQAVQIVAARLSRMEPPLRKEVVEYMTDFDSHLWSMRKSKANFFRLMTVFSGLFAVSKWFTGVCAWKNPITTVLVHILYIMLVCFPELILPTVFLYMFLIGIWNFRYRPRYPPHMNTKISHAEAVHPDELDEEFDTFPTSRNPEIVRMRYDRLRSVAGRIQTVVGDIATQGERVQALLSWRDPRATGVFVLFCLIAAVVLYVTPVQVLAALAGFYVMRHPRFRHRLPSVPVNFFRRLPARTDSML

SEQ ID NO: 90237 - protein, 749 aa, Setaria italica
  Transcript Sequence Number=SeqID_24263
  Gene Ontology: Mol. function=glutathione peroxidase activity; Cellular component=cell wall
  Homolog annotation: Hit_ID=B9FDD7; Match level="QueryCoverage=98%, HitCoverage=65%, E-value=0.0, Identity=84%"; Hit description =Glutathione peroxidase
  Pfam annotation: Domain name=C2; Domain location=277-357; Score=92.0; E_value=2.1e-24; Accession=PF00168.22; Description=C2 domain
  Pfam annotation: Domain name=C2; Domain location=439-521; Score=77.3; E_value=5.4e-20; Accession=PF00168.22; Description=C2 domain
  Pfam annotation: Domain name=C2; Domain location=6-92; Score=84.3; E _value=4.3e-22; Accession=PF00168.22; Description=C2 domain
  Pfam annotation: Domain name=C2; Domain location=601-694; Score=81.6; E_value=2.9e-21; Accession=PF00168.22; Description=C2 domain
  Pfam module annotation: Pfam domain module=C2::C2::C2::C2; Domain location=277-357::439-521::6-92::601-694
MATYKLGVEVVSAHDLMPKDGQGSANACVEVTFDGQRFRTAVKEKDLNPVWNERFYFNISDPSNLPELALEAYVYNVNKTIESSRSFLGKVRIAGTSFVPFPDAVVMHYPLEKRGMFSRVKGELGLKVYITNDPAIKASNPLPAMDPVSSNPPPAPSPAEQIAADITGTNLHRSQEHRSEAKTLHTIAKEAHHHHNHGHLPASFGEQPSKYSVDQMKPEHQQPRIVRMYSAASQQPMDYALKETSPFLGGGQVVGGRVIRGEKHASTYDLVERMQYLFVRVVRARDLPDMDVTGSLDPFVEVRVGNYRGITKHFEKQKNPEWNAVFAFSRDCMQASVLEVVVKDKDLLKDDFVGLVRFDLNDVPIRVPPDSPLAPEWYRLVGKSGDKSMGELMLAVWIGTQADEAFPDAWHSDAATLEDPSAVTHMKSKVYHAPRLWYLRVNIVEAQDVAIFDKTRYPDVFVRVQVGHQMGRTKPVQARNFNPFWNEDLMFVAAEPFEDNLILTLEDRAAPNKDEMLGRVIIPLTMIDRRADDRIIHGKWFNLEKPVLVDVDQLKKEKFSTRLHLRLCLDGGYHVLDECTNYSSDLRPTAKQLWKPSIGLLELGILGAQGIVPMKTRDGKGSSDTYCVAKYGSKWVRTRTIMNNPNPRFNEQYTWEVYDPATVLTVGVFDNGQLGERSGEKTSSGKDGKIGKVRIRLSTLETGRVYTHSYPLLVLHSSGVKKMGELHLAIHPSFSPLMSGKDGKIGKVR

SEQ ID NO: 90238 - protein, 181 aa, Setaria italica
  Transcript Sequence Number=SeqID_24264
  Gene Ontology: Mol. function=transferase activity; Cellular component= cell wall
  Homolog annotation: Hit_ID=B9RCA4; Match level="QueryCoverage=50%, HitCoverage=9%, E-value=8e-40, Identity=83%"; Hit description =Synaptotagmin, putative
  Pfam annotation: Domain name=PRT_C; Domain location=42-181; Score =185.1; E_value=2e-52; Accession=PF08372.2; Description=Plant phosphoribosyltransferase C-ter
  Subcellular localization annotation: CTP_CleavageSite=73; ConfidenceScore=5.23e-01
NVEEHGEGTATPRKTLPLSLPTQVAFASRRLSFLFPLKPLLLPHPSRPPATSTPWTPREGGPSPPCRFKPRIRSALPWGRPDLGAPRPQCSVAGRIQTVVGDIATQGERVQALLSWRDPRATGVFVLFCLIAAVVLYVTPVQVLAALAGFYVMRHPRFRHRLPSVPVNFFRRLPARTDSML

SEQ ID NO: 90239 - protein, 676 aa, Setaria italica
  Transcript Sequence Number=SeqID_24265
  Gene Ontology: Mol. function=nucleoside-triphosphatase activity; Cellular component=intracellular; Biological process=regulation of transcription, DNA-dependent
  Homolog annotation: Hit_ID=B9S5U3; Match level="QueryCoverage=95%, HitCoverage=13%, E-value=1e-148, Identity=45%"; Hit description=ATP binding protein, putative
DNDDEQGKNDDLEDEPITCEETDLNTEEVMDKTDAYDDRTGPELPEPDNDSHDIDMETQELDEEDADNEDIGSEEVEQADQRSDASDDMELGDMAQHGDSAVDHDGDHVEDANTENIDKQQLDKIDSLKHPSQGQPENMQVDNNRESEANLANSSDMNGAVAPSVNFSGNELPNMEISMPNSGDDSRLSNTKPEMQNDAPQSHIKQANPFRSIGDAMEEWKERARVSADTQDNPPENGHHSDDENATQFRYVPEGEQSTSQALGAATADQISDDTQIKQSFIEDESRVKQLEQSEERTPDNPEVPHIQASQALTSKSENANVLEGPEIQTDTSVQDLVEVGKDNSFQNLVSFKRPPADDKIALDDLAVDTELSTQMDLDIPDAETKRAFVDWKNLELATMKLSQELAEQLRLVMEPTLASKLQGDYRTGKRINMKKVIPYIASHFRRDKIWLRRTKPNKRNYQVVIAIDDSRSMSEGKCGKVAIEALVTVCRAMSQLEVGQFAVASFGKKGNVRVLHDFHQIFNSEAGVKMISSLSFEQDNKIEDQPVSDLLTHLNTMLDTAVARARTPSGQNPLQQLILIISDGKFHEKENLRRHVRDVLNRKRMVAYVLLDSPEDSIMNLQEACFKAGENLQLKKYMDSFPFPYYVMLQNIEALPRTLADLLRQWFELMQSANE

SEQ ID NO: 90240 - protein, 103 aa, Setaria italica
  Transcript Sequence Number=SeqID_24266
TNGTNLPTVQRTDGRGLDLHVSRRVQIKQHVRSTVDLALLGSIELIIKMAIDRWNHKACIHKHSDHKIFERSRRSVHMKNHTDDGDRLIERVTSAVAIGDEQE

SEQ ID NO: 90241 - protein, 101 aa, Setaria italica
  Transcript Sequence Number=SeqID_24267
  Subcellular localization annotation: CTP_CleavageSite=48; ConfidenceScore=5.23e-01
HRASCSTNRSSAALHLHLHGRTTSPYTTLPQRPHHRRVAPPCFLAGFRFEEQKVLIPPSHQAASFNLLSTGFFGLLPHVRGGNRARGGAGHRGGGRGGGVG

SEQ ID NO: 90242 - protein, 122 aa, Setaria italica
  Transcript Sequence Number=SeqID_24268
  Gene Ontology: Mol. function=electron carrier activity; Cellular component=extracellular region; Biological process=response to oxidative stress
  Homolog annotation: Hit_ID=B6STZ5; Match level="QueryCoverage=100%, HitCoverage=35%, E-value=1e-48, Identity=73%"; Hit description =Peroxidase 1
  Pfam annotation: Domain name=peroxidase; Domain location=13-122; Score=60.8; E_value=5.2e-15; Accession=PF00141.15; Description =Peroxidase
YYNKTCPAAEEIVRNETAAAVTASPDLAAALLRLHYHDCFVQGCDASVLLDSTPNNTAERDAKPNGSLRGFDVVARVKDRLEQACPGTVSCADILALMARDAVSLAKGPSWPVALGRRDGRI

SEQ ID NO: 90243 - protein, 50 aa, Setaria italica
  Transcript Sequence Number=SeqID_24269
KKLKETSVSSVVKHVSHKIPFFTRFELSLLVDLVSHLYSCNLPYCYVDKF

SEQ ID NO: 90244 - protein, 99 aa, Setaria italica
  Transcript Sequence Number=SeqID_24270
  Gene Ontology: Mol. function=microtubule motor activity; Cellular component=microtubule associated complex; Biological process =microtubule-based movement
  Homolog annotation: Hit_ID=B8Q8B2; Match level="QueryCoverage=86%, HitCoverage=15%, E-value=2e-27, Identity=74%"; Hit description=SKIP interacting protein 26 (Fragment)
DHEEFHSDGLHGEETPLVSRKTTDHVDLLREQSKILSGEVALHTSVLKRLMEEAGRSTMNGHVELEMKVNDEIKVKRQQIANLEREIKGNLDQLGHPLS

SEQ ID NO: 90245 - protein, 602 aa, Setaria italica
  misc_feature (290)..(290): Xaa can be any naturally occurring amino acid
  misc_feature (419)..(419): Xaa can be any naturally occurring amino acid
  Transcript Sequence Number=SeqID_24271
  Gene Ontology: Mol. function=microtubule motor activity; Cellular component=microtubule associated complex; Biological process =microtubule-based movement
  Homolog annotation: Hit_ID=B8Q8B2; Match level="QueryCoverage=93%, HitCoverage=95%, E-value=0.0, Identity=62%"; Hit description=SKIP interacting protein 26 (Fragment)
KITTKLKEELDQLKRGILSGTPLKDATEDNFILWKQKLEDGNVKLQSRLEQEEEAKAALLARIQRLTKLILVSTKASQTPRLSQHHGPRRRHSFGEEELACLPHRRRDIVLNGESNDLFVPMEGFDETLEVSSKGEKKNHKGLLNWFKLRKNDGGSAALTSSDGDQSSLRKAFTAPSTPLGNGLSFQTEQGRSNPLLPENVSADLLTVDHEEFHSDGLHGEETPLVSRKTTDHVDLLREQSKILSGEVALHTSVLKRLMEEAGRSTMNGHVEVISLSSLSICYCRFSCCXKRKCILKLEMKVNDEIKVKRQQIANLEREIKGNLDQLGHPLSRAELLEQLNEKVFELEVKTADNRIMQDQLEQKASECQKLQETVAHLQEQLSQALEANDLLSESIIFQQNTDISLQTGSQVHKKSSIXDVSDELRQKAQQSEIDELKQRLCDLTEAKAQLEARNQKLLEESIYAKGLASAAGIELKALSGEVTKLMKHNERLASELASARNSTQRRVNNGQRVFRRDSFTKRHEPASRRNVHASYEREQALEVMLMEKDQREAELQKKIEESKQKEAFLEGELANMWVLVAKLKKGKGVDQDGMDANLNAS

SEQ ID NO: 90246 - protein, 290 aa, Setaria italica
  Transcript Sequence Number=SeqID_24272
  Gene Ontology: Cellular component=chloroplast
  Homolog annotation: Hit_ID=Q8LBR6; Match level="QueryCoverage=53%, HitCoverage=73%, E-value=6e-16, Identity=35%"; Hit description =Rhodanese-like family protein
  Subcellular localization annotation: CTP_CleavageSite=48; ConfidenceScore=5.58e-01
MAAPPLGLARRFAGVFTSPAVAHSGSRPRSLRPGLGLLPSKRWSGVVRMGAVVGGGQEGEDEELRQTKEQAAARRRWETLIREQKIKTLTPREAGYTYKLTDKALLDVRPSNERQKAWVKGSTWIPVFDVDTSVDLGGLSKKVSNFVMGGWWSGSSTLSFNKNFVQQVEEKFSKDTDIILVCQKGLRSLAACEQLYNAGFENLFWVQGGLEAAEEEDFEREGSQPFKLAAIGGVSEFFGWTDQQRRQAAKEGLGYRLVFTGRLVGALVLLDALFLGAQRIGPLLQEMQSH

SEQ ID NO: 90247 - protein, 346 aa, Setaria italica
  Transcript Sequence Number=SeqID_24273
  Gene Ontology: Mol. function=electron carrier activity; Biological process=oxidation reduction
  Homolog annotation: Hit_ID=Q8S9F0; Match level="QueryCoverage=95%, HitCoverage=62%, E-value=1e-147, Identity=76%"; Hit description =Cytochrome P450
  Subcellular localization annotation: CTP_CleavageSite=25; ConfidenceScore=5.26e-01
PYIVKVHFILQSSSAMVLGALFAAVASVPRSLLVYGVPAGFVLLWQGGRLLNKLWWQPRRLERALRAQGLRGTTYRFLTGDVKEFGRLNEEAWASPLPLGCHDIVPRVTPFLYNNVRENGKTCFSWFGPIPNVTITDPALVKDLLSNKFGHFEKPQFPALTKLISDGLTSHEGEKWVKHRRILNPAFHLEKLKLMLPAFSACCEELVDKWEQSLDSDGSCELDVWSELQALTGDVISRTAFGSSYHEGRRLFQLQSEQAERFVAAIQKIAIPGYMNLPTKNNRRMRQIQKEVNSILRGLIGKRIQAMKEGEPTKDDLLGILLESNMRDTDENGQSSLGMTIEDVIE

SEQ ID NO: 90248 - protein, 116 aa, Setaria italica
  Transcript Sequence Number=SeqID_24274
  Gene Ontology: Mol. function=aspartic-type endopeptidase activity; Biological process=DNA integration
  Homolog annotation: Hit_ID=B6SSX8; Match level="QueryCoverage=98%, HitCoverage=21%, E-value=7e-48, Identity=76%"; Hit description =Flavonoid 3-monooxygenase
ASVFAAAAEELDRVVGRGRWVTEKDIAHLPYLDAIIKETMRVHPIVPLLTPRVTREDATVAGYDIPKGTLVLINMWTIGRDPALWDAPEEFSPERFVGRKIDVKGQDFELLPFGSG

SEQ ID NO: 90249 - protein, 108 aa, Setaria italica
  Transcript Sequence Number=SeqID_24275
  Homolog annotation: Hit_ID=B6TI36; Match level="QueryCoverage=98%, HitCoverage=23%, E-value=3e-44, Identity=83%"; Hit description =Transporter, folate-biopterin transporter
MEKEQKVAVEGAAAAARRRLVIGVGFWVQGFRLFPWLGVSFFLKDGMGVDASSLQILQASANLPMVAKPLVGLLSDAVPIRGHRRLPYVAIGALLQAVSWLAIALWPA

SEQ ID NO: 90250 - protein, 96 aa, Setaria italica
  misc_feature (71)..(71): Xaa can be any naturally occurring amino acid
  misc_feature (79)..(79): Xaa can be any naturally occurring amino acid
  Transcript Sequence Number=SeqID_24276
  Gene Ontology: Mol. function=metal ion binding; Cellular component =chromosome
  Homolog annotation: Hit_ID=Q7XU27; Match level="QueryCoverage=70%, HitCoverage=7%, E-value=4e-20, Identity=69%"; Hit description=E3 ubiquitin-protein ligase BRE1-like 1
MSTCLHIQGPGKIAMSRPLDFAVLKYKNQRLAEQLEVHKFEYRTLEGRFNDLKEKQRTHNETLVLVKSHWXRLLADLDXGSVCKNESLHSSCGTGQ

SEQ ID NO: 90251 - protein, 39 aa, Setaria italica
  Transcript Sequence Number=SeqID_24277
  Gene Ontology: Mol. function=protein serine/threonine kinase activity; Biological process=protein amino acid phosphorylation
  Homolog annotation: Hit_ID=B6TDZ3; Match level="QueryCoverage=87%, HitCoverage=8%, E-value=1e-10, Identity=85%"; Hit description =Serine/threonine-protein kinase AFC3
LLGVVQKSSQDEMHFKCLPKSSAIKLIDFGSTAFDNQEH

SEQ ID NO: 90252 - protein, 134 aa, Setaria italica
  misc_feature (6)..(6): Xaa can be any naturally occurring amino acid
  misc_feature (75)..(75): Xaa can be any naturally occurring amino acid
  Transcript Sequence Number=SeqID_24278
  Gene Ontology: Mol. function=protein serine/threonine kinase activity; Cellular component=nucleus; Biological process=protein amino acid phosphorylation
  Homolog annotation: Hit_ID=B6TDZ3; Match level="QueryCoverage=100%, HitCoverage=47%, E-value=3e-63, Identity=70%"; Hit description =Serine/threonine-protein kinase AFC3
  Pfam annotation: Domain name=Pkinase; Domain location=1-133; Score= -56.1; E_value=3.8e-05; Accession=PF00069.17; Description=Protein kinase domain
RNHICXIVFEKLGPSLYDFLKRNRYQPFPVELVREFGRQLLESVAYMHELRLIHTDLKPENILLVSSEFIKVPSXKGLGWSFPCDIWSVGCILVELCSGEALFQTHENLEHLAMMERVLGPIPEHMIRKASSSA

SEQ ID NO: 90253 - protein, 216 aa, Setaria italica
  Transcript Sequence Number=SeqID_24279
  Gene Ontology: Mol. function=protein serine/threonine kinase activity; Cellular component=nucleus; Biological process=protein amino acid phosphorylation
  Homolog annotation: Hit_ID=B6TDZ3; Match level="QueryCoverage=99%, HitCoverage=55%, E-value=1e-115, Identity=93%"; Hit description =Serine/threonine-protein kinase AFC3
  Pfam annotation: Domain name=Pkinase; Domain location=1-213; Score =12.8; E_value=3e-09; Accession=PF00069.17; Description=Protein kinase domain
MHYMHELRLIHTDLKPENILLVSSEFIKVPSSKKSSQDEMHFKCLPKSSAIKLIDFGSTAFDNQEHNSIVSTRHYRAPEIILGLGWSFPCDIWSVGCILVELCSGEALFQTHENLEHLAMMERVLGPIPEHMIRKASSSAQKYFRRATRLNWPEGAVSRESIRAVRKLDRLKDLVSRNADHSRAVLADLLQGLLRFEPSERLTAQEALDHPFFRNP

SEQ ID NO: 90254 - protein, 72 aa, Setaria italica
  misc_feature (15)..(15): Xaa can be any naturally occurring amino acid
  Transcript Sequence Number=SeqID_24280
  Gene Ontology: Mol. function=protein serine/threonine kinase activity; Biological process=protein amino acid phosphorylation
  Homolog annotation: Hit_ID=B6TDZ3; Match level="QueryCoverage=87%, HitCoverage=16%, E-value=6e-28, Identity=96%"; Hit description =Serine/threonine-protein kinase AFC3
ECWDRETREYVAIKXVVRSIRKYRDAAMIEIDVLNRLAENEKYRSLCVQIQRWFDYRNHICIVSSSFLSIIL

SEQ ID NO: 90255 - protein, 326 aa, Setaria italica
  Transcript Sequence Number=SeqID_24281
  Gene Ontology: Mol. function=protein serine/threonine kinase activity; Cellular component=nucleus; Biological process=protein amino acid phosphorylation
  Homolog annotation: Hit_ID=B6TDZ3; Match level="QueryCoverage=100%, HitCoverage=84%, E-value=0.0, Identity=94%"; Hit description =Serine/threonine-protein kinase AFC3
  Pfam annotation: Domain name=Pkinase; Domain location=1-322; Score =221.8; E_value=1.7e-63; Accession=PF00069.17; Description=Protein kinase domain
  Pfam annotation: Domain name=Pkinase_Tyr; Domain location=6-322; Score=-116.1; E_value=5.2e-06; Accession=PF07714.9; Description =Protein tyrosine kinase
  Pfam module annotation: Pfam domain module=Pkinase::Pkinase_Tyr; Domain location=1-322::6-322
SKIFVGTFGRVLECWDRETREYVAIKVVRSIRKYRDAAMIEIDVLNRLAENEKYRSLCVQIQRWFDYRNHICIVFEKLGPSLYDFLKRNRYQPFPVELVREFGRQLLESVAYMHELRLIHTDLKPENILLVSSEFIKVPSSKKSSQDEMHFKCLPKSSAIKLIDFGSTAFDNQEHNSIVSTRHYRAPEIILGLGWSFPCDIWSVGCILVELCSGEALFQTHENLEHLAMMERVLGPIPEHMIRKASSSAQKYFRRATRLNWPEGAVSRESIRAVRKLDRLKDLVSRNADHSRAVLADLLQGLLRFEPSERLTAQEALDHPFFRNPT

SEQ ID NO: 90256 - protein, 73 aa, Setaria italica
  Transcript Sequence Number=SeqID_24282
  Subcellular localization annotation: CTP_CleavageSite=44; ConfidenceScore=5.03e-01
VKPFSIQIFVPFFLMKRKKNITMPNGVTMGQTITVKQLQSLMTSAGGIKRGHLGDGQLGLGPGQRRVPHQTRT

SEQ ID NO: 90257 - protein, 295 aa, Setaria italica
  Transcript Sequence Number=SeqID_24283
  Gene Ontology: Mol. function=aspartic-type endopeptidase activity; Cellular component=chromatin; Biological process=chromatin assembly or disassembly
  Homolog annotation: Hit_ID=Q2QSH9; Match level="QueryCoverage=80%, HitCoverage=15%, E-value=2e-49, Identity=43%"; Hit description =Retrotransposon protein, putative, unclassified, expressed
  Pfam annotation: Domain name=RVP_2; Domain location=128-243; Score= -42.0; E_value=0.0022; Accession=PF08284.3; Description=Retroviral aspartyl protease
  Subcellular localization annotation: CTP_CleavageSite=32; ConfidenceScore=5.36e-01
ANIQQQIQEQSSKKSLKYSTTTKWPATSTSVRVDQPKPVTSPTLSKERQLRDYCRVHILCFYCREPYDATHASKCTKRPKAQVNALVLNDLDVSLTEEVLTQLDIEDALAVDFGTLSLNAIAGTEKGEVMRLRALVKNKVMLMLVDSGSSHCFVSSGFLNKLGIQPIPAQPKTVKVANGEVLVSDQMVPKLAWWIQGHTFSCDMRVLNLEAYDCILGYDWLKLHSPITHHWEHKTMQFLHKGEQITIQGVQIGNLLVQELSADKLLKWDAGSDIWAFAIVKVLPQQEEQSNPAEV

SEQ ID NO: 90258 - protein, 47 aa, Setaria italica
  Transcript Sequence Number=SeqID_24284
KDAIIMHSILSSLLPSGAYIVHLLVSPHTSQSALHTCSALARLLPVS

SEQ ID NO: 90259 - protein, 165 aa, Setaria italica
  misc_feature (121)..(121): Xaa can be any naturally occurring amino acid
  Transcript Sequence Number=SeqID_24285
  Gene Ontology: Mol. function=structural molecule activity; Cellular component=clathrin coat of trans-Golgi network vesicle; Biological process=intracellular protein transport
TVGRPFHVRRPLRPDSNGGPILPPPTEMGRDEGFLLLEWRRQNAILLEEKEKKEKELRSQIILDAEEFKKAFVEKRKLNLETSKGQNRDREKVGGTSLGSEPCISFSTRWKPESCLTACCXLFLANQEKFHAGDGKQYWKAISELIPHEIANIEKRGARKDKEKE

SEQ ID NO: 90260 - protein, 299 aa, Setaria italica
  misc_feature (45)..(45): Xaa can be any naturally occurring amino acid
  Transcript Sequence Number=SeqID_24286
  Gene Ontology: Mol. function=structural molecule activity; Cellular component=clathrin coat of trans-Golgi network vesicle; Biological process=intracellular protein transport
MATAFDSPTSSPAAAAPFHGGDAFLHFDGSADVHASADGFPASPXPYAFRSDAPPSPFGMPQANGGAVHDDDPFAPDSNGGPILPPPTEMGRDEGFLLLEWRRQNAILLEEKEKKEKELRSQIILDAEEFKKAFVEKRKLNLETSKGQNRDREKLFLANQEKFHAGADKQYWKAISELIPHEIANIEKRGARKDKEKEKKPGIVVIQGPKPGKPTDMARMRQILLKLKHTPPPHMKPPPPPAAAAGKDGAPAAAGKDGAPAAAAKDGAKPAAPANGSVPEMEKAAGAAPAPATEPIAAA

SEQ ID NO: 90261 - protein, 530 aa, Setaria italica
  misc_feature (279)..(279): Xaa can be any naturally occurring amino acid
  Transcript Sequence Number=SeqID_24287
  Gene Ontology: Cellular component=exocyst; Biological process =exocytosis
  Homolog annotation: Hit_ID=B6SXL0; Match level="QueryCoverage=100%, HitCoverage=87%, E-value=0.0, Identity=85%"; Hit description=Protein binding protein
  Pfam annotation: Domain name=Exo70; Domain location=215-530; Score =345.5; E_value=9.9e-101; Accession=PF03081.7; Description=Exo70 exocyst complex subunit
TLGEDSEICDIKHALKALRKKILSLDFDNSMHVHDPQDSFEYLEVLYKIRRLSERLRNLDPCGEAKQLDELTVYADDLSEMAMARLEEEFVYLLTHYKQPLEQEVLSFRSTEDGSVEDFSSSSFSEEQSEGKATPNDVAGGPEYLVPDLIQPGALSAVKSIAKFMFLNGYDKECCQAYINSRQNAIDEYFASLRLDKLSIEELMNTSWTKLNILIRRWNRAMRVFIRVYLASEKRLSNHIFGELTDSTADLCFYEISFNSVIQLLSFYVSVAIGPPKRXKLFRLLDMYEVLNDLLPEAESLFESGYDDMILNEYHEALLQLGESARKTFAEFKYAIQSYTSSNAVARGEVHPLTKYVMNYIRALTAYSKTLDSILKDTDRRHLHLASDIQLMANAYPNFTATALHLQSVAAILEANLEAGSRLYRDDRLQNIFMMNNIHYMVQKVKNSDLKSFLGDDWIRVHNRKFQQHAIRYERASWNSVLSYLSDDGLCAAGDAASRKTIREKIKNFNLSFEEVYRVQTAWSVPDDQL

SEQ ID NO: 90262 - protein, 147 aa, Setaria italica
  Transcript Sequence Number=SeqID_24288
  Gene Ontology: Mol. function=kinase activity; Cellular component =nucleus; Biological process=cell division
  Homolog annotation: Hit_ID=Q75I54; Match level="QueryCoverage=100%, HitCoverage=39%, E-value=6e-73, Identity=90%"; Hit description =Cyclin-A3-1
  Pfam annotation: Domain name=Cyclin_N; Domain location=9-138; Score =230.2; E_value=5e-66; Accession=PF00134.15; Description=Cyclin, N -terminal domain
QLCAPYASDIYSYLRSMEAQARRRPAQDYIAAVQVDVTANMRSILVDWLVEVAEEYKLVSDTLYLTVSYIDRFLSDKALNRQRLQLLGVSAMLIASKYEEISPPNVEDFCYITDNTYTKQEVVKMESDILNVLKFEMGTPTTKTFLR

SEQ ID NO: 90263 - protein, 113 aa, Setaria italica
  Transcript Sequence Number=SeqID_24289
  Subcellular localization annotation: CTP_CleavageSite=76; ConfidenceScore=5.71e-01
ISLFFGCCSALLWFGRVQAAAFSVSPTIRSRVSPAAEQISSFASRRRHQTPQFLAFPSAASFPSPCHCPFPASSSCSSLRMEPPPLLRLLLPLASLSCLLLARGSAAIGVLGG

SEQ ID NO: 90264 - protein, 206 aa, Setaria italica
  misc_feature (20)..(20): Xaa can be any naturally occurring amino acid
  Transcript Sequence Number=SeqID_24290
  Homolog annotation: Hit_ID=B6T6S7; Match level="QueryCoverage=96%, HitCoverage=73%, E-value=2e-99, Identity=87%"; Hit description =Ser/Thr-rich protein T10 in DGCR region
  Pfam annotation: Domain name=DUF833; Domain location=1-192; Score =21.1; E_value=5.6e-11; Accession=PF05742.4; Description=Protein of unknown function (DUF833)
RESGSLIGAKTRGQLPVRFXQGSQGPLEYAAEIAKEADQYNGFNLILADVNSGTMVYISNRPGDDPVIHTVAPGIHVLSNASINSPWPKALRLGQSFKKYLETHDDAEASVKQMVEELMMDTIKPDTSMVPDTGVDPEWEYKLSSIFIDTAKGQARYGTRSMVALAAKLDGEATFYERYLENSLWKENIIQFQMEKAQQVLRGTTE

SEQ ID NO: 90265 - protein, 66 aa, Setaria italica
  Transcript Sequence Number=SeqID_24291
  Gene Ontology: Mol. function=hydrolase activity
  Homolog annotation: Hit_ID=B9T6B0; Match level="QueryCoverage=90%, HitCoverage=13%, E-value=2e-18, Identity=70%"; Hit description =Monoglyceride lipase, putative
VLHGTADTITDPRASQRLYHASMSTNKSIKLYDGYLHDLLFEPERDDIANDIINWLSARLDVLQRR

SEQ ID NO: 90266 - protein, 62 aa, Setaria italica
  Transcript Sequence Number=SeqID_24292
  Gene Ontology: Mol. function=transferase activity, transferring glycosyl groups; Cellular component=chloroplast
  Homolog annotation: Hit_ID=B6UBW7; Match level="QueryCoverage=100%, HitCoverage=8%, E-value=2e-28, Identity=96%"; Hit description =Stachyose synthase
SVSFNSILLGEIFIPDWDMFHSKHESAEFHGAARALSGGGVYVSDKPGVHDFSVLKKLVLPD

SEQ ID NO: 90267 - protein, 122 aa, Setaria italica
  Transcript Sequence Number=SeqID_24293
  Gene Ontology: Mol. function=transferase activity, transferring glycosyl groups; Cellular component=chloroplast
  Homolog annotation: Hit_ID=B6UBW7; Match level="QueryCoverage=100%, HitCoverage=15%, E-value=4e-51, Identity=80%"; Hit description =Stachyose synthase
RFLIIDDGWQETVDEFEEVDETLREQTMFAQRLTDLKENHKFRGETCKNLGDLVKRIKEKHGVKYVYMWHALLGYWGGVQVTSDVMKKYNPKLVYPVQSPGNVANLRDIAMDSLEKFGVGII

SEQ ID NO: 90268 - protein, 126 aa, Setaria italica
  Transcript Sequence Number=SeqID_24294
  Gene Ontology: Mol. function=transferase activity, transferring glycosyl groups; Cellular component=chloroplast
  Homolog annotation: Hit_ID=B6UBW7; Match level="QueryCoverage=71%, HitCoverage=11%, E-value=2e-47, Identity=95%"; Hit description =Stachyose synthase
RAERGYLICRSWSKKRRSKVSPRPAKTTTPARIASVSFNSILLGEIFIPDWDMFHSKHESAEFHGAARALSGGGVYVSDKPGVHDFSVLKKLVLPDGSILRARYAGRPARDCLFNDPVMDGKRYKH

SEQ ID NO: 90269 - protein, 132 aa, Setaria italica
  Transcript Sequence Number=SeqID_24295
  Gene Ontology: Mol. function=transferase activity, transferring glycosyl groups; Cellular component=chloroplast
  Homolog annotation: Hit_ID=B6UBW7; Match level="QueryCoverage=93%, HitCoverage=16%, E-value=1e-64, Identity=94%"; Hit description =Stachyose synthase
VDGVKVDVQNVLETLGHGFGGRVAVTQKYQQALEESIAQNFKRNNLICCMSHNSDCIFSALKSAVARASEDFMPREPTLQTLHIASVSFNSILLGEIFIPDWDMFHSKHESAEFHGAARALSGGGVYVSDKP

SEQ ID NO: 90270 - protein, 658 aa, Setaria italica
  Transcript Sequence Number=SeqID_24296
  Gene Ontology: Mol. function=transferase activity, transferring glycosyl groups; Cellular component=chloroplast
  Homolog annotation: Hit_ID=B6UBW7; Match level="QueryCoverage=99%, HitCoverage=85%, E-value=0.0, Identity=79%"; Hit description =Stachyose synthase
  Pfam annotation: Domain name=Raffinose_syn; Domain location=1-638; Score=791.7; E_value=4.8e-235; Accession=PF05691.4; Description =Raffinose synthase or seed imbibition protein Sip1
DAETQMLLLESRDEEGSAAAEGGAVYALMLPALDGDFRVSLQGSPENELQFCLESGDPEVQTMEAVDAVFINSGDNPFKLMKESIKLLSKIKGNFKHIGDKEIPANLDWFGWCTWDAFYKAVNPAGIEEGLKSLREGGVPPRFLIIDDGWQETVDEFEEVDETLREQTMFAQRLTDLKENHKFRGETCKNLGDLVKRIKEKHGVKYVYMWHALLGYWGGVQVTSDVMKKYNPKLVYPVQSPGNVANLRDIAMDSLEKFGVGIIDPDKIFEFYSDQHSYLSSVGVDGVKVDVQNVLETLGHGFGGRVAVTQKYQQALEESIAQNFKRNNLICCMSHNSDCIFSALKSAVARASEDFMPREPTLQTLHIASVSFNSILLGEIFIPDWDMFHSKHESAEFHGAARALSGGGVYVSDKPGVHDFSVLKKLVLPDGSILRARYAGRPARDCLFNDPVMDGKSLLKIWNLNNFSGVIGVFNCQGAGQWVWPVKDIDYVPTSINITGHLSPSDLESLEEIAGDNWSGETAVYAFNSCSLSRLQKHQNLEVSLSTMACEIYTISPIKVFGEAVQFAPLGLINMFNSGGALDDISSTADSSATTIHVRCRGPGRFGAYSATRPENCRVDGQQVEFCHTEDDLLAFDLPRSSSRDGDLWSIEILYRTS

SEQ ID NO: 90271 - protein, 256 aa, Setaria italica
  Transcript Sequence Number=SeqID_24297
  Gene Ontology: Mol. function=triose-phosphate isomerase activity; Cellular component=cytoplasm; Biological process=metabolic process
  Homolog annotation: Hit_ID=Q8LR75; Match level="QueryCoverage=99%, HitCoverage=100%, E-value=1e-123, Identity=86%"; Hit description =Triosephosphate isomerase
  Pfam annotation: Domain name=TIM; Domain location=6-246; Score=422.0; E_value=9.9e-124; Accession=PF00121.10; Description=Triosephosphate isomerase
MAPRKFFVGGNWKCNGTGEDVKKIVTVLSEAEVPSEDVVEVVVSPPFVFLPQVKGLLRLDFAVAAQNCWVRKGGAFTREISAEMLVNLQVPWVILGHSERRALLGESSDFVADKVAYALSQGLKVIACIGETLEQREAGTTMDVVAAQTKAIAEKISDWTNVVLAYEPVWAIGTGKVATPAQAQEVHDGLRKWLHSNVSPAVAESTRIIYGGSVNGANCKELAGQPDVDGFLVGGASLKPEFVDIIKSATVKSSSA

SEQ ID NO: 90272 - protein, 398 aa, Setaria italica
  Transcript Sequence Number=SeqID_24298
  Gene Ontology: Mol. function=kinase activity
  Homolog annotation: Hit_ID=B9SGL2; Match level="QueryCoverage=83%, HitCoverage=45%, E-value=4e-57, Identity=40%"; Hit description =Bromodomain-containing protein, putative
  Pfam annotation: Domain name=Bromodomain; Domain location=214-299; Score=126.6; E_value=8.2e-35; Accession=PF00439.17; Description =Bromodomain
LAPAPPGEPSPGSGDIAPGINRDGAAVPNGHGKDWAMVAVQKAEKAKKRRARSELRRQLASELDQVRMLSKRLKAAAETLAQQEDSVPMPLAMMLPPSQVVDARYIRSQFSPTGPVTPIPAQAAFAPFRSLPPQAPLTVSVVHTEPFEVEKRTPKANQLYQNSEFLLAKDKFPPADTHGRKKPKHHKKKNRSLEPRGADFDAERRLYSHAFKKSSSLLSRLMKHKFAWVFNKPVDAVGLGLHDYFEIIRHPMDLGTIRGRLSHGQYRNPKEFAEDVRLTFQNAMTYNPKGHDVHIMAEQLLGIFEAQWPEIEAKVNYLALCPPLPKKFPPPPIDLRLLERSDSVKHHVALESNSRPISHTPTRPPSMKKPRAKDANKRDMTMDEKRKLSENLHCHVSL

SEQ ID NO: 90273 - protein, 76 aa, Setaria italica
  Transcript Sequence Number=SeqID_24299
  Gene Ontology: Mol. function=transferase activity, transferring glycosyl groups; Biological process=metabolic process
  Homolog annotation: Hit_ID=Q6Z381; Match level="QueryCoverage=90%, HitCoverage=13%, E-value=9e-16, Identity=49%"; Hit description =Putative UDP-glucosyltransferase
AGGRSGELERRPDWVVLDFAHHWLCPIADQHQVPCAMFLIVTGTMLAYNGSRRENASHPRVTVDDFMPMPRWFPSP

SEQ ID NO: 90274 - protein, 234 aa, Setaria italica
  misc_feature (219)..(219): Xaa can be any naturally occurring amino acid
  misc_feature (228)..(228): Xaa can be any naturally occurring amino acid
  Transcript Sequence Number=SeqID_24300
  Gene Ontology: Mol. function=transferase activity, transferring glycosyl groups; Biological process=metabolic process
  Homolog annotation: Hit_ID=Q6Z381; Match level="QueryCoverage=97%, HitCoverage=47%, E-value=4e-48, Identity=51%"; Hit description =Putative UDP-glucosyltransferase
  Subcellular localization annotation: CTP_CleavageSite=57; ConfidenceScore=5.39e-01
TGTSFQVPCAMFLIVTGTMLAYNGSRRENASHPRVTVDDFMPMPRWFPSPPSLAFRRQEAAWMAAAFRPNASGVSDIERTWRTEERCRLLVFRSCPEAEPRTVFPLLAELFGKPAVPAGLLLPEPEEDARDGGGHSNAVARPGALQWLDGQPPRSVLYVALGSEAPVTAASVHELALGLELSGVRFLWALRQPPSAAGEQPLLPGGVRAASGRAAGLVXAGWVPQVRXLAHAAV

SEQ ID NO: 90275 - protein, 185 aa, Setaria italica
  Transcript Sequence Number=SeqID_24301
  Gene Ontology: Mol. function=transferase activity, transferring glycosyl groups; Biological process=metabolic process
  Homolog annotation: Hit_ID=B6T9G0; Match level="QueryCoverage=96%, HitCoverage=36%, E-value=7e-71, Identity=72%"; Hit description =Cytokinin-O-glucosyltransferase 2
TVISREQFKEFLSGIAATGYPFLWVLRPDMVWASQDGVLHEAAMAAAGDGKARIVAWAPQRDVLRHRAVGCFLTHAGWNSTLEAVVEGVPMVCWPFFADQHVNSRFVGAVWRNGLDMKDVCERGVVERTVREAMESDEIRRAAQALAQLVKRDVAAGGSSATELERLVGFIRELSASKATRGLGQ

SEQ ID NO: 90276 - protein, 95 aa, Setaria italica
  Transcript Sequence Number=SeqID_24302
  Gene Ontology: Mol. function=aspartic-type endopeptidase activity; Biological process=proteolysis
  Homolog annotation: Hit_ID=B9SG33; Match level="QueryCoverage=98%, HitCoverage=24%, E-value=3e-31, Identity=67%"; Hit description =Aspartic proteinase nepenthesin-1, putative
FLPLTRSYPNASRLAASLRRGLGDGAHPNARMRLHDDLLTNGYYTTRLYIGTPPQEFALIVDSGSTVTYVPCASCEQCGNHQDPRFQPDLSSTYS

SEQ ID NO: 90277 - protein, 105 aa, Setaria italica
  Transcript Sequence Number=SeqID_24303
IRLQIQFGSGSCLHFLLCHTILHGYIGEVTYPISDTYPYRIRGEYAVDMYREAVDTYREVSGIKINTTNVDTWADTYQANFAIRPSPTTHLSPPRHPCFVPLRPL

SEQ ID NO: 90278 - protein, 96 aa, Setaria italica
  Transcript Sequence Number=SeqID_24304
PSTSKLSESQFIMYEPSLLNIHQIATNFSCYATSEIFLFSFPCSCSAPVSKRRRLGRISHFALQGGITCQLQLPISLFLKELPPYFNSVTSFQGPS

SEQ ID NO: 90279 - protein, 127 aa, Setaria italica
  Transcript Sequence Number=SeqID_24305
  Gene Ontology: Mol. function=transferase activity, transferring glycosyl groups; Cellular component=plasma membrane
  Homolog annotation: Hit_ID=Q7XZZ4; Match level="QueryCoverage=100%, HitCoverage=12%, E-value=2e-67, Identity=97%"; Hit description=C2 domain-containing protein, putative, expressed
SGQPVGQARVPLSTVHRRADDRVEPPSRWLNLCGDEARPYAGRVHVRVCLEGGYHVLDEAANVASDVRAASKHLSKPPVGMLEVGVRGAANLVPMKIAKDGASGSTDAYVVLKYGPKWARTRTILDQ

SEQ ID NO: 90280 - protein, 342 aa, Setaria italica
  misc_feature (272)..(272): Xaa can be any naturally occurring amino acid
  misc_feature (284)..(284): Xaa can be any naturally occurring amino acid
  Transcript Sequence Number=SeqID_24306
MVYLGALFLYALCVNYGPSYLFWVIILIYTELNILSQYIYQIIIQHCGLNIHLSLLQRLGFPVDKIKASFVVSILPLFLVYISTLLQSSITAKDGEWVPVTEFSFLSTRNNIEEKRCIPYSWRERLKSLHLPIMNLLRMIIRGLSRYWMSLTHGAESPPYFVQVTMEVNHWPEDGIQPERIESAINRVLAIAHEERCQANLPASCHCCSKVRIQSIEKSKENSNMALAVLEVVYAAPLECQPAGWYKSLTPAADVEREIHESQKAGLFDEIXFPYPIVSVIGGXKREIDLYAYYFGADLAVFFLVAMFYQSVLKNKSEFLEVYQLEDQFPKEFVFILMVLFS

SEQ ID NO: 90281 - protein, 155 aa, Setaria italica
  Transcript Sequence Number=SeqID_24307
  Homolog annotation: Hit_ID=A2Q5Z4; Match level="QueryCoverage=50%, HitCoverage=38%, E-value=4e-26, Identity=73%"; Hit description =Protein FAM38B, related
NKFPYPIVSVIGGGKREIDLYAYYFGADLAVFFLVAMFYQSVLKNKSEFLEVYQLEDQFPKEFVFILMVLFFLIVVDRIIYLWSFATGKVVFYLFNLVLFTYSVTEYAWGMELAHRDVGGLVLRAIYLTKSISLALQALQIRYGIPNKSNLYRQF

SEQ ID NO: 90282 - protein, 53 aa, Setaria italica
  Transcript Sequence Number=SeqID_24308
SIRYEHGNDRQEEIHTKLTISCDKKAGKMNKREEKTARRGHNKRRSSSRTGLF

SEQ ID NO: 90283 - protein, 99 aa, Setaria italica
  Transcript Sequence Number=SeqID_24309
  Gene Ontology: Cellular component=integral to peroxisomal membrane; Biological process=peroxisome organization and biogenesis
  Homolog annotation: Hit_ID=B6TF11; Match level="QueryCoverage=84%, HitCoverage=20%, E-value=8e-24, Identity=62%"; Hit description=AATL2
MVSPSSVLPKVVDDATDQATPRRAKWWYVTFHNVTAMVGAGVLSLPYAMAHLGWGPGVLALLASWGITLYTLRLLIELHECVPGAPWCLGHIDDLACMQ

SEQ ID NO: 90284 - protein, 119 aa, Setaria italica
  Transcript Sequence Number=SeqID_24310
  Gene Ontology: Mol. function=ATPase activity, coupled to transmembrane movement of ions, phosphorylative mechanism; Cellular component=integral to membrane
  Homolog annotation: Hit_ID=Q9LI83; Match level="QueryCoverage=90%, HitCoverage=8%, E-value=1e-10, Identity=38%"; Hit description =Putative phospholipid-transporting ATPase 10
STDYYMVFADALVGAPSYWAVTLLVPAAALVPYFAYAAAKSWFFPDYHNQIQWLRHRERAHPDPETSAGVEFGHALRQFSVRSTGVGVSARRDAAAVLRRINGTQQVHHADSPQQLEVS

SEQ ID NO: 90285 - protein, 98 aa, Setaria italica
  Transcript Sequence Number=SeqID_24311
  Gene Ontology: Mol. function=hydrolase activity, hydrolyzing O -glycosyl compounds; Cellular component=cytoplasm; Biological process= carbohydrate metabolic process
  Homolog annotation: Hit_ID=B6T324; Match level="QueryCoverage=88%, HitCoverage=75%, E-value=1e-43, Identity=97%"; Hit description =Glucan endo-1,3-beta-glucosidase 4
  Pfam annotation: Domain name=X8; Domain location=14-97; Score=141.4; E_value=2.8e-39; Accession=PF07983.5; Description=X8 domain
AFTSSSSVEAQKKTWCVAKPSASNDILSLNLNYACSQVSCAVIQKGGPCYYPDNLVSRAAVAMNLYYAANGRHPWNCYFNNSALVVQSDPSYGSCTYY

SEQ ID NO: 90286 - protein, 173 aa, Setaria italica
  Transcript Sequence Number=SeqID_24312
  Gene Ontology: Mol. function=sugar binding
  Subcellular localization annotation: CTP_CleavageSite=97; ConfidenceScore=5.20e-01
HFQKLATALQPWSSSPCIATLLLLLSCSLAAATTAPLGTIERVTKQRILASIPPGGRPPVLFLTSPSGKYAAYFVRTHTVPGAGGLGADFCYVEVVDAATAGAHGGAAEGEEDGVAAAAAAASGKSVWESECRPISTVNTCTLLFSWHGLEVFDGREEVWHGETNTDGTNFLE

SEQ ID NO: 90287 - protein, 98 aa, Setaria italica
  Transcript Sequence Number=SeqID_24313
AFMHRRGWIKACDSLTDGKKTQQASKCVSCWVSEKVKRTHVCRSRGSIDHRSRSFQPFTTLSDTGLDSYDLISCYHHVPFFLACHVGSCTCYWICMIP

SEQ ID NO: 90288 - protein, 70 aa, Setaria italica
  Transcript Sequence Number=SeqID_24314
SKRHLRLAYALMLGWLAAWPAINMYPQPLVGYGIVERKPKKIAPTLPSAILWMRVTVQILTYRRFLDLNS

SEQ ID NO: 90289 - protein, 69 aa, Setaria italica
  Transcript Sequence Number=SeqID_24315
SWRFLAAAAQSDGDPRPPVEPAGWSPDPLQAGFATPLLDPITGSEAKILLLGGEARALRWCSFRPLPAT

SEQ ID NO: 90290 - protein, 43 aa, Setaria italica
  Transcript Sequence Number=SeqID_24316
  Homolog annotation: Hit_ID=Q6Z6G6; Match level="QueryCoverage=100%, HitCoverage=14%, E-value=1e-10, Identity=68%"; Hit description =Cytoplasmic tRNA 2-thiolation protein 1
KACVLLDGLNRGLPKLGIGRTKACPGAERNTSRLQGKHGNFDF

SEQ ID NO: 90291 - protein, 78 aa, Setaria italica
  Transcript Sequence Number=SeqID_24317
GQSGLLLPSHLSQMKQELAFVDNTHISVNPYTHEQVFSVNTAGSIEHTLPDVMCSGADKNDDPSMPIIYDREIVPSPR

SEQ ID NO: 90292 - protein, 333 aa, Setaria italica
  misc_feature (314)..(314): Xaa can be any naturally occurring amino acid
  Transcript Sequence Number=SeqID_24318
  Gene Ontology: Mol. function=metal ion binding; Cellular component =intracellular
  Homolog annotation: Hit_ID=B6SV94; Match level="QueryCoverage=99%, HitCoverage=68%, E-value=1e-123, Identity=73%"; Hit description=CCT motif family protein
  Pfam annotation: Domain name=CCT; Domain location=278-323; Score =86.1; E_value=1.2e-22; Accession=PF06203.6; Description=CCT motif
  Pfam annotation: Domain name=CCT_2; Domain location=277-302; Score =18.4; E_value=0.014; Accession=PF09425.2; Description=Divergent CCT motif
  Pfam module annotation: Pfam domain module=CCT::CCT_2; Domain location=278-323::277-302
SSPAPVSSVFRDFRDPAPSPASPDTVDADELGEIDFDDDGFDAESILDVDEATAGAAEGLDGIMGSLTVESNTATTSDDSILSSSGIHPYLRSLMVVGLAGRFELGLGFRHGARPNLNRALKRRDDDGAWWMWPAVPVKDLTVAPPMPPAPAAPDAAMAQVPAAPEKKKSKKKKVVKVEKVMAKGKEELPNAKCKEEADGSVEAANGDGDADSTPTKAPKTGLGLKLDADEVLKAWSDKGSMFTEGGGPESPTSAADVRAKLADIDLFPENGAAGGIREASVLRYKEKRRTRLFSKKIRYQVRKVNADCRPRMXKGRFVRSPSLLQQALEEES

SEQ ID NO: 90293 - protein, 169 aa, Setaria italica
  Transcript Sequence Number=SeqID_24319
  Gene Ontology: Mol. function=microtubule motor activity; Cellular component=microtubule associated complex; Biological process =microtubule-based movement
  Homolog annotation: Hit_ID=Q10MN5; Match level="QueryCoverage=98%, HitCoverage=18%, E-value=5e-87, Identity=84%"; Hit description =Kinesin-4, putative, expressed
  Pfam annotation: Domain name=CH; Domain location=3-116; Score=43.9; E_ value=6.1e-10; Accession=PF00307.23; Description=Calponin homology (CH) domain
AGWLRRTVGAVAARDLPEEPSEEEFRLGLRNGQILCSALNRVHPGAVPKVVVNTADSVLQADGAALSAFQYFENVRNFLVATQEIGLPCFEASDLEQGGKSARVVNCVLALKSYGDWKQCGGTGPWKYGGNLKPSASGKSFGRKNSEPFRRSQSMNEGEVPYEEAGFNA

SEQ ID NO: 90294 - protein, 87 aa, Setaria italica
  Transcript Sequence Number=SeqID_24320
  Gene Ontology: Cellular component=integral to membrane
  Homolog annotation: Hit_ID=B9RF35; Match level="QueryCoverage=98%, HitCoverage=21%, E-value=8e-26, Identity=67%"; Hit description =Cation:cation antiporter, putative
AGPMFNMLVGLGTALVVQTARVYPKAYVLEFHVGIVVAFVFLLLSLMGTLLVVTWARFRVPRFCGYCLMGIYVLFTVVSIAIASTSG

SEQ ID NO: 90295 - protein, 168 aa, Setaria italica
  Transcript Sequence Number=SeqID_24321
  Subcellular localization annotation: CTP_CleavageSite=59; ConfidenceScore=5.21e-01
MPAPPTLPLTRRPSDARRRGRLLLFLITLVAVSAAAALAYLSFPSAAPTPPPAPSSTVRADADCCRGMGGARALGSAVKWGSNHRLPSAAACCASCKAMCPHPEGGACRCDSWVFCGDERRCKDRLGRSVHPSHILSSPSSSTNLSEVAKHSSRFIRPPICAKCLFFP

SEQ ID NO: 90296 - protein, 86 aa, Setaria italica
  misc_feature (74)..(74): Xaa can be any naturally occurring amino acid
  Transcript Sequence Number=SeqID_24322
  Subcellular localization annotation: CTP_CleavageSite=29; ConfidenceScore=5.37e-01
AGDCGATRPTMTTPGTTAMFAGLAILLFSVSTGFNSGAGGFGLLLCFAGVLAGANIVAVGIQMSDADLAPVIPXVFAEVRALAEFL

SEQ ID NO: 90297 - protein, 166 aa, Setaria italica
  Transcript Sequence Number=SeqID_24323
  Homolog annotation: Hit_ID=B9RHU2; Match level="QueryCoverage=100%, HitCoverage=8%, E-value=8e-37, Identity=49%"; Hit description =Splicing endonuclease positive effector sen1, putative
  Subcellular localization annotation: CTP_CleavageSite=8; ConfidenceScore=5.02e-01
QVVQLPVPVGRRQGSGCKVTSTRRLQPPKLGSWFKNILEMDYFTVVGLSSSEVVKMPALKEIPVCFDSQAQYVEIFQPLVLEEFKAQLQNSYVETPLDDMICGCISILSVERVDEFLIVRARPENSQSIKFKGCMENDLILLTKDSLKDPEQQVHVLGKVERRESD

SEQ ID NO: 90298 - protein, 79 aa, Setaria italica
  misc_feature (62)..(62): Xaa can be any naturally occurring amino acid
  Transcript Sequence Number=SeqID_24324
DLYVEVARELGLAPLFVELLQQMSSAVLLYSAMALENLSLQSGRLTAVPEPPAPRGGLLMCXCFGKQPPPAPPGALGTC

SEQ ID NO: 90299 - protein, 66 aa, Setaria italica
  Transcript Sequence Number=SeqID_24325
AGTLHPSFLFLNALFFSMTQVQRHEIRIFHDDKQMDLTTVLENHYSFFATKMYLKVETSPLNKIQP

SEQ ID NO: 90300 - protein, 72 aa, Setaria italica
  Transcript Sequence Number=SeqID_24326
SPPADYLFCWEIWTSSVTGQDNTCWLSCKQLPEKTAHELGELVSTHPIQRVKQTLVRAAHLMKLVSICLLTS

SEQ ID NO: 90301 - protein, 102 aa, Setaria italica
  Transcript Sequence Number=SeqID_24327
MSAAAEEYPWRAQQVFGDSMAAQRSALVLASYPVLLLLVILAAFVRYLWVALAMYCALLFVLSCASRTFAARAASDDEEARLSRGGLSAAAIAAVAPAFPYE

SEQ ID NO: 90302 - protein, 102 aa, Setaria italica
  Transcript Sequence Number=SeqID_24328
  Gene Ontology: Mol. function=hydrolase activity, hydrolyzing O -glycosyl compounds; Cellular component=extracellular region; Biological process=cell wall organization and biogenesis
  Homolog annotation: Hit_ID=Q67UW5; Match level="QueryCoverage=71%, HitCoverage=13%, E-value=7e-34, Identity=93%"; Hit description =Endoglucanase 5
AASSASYRHDRDFIGCLQGFDSWYSAGRENPHDLVGAVVGGPNGEDVFTDHRGAYMQTEACTYNTAPMVGVFSKLMQLEGQQPQRRRQPEAEASDEAPVEDL

SEQ ID NO: 90303 - protein, 195 aa, Setaria italica
  Transcript Sequence Number=SeqID_24329
  Gene Ontology: Mol. function=hydrolase activity, hydrolyzing O -glycosyl compounds; Biological process=carbohydrate metabolic process
  Homolog annotation: Hit_ID=Q25AK4; Match level="QueryCoverage=100%, HitCoverage=34%, E-value=1e-83, Identity=77%"; Hit description =H0510A06.1 protein
GVRVNNPALLDLPLIDVFREVVSALGSKSIMVILDNQMTTPGWCCSRTDGNGFFGDKYFDPDEWLKGLNAMATIFNDTKNVVGMSLRNELRGPNQNISLWYRYMQLGAEAVHAANPNVLVILSGLDFDNTLSFLHSKKPELRFTGKLVFEQHWYGFSDGGHWEILNQNDACRMVVDSIWAKGLFLLQQGWPLFFS

SEQ ID NO: 90304 - protein, 98 aa, Setaria italica
  Transcript Sequence Number=SeqID_24330
  Gene Ontology: Mol. function=sequence-specific DNA binding; Cellular component=nucleus; Biological process=regulation of transcription, DNA-dependent
  Homolog annotation: Hit_ID=B6U459; Match level="QueryCoverage=89%, HitCoverage=30%, E-value=3e-35, Identity=86%"; Hit description =WRKY25-superfamily of TFs having WRKY and zinc finger domains
  Pfam annotation: Domain name=Plant_zn_clust; Domain location=1-41; Score=15.7; E_value=0.018; Accession=PF10533.1; Description=Plant zinc cluster domain
  Pfam annotation: Domain name=WRKY; Domain location=51-98; Score=82.8; E_value=1.3e-21; Accession=PF03106.7; Description=WRKY DNA -binding domain
  Pfam module annotation: Pfam domain module=Plant_zn_clust::WRKY; Domain location=1-41::51-98
  Subcellular localization annotation: CTP_CleavageSite=31; ConfidenceScore=5.04e-01
HHHGEPGAAGRCHCSKKPKRSRQGLSRRTVRVPAVGTAAPGSQAPASSDIPADDYSWRKYGQKPIKGSPYPRGYYRCSSAKGCPARKHVERAADDPAT

SEQ ID NO: 90305 - protein, 68 aa, Setaria italica
  Transcript Sequence Number=SeqID_24331
  Gene Ontology: Mol. function=protein binding
  Homolog annotation: Hit_ID=Q2PYY5; Match level="QueryCoverage=98%, HitCoverage=20%, E-value=3e-11, Identity=52%"; Hit description =Vernalization independence 3-like protein
RGHALGVVSLAAHPAGALAAAVSLDSFVRVFDVDSGASVATLEAPPSEVWGVQFHPKVSALAAAGGGS

SEQ ID NO: 90306 - protein, 217 aa, Setaria italica
  Transcript Sequence Number=SeqID_24332
  Gene Ontology: Mol. function=transporter activity; Cellular component= membrane; Biological process=oligopeptide transport
  Homolog annotation: Hit_ID=B9RUG8; Match level="QueryCoverage=70%, HitCoverage=29%, E-value=1e-49, Identity=61%"; Hit description=Amino acid permease, putative
  Pfam annotation: Domain name=PTR2; Domain location=1-215; Score= -104.4; E_value=0.023; Accession=PF00854.13; Description=POT family
RKLLHISFTRKVRLPARADDDSDISELELEEKALKDEFTDPRETGNGHDATPNVTKTILRLLPIWTTLLIFAVNFQQPMTFFTNHGMLMNHKVGSTFVIPPATLQSSTTMSVILLMPLYDKIFVPLMRLFTREEKGITVLQRTGIGMVLSVVAMVVAAAVESKRLHLTSEGDATQLSIFWLLPQYILLGVADVFTVVGMQEFFYTQVPSTCGLDPFK

SEQ ID NO: 90307 - protein, 121 aa, Setaria italica
  misc_feature (105)..(105): Xaa can be any naturally occurring amino acid
  Transcript Sequence Number=SeqID_24333
  Gene Ontology: Mol. function=glycerone kinase activity; Biological process=glycerol metabolic process
  Homolog annotation: Hit_ID=B9T668; Match level="QueryCoverage=100%, HitCoverage=20%, E-value=5e-40, Identity=67%"; Hit description =Dihydroxyacetone kinase, putative
  Pfam annotation: Domain name=Dak1; Domain location=22-121; Score= -165.2; E_value=0.00025; Accession=PF02733.9; Description=Dak1 domain
MAARGKKLINDPNDVVTQFIEGLAEAYPGVQYLDGFPEVKVVLRSDVAAGTYDKVAVICGGGSGHEPAHGGFVGQGMLTAAVSGDVFTSPPVNSILAAIRAVTGXPKGCLLVVTNYTGDRL

SEQ ID NO: 90308 - protein, 53 aa, Setaria italica
  Transcript Sequence Number=SeqID_24334
  Subcellular localization annotation: CTP_CleavageSite=20; ConfidenceScore=5.05e-01
LKLSNVFLVHRMDPAPSRLRFASTQASCGVTHPLTRRRPAAPESSPDFEAKLV

SEQ ID NO: 90309 - protein, 224 aa, Setaria italica
  misc_feature (215)..(215): Xaa can be any naturally occurring amino acid
  Transcript Sequence Number=SeqID_24335
  Gene Ontology: Mol. function=ATPase activity, coupled to transmembrane movement of substances; Cellular component=integral to membrane; Biological process=transport
  Homolog annotation: Hit_ID=Q6J0P5; Match level="QueryCoverage=99%, HitCoverage=15%, E-value=4e-70, Identity=60%"; Hit description =Multidrug-resistance associated protein 3
SSPLQLAGVVFNGCLGLVYLGLGFWMLGRNFSQDASVYLLHWWLVALLQGFSLILISIAFSIRARFLGVTSVRIWSVLLTIYAAFVCCSSVINMVAHKAVAMKGCLDVLFVPGALLLLVYGIWHIREDGNGNGGTGSALYKPLNAEAADDADDSESHVTPFAKAGFFSVMTFWWLNPLMKMGYEKPLEEKDMPLLGASDRAYNQYLMFLEKLNKXKQLQPHGTP

SEQ ID NO: 90310 - protein, 52 aa, Setaria italica
  Transcript Sequence Number=SeqID_24336
CWLVQQHQAFKNGGRTIIDYKVHFLLLYICKPKSFIIYGRILHVKNPRGGGF

SEQ ID NO: 90311 - protein, 111 aa, Setaria italica
  Transcript Sequence Number=SeqID_24337
  Subcellular localization annotation: CTP_CleavageSite=11; ConfidenceScore=5.41e-01
APSGDHVCTVSAARPSRRRQISRAIRRRRRHGPAEPPPAPWGTRTRPRRRQWTPPGTRTGTTGTPPAAAPARPTGGTPAPGRRSRRRRAAPGWPRRPGRGRGRTGPAAAGC

SEQ ID NO: 90312 - protein, 75 aa, Setaria italica
  Transcript Sequence Number=SeqID_24338
MATFRGLAALALILTFSSCCYLTTPTSATPDSDGFLQCLLGNIPSGLIYTQGASNFTDVLASSVHNPRVYTGDMV

SEQ ID NO: 90313 - protein, 122 aa, Setaria italica
  Transcript Sequence Number=SeqID_24339
  Gene Ontology: Mol. function=protein transporter activity; Cellular component=mitochondrial inner membrane
  Homolog annotation: Hit_ID=B6TSG2; Match level="QueryCoverage=97%, HitCoverage=61%, E-value=3e-41, Identity=72%"; Hit description =Mitochondrial import inner membrane translocase subunit Tim17 family protein
TEGARELARDARATRPDDPMNSVVGGLASGAVLGRIQGGHFGAVKYAVTFAAAGTAMDYAALKLAPEWHAWKEQLSEKKDWFTLPEWSPIQVLDEEALAKKKAREEKLFAQRALGKLDKEDS

SEQ ID NO: 90314 - protein, 84 aa, Setaria italica
  Transcript Sequence Number=SeqID_24340
  Gene Ontology: Mol. function=serine-type carboxypeptidase activity; Cellular component=extracellular region; Biological process =proteolysis
  Homolog annotation: Hit_ID=B9SJ52; Match level="QueryCoverage=98%, HitCoverage=18%, E-value=3e-21, Identity=55%"; Hit description =Vitellogenic carboxypeptidase, putative
PASEADIPRDEPTIAAHLLAALQSFMALDQSFRARPLFLAGESYAGKYIPAAAKHILDANDKLPAGRRVNLQGIAIGNGMTHPV

SEQ ID NO: 90315 - protein, 240 aa, Setaria italica
  misc_feature (179)..(179): Xaa can be any naturally occurring amino acid
  Transcript Sequence Number=SeqID_24341
  Gene Ontology: Mol. function=nucleotide binding; Biological process =defense response
  Homolog annotation: Hit_ID=Q69XW4; Match level="QueryCoverage=97%, HitCoverage=18%, E-value=2e-65, Identity=58%"; Hit description =Putative disease resistance protein
NAKTVGGCFHLPESITKLINLVHVDVEKAYVLMLSSTHKLPYVECAGEFCVDEEGSLLGLKDLNKLRGQLTIMSLEKVRNKVEASKAHLHLKEHITKLELQWESSRAKCANSTKQGFEVLDVLKPQPDLEELTISGYPGARSPSWLESGWLSRVQFVCLRDCNRWEVLPPLGDLLLLKXLEIRRMQGLKTLGQEFFGCAGFPSLERFLLERLPNLEWCLVDNYQLFRNLQHLSVAGMPES

SEQ ID NO: 90316 - protein, 105 aa, Setaria italica
  Transcript Sequence Number=SeqID_24342
  Homolog annotation: Hit_ID=B6TN37; Match level="QueryCoverage=99%, HitCoverage=23%, E-value=5e-38, Identity=77%"; Hit description=F-box domain containing protein
  Pfam annotation: Domain name=F-box; Domain location=6-54; Score=19.3; E_value=0.016; Accession=PF00646.25; Description=F-box domain
MECGETGMNSVPDGVVQHILSMLSNVRDVAACACVCRRWRDCVPYLPALFFPRNAFDAAAVGRGAADDTIGRMVASVARLRELVIYCPFSMERLPAWLAARSATL

SEQ ID NO: 90317 - protein, 67 aa, Setaria italica
  Transcript Sequence Number=SeqID_24343
  Subcellular localization annotation: CTP_CleavageSite=61; ConfidenceScore=5.34e-01
TTGFNSSVNSVRDFQLKKKDNPSVPTISKAVIWTGQNKCLTSVNRNRKNSCQHTPPFSDISSSSGSH

SEQ ID NO: 90318 - protein, 246 aa, Setaria italica
  Transcript Sequence Number=SeqID_24344
  Gene Ontology: Mol. function=transferase activity, transferring glycosyl groups; Cellular component=plastid outer membrane; Biological process=biosynthetic process
  Homolog annotation: Hit_ID=Q2RAB0; Match level="QueryCoverage=100%, HitCoverage=33%, E-value=1e-118, Identity=82%"; Hit description =Digalactosyldiacylglycerol synthase 1, putative, expressed
  Pfam annotation: Domain name=Glycos_transf_1; Domain location=1-137; Score=-27.5; E_value=0.066; Accession=PF00534.12; Description =Glycosyl transferases group 1
WAKGYRELIDLFAKHKSDLEGFKLDIYGNGEDSHEVQSAARKLNLNLNFHKGRDHADDSLHGYKVFINPSISDVLCTATAEALAMGKFVVCADHPSNDFFRSFPNCLTYKTSEDFVARVKEAMTRDPQPLTPEQRYDLSWEAATQRFMEHSELDRFLNSSNSDCSSSSSTERDGNSAGRRMRKSASVPNMSEVVEGGLAFAHYCLTGSELFRLSTGAVPGTRDYSKQHSLDLRLLPPQVQKPIYGW

SEQ ID NO: 90319 - protein, 409 aa, Setaria italica
  Transcript Sequence Number=SeqID_24345
  Gene Ontology: Mol. function=transferase activity, transferring glycosyl groups; Cellular component=plastid outer membrane; Biological process=biosynthetic process
  Homolog annotation: Hit_ID=Q2RAB0; Match level="QueryCoverage=99%, HitCoverage=55%, E-value=0.0, Identity=90%"; Hit description =Digalactosyldiacylglycerol synthase 1, putative, expressed
  Pfam annotation: Domain name=Glycos_transf_1; Domain location=271 -407; Score=-20.4; E_value=0.02; Accession=PF00534.12; Description =Glycosyl transferases group 1
SLCSKRKDAYNFLSACEPSSLRNDNVGDELDLRIASVLQSTGYHDDGGFWLDRKSSLSDKRHVAIVTTASLPWMTGTAVNPLFRAAYLAKSSKQNVTLVVPWLCKSDQELVYPNSMTFNSPEEQENYMRNWLEERVGFKTDFKISFYPGKFQKERRSIIPAGDTSQFIPSKEADIAILEEPEHLNWYHHGKRWTDKFNHVVGVVHTNYLEYIKREKNGAIQAFFVKHINNLVARAYCHKILRLSGATQDLPKSMICNVHGVNPKFLEVGERIAAQRESGQESFSKGAYFLGKMVWAKGYRELIDLFAKHKSDLEGFKLDIYGNGEDSHEVQSAARKLNLNLNFHKGRDHADDSLHGYKVFINPSISDVLCTATAEALAMGKFVVCADHPSNDFFRSFPNLSLYLTKYLR

SEQ ID NO: 90320 - protein, 64 aa, Setaria italica
  Transcript Sequence Number=SeqID_24346
  Gene Ontology: Mol. function=DNA-directed DNA polymerase activity; Cellular component=intracellular; Biological process=DNA replication
  Homolog annotation: Hit_ID=Q69S01; Match level="QueryCoverage=96%, HitCoverage=11%, E-value=9e-27, Identity=88%"; Hit description =Putative PolI-like DNA polymerase
PFAALCEICSIDSLISNFILPLQGNHISCKEGRIHCSLNINTETGRLSARTPNLQNQPALEKDR

SEQ ID NO: 90321 - protein, 168 aa, Setaria italica
  Transcript Sequence Number=SeqID_24347
  Gene Ontology: Mol. function=structural constituent of cell wall
  Homolog annotation: Hit_ID=B6SLV3; Match level="QueryCoverage=82%, HitCoverage=79%, E-value=1e-62, Identity=83%"; Hit description =Arabinogalactan protein
  Pfam annotation: Domain name=Pollen_Ole_e_I; Domain location=42-162; Score=-11.9; E_value=0.00057; Accession=PF01190.9; Description =Pollen proteins Ole e I family
  Subcellular localization annotation: CTP_CleavageSite=61; ConfidenceScore=5.07e-01
TAMALLVKCVLLSLSAVVLSIGSASAMGLPPPPPMVNFSIGVQGVVWCKSCRYPGYFAPMDASPLPGAEVYLRCKHGRRALTVPGRSGPGGYFLIQTSQQMSAFTSQQCRVYVPRSPARVCGVADYPSRANKGLPLKFQEFVKRDNGLQGMYSVGNRLFRPKYPGRCY

SEQ ID NO: 90322 - protein, 125 aa, Setaria italica
  Transcript Sequence Number=SeqID_24348
  Pfam annotation: Domain name=DUF588; Domain location=9-107; Score =11.0; E_value=3.6e-05; Accession=PF04535.4; Description=Domain of unknown function (DUF588)
SNQHGDWMQFDRYQEYKYLLAIAALAFLYSLAQAARHAFRMRGGVDPVSAPSARLLDFVGDQVVAYLLMSALSAAVPITNRMRSAVVNTFTDATAAAISMAFFAFAALALSAVVSGYKLSKQTYI

SEQ ID NO: 90323 - protein, 220 aa, Setaria italica
  Transcript Sequence Number=SeqID_24349
  Gene Ontology: Mol. function=electron carrier activity; Biological process=electron transport chain
  Homolog annotation: Hit_ID=B9RJR1; Match level="QueryCoverage=43%, HitCoverage=51%, E-value=4e-32, Identity=69%"; Hit description=Blue copper protein, putative
  Pfam annotation: Domain name=Copper-bind; Domain location=35-125; Score=-18.4; E_value=0.07; Accession=PF00127.12; Description=Copper binding proteins, plastocyaninaz
  Pfam annotation: Domain name=Cu_bind_like; Domain location=37-118; Score=141.3; E_value=3e-39; Accession=PF02298.9; Description =Plastocyanin-like domain
  Pfam module annotation: Pfam domain module=Copper-bind::Cu_bind_like; Domain location=35-125::37-118
MTSCWVSRLPLAVLLLVATCSSTAAASSYTVGDGSGWTTGVDYTSWTASKTFKVGDSLVFNYAKGLHTVVEVSAAEYMACTAANPLGSDSSGATTVPLKTPGTHYFVCSITGHCGAGMKLAVTVGGSSSPASPTPTTTPRTSPTPTTPYTTPMPTTPTTTTPTPYTTPTTPTCSGGGGGGTTATPGTTPFMSYPSAAGLGSASLAGFGLVCCMMFQLVLL

SEQ ID NO: 90324 - protein, 107 aa, Setaria italica
  Transcript Sequence Number=SeqID_24350
  Gene Ontology: Mol. function=electron carrier activity; Cellular component=integral to membrane; Biological process=oxidation reduction
  Homolog annotation: Hit_ID=Q2V065; Match level="QueryCoverage=100%, HitCoverage=20%, E-value=6e-40, Identity=70%"; Hit description =Cytochrome P450
PGYMSLPTRNNRKMRKNNKEVESILRDIIGKRIQAMKQGKSTEDDLLGLLLESNMRETEENGQSSKGMTVEEVIEECKVFYFAGMETTSVLLTWTMVVLSMHPEWQD

SEQ ID NO: 90325 - protein, 57 aa, Setaria italica
  Transcript Sequence Number=SeqID_24351
  Subcellular localization annotation: CTP_CleavageSite=47; ConfidenceScore=5.08e-01
SSPGSIPHLCKSLATASSRHWARRRRPVQHIFVALLQFEAAHFVVFLAENVTAFLYE

SEQ ID NO: 90326 - protein, 164 aa, Setaria italica
  Transcript Sequence Number=SeqID_24352
CQVSDNKVVDRMDYTSPLLHQQTIGFTEMMSKGNELIADRGLSSSVEITPDNSYGQINNTPSNAYASNHPEETSMQLPEIGTSNSVAQAHVDVSEHRFDGLTSEEIIPVPLDDIQIHEDGPQQPGADDEIDEVPFSDAPIIGAPFRLISFVARYVSGADLVNQK

SEQ ID NO: 90327 - protein, 93 aa, Setaria italica
  Transcript Sequence Number=SeqID_24353
MERNQKEKSEEPWVGRRILGVAFAGVVAVAAGAFVMLSRNGDGAEQEQTAGRTMKGPDTSGERISRNKFEEDPKRYFKTCRQKGPKAAVDDFK

SEQ ID NO: 90328 - protein, 92 aa, Setaria italica
  Transcript Sequence Number=SeqID_24354
  Gene Ontology: Mol. function=transferase activity, transferring glycosyl groups; Biological process=metabolic process
  Homolog annotation: Hit_ID=Q8LKT1; Match level="QueryCoverage=100%, HitCoverage=20%, E-value=1e-37, Identity=82%"; Hit description =Putative glucosyl transferase
VSMSWALKLTNTVGVRIALCLTYSASVFALRMKLPKLIEDGVIDESGNVKMHKMIQLMPPTDSTEIPWVSLGSTTERRRVNIRNVIDTNKLM

SEQ ID NO: 90329 - protein, 66 aa, Setaria italica
  Transcript Sequence Number=SeqID_24355
AARRGIVDAAVDGGVEDVVAAAVAEAERLAARGWDGEVLAEIRKAAWPKVWSKVKDHGAGPARPRL

SEQ ID NO: 90330 - protein, 48 aa, Setaria italica
  Transcript Sequence Number=SeqID_24356
YIYVKTKTYFSDRLNSTFSEIHALVIFRFSLFSNCFLLFMNMKFTCAP

SEQ ID NO: 90331 - protein, 84 aa, Setaria italica
  Transcript Sequence Number=SeqID_24357
  Gene Ontology: Mol. function=protein serine/threonine phosphatase activity; Cellular component=protein serine/threonine phosphatase complex; Biological process=protein amino acid dephosphorylation
  Homolog annotation: Hit_ID=B6TEB8; Match level="QueryCoverage=71%, HitCoverage=16%, E-value=4e-30, Identity=100%"; Hit description =Catalytic/ protein phosphatase type 2C/ protein serine/threonine phosphatase
MLFDSLPHMVNALKFIPFFLAMALSEDHKPNRIDERKRIENAGGIVIWAGTWRVGGVLAMSRAFGNRLLKPYVVAEPEIQVYCN

SEQ ID NO: 90332 - protein, 303 aa, Setaria italica
  Transcript Sequence Number=SeqID_24358
  Gene Ontology: Mol. function=protein serine/threonine phosphatase activity; Cellular component=protein serine/threonine phosphatase complex; Biological process=protein amino acid dephosphorylation
  Homolog annotation: Hit_ID=B6TEB8; Match level="QueryCoverage=93%, HitCoverage=77%, E-value=1e-158, Identity=96%"; Hit description =Catalytic/ protein phosphatase type 2C/ protein serine/threonine phosphatase
  Pfam annotation: Domain name=PP2C; Domain location=50-290; Score =258.6; E_value=1.5e-74; Accession=PF00481.13; Description=Protein phosphatase 2C
MMLDSSDPASPAAAADAGQVQPQRRAAGAVAQAHDGGYASGGWEREDGKLSCGYSSFRGKRATMEDFYDVKLTEIDGQAVSLFGVFDGHGGSRAAEYLKEHLFENLLKHPEFLTDTKLAISETYQKTDTDFLESEASAFRDDGSTASTAVLVGDHLYVANVGDSRAVISKAGKAMALSEDHKPNRIDERKRIENAGGIVIWAGTWRVGGVLAMSRAFGNRLLKPYVVAEPEIQEEQVNGELECLVLASDGLWDVVENEEAVSLGKSEDAPESAARKLTEIAYSRGSADNITCIVVQFHHDKTG

SEQ ID NO: 90333 - protein, 86 aa, Setaria italica
  Transcript Sequence Number=SeqID_24359
  Gene Ontology: Cellular component=integral to membrane
  Homolog annotation: Hit_ID=B4FMX3; Match level="QueryCoverage=100%, HitCoverage=25%, E-value=4e-29, Identity=70%"; Hit description =Membrane protein
FATGFLLGFVLLIQPQFGWLEQPFGSKSKSKYKAYQIILLLLALVLLAAGFAVGLVMVFRGENGNDHCRWCHFLTCVPTSSWKCDN

SEQ ID NO: 90334 - protein, 115 aa, Setaria italica
  Transcript Sequence Number=SeqID_24360
  Gene Ontology: Mol. function=oxidoreductase activity; Biological process=oxidation reduction
  Homolog annotation: Hit_ID=Q8S412; Match level="QueryCoverage=98%, HitCoverage=27%, E-value=2e-44, Identity=70%"; Hit description =Cinnamyl alcohol dehydrogenase
  Pfam annotation: Domain name=ADH_N; Domain location=31-115; Score =63.9; E_value=6.1e-16; Accession=PF08240.4; Description=Alcohol dehydrogenase GroES-like doma
MAEGMEAHGWAARDASGHLSPFNFSRRVQRDGDVTIKVLFCGLCHTDLHVIKNEWGNAMYPLVPGHEVVGVVTDVASGVTKFKAGDTVGVGYFVDSCRTCESCSKGYESYCPSSC

SEQ ID NO: 90335 - protein, 151 aa, Setaria italica
  Transcript Sequence Number=SeqID_24361
  Gene Ontology: Mol. function=transferase activity, transferring groups other than amino-acyl groups
  Homolog annotation: Hit_ID=B6TT96; Match level="QueryCoverage=100%, HitCoverage=33%, E-value=3e-34, Identity=52%"; Hit description =Transferase
MVNEATKEQGSHDVTVTVAPALPVQGHRLPLSNLDLLLPPLDVSLFFCYLHPAPTAAALKEALAKTLVAYYPLAGEVVANADGEPELLCSGRGVDFTVATAAGVDLREIRLGAVDESVEKLVPVKKAGGVVAVKVTKFRCGGAVVGCTFDH

SEQ ID NO: 90336 - protein, 62 aa, Setaria italica
  Transcript Sequence Number=SeqID_24362
KDLPMNPELILNFLRPSLLQILQHFRISNNTTISRHLSVLLWLQGGGLSSLTIIAIIVLAEG

SEQ ID NO: 90337 - protein, 329 aa, Setaria italica
  Transcript Sequence Number=SeqID_24363
  Gene Ontology: Mol. function=transporter activity; Cellular component= integral to membrane; Biological process=transport
  Homolog annotation: Hit_ID=B9RY29; Match level="QueryCoverage=99%, HitCoverage=99%, E-value=3e-94, Identity=54%"; Hit description =Coiled-coil domain-containing protein, putative
  Pfam annotation: Domain name=DUF572; Domain location=1-328; Score =407.2; E_value=2.7e-119; Accession=PF04502.5; Description=Family of unknown function (DUF572)
MGERKVLNKYYPPDFDPSKIPRRRQPKNQQIKVRMMLPMSIQCATCGTYIYKGTKFNSRKEDVVGETYLGIQIFRFYFKCTKCSAEITFKTDPQNSDYTVESGASRNFEPWREQDEAADKEKRKRDAEEMGDAMRALENRAMDSKQDMDILAALEEMRSMKSRHAGVSVDQMLEILKRSAHEKEEKAIAELDEEDEQLIKSITFRNSGFYVKRIEDDDDDDDDDDDLVPGQSSKTIKINGSSESVAKPTDVLSKTNGSEGANKEGSKSWMPKFIVKPKSTSADPKRQKTESTAVQDNGKAPVAEQKSEPAMQTNVLQSLCQNYDSDDSE

SEQ ID NO: 90338 - protein, 97 aa, Setaria italica
  Transcript Sequence Number=SeqID_24364
  Subcellular localization annotation: CTP_CleavageSite=68; ConfidenceScore=5.02e-01
RVASRERYVESGRAYMLAGVSMHAQQRANMMPAMAFNAVGASRNSIAGASRAEGTANEAASFATPAMRAMLLRSRRAREASAEQQQQAKAGEETGSS

SEQ ID NO: 90339 - protein, 86 aa, Setaria italica
  Transcript Sequence Number=SeqID_24365
  Gene Ontology: Mol. function=ubiquitin-protein ligase activity; Cellular component=ubiquitin ligase complex; Biological process =ubiquitin-dependent protein catabolic process
  Homolog annotation: Hit_ID=B6SVK1; Match level="QueryCoverage=98%, HitCoverage=12%, E-value=9e-22, Identity=65%"; Hit description =Ubiquitin-protein ligase
DAVPYMEGLVGALVRLTATLYSPEVLKVAMDHNLASVLTELLNGPAGIDEVQRLAAVGLENLSYLSIKLSQPPQDELLSKKNSIIK

SEQ ID NO: 90340 - protein, 236 aa, Setaria italica
  Transcript Sequence Number=SeqID_24366
  Gene Ontology: Mol. function=transcription regulator activity; Cellular component=nucleus; Biological process=regulation of transcription
  Homolog annotation: Hit_ID=Q9FYJ6; Match level="QueryCoverage=76%, HitCoverage=55%, E-value=9e-34, Identity=46%"; Hit description =Transcription factor bHLH111
TNTSVGMHGSLDYSGMGLDKICQEGRAVEASGSFGMRSLPDLSSFSGYRSNAESTSSVQPYLRSSNLSDSSKQEQDIVSARSSSSGSGAASERKKRPSEERTSNVKKSKQEGSKASPPKPQVPKVKIGEKITALQQIVSPFGKTDTASVLFETIKYIKFLHEQVQLLSEPYTNSSRNKGNLPWVVEHAETSKGDQAEHDLRNRGLCLVPVSWTPEVYRDGTAMDYWTPAYRGCLYR

SEQ ID NO: 90341 - protein, 53 aa, Setaria italica
  Transcript Sequence Number=SeqID_24367
KTKCVKLLARAHRELFIGSKGCIFMISFVIPSAPVFSYPLCYDNRCTACLVSS

SEQ ID NO: 90342 - protein, 72 aa, Setaria italica
  Transcript Sequence Number=SeqID_24368
KPKGPLEALRPKLQQCVIRWSPLPVIPCSFGLSASSGPLGLATPCCCTQPSVISEFKPMDLGTQVCTTLDVL

SEQ ID NO: 90343 - protein, 122 aa, Setaria italica
  Transcript Sequence Number=SeqID_24369
  Gene Ontology: Cellular component=plasma membrane
  Homolog annotation: Hit_ID=B6T3V2; Match level="QueryCoverage=100%, HitCoverage=100%, E-value=2e-53, Identity=86%"; Hit description =Negatively light-regulated protein
  Pfam annotation: Domain name=Endosulfine; Domain location=14-115; Score=-16.9; E_value=0.083; Accession=PF04667.9; Description=cAMP -regulated phosphoproteinendosulfine
  Pfam annotation: Domain name=Lg106; Domain location=38-121; Score =204.2; E_value=3.6e-58; Accession=PF07844.3; Description=Lg106-like protein
  Pfam module annotation: Pfam domain module=Endosulfine::Lg106; Domain location=14-115::38-121
MSEMKDSTAAALDGNPEPMDQTEDNSMPSAQQQEEAIKKKFGGLMPKKPPLISKDHERAYFDSADWALGKQGVAKPKGPLEALRPKLQPTRQQQQQRSRRSIYTSSENEDGDGAGAEDMNIN

SEQ ID NO: 90344 - protein, 73 aa, Setaria italica
  Transcript Sequence Number=SeqID_24370
  Gene Ontology: Mol. function=RNA polymerase II transcription factor activity; Cellular component=nucleus; Biological process=regulation of transcription
  Homolog annotation: Hit_ID=Q7XM94; Match level="QueryCoverage=100%, HitCoverage=16%, E-value=2e-24, Identity=75%"; Hit description =OSJNBa0043L24.23 protein
  Pfam annotation: Domain name=Ssl1; Domain location=2-73; Score= -161.0; E_value=0.046; Accession=PF04056.6; Description=Ssl1-like
RVLEAWERAYADDRSWEALQEDQSGLLRSIDTKTVVHAQYRRRLLLRSAAAAAARIQKGLIRYLYIVIDLSRA

SEQ ID NO: 90345 - protein, 105 aa, Setaria italica
  Transcript Sequence Number=SeqID_24371
MAGSHLPHLLLLLILAAGAPGPSSARHVITFAPARGVGPASVAWDPTAQHFVVAGGGDAVLSVSDAGVTESIVSSGASAVAVDDRRRRLLVASPGSVSAFDLRSP

SEQ ID NO: 90346 - protein, 96 aa, Setaria italica
  Transcript Sequence Number=SeqID_24372
  Gene Ontology: Mol. function=oxidoreductase activity; Cellular component=cytoplasm; Biological process=oxidation reduction
  Homolog annotation: Hit_ID=Q8H1S4; Match level="QueryCoverage=88%, HitCoverage=23%, E-value=1e-15, Identity=48%"; Hit description=1 -aminocyclopropane-1-carboxylate oxidase homolog 4
  Subcellular localization annotation: CTP_CleavageSite=35; ConfidenceScore=5.14e-01
SSLFSLVCAQLVSNGRFRSVEHRVLANKNTTARVSVASFVDVGVGRDTRRYGPIQELVHGGNSPLYRSVTVEEFVGHFYRKGSERRARLDYFKLEQ

SEQ ID NO: 90347 - protein, 223 aa, Setaria italica
  Transcript Sequence Number=SeqID_24373
  Gene Ontology: Mol. function=binding; Cellular component =mitochondrial inner membrane; Biological process=transport
  Homolog annotation: Hit_ID=Q67U56; Match level="QueryCoverage=89%, HitCoverage=81%, E-value=1e-92, Identity=85%"; Hit description =Mitochondrial substrate carrier-like protein
  Pfam annotation: Domain name=Mito_carr; Domain location=128-217; Score=82.4; E_value=1.6e-21; Accession=PF00153.19; Description =Mitochondrial carrier protein
  Pfam annotation: Domain name=Mito_carr; Domain location=5-98; Score =95.7; E_value=1.7e-25; Accession=PF00153.19; Description =Mitochondrial carrier protein
  Pfam module annotation: Pfam domain module=Mito_carr::Mito_carr; Domain location=128-217::5-98
EPAASAAAGAAAGLAAAVAAQVVWTPVDVISQRLMVQGNPCPASRYRGGVDAFRKIVGSDGLRGLYRGFGMSILTYAPSNAVWWATYSLSQKIIWSGIGCYLCEYGVGVQEIDLGDGDSSLQPGCKTIMVVQGVSAAMAGGASALVTMPLDTIKTRMQVMDGEGEPITVGRTVRRLIKEGGWAACYRGLGPRWASMSLSATTMITTYEFLKRLSDKGQESGLA

SEQ ID NO: 90348 - protein, 295 aa, Setaria italica
  Transcript Sequence Number=SeqID_24374
  Gene Ontology: Mol. function=molecular_function; Cellular component =membrane; Biological process=auxin mediated signaling pathway
  Homolog annotation: Hit_ID=Q6YUL3; Match level="QueryCoverage=97%, HitCoverage=80%, E-value=1e-128, Identity=79%"; Hit description =Nodulin-like protein
  Pfam annotation: Domain name=DUF6; Domain location=131-260; Score =57.0; E_value=7.1e-14; Accession=PF00892.12; Description=Integral membrane protein DUF6
  Pfam annotation: Domain name=DUF606; Domain location=135-257; Score= -55.0; E_value=0.017; Accession=PF04657.5; Description=Protein of unknown function, DUF606
  Pfam module annotation: Pfam domain module=DUF6::DUF606; Domain location=131-260::135-257
KKNRPPFTFSLLVQFFLLAFCGITCNQGFYLLGLHYLSPTYASAIQNTVPAITFVLAACLRLEQVSINKRYGTAKVIGTVVSIGGATIITLYKGMPLMNFKSFHMLGSSIASSNHVWDWTVGCLFLLGNCFAWSGWMVLQAPVLKKYPARLSVLALTLVFGLVQLLAIAAFCENDSDKWKLHSGGELFTVLYAGLVASGVALSLQIWCIDRGGALFTAIFQPVQTVMVAIMAAVMLGDELYTGGVIGAVLIVIGLYFVLWGKNEEKRSSNQGNEPELSRHLLREESSPEPKSMNK

SEQ ID NO: 90349 - protein, 84 aa, Setaria italica
  misc_feature (61)..(61): Xaa can be any naturally occurring amino acid
  Transcript Sequence Number=SeqID_24375
WFRMMRELITKWSASEDATQKVLKKAATEKGQKRNKLADSVKRCHDLALECGASPDSVHVXTIFEKEFNREFFCNIPTPKARLV

SEQ ID NO: 90350 - protein, 190 aa, Setaria italica
  Transcript Sequence Number=SeqID_24376
  Gene Ontology: Mol. function=catalytic activity; Cellular component =nucleus; Biological process=immune response
  Homolog annotation: Hit_ID=B9RUU0; Match level="QueryCoverage=76%, HitCoverage=34%, E-value=1e-54, Identity=69%"; Hit description =Catalytic, putative
  Pfam annotation: Domain name=HD; Domain location=100-188; Score=14.4; E_value=0.001; Accession=PF01966.14; Description=HD domain
VSGRVTCASPEGDSALAAASPAATLTFHSPSPAAAAAVARPGYGSCDRRYVKQVFDNLHGSISLDPLALQFVDTEEFQRLRDLKQLGLTYLVYPGAVHTRFEHSLGVYSLAGKAMNNLKTYQGEELGIDRIDMQTVKLAGLLHDIGHGPFSHLFEHEFLPRVNPGSTWSHERMSVLLLDSIVDKHAIDIE

SEQ ID NO: 90351 - protein, 47 aa, Setaria italica
  Transcript Sequence Number=SeqID_24377
CKERAELRRTEAGPAWEPRWDPAGVPVTGSRPSWPEKLHLPGCLRGG

SEQ ID NO: 90352 - protein, 215 aa, Setaria italica
  misc_feature (29)..(29): Xaa can be any naturally occurring amino acid
  Transcript Sequence Number=SeqID_24378
  Gene Ontology: Mol. function=chitinase activity; Biological process =positive regulation of mitosis
  Homolog annotation: Hit_ID=Q0ZH66; Match level="QueryCoverage=82%, HitCoverage=89%, E-value=4e-58, Identity=69%"; Hit description=HFR-3
  Pfam annotation: Domain name=Chitin_bind_1; Domain location=117-155; Score=61.0; E_value=4.5e-15; Accession=PF00187.11; Description =Chitin recognition protein
  Pfam annotation: Domain name=Chitin_bind_1; Domain location=158-197; Score=41.7; E_value=2.8e-09; Accession=PF00187.11; Description =Chitin recognition protein
  Pfam annotation: Domain name=Chitin_bind_1; Domain location=29-69; Score=57.6; E_value=4.7e-14; Accession=PF00187.11; Description =Chitin recognition protein
  Pfam annotation: Domain name=Chitin_bind_1; Domain location=72-112; Score=51.2; E_value=4.1e-12; Accession=PF00187.11; Description =Chitin recognition protein
  Pfam module annotation: Pfam domain module=Chitin_bind_1::Chitin_bind_ 1::Chitin_bind_1::Chitin_bind_1; Domain location=117-155::158-197::29- 69::72-112
MKVLVLCVVALAIATMATDAHAQLLNCPXTRCGKQGDGMECPNNLCCSKDGYCGIGSLYCGDGCQSGACHTNQPCGAQAGGAVCPGNLCCSRNGRCGFGSEYCGAGCQGGPCRADIKCGRQAGGKECPNNWCCSQYGYCGMGVEFCGVRCQSGPCIVDRPCGLNANGAKCTNNYCCSSSGFCGLGKEYCGDGCQGQFGSCYLKAVADALRLCVIP

SEQ ID NO: 90353 - protein, 268 aa, Setaria italica
  Transcript Sequence Number=SeqID_24379
  Gene Ontology: Mol. function=acid phosphatase activity; Cellular component=plasma membrane
  Homolog annotation: Hit_ID=B6TV55; Match level="QueryCoverage=89%, HitCoverage=81%, E-value=1e-124, Identity=88%"; Hit description=Stem 28 kDa glycoprotein
  Pfam annotation: Domain name=Acid_phosphat_B; Domain location=41-268; Score=315.1; E_value=1.4e-91; Accession=PF03767.6; Description=HAD superfamily, subfamily IIIB (Acid
MATATTARLVLLVALVAGSAWAVQAAADESQKAPLIHALRPMVGSAGDLGRRGGVPCDSWRLAVEAYNKRDWRTVPADCEGYVGHYMLGGHYRRDSRVVVNEAVAYAERLKLGGKGKEVWVFDIDETSLSNLPYYATHGFGTKPYNATSFNAYVLEGSAPVLPETQRLYNKLIALGIKPVFLTGRTEDQRAITVANLRRQGYSGWMKLLLKPVGFKASAIGFKSGERQKLQDAGYVIVGNIGDQWSDILGAPEGARTFKLPDPIYYIG

SEQ ID NO: 90354 - protein, 246 aa, Setaria italica
  Transcript Sequence Number=SeqID_24380
  Gene Ontology: Mol. function=acid phosphatase activity; Cellular component=plasma membrane
  Homolog annotation: Hit_ID=B6TV55; Match level="QueryCoverage=93%, HitCoverage=78%, E-value=1e-114, Identity=85%"; Hit description=Stem 28 kDa glycoprotein
  Pfam annotation: Domain name=Acid_phosphat_B; Domain location=19-246; Score=324.5; E_value=2.1e-94; Accession=PF03767.6; Description=HAD superfamily, subfamily IIIB (Acid
LFLLVGRPVVFLRPIVRRPLVGSAGDLGWRGGVPCDSWRLAVETNNKRDWRTVPANCERYVGHYMLGGHYRRDSRVVIDEAVAYAEGLQLAGNGKEVWVFDIDETALSNLPYYASNGFGTKPYDATSFNAYVFAGSAPVLPETQRLYNKLISLGITPVFLTGRRENQRAITVANLRREGYSGWMKLLLKPVGYNGTAIGFKSDERQKLQDAGYVIVGNIGDQWSDILGAPEGVRTFKLPDPLYYIG

SEQ ID NO: 90355 - protein, 94 aa, Setaria italica
  Transcript Sequence Number=SeqID_24381
  Subcellular localization annotation: CTP_CleavageSite=27; ConfidenceScore=5.24e-01
GRAGPTPSSSMPPPPPPKPASPAPQPEAEAAGAEGSAGPSPSVSDSSAEEAPNPSGAYSGDTEMEEAAPPPAERQRQQRPRAPYVIPEWSAAPD

SEQ ID NO: 90356 - protein, 86 aa, Setaria italica
  Transcript Sequence Number=SeqID_24382
FAHRQDKGIIPSCLDVKWLICVPWIKLLINCFRFQLGSGLHPFVWWRIFIPDYDLFKPQCSPQPSVYNFIEFRMILGGRIPVVHNN

SEQ ID NO: 90357 - protein, 70 aa, Setaria italica
  Transcript Sequence Number=SeqID_24383
RSVVDWWRHHESSGGGGGGRCSLWANGGTAAEGGLRAGSERDDEDPKVAAARRQEEDRKFWEACLASGYP

SEQ ID NO: 90358 - protein, 45 aa, Setaria italica
  Transcript Sequence Number=SeqID_24384
MHCRMARFLLLLPALALVATSAWAPAAFADPQATLLNLGCSQYNA

SEQ ID NO: 90359 - protein, 148 aa, Setaria italica
  misc_feature (16)..(16): Xaa can be any naturally occurring amino acid
  misc_feature (35)..(35): Xaa can be any naturally occurring amino acid
  misc_feature (144)..(144): Xaa can be any naturally occurring amino acid
  Transcript Sequence Number=SeqID_24385
  Gene Ontology: Cellular component=endoplasmic reticulum membrane; Biological process=transport
  Homolog annotation: Hit_ID=Q8LFP1; Match level="QueryCoverage=99%, HitCoverage=60%, E-value=3e-34, Identity=48%"; Hit description=PRA1 family protein H
  Pfam annotation: Domain name=PRA1; Domain location=2-147; Score= -10.5; E_value=0.00035; Accession=PF03208.11; Description=PRA1 family protein
  Subcellular localization annotation: CTP_CleavageSite=24; ConfidenceScore=5.60e-01
LSSADLAAPTRPWSLXAFVGPPASVSYSWPPTSTXARLRVQENVRRYARNYAALAILVFACCLYRMPMALLGMLASLAVWEGVRYCRDHWTLSPGIAQALLHCAQIATAILLYVCNLQFALVYAIGLSYVVMMLHASLRKLTPXKLPD

SEQ ID NO: 90360 - protein, 167 aa, Setaria italica
  Transcript Sequence Number=SeqID_24386
  Homolog annotation: Hit_ID=B9RW62; Match level="QueryCoverage=70%, HitCoverage=19%, E-value=2e-14, Identity=39%"; Hit description =Micronuclear linker histone polyprotein, putative
MGNSSNNKKLPPYLLLVLLAIGAAAVSVGILHKMRERRVLSVLIQEHDQQLMSFQVLLEKEKEINKEMRRKVDELEAKTSVLSIERAELKNKLMDSETTTTYLTNTQKELEAALVEKESHINQMKENTAASNPDQTTSIKELLQQKEAEPDKSENSSDSIPATTEDS

SEQ ID NO: 90361 - protein, 52 aa, Setaria italica
  Transcript Sequence Number=SeqID_24387
KYRTHYQKTPVEGSKCATAMADLHLSIIICRIRECSIEHIDVFGYLRFESKL

SEQ ID NO: 90362 - protein, 117 aa, Setaria italica
  misc_feature (20)..(20): Xaa can be any naturally occurring amino acid
  Transcript Sequence Number=SeqID_24388
VIYPANTQKELEAALVEKRXHINQMKENTAASNPATTEDSSNNTTASESDHQDESNVLGANNENATSDTVALEKPENSGDSMPATAEEQNSSITNASESSQQDESIVAGANNENATS

SEQ ID NO: 90363 - protein, 145 aa, Setaria italica
  Transcript Sequence Number=SeqID_24389
  Gene Ontology: Cellular component=integral to membrane
  Homolog annotation: Hit_ID=B9SRB0; Match level="QueryCoverage=96%, HitCoverage=33%, E-value=1e-20, Identity=37%"; Hit description =Auxin:hydrogen symporter, putative
SCSYLPAKLKSSQFACLDAGNVGNIFLIIVPALCKEKGSPFGAPDACQTYGLAYSSLSLAIGAVFLWSFAYNIIRVTSQVSEGDGDALTNQTAVFIPRSATGPVSEKFSTSIMNECTLPLISTDIPPNKSKVPLLGRARQFLPSI

SEQ ID NO: 90364 - protein, 110 aa, Setaria italica
  Transcript Sequence Number=SeqID_24390
  Pfam annotation: Domain name=SKG6; Domain location=36-74; Score=16.1; E_value=0.011; Accession=PF08693.2; Description=Transmembrane alpha -helix domain
  Subcellular localization annotation: CTP_CleavageSite=47; ConfidenceScore=5.73e-01
VYSFFSGGPSLRLPAPSTPAPAPSPTPVNVTPTATPPGRRRNKAGIVAAIAMPIVAAVLAISTVCLCFLWRRRRPAREQTPSYSTNDADIESIDSLLLDISTLRAATDHF

SEQ ID NO: 90365 - protein, 124 aa, Setaria italica
  Transcript Sequence Number=SeqID_24391
  Gene Ontology: Mol. function=pyridoxal phosphate binding; Cellular component=mitochondrion; Biological process=photorespiration
  Homolog annotation: Hit_ID=B6U6Q5; Match level="QueryCoverage=100%, HitCoverage=26%, E-value=4e-59, Identity=88%"; Hit description =Alanine--glyoxylate aminotransferase 2
NPLCTAGGLAVLKVLEKEKLQENAFVVGSYLKDRLRGLQEKHEIIGDVRGTGFMLGVELVTDRQLKTPAKEEICHAMEHMKDMGVLVGKGGFYGNVFRITPPLCFTKEDADFFVEVMDVALSKL

SEQ ID NO: 90366 - protein, 127 aa, Setaria italica
  Transcript Sequence Number=SeqID_24392
PAHHPPPPHHRTPPPHFSPPAHHHAPPPPAHHAPPPHFPTPPTHHSPPPPSHHAPPPHFPPSDHHSPPPPARHTSPPHFPPPAHHAPPPHFPPPAHHSPPSPAHHLPAPTSIPLPTACSIAAFRHLH

SEQ ID NO: 90367 - protein, 49 aa, Setaria italica
  Transcript Sequence Number=SeqID_24393
WITILLSLYVFIHGQVIWSICFAFVLEFWDLLFHSISISYVLDVAGKCD

SEQ ID NO: 90368 - protein, 213 aa, Setaria italica
  Transcript Sequence Number=SeqID_24394
  Gene Ontology: Mol. function=N-acetyltransferase activity; Cellular component=protein complex; Biological process=metabolic process
  Homolog annotation: Hit_ID=B6TRH8; Match level="QueryCoverage=89%, HitCoverage=89%, E-value=1e-100, Identity=91%"; Hit description=N -acetyltransferase
  Pfam annotation: Domain name=Acetyltransf_1; Domain location=101-182; Score=40.2; E_value=8.2e-09; Accession=PF00583.16; Description =Acetyltransferase (GNAT) family
MEVSGAAPAAAAAVEAESGSGGKGSWYVLGERAVLVPYLREHVPRYHEWMQDPALLEATASEPLSLAQEFDVHRSWTLDPLKHTFIVLDKELIEGRFSPGNRHTEAMVGDVNIYMNDPDDMQLAEIEIMIAEHKSRGKGIGQEAILLMMAFAVEKYGIHTFRAKISESNTASLKLFRKLGFKDASYSAVFKEVTLEAPADALPLRFPLTIGDW

SEQ ID NO: 90369 - protein, 101 aa, Setaria italica
  misc_feature (89)..(89): Xaa can be any naturally occurring amino acid
  Transcript Sequence Number=SeqID_24395
YENLKKQGLAPPSDDEKDYGEVSSEEDEDAIASRTVDRRLFEVIRRIRSGDPAILDKDAKVYSSEEEGGEKKEGESKKKKKAKKEKPLXLKDVNARHLLEE

SEQ ID NO: 90370 - protein, 553 aa, Setaria italica
  Transcript Sequence Number=SeqID_24396
  Gene Ontology: Mol. function=zinc ion binding; Cellular component =nucleus; Biological process=ribosome biogenesis
  Homolog annotation: Hit_ID=B9RM59; Match level="QueryCoverage=80%, HitCoverage=72%, E-value=7e-59, Identity=37%"; Hit description =Trichohyalin, putative
  Pfam annotation: Domain name=Kri1; Domain location=303-485; Score =161.5; E_value=2.6e-45; Accession=PF05178.4; Description=KRI1-like family
TEKKGIRKERPNAIASRTVDRRLFEVIRRIRSGDPAILDKDAKVYSSEEEGGEKKEGESKKKKKAKKEKPLYLKDVNARHLLEEGPEFTAQTSRSSRYDRIAYDEQQKKGLEAFLEAQKEVLGDDDDDDLFHEKPKAGAAADEDEDEEEKQTKELAGEVFGKDEELDENEKFLKEFFLKRPYLDSGKKSYLEDIQELSDEEELKDQEKYEYVYSFRHEEAEASGAVVADRVMGHSRVVEGSVRKKESSRKQQRKSKEERMARAKQEQAEELKHLKNLKKKEIAEKLERIRMIAGIEGDAACKLGADDLEEDFDPEDYDKKMQEMFDDSYYEADDVDPEFGSGEEMDLKKPDFDKEDELLGLPKGWDSENCKEESSATDGKATKGKISLKDKVELEKEMEEYYKLDYEDTIGDLKTRFKYKKVNPNSFGLSTYEILASDDKDLNQYVSMKKLAPYRESEWKITHHRKLSKDLILGGQKKVGKKDKSGKKSGSAEGGPSSSKPEKDKLPIEQELTDDKKKSTRSRRRKRRNEDLKMSADRLGAYGKLNSKRHKSH

SEQ ID NO: 90371 - protein, 130 aa, Setaria italica
  misc_feature (38)..(38): Xaa can be any naturally occurring amino acid
  misc_feature (124)..(124): Xaa can be any naturally occurring amino acid
  Transcript Sequence Number=SeqID_24397
  Gene Ontology: Mol. function=protein serine/threonine kinase activity; Cellular component=cellular_component; Biological process =protein amino acid phosphorylation
  Homolog annotation: Hit_ID=Q8W306; Match level="QueryCoverage=51%, HitCoverage=11%, E-value=3e-32, Identity=97%"; Hit description=SRPK4
MAEAEAAGSSSSRRRMEDKEGAAAAAAAAMEADAEAGXQGRGEDEDEEGESSDYTSEDEGTEDYRRGGYHAVRVGDSFKQGAYVVQSKLGWGHFSTVWLAWDTAHSRYVALKVQKSAQHYTEAXAMDEIK

SEQ ID NO: 90372 - protein, 42 aa, Setaria italica
  Transcript Sequence Number=SeqID_24398
RGALRRSWWTLGRVESQRGATAWVNRPAAALLDRALARMAEE

SEQ ID NO: 90373 - protein, 79 aa, Setaria italica
  Transcript Sequence Number=SeqID_24399
  Gene Ontology: Mol. function=methyltransferase activity; Biological process=metabolic process
  Homolog annotation: Hit_ID=B9RWD4; Match level="QueryCoverage=53%, HitCoverage=5%, E-value=1e-12, Identity=69%"; Hit description=S -adenosylmethionine-dependent methyltransferase, putative
MATTPPPPPASILGTLGDFTSRENWDKFFALRGTGDSFEWYAEWPNLQTPLLALLGDRGAAAEADAGAWGAGPGDPGAR

SEQ ID NO: 90374 - protein, 56 aa, Setaria italica
  Transcript Sequence Number=SeqID_24400
  Gene Ontology: Mol. function=peptidase activity
  Homolog annotation: Hit_ID=B6SS76; Match level="QueryCoverage=100%, HitCoverage=9%, E-value=1e-12, Identity=67%"; Hit description =Microtubule-associated protein TORTIFOLIA1
MGAAARREPLKQRVNRCLLKLSDRDTEAMAAAELEAIARALDPDELPAFVSAVSDA

SEQ ID NO: 90375 - protein, 144 aa, Setaria italica
  Transcript Sequence Number=SeqID_24401
  Gene Ontology: Mol. function=transferase activity, transferring glycosyl groups; Biological process=metabolic process
  Homolog annotation: Hit_ID=B9RJL9; Match level="QueryCoverage=99%, HitCoverage=29%, E-value=5e-48, Identity=60%"; Hit description=UDP -glucuronosyltransferase, putative
DLLARLNARPGSRAPAVSCVIADGVMSFAQRVAEEMGILALVFWTTSACGFMGYLHFAELIRRGYVPLKDESDLTNGYLDTAIDWIPGMPGMRLKDIPSFIRTTDRDDVMLNFDGGEAQNARKARGVILNTYDALEQGVVDALR

SEQ ID NO: 90376 - protein, 71 aa, Setaria italica
  Transcript Sequence Number=SeqID_24402
  Subcellular localization annotation: CTP_CleavageSite=68; ConfidenceScore=5.21e-01
ARAAGGITGRRARIHRRTGRGGFLWTRGSPGAVATATAAFVRFRTAPGSGLARLGSGVCDCELTTCAVAAA

SEQ ID NO: 90377 - protein, 69 aa, Setaria italica
  Transcript Sequence Number=SeqID_24403
  Subcellular localization annotation: CTP_CleavageSite=42; ConfidenceScore=5.47e-01
MRWSAAAAAVSAAATAAASAACSSTTGSSAPSEEDAGSRRRRGAAAADERFAPRFDGLRFIETLVTAHR

SEQ ID NO: 90378 - protein, 76 aa, Setaria italica
  Transcript Sequence Number=SeqID_24404
AVAAASGAELLACDCDAPAPPAVGRCDGLLLSRQHHDDEVHEGPASREKPRGGGGNRFAPRFDGLRFIETLVTAHR

SEQ ID NO: 90379 - protein, 76 aa, Setaria italica
  Transcript Sequence Number=SeqID_24405
LRGEEKNDVNLRIWLSCYKNVAAPPLKKQVAVRTSIHVLHSIRRIVVLFPTIYKEKRCKLDQQFKCTEVVLNMGLP

SEQ ID NO: 90380 - protein, 102 aa, Setaria italica
  Transcript Sequence Number=SeqID_24406
RFKESLDRGFEISALVVAPSVAGLSGKVLGYVKGSSDLTGGHMAVAPECFLFYSAVCGLLVVLFCTVPPSLSSGKDMRRAKKCIPGIAYIALLFLVVATVVA

SEQ ID NO: 90381 - protein, 196 aa, Setaria italica
  Transcript Sequence Number=SeqID_24407
  Homolog annotation: Hit_ID=B2Z6N3; Match level="QueryCoverage=96%, HitCoverage=7%, E-value=4e-47, Identity=50%"; Hit description =Neuroblastoma-amplified gene
GDAHTWESMLVDNRKFLSFAVLELPWLLKLSNEEMWDGENQTSRTDHTTRKYRFSTKVEATISIIYWLAVNGLAPNDNLIMILAKSIMEPPVDEEFDVLGCSVLLNLMDPFNGVKIIEEELKRRECYQEISSVMSIGMLYSSLNNSKKECSTPEQRRNLLLHKFHEKFTSADTDDLDQIDMANTTFWREWKSKLEE

SEQ ID NO: 90382 - protein, 73 aa, Setaria italica
  Transcript Sequence Number=SeqID_24408
  Gene Ontology: Biological process=lipid metabolic process
  Homolog annotation: Hit_ID=B6T692; Match level="QueryCoverage=68%, HitCoverage=21%, E-value=2e-19, Identity=86%"; Hit description =Surfactant protein B containing protein
  Pfam annotation: Domain name=SapB_2; Domain location=28-62; Score =26.7; E_value=9.5e-05; Accession=PF03489.9; Description=Saposin-like type B, region 2
PSIVGSFGNNKLPNFYNTRSSNKIEGHVQQCKRLVLQYVPLILINGEKFLEKNDVCALVQACPASQKRQPAHS

SEQ ID NO: 90383 - protein, 102 aa, Setaria italica
  Transcript Sequence Number=SeqID_24409
  Gene Ontology: Biological process=lipid metabolic process
  Homolog annotation: Hit_ID=B6T8B6; Match level="QueryCoverage=64%, HitCoverage=28%, E-value=4e-20, Identity=71%"; Hit description =Surfactant protein B containing protein
  Pfam annotation: Domain name=SapB_1; Domain location=49-88; Score =30.6; E_value=6.5e-06; Accession=PF05184.7; Description=Saposin-like type B, region 1
MGSKAPLFLLLLLLLVASGPARAKDAGYGPVYKEQISSIKIPVHLKSSNPICSACENFTNEAVSYLSKKQTQDKIVEFLHDACSQSFSLEQKVIILSIFVSS

SEQ ID NO: 90384 - protein, 70 aa, Setaria italica
  Transcript Sequence Number=SeqID_24410
  Gene Ontology: Biological process=lipid metabolic process
  Homolog annotation: Hit_ID=B6T692; Match level="QueryCoverage=74%, HitCoverage=22%, E-value=6e-22, Identity=92%"; Hit description =Surfactant protein B containing protein
  Pfam annotation: Domain name=SapB_2; Domain location=20-54; Score =26.7; E_value=9.5e-05; Accession=PF03489.9; Description=Saposin-like type B, region 2
KNKLLNYFLIKECNKIEGHVQQCKRLVLQYVPLILINGEKFLEKNDVCALVQACPASQKRQPAHSWTRDW

SEQ ID NO: 90385 - protein, 115 aa, Setaria italica
  Transcript Sequence Number=SeqID_24411
  Gene Ontology: Cellular component=lysosome; Biological process=lipid metabolic process
  Homolog annotation: Hit_ID=B6T692; Match level="QueryCoverage=95%, HitCoverage=47%, E-value=2e-49, Identity=86%"; Hit description =Surfactant protein B containing protein
  Pfam annotation: Domain name=SapB_1; Domain location=20-58; Score =26.7; E_value=9.2e-05; Accession=PF05184.7; Description=Saposin-like type B, region 1
  Pfam annotation: Domain name=SapB_2; Domain location=61-95; Score =26.7; E_value=9.5e-05; Accession=PF03489.9; Description=Saposin-like type B, region 2
  Pfam module annotation: Pfam domain module=SapB_1::SapB_2; Domain location=20-58::61-95
TKQVIGLCRDTALFSGVRSDSTCVFCHHLLDEIMSKLKDPDAEFEIIQILIKECNKIEGHVQQCKRLVLQYVPLILINGEKFLEKNDVCALVQACPASQKTSASSFLDEGLVSDA

SEQ ID NO: 90386 - protein, 232 aa, Setaria italica
  Transcript Sequence Number=SeqID_24412
  Gene Ontology: Mol. function=nucleic acid binding; Cellular component= lysosome; Biological process=lipid metabolic process
  Homolog annotation: Hit_ID=B6T692; Match level="QueryCoverage=90%, HitCoverage=92%, E-value=4e-90, Identity=77%"; Hit description =Surfactant protein B containing protein
  Pfam annotation: Domain name=SapB_1; Domain location=137-175; Score =26.7; E_value=9.2e-05; Accession=PF05184.7; Description=Saposin-like type B, region 1
  Pfam annotation: Domain name=SapB_1; Domain location=51-90; Score =22.7; E_value=0.0015; Accession=PF05184.7; Description=Saposin-like type B, region 1
  Pfam annotation: Domain name=SapB_2; Domain location=178-212; Score =29.6; E_value=1.2e-05; Accession=PF03489.9; Description=Saposin-like type B, region 2
  Pfam annotation: Domain name=SapB_2; Domain location=92-125; Score =20.6; E_value=0.0066; Accession=PF03489.9; Description=Saposin-like type B, region 2
  Pfam module annotation: Pfam domain module=SapB_1::SapB_1::SapB _2::SapB_2; Domain location=137-175::51-90::178-212::92-125
FRSGNRHHSKAPFFLLVLLLLVAWAPSAQARDADHSPIYKEHIPVHLRSSSPLCSGCENFASEAISYLSEKQTQDKIMEFLHDACSQSFSLEQKCLELMDSYATLLFAKITEIKPEEFCKQHGMCRDIAHLSGVRSDSTCVFCHHLLDEIMSKLKDPDAEFEIIQILIKECNKIEGHVQQCKRLVLQYIPLILVNGEKFLEKNDVCALVQACPASRKRTAISVEEGVLLSDA

SEQ ID NO: 90387 - protein, 151 aa, Setaria italica
  Transcript Sequence Number=SeqID_24413
  Gene Ontology: Mol. function=transferase activity; Cellular component= mitochondrion; Biological process=biosynthetic process
  Homolog annotation: Hit_ID=Q8L3X9; Match level="QueryCoverage=98%, HitCoverage=32%, E-value=2e-59, Identity=73%"; Hit description=3 -oxoacyl-[acyl-carrier-protein] synthase, mitochondrial
  Pfam annotation: Domain name=Ketoacyl-synt_C; Domain location=1-107; Score=154.0; E_value=4.5e-43; Accession=PF02801.14; Description=Beta- ketoacyl synthase, C-terminal do
DAHHITQPQHDGRGAILAMKRALDQSGLSANEIDYVNAHATSTPLGDAVEANAIKTIFGDHAASGDLALSSTKGAIGHLLGAAGSVEAIFTVLAIHHGVAPPTLNLEQPDPLFEGAFTPLAAARKMPIRAAISNSFGFGGTNTSLLFSSPP

SEQ ID NO: 90388 - protein, 82 aa, Setaria italica
  misc_feature (1)..(11): Xaa can be any naturally occurring amino acid
  Transcript Sequence Number=SeqID_24414
XXXXXXXXXXXFIKAFAWFFSIIWNNWPVSPSLAGSICRPGRLVSYLDRDSPGPRITGTAGSETQNHDTKLESETQNRRSKI

SEQ ID NO: 90389 - protein, 284 aa, Setaria italica
  Transcript Sequence Number=SeqID_24415
  Gene Ontology: Mol. function=hydrolase activity
  Homolog annotation: Hit_ID=B6UBZ5; Match level="QueryCoverage=93%, HitCoverage=81%, E-value=1e-105, Identity=75%"; Hit description =Hydrolase
  Pfam annotation: Domain name=Abhydrolase_1; Domain location=41-269; Score=25.5; E_value=4.9e-05; Accession=PF00561.12; Description =alphabeta hydrolase fold
  Pfam annotation: Domain name=Thioesterase; Domain location=46-239; Score=-45.5; E_value=0.064; Accession=PF00975.12; Description =Thioesterase domain
  Pfam module annotation: Pfam domain module=Abhydrolase_1::Thioesterase ; Domain location=41-269::46-239
LQPPSSEQQQPPRPVVVLIHGFGPDPTWQWAAQAGPLSRHFDLVVPTLLFFGASATRGPARSDAFQAAALAALLTGEAHLPGAAGRTVHVVGTSYGGLVAYHLARELHGRGAATPVAVGKVALCDSDACKGADDDRALAARSGVGEVTELLAPADTRALRRLMAICAHRPIKYIPECLLRDMLRKYFADKREDKIALIKGITTGEGFPLTPLSQEVLIIWGEFDQIFPVEKAHKMKEKLGEKATVKVIPNAGHLPQQEDPKLFNQILLDFLLHPSTSNGSAAAK

SEQ ID NO: 90390 - protein, 71 aa, Setaria italica
  Transcript Sequence Number=SeqID_24416
FFWHLNLGVRLEACYKVTHSTCPKMLPLHHIIQAPVNLGCWMMEGHSRMKRFRKGHVHETKSFKPIAATYR

SEQ ID NO: 90391 - protein, 86 aa, Setaria italica
  Transcript Sequence Number=SeqID_24417
  Gene Ontology: Mol. function=transferase activity, transferring glycosyl groups; Cellular component=integral to membrane; Biological process=cell wall organization and biogenesis
  Homolog annotation: Hit_ID=B6UFF1; Match level="QueryCoverage=74%, HitCoverage=13%, E-value=5e-23, Identity=78%"; Hit description =Glycosyltransferase 6
RGAAVPGPAGGGKWGWRRPFVTHFVGCQPCGGWRNPMYSRESCDDGMRRALGFADDQVLRAYGFRHAAPLNDSVRPLPFDYPARNN

SEQ ID NO: 90392 - protein, 48 aa, Setaria italica
  Transcript Sequence Number=SeqID_24418
  Homolog annotation: Hit_ID=B6T693; Match level="QueryCoverage=97%, HitCoverage=41%, E-value=8e-19, Identity=95%"; Hit description =Ubiquitin domain containing 1
TALAQTIVDSAGIIVSNPDMTLCYDERGAKYELPKYVLSEPTNLIRQG

SEQ ID NO: 90393 - protein, 121 aa, Setaria italica
  Transcript Sequence Number=SeqID_24419
  Gene Ontology: Cellular component=cytoplasm; Biological process =protein modification process
  Homolog annotation: Hit_ID=B6T693; Match level="QueryCoverage=93%, HitCoverage=100%, E-value=2e-59, Identity=95%"; Hit description =Ubiquitin domain containing 1
MSVRSAVAMGCAGSTPKVDENSKKLKKPKAWKHTQPITPAQLKQMRDEFWDTAPHYGGQKEIWDALKVAAESDLALAQTIVDSAGIIVSNPDMTLCYDERGAKYELPKYVLSEPTNLIRQG

SEQ ID NO: 90394 - protein, 56 aa, Setaria italica
  Transcript Sequence Number=SeqID_24420
LKSSLSVNFAYTETKSDRYSIILVIAQSFASIVKAVKKLYPFFSIGFTPCTGMFPS

SEQ ID NO: 90395 - protein, 321 aa, Setaria italica
  Transcript Sequence Number=SeqID_24421
  Gene Ontology: Mol. function=substrate-specific transmembrane transporter activity; Cellular component=integral to membrane; Biological process=transmembrane transport
  Homolog annotation: Hit_ID=Q6B4G9; Match level="QueryCoverage=94%, HitCoverage=57%, E-value=1e-154, Identity=87%"; Hit description =Sugar transport protein 1
  Pfam annotation: Domain name=MFS_1; Domain location=30-318; Score= -7.5; E_value=0.05; Accession=PF07690.8; Description=Major Facilitator Superfamily
  Pfam annotation: Domain name=Sugar_tr; Domain location=26-321; Score =109.1; E_value=1.5e-29; Accession=PF00083.16; Description=Sugar (and other) transporter
  Pfam module annotation: Pfam domain module=MFS_1::Sugar_tr; Domain location=30-318::26-321
MAGGAMVNTAGGKDYPGKLTLFVFFTCVVAATGGLIFGYDIGISGGVTSMDPFLEKFFPQVFHKKKEVKTNQYCKYDNQLLQTFTSSLYLAALVASFFAATVTRVMGRKWSMFGGGLTFLIGAALNGAAENVAMLIIGRILLGVGVGFANQSVPVYLSEMAPARLRGMLNIGFQLMITIGILAAELINYGTNKIKAGYGWRVSLALAAVPAGIITLGSLFLPDTPNSLLERGHADEARRMLRRIRGTEDIGEEYADLVAASEEARQVRHPWRNIVKRRYRAQLTMAIMIPFFQQLTGINVIMFYAPVLFETLGFKGTPRSS

SEQ ID NO: 90396 - protein, 76 aa, Setaria italica
  Transcript Sequence Number=SeqID_24422
  Gene Ontology: Mol. function=electron carrier activity; Cellular component=endoplasmic reticulum membrane; Biological process =oxidation reduction
  Homolog annotation: Hit_ID=Q6YVG7; Match level="QueryCoverage=90%, HitCoverage=16%, E-value=8e-32, Identity=91%"; Hit description =Putative thromboxane-A synthase
EEERARHPYAHIPFGVGPRACIGHKFALQQVKLAVVGLYRRYVFRHSPAMESPIQFDFDLVLAFRHGVKLRAIRRE

SEQ ID NO: 90397 - protein, 77 aa, Setaria italica
  Transcript Sequence Number=SeqID_24423
NLIKFIHKCSLAEMPVRCYGSLLALMLLFANTLASLHNMLVRCPSPLFASIVVEDIYGWFNAICLLLGTHFQLRQTP

SEQ ID NO: 90398 - protein, 202 aa, Setaria italica
  Transcript Sequence Number=SeqID_24424
  Gene Ontology: Mol. function=transferase activity; Cellular component= chloroplast
  Homolog annotation: Hit_ID=B9R7P1; Match level="QueryCoverage=100%, HitCoverage=68%, E-value=1e-51, Identity=33%"; Hit description =Pentatricopeptide repeat-containing protein, putative
  Pfam annotation: Domain name=PPR; Domain location=110-144; Score =38.2; E_value=3.3e-08; Accession=PF01535.12; Description=PPR repeat
  Pfam annotation: Domain name=PPR; Domain location=14-48; Score=22.3; E_value=0.002; Accession=PF01535.12; Description=PPR repeat
  Pfam annotation: Domain name=PPR; Domain location=145-179; Score =50.6; E_value=6.2e-12; Accession=PF01535.12; Description=PPR repeat
  Pfam annotation: Domain name=PPR; Domain location=75-109; Score=29.6; E_value=1.3e-05; Accession=PF01535.12; Description=PPR repeat
  Pfam module annotation: Pfam domain module=PPR::PPR::PPR::PPR; Domain location=110-144::14-48::145-179::75-109
YFDLAGKGLTPNLFICSSLVSCFYRKGKVDEANLVLQKLVDTDMIPDISATRLEIGKLANALDTVAGGNLHSAKIMLNIVIFGLCKLGRIEDAKNMFANLKTKGFVADNFTYSSLIHGCSTSGFVDVAFDLRDEMLSVGLTPNIVTYNSLIYGLCKSGELSRAVSLFKKLQSKGISPNAITYNTLIDKYCKDGHITEAFKVK

SEQ ID NO: 90399 - protein, 143 aa, Setaria italica
  misc_feature (76)..(76): Xaa can be any naturally occurring amino acid
  Transcript Sequence Number=SeqID_24425
  Gene Ontology: Mol. function=catalytic activity
  Subcellular localization annotation: CTP_CleavageSite=47; ConfidenceScore=5.46e-01
TWPFGPRSGLCSSLSSGVVSKVVQIPSTQLSHPSGTVEAHNMDMPVMLQTTAAVHPGASGGMLVNSHGLMVGIVTXNEEPAILEQLDKPNKVLSSVWALAPSSSQFIDNPPEKGGEEKVMEFSKFLSNKQATLKSSTDLKELF

SEQ ID NO: 90400 - protein, 136 aa, Setaria italica
  Transcript Sequence Number=SeqID_24426
  Gene Ontology: Mol. function=catalytic activity
  Homolog annotation: Hit_ID=B9RBB4; Match level="QueryCoverage=97%, HitCoverage=20%, E-value=1e-24, Identity=40%"; Hit description =Trypsin domain-containing protein, putative
NAHLLEPWRLGRTSPLGAQTSSAGEYLSARENRSLQPQQCKFSNDDAVKHEVSLFNLGFKREKRISVRLDHAERQVWCSASVVFISKGPLDVALLQMEEVPIELNTIRPEFVCPTAGSSVYVVGHGLFGPRSGDKS

SEQ ID NO: 90401 - protein, 237 aa, Setaria italica
  Transcript Sequence Number=SeqID_24427
  Gene Ontology: Mol. function=catalytic activity; Cellular component =peroxisome; Biological process=proteolysis
  Homolog annotation: Hit_ID=B9RBB4; Match level="QueryCoverage=100%, HitCoverage=33%, E-value=2e-51, Identity=44%"; Hit description =Trypsin domain-containing protein, putative
LDHAERQVWCSASVVFISKGPLDVALLQMEEVPIELNTIRPEFVCPTAGSSVYVVGHGLFGPRSGLCSSLSSGVVSKVVQIPSTQLSHPSGTVEAHNMDMPVMLQTTAAVHPGASGGMLVNSHGLMVGIVTSNAKHGGGSTIPHLNFSIPCKSLEIIFKYSENEEPAILEQLDKPNKVLSSVWALAPSSSQFIDNPPEKGGEEKVMEFSKFLSNKQATLKSSTDLKELFKRMMPSKM

SEQ ID NO: 90402 - protein, 67 aa, Setaria italica
  Transcript Sequence Number=SeqID_24428
  Homolog annotation: Hit_ID=B6STA0; Match level="QueryCoverage=55%, HitCoverage=18%, E-value=1e-11, Identity=94%"; Hit description=Actin associated protein
  Subcellular localization annotation: CTP_CleavageSite=35; ConfidenceScore=5.74e-01
MGSSSSPSPPPPPMIGRAGNLTVFITPPSPASTPRGASRTPPPESPHSDFSTPTPQRAAPSPSSSPS

SEQ ID NO: 90403 - protein, 140 aa, Setaria italica
  Transcript Sequence Number=SeqID_24429
  Gene Ontology: Mol. function=metal ion binding; Cellular component =plasma membrane
  Homolog annotation: Hit_ID=B6SRS7; Match level="QueryCoverage=89%, HitCoverage=27%, E-value=5e-48, Identity=73%"; Hit description =Copine-1
  Pfam annotation: Domain name=Copine; Domain location=15-137; Score =140.4; E_value=5.5e-39; Accession=PF07002.8; Description=Copine
TTLVENTNTQTNTRSLHAMGNTPNPYEQAISIIGRTLARFDEDNLIPCFGFGDATTHDRSVFSFNHDNQPCDGFEQALSRYREIVPQLKLAGPTSFAPIIETAIGIVDSSGGQYHVLLKLWNDFSVPRSACSKPSQGWLS

SEQ ID NO: 90404 - protein, 417 aa, Setaria italica
  Transcript Sequence Number=SeqID_24430
  Gene Ontology: Mol. function=metal ion binding; Cellular component =plasma membrane
  Homolog annotation: Hit_ID=B6SRS7; Match level="QueryCoverage=91%, HitCoverage=87%, E-value=1e-152, Identity=66%"; Hit description =Copine-1
  Pfam annotation: Domain name=Copine; Domain location=89-237; Score =304.8; E_value=1.8e-88; Accession=PF07002.8; Description=Copine
  Pfam annotation: Domain name=zf-C3HC4; Domain location=374-406; Score= 10.0; E_value=0.0073; Accession=PF00097.17; Description=Zinc finger, C3HC4 type (RING finger)
  Pfam annotation: Domain name=zf-P11; Domain location=371-415; Score =4.7; E_value=0.038; Accession=PF03854.6; Description=P-11 zinc finger
  Pfam module annotation: Pfam domain module=Copine::zf-C3HC4::zf-P11; Domain location=89-237::374-406::371-415
MGSFFSKENQPGGRQPHDYNHSHNQNNGAATASRGGKNRYAKIGDDYHTLEQVTDALAHAGLESSNLIVGIDFTKSNEWTGKVSYNNQSLHAMGNTPNPYEQAISIIGRTLARFDEDNLIPCFGFGDATTHDRSVFSFNHDNQPCDGFEQALSRYREIVPQLKLAGPTSFAPIIETAIGIVDSSGGQYHVLLIIADGQVTRSIDTGNGRLSPQERETIDAIVKASDYPLSIVLVGVGDGPWDMMRQFDDNIPSRAFDNFQFVNFTQIMSRPIPTSKKEAEFALSALMEIPEQFKAAMSLQLLGKRRGFPNRPVLPPPVSNQQQYSGFSAVKQTQSTSYSGCSAAKQTQSTGYGAAPKTPSAPREDSDIGDPQTCPICWNQAKNLAFGCGHQTCSDCAKDLKVCPMCQKAISVRLKLY

SEQ ID NO: 90405 - protein, 219 aa, Setaria italica
  misc_feature (197)..(197): Xaa can be any naturally occurring amino acid
  misc_feature (209)..(209): Xaa can be any naturally occurring amino acid
  Transcript Sequence Number=SeqID_24431
  Gene Ontology: Mol. function=ATPase activity, coupled to transmembrane movement of substances; Cellular component=integral to membrane; Biological process=transport
  Homolog annotation: Hit_ID=Q8LPK2; Match level="QueryCoverage=87%, HitCoverage=66%, E-value=5e-91, Identity=57%"; Hit description=ABC transporter B family member 2
  Pfam annotation: Domain name=ABC_membrane; Domain location=1-218; Score=23.9; E_value=0.00021; Accession=PF00664.15; Description=ABC transporter transmembrane region
GTKTTLLNIIGLAYLFPTTVSGRVAKYSLDFVYLGIVILFSSWTEVACWMHTGERQAAKMRLAYLRAMLDQDIAVFDTEASTGEVINAITSDILVVQDAISEKVGNFMHYISRFVAGFAIGFSQVWQISLVTLAIVPLIAIAGGTYAYVTIGLMARVRKSYVKAGEIAEEVIGNVRTVQAFVGEEKAVRSYREALLXRTYKYGKGGGLXAKGLGLGSMH

SEQ ID NO: 90406 - protein, 256 aa, Setaria italica
  Transcript Sequence Number=SeqID_24432
  Gene Ontology: Mol. function=ATPase activity, coupled to transmembrane movement of substances; Cellular component=integral to membrane; Biological process=transport
  Homolog annotation: Hit_ID=B9SNT8; Match level="QueryCoverage=99%, HitCoverage=72%, E-value=3e-92, Identity=50%"; Hit description =Multidrug resistance protein 1, 2, putative
  Pfam annotation: Domain name=ABC_tran; Domain location=165-254; Score= -27.2; E_value=0.00047; Accession=PF00005.19; Description=ABC transporter
NVTGTVDKDVTYGRRKKAVRSYREALLRTYKYGKRGGLAKGLGLGSMHSVLFLSWALLIWFTGVVVHKRISNGGESFTTMLNVVIAGLSLGQAAPNISTFLRARTAAYPIFQMIERSTVNKASSKTGRTLPAVDGHIQFRSVHFSYPSRPDVVILDRFSLDFPAGKIVALVGGSGSGKSTVVSLIERFYEPLSGSILLDGHDIKELDVKWLRRQIGLVNQEPALFATSIRENILYGKEDATMEEINHAAKLSEAIT

SEQ ID NO: 90407 - protein, 152 aa, Setaria italica
  Transcript Sequence Number=SeqID_24433
  Gene Ontology: Mol. function=aspartic-type endopeptidase activity; Cellular component=chromatin
  Homolog annotation: Hit_ID=Q7XP97; Match level="QueryCoverage=90%, HitCoverage=3%, E-value=1e-32, Identity=54%"; Hit description =OSJNBa0060B20.14 protein
  Subcellular localization annotation: CTP_CleavageSite=38; ConfidenceScore=5.21e-01
ALLPALRPSLSPGPTEQIDDSFSQWNHPNVQHALSQVVTMSVSSSVLHPLLRACAGYLSSYLSSHVKTACVLLDLCRGPLAPWIPMITAKVDLAVELLEGLLGIIQEAGQYLARSRAALKYVLLAISGHMDDVLTEYKEVMHKLLFILEMLV

SEQ ID NO: 90408 - protein, 107 aa, Setaria italica
  Transcript Sequence Number=SeqID_24434
  Gene Ontology: Mol. function=exonuclease activity; Cellular component= intracellular
  Homolog annotation: Hit_ID=B4FYY5; Match level="QueryCoverage=97%, HitCoverage=20%, E-value=1e-45, Identity=78%"; Hit description =Exonuclease
RSSQESGSTSEWRALVKKYGYVNRPTVRLNIPTIVSGDSAIYTTDICQKEPSGNIQKLVFSNLDATELDSLFVRGSKVDAFFSLEIYDYQQNAGIRLVAKRLVVHSK

SEQ ID NO: 90409 - protein, 690 aa, Setaria italica
  misc_feature (606)..(606): Xaa can be any naturally occurring amino acid
  Transcript Sequence Number=SeqID_24435
  Homolog annotation: Hit_ID=Q6ZAC4; Match level="QueryCoverage=99%, HitCoverage=65%, E-value=1e-162, Identity=50%"; Hit description =Putative dentin sialophosphoprotein
AAPLPQTYTVVQEKKITDSKSHESSRSEVHAASKGLMSSQRTNQVEANPAFASWDADFQSASSGSAAGDSNQPDLFKSSSAAESLSFPDPVIAINPAVGTENKTNMKSAILEHHSEDLASASGTLFDDNLSNQKVAPILESNSGTIPENNALEFTDSSLNMNFAKSDQLPGRDDTGVNDDEAFDDWQDFAGSGNQGSLSNAEHIVEPLKRDSSEIETIDPLPVGTTESTNNANEDSSDDWQAFASISGQGGDIVKSVEGSTSGHGQDLVGSFGEKMSSISLEHSSEVNPVDLWPVGNDKAQNTAEMGKEANDSFDDWQDFATSSKVQAISLNQTGDMMEVPKASHKETDMDSWFMGDFKEPGNTGIVNGNNMLDDWQGFTGSDQAQQNSSSTGGEMMSALSEQQEGTVSVQSWVHDSNKEAAKTSSTNVENDTYDIWQDFTKSGHLQENVTNLGREVTSVSPEPAKQIDSLDLWLTSNFKESKSSEGAGRIDASSDGWQDFASFDQTQTSTKIPGEGHLGKNPPGTETLDLWASSHANEMNLEQISDNNDLFDDWQDFQNSRPQQTNLQVPSDASLFDIPSASRPDALGGLASGSILQLASSENQXDKKEDSNEAKSVPSDEHLKSTNGMQHMDNVDPLSLLWPTNNNAIRKQESVNTSVEQLLAQMHDLSFMLKDELSVPDKPVDHSKP

SEQ ID NO: 90410 - protein, 81 aa, Setaria italica
  Transcript Sequence Number=SeqID_24436
PERETEITMCKVRKHGITLFFPNLNKRHLHQSEQEQTKISSIKRILKCQDSRGTILFQTLIISTSPFCKLLKTVLPKELEL

SEQ ID NO: 90411 - protein, 57 aa, Setaria italica
  Transcript Sequence Number=SeqID_24437
QEPPTVSEKGREFLVVSFPAIGIFTYSLPLHHASCHHIHTPVSHLHNKLLLGSNGVM

SEQ ID NO: 90412 - protein, 174 aa, Setaria italica
  Transcript Sequence Number=SeqID_24438
  Gene Ontology: Mol. function=glycerophosphodiester phosphodiesterase activity; Cellular component=anchored to membrane; Biological process=glycerol metabolic process
  Homolog annotation: Hit_ID=Q8GXJ8; Match level="QueryCoverage=100%, HitCoverage=48%, E-value=1e-49, Identity=51%"; Hit description=GPI -anchored protein
TAATAFVSKSSTVHEIQNKSGIFSFELSWSEIQTLKPDIFSPFAQAGLKRNPASKNAGRFLTLPQFLDMAKASNVSGILIEMEHASYLAKRGLGVVESVSSALTKAGYDKETKQQVFIQSDDSSVLSAFKKFPAFKRVLNLEMEFSGASQPSLDDIKKFADGVRIHRSSVAQIT

SEQ ID NO: 90413 - protein, 110 aa, Setaria italica
  Transcript Sequence Number=SeqID_24439
  Gene Ontology: Mol. function=oxidoreductase activity; Biological process=DNA integration
  Homolog annotation: Hit_ID=Q5TIW5; Match level="QueryCoverage=100%, HitCoverage=20%, E-value=3e-27, Identity=57%"; Hit description =Pollen allergen Tri a 4 (Fragment)
  Pfam annotation: Domain name=FAD_binding_4; Domain location=1-110; Score=-22.9; E_value=0.069; Accession=PF01565.15; Description=FAD binding domain
QAAVRCGRAHGVRVRVRSGGHDYEGLSYRSLQQGDVFGVVDLAGIRAITVGSDAVWPLAPTAWVESGATLGELYYTVAKNNSEVAFPAGICPTIGVGGHFSGGGIGMLMR

SEQ ID NO: 90414 - protein, 173 aa, Setaria italica
  Transcript Sequence Number=SeqID_24440
  Gene Ontology: Mol. function=transferase activity, transferring glycosyl groups; Cellular component=intracellular; Biological process=protein amino acid ADP-ribosylation
  Homolog annotation: Hit_ID=Q9ZSV1; Match level="QueryCoverage=99%, HitCoverage=17%, E-value=1e-77, Identity=83%"; Hit description=Poly [ADP-ribose] polymerase 1
  Pfam annotation: Domain name=BRCT; Domain location=31-109; Score =30.8; E_value=5.5e-06; Accession=PF00533.18; Description=BRCA1 C Terminus (BRCT) domain
KSQKVKKPERVLPPMSPEKSGSKSTQRMSLLSPEGLDKLRFSIVGQSKEVVDESIQKLKHAGANFHARVAKDVDCLISCGELDNENAEVRKARRLKIPIVREDYIGECIRKNRTLPFDLYKVENTLESKGGTVTVKVKGRSAVHESSGLQDTAHILEDGKSITIQPNMSDLAR

SEQ ID NO: 90415 - protein, 85 aa, Setaria italica
  Transcript Sequence Number=SeqID_24441
YFLQGDTNKLSLINYNYTTRYRITNPVLYKSLKRTRKVIQLSLGSHSYYWPSLTVLKTCFSHKPHISPQDLRWLEAKTNLQPSLD

SEQ ID NO: 90416 - protein, 101 aa, Setaria italica
  Transcript Sequence Number=SeqID_24442
REKGDGCCGGGEVILGFEVVGFGLFASTAISFVPFLLLGSPSPSPHSVPCRSRRYRPARCSQNSSHHSFEEIQIRGARVTPSDEPARRFGSKLKIRMRSPC

SEQ ID NO: 90417 - protein, 87 aa, Setaria italica
  Transcript Sequence Number=SeqID_24443
ANRAKCNFTSLLHRRFGKTKHQITSWWHDANFCLLTWSMLSCPCVAHLLVGSSLELVRKGCVMASLSNVMSHNDSDSLLVSFASSRC

SEQ ID NO: 90418 - protein, 80 aa, Setaria italica
  misc_feature (34)..(34): Xaa can be any naturally occurring amino acid
  Transcript Sequence Number=SeqID_24444
  Gene Ontology: Mol. function=calcium ion binding; Cellular component =membrane; Biological process=protein transport
  Homolog annotation: Hit_ID=Q9LLR3; Match level="QueryCoverage=95%, HitCoverage=12%, E-value=2e-30, Identity=80%"; Hit description =Vacuolar targeting receptor bp-80
MPFSECCAGKEGTTATVGWSFLWVIFFGLVFAGXGAYAVYKYRLRSYMDSEIRAIMAQYMPLDNQEGANQQHHVAHADDI

SEQ ID NO: 90419 - protein, 188 aa, Setaria italica
  Transcript Sequence Number=SeqID_24445
  Gene Ontology: Mol. function=calcium ion binding; Cellular component =membrane; Biological process=protein transport
  Homolog annotation: Hit_ID=Q9LLR3; Match level="QueryCoverage=46%, HitCoverage=14%, E-value=7e-42, Identity=89%"; Hit description =Vacuolar targeting receptor bp-80
LRFKLKLLFGVFLVSLDEENEILKAEQDAQIGNGKRGDVTILPTLVINNRQYRGKLDKVAVLKAICSGFEETTEPAICLSEEIQTNECLDNNGGCWLDKANNVTPSPLKPAGHLHPSGSSFEQAEIVFPSLVSCQNPPLLISHLPIPEASQCVYPSPTNFTPFTIGHSQTRPRKVSLHAVNVYLAFVP

SEQ ID NO: 90420 - protein, 94 aa, Setaria italica
  Transcript Sequence Number=SeqID_24446
QTNYPNYNSIAPFVLKFCSLTVPCQARDICRLLGLGSLEKLQQNCYLTLQVKIWQVNKKIMIQQSYHSALHPIQLTKLLLPLAKFGKPTYLIKM

SEQ ID NO: 90421 - protein, 79 aa, Setaria italica
  Transcript Sequence Number=SeqID_24447
MWRSRSNFAGGQNNGDDQKDGYGSSQQYEATTAGKKRGSPLYINTREVHVYGAPPGYDNDNTNNDDQRRRGGGGGFFGP

SEQ ID NO: 90422 - protein, 73 aa, Setaria italica
  Transcript Sequence Number=SeqID_24448
MWRSRSNFAGGQNNGDDQKDGYGSSQQYEATTAGKKRGSSRLKKSSGSKDEATDDDSRYNSNGGGSDDYNSGG

SEQ ID NO: 90423 - protein, 76 aa, Setaria italica
  Transcript Sequence Number=SeqID_24449
LIARMMVERGVGVEVARRDDDGEAFVREDVAAAVRRVMVEEEGKELAVNARRLREVVVGDDGGRQERYVDELVDCM

SEQ ID NO: 90424 - protein, 112 aa, Setaria italica
  misc_feature (24)..(24): Xaa can be any naturally occurring amino acid
  Transcript Sequence Number=SeqID_24450
  Gene Ontology: Mol. function=UDP-glucose 4-epimerase activity; Biological process=galactose metabolic process
  Homolog annotation: Hit_ID=Q58IJ5; Match level="QueryCoverage=100%, HitCoverage=29%, E-value=1e-49, Identity=83%"; Hit description=UDP-D- glucose epimerase 2
GTGVRDYIHVVDLAEGHLFRITKXFFESSSNIGCEAYNLGTGKGTSVLEIVNAFEKASGKKIPLVMGQRRPGDAEILFSSPAKAERELHWKAKYGITEMCRDLWNWASKHPY

SEQ ID NO: 90425 - protein, 114 aa, Setaria italica
  Transcript Sequence Number=SeqID_24451
DWILSYAFLAHANRTNQIDRDLTTNNSANHRPISTVNWLNLYSLRPELLFIFTFLVFTLLDLQMMPRRARRAPASTSWRHASHAPAVRAWNTRRAGEPAKPGGIRARNHASDRG

SEQ ID NO: 90426 - protein, 90 aa, Setaria italica
  Transcript Sequence Number=SeqID_24452
  Gene Ontology: Mol. function=hydrolase activity, acting on ester bonds; Biological process=lipid metabolic process
  Homolog annotation: Hit_ID=Q672R1; Match level="QueryCoverage=61%, HitCoverage=14%, E-value=4e-14, Identity=69%"; Hit description =Lipase 1
MALAPGRSKMRIITLAVCTLLLLASAEAATSSAVDRRYHSIFSFGDSFADTGNNPAVFAWYSVFDPVTRPPYGSTFFGRPTGRNADGRLI

SEQ ID NO: 90427 - protein, 154 aa, Setaria italica
  Transcript Sequence Number=SeqID_24453
  Gene Ontology: Mol. function=isomerase activity; Cellular component =endoplasmic reticulum; Biological process=cell redox homeostasis
  Homolog annotation: Hit_ID=B6UDP0; Match level="QueryCoverage=94%, HitCoverage=25%, E-value=1e-72, Identity=89%"; Hit description=PDIL1- 4-Zea mays protein disulfide isomerase
  Pfam annotation: Domain name=Thioredoxin; Domain location=78-151; Score=21.2; E_value=4e-06; Accession=PF00085.12; Description =Thioredoxin
YFVERDNEEVGEPVANYFGITGLETTVLAYTGNEDARKFFLDGELSLDAIKDFAESSLEDKLTPFYKSEPVPESNDGDVKIVVGKNLDLIVLDESKDVLLEIYAPWCGHCQSLEPIYNKLAKHLRGIGSLVIAKMDGTTNEHPRAKVCITAFDG

SEQ ID NO: 90428 - protein, 123 aa, Setaria italica
  Transcript Sequence Number=SeqID_24454
  Gene Ontology: Mol. function=isomerase activity; Cellular component =endoplasmic reticulum; Biological process=cell redox homeostasis
  Homolog annotation: Hit_ID=B6UDP0; Match level="QueryCoverage=89%, HitCoverage=19%, E-value=9e-51, Identity=90%"; Hit description=PDIL1- 4-Zea mays protein disulfide isomerase
NPIKKQILLFAVANKSSKFLPIFKEAAKSFKGKLLFVFVERDNEEVGEPVANYFGITGLETTVLAYTGNEDARKFFLDGELSLDAIKDFAESFLEDKLTPFYKSEPVPESVSLEKLLISPFDW

SEQ ID NO: 90429 - protein, 576 aa, Setaria italica
  Transcript Sequence Number=SeqID_24455
  Gene Ontology: Mol. function=isomerase activity; Cellular component =endoplasmic reticulum; Biological process=cell redox homeostasis
  Homolog annotation: Hit_ID=B6UDP0; Match level="QueryCoverage=94%, HitCoverage=95%, E-value=0.0, Identity=78%"; Hit description=PDIL1-4- Zea mays protein disulfide isomerase
  Pfam annotation: Domain name=Thioredoxin; Domain location=434-540; Score=96.2; E_value=1.2e-25; Accession=PF00085.12; Description =Thioredoxin
  Pfam annotation: Domain name=Thioredoxin; Domain location=92-198; Score=159.1; E_value=1.3e-44; Accession=PF00085.12; Description =Thioredoxin
  Pfam module annotation: Pfam domain module=Thioredoxin::Thioredoxin; Domain location=434-540::92-198
MSPRSLAAVLLLLLFAAAASPSAPATTTTTGGKDEEEDLQYLIDNAGDTPASDPDGWLPDPEGEDDYGDDLFQDQDQDLDLPAHHQQIDETHVVVLTAANFSSFLAATRHVMVEFYAPWCGHCQVLAPDYAAAASHLAAQHAQADVALAKVDATEDTDLAQKYDVQGFPTILFFIDGVPKDYNGARTKDAIVEWINKKLGPGVQNITTVDDAQRILTGDDKAVLAFLDSLSGADSDELAAASRLEDTVNFYQTSSPDVAKLFHIDPAAKRPSVVLLKKEEEKLTFFDGEFKASAIADFVSANKLPLVTTLTQETSASIFGNPIKKQILLFAVANKSSKFLPIFKEAAKSFKGKLLFVFVERDNEEVGEPVANYFGITGLETTVLAYTGNEDARKFFLDGELSLDAIKDFAESFLEDKLTPFYKSEPVPESNDGDVKIVVGKNLDLIVLDESKDVLLEIYAPWCGHCQSLEPIYNKLAKHLRGIGSLVIAKMDGTTNEHPRAKPDGYPTILFYPAGKKSFEPITFEGDRTVVEMYKFIKKHASIPFKLKRQDSSTARTGSTQTEGVKSSGTNMKDEL

SEQ ID NO: 90430 - protein, 145 aa, Setaria italica
  Transcript Sequence Number=SeqID_24456
  Gene Ontology: Mol. function=signal transducer activity; Biological process=two-component signal transduction system (phosphorelay)
  Homolog annotation: Hit_ID=Q9SLX1; Match level="QueryCoverage=90%, HitCoverage=90%, E-value=2e-59, Identity=87%"; Hit description =Histidine-containing phosphotransfer protein 1
  Pfam annotation: Domain name=Hpt; Domain location=45-130; Score=61.0; E_value=4.6e-15; Accession=PF01627.15; Description=Hpt domain
MAAAALREQLNALLSSMFASGLVDDQFQQLQMLQDDGGTPGFVAEVVTLFCDDADRIISELAALLEQPVVDFDKVDAYVHQLKGSSASVGAQKVKFTCMQFRQLCQDKNRDGCIMALAVVRNEFYDLRNKFQNMLQLEQQIQAQQ

SEQ ID NO: 90431 - protein, 256 aa, Setaria italica
  Transcript Sequence Number=SeqID_24457
  Gene Ontology: Mol. function=metal ion binding; Cellular component =cytoplasm; Biological process=ubiquitin-dependent protein catabolic process
  Homolog annotation: Hit_ID=B9T7A8; Match level="QueryCoverage=100%, HitCoverage=37%, E-value=2e-91, Identity=62%"; Hit description =Ubiquitin ligase protein cop1, putative
  Pfam annotation: Domain name=U-box; Domain location=1-66; Score= -16.3; E_value=0.033; Accession=PF04564.7; Description=U-box domain
  Pfam annotation: Domain name=zf-C3HC4; Domain location=1-38; Score =37.5; E_value=5.4e-08; Accession=PF00097.17; Description=Zinc finger, C3HC4 type (RING finger)
  Pfam module annotation: Pfam domain module=U-box::zf-C3HC4; Domain location=1-66::1-38
CPICMAVIKDAFLTACGHSFCYMCIVTHLSRKSDCPCCRHYLTKAQLYPNFLLDKVLKKISARQIAKAASPIDQFRYALQQGNEMGVKELDSLMTLISEKKRQMEQQESETNMQILLVFLHCLRKQKLEELNEIQTDLQYIKEDISAVERHRLELHRTKERYSMKLRVLLDDPAAQKMWPSPIEKASSLFLPNPRTPLSASCPGSLQNKKLDLKAQVSHQGFQRRDALTCSDPPNSPIQSGNVIARKRRVQAQFNE

SEQ ID NO: 90432 - protein, 275 aa, Setaria italica
  misc_feature (93)..(93): Xaa can be any naturally occurring amino acid
  Transcript Sequence Number=SeqID_24458
  Gene Ontology: Cellular component=chloroplast
  Homolog annotation: Hit_ID=B6SKI6; Match level="QueryCoverage=100%, HitCoverage=84%, E-value=4e-73, Identity=36%"; Hit description=ATP binding protein
  Pfam annotation: Domain name=PPR; Domain location=1-34; Score=8.9; E _value=0.79; Accession=PF01535.12; Description=PPR repeat
  Pfam annotation: Domain name=PPR; Domain location=105-139; Score =42.1; E_value=2.2e-09; Accession=PF01535.12; Description=PPR repeat
  Pfam annotation: Domain name=PPR; Domain location=140-174; Score =40.6; E_value=6.2e-09; Accession=PF01535.12; Description=PPR repeat
  Pfam annotation: Domain name=PPR; Domain location=209-243; Score =40.8; E_value=5.5e-09; Accession=PF01535.12; Description=PPR repeat
  Pfam annotation: Domain name=PPR; Domain location=35-69; Score=46.0; E_value=1.5e-10; Accession=PF01535.12; Description=PPR repeat
  Pfam annotation: Domain name=PPR; Domain location=70-104; Score=45.4; E_value=2.2e-10; Accession=PF01535.12; Description=PPR repeat
  Pfam module annotation: Pfam domain module=PPR::PPR::PPR::PPR::PPR::PP R; Domain location=1-34::105-139::140-174::209-243::35-69::70-104
PSIVIVNALCRKGLLQKVTRYLEKMSKHGCAANVVTYNAVINGICEQGHVDSALELLNNMQSYGCKPDIVTYNTLLKGLCSAERWEDAEELMXKMTQNDCIPDNGTFNTVINFLCQKGLIVQAFEVFKQMPEKGCNPNSITYSTMVGGLAKAGKLEQALELLNEMASKGFNSDKMYQLLTEYLNREDKIEEVVQAVHKLQGAGAPPHAALYNTVLLGLCRNGKTDYAIDVFADMVSCGCMPDELSYIILIEGLAYEGYLKEARELLSKLCSRNVL

SEQ ID NO: 90433 - protein, 88 aa, Setaria italica
  Transcript Sequence Number=SeqID_24459
ASWCCRLPAPGAPPGHARGCAGWNEVATAGRRRPAQAPLRHPPLRKGLRFDGRKRIGQEKKGRQNGHGFFSRWLKESYSRQRAHTNDP

SEQ ID NO: 90434 - protein, 348 aa, Setaria italica
  Transcript Sequence Number=SeqID_24460
  Gene Ontology: Mol. function=heat shock protein binding; Cellular component=membrane; Biological process=protein folding
  Homolog annotation: Hit_ID=B6THE8; Match level="QueryCoverage=100%, HitCoverage=78%, E-value=1e-146, Identity=74%"; Hit description =Chaperone protein dnaJ 16
FEAIEADGQELELDLSSLNTVNTVFAALFSKLGVPIKTTVSATVLEEALNGSVEISQLQLGKSVCRKVEKQTAHFYSVDITDKEAKMGLVCRVHSTAKSKFKLLYFELEDNGGLSLALQEDSAKTGKVTSAGMFFLGFPVYRFEQNNSAAAAKDPDSAFFKRLDGFQPCEVNELKAGTHYFAVYGDNFFKSASYTIEVVCAEPFSAEKERLRSVEAKIIAKRSELSKFESEYREVLAKFTEMTSRYAQEMQTIDELLKERNAIHASYTNNPTLQRSSSSSKGKSPSKGSKSEDDQTVKKEKKSKSQPMEESRSDDDATKNKKEKKPKDRIRRKKWFNIHMKVDKRRPC

SEQ ID NO: 90435 - protein, 91 aa, Setaria italica
  Transcript Sequence Number=SeqID_24461
  Subcellular localization annotation: CTP_CleavageSite=55; ConfidenceScore=5.42e-01
MERDGLSPSLDSVKRATAATQTGSVGSGTSQPMSWDFSHSASPRLSNEVMPINYAAAARSSAPYARDHTISERKRREKISQRLIELSTVIP

SEQ ID NO: 90436 - protein, 109 aa, Setaria italica
  Transcript Sequence Number=SeqID_24462
  Gene Ontology: Mol. function=hydrolase activity, acting on glycosyl bonds; Biological process=cell wall organization and biogenesis
  Homolog annotation: Hit_ID=B6TUZ2; Match level="QueryCoverage=99%, HitCoverage=19%, E-value=3e-23, Identity=50%"; Hit description =Polygalacturonase
GVSIHHTTIACGDDCISIQDGCSDLFIRSVRCGPGHGISIGGLGKGGASAVVSGVTVQDVTLNQTMTGLRIKTWQQGGSGSVKSVRFSDVQMSAVKTAIVIDQYYCDHT

SEQ ID NO: 90437 - protein, 84 aa, Setaria italica
  Transcript Sequence Number=SeqID_24463
  Gene Ontology: Mol. function=structural constituent of ribosome; Cellular component=intracellular; Biological process=protein modification process
  Homolog annotation: Hit_ID=O64955; Match level="QueryCoverage=80%, HitCoverage=79%, E-value=3e-32, Identity=99%"; Hit description =Polyubiquitin (Fragment)
  Pfam annotation: Domain name=ubiquitin; Domain location=9-77; Score =133.0; E_value=9.3e-37; Accession=PF00240.15; Description=Ubiquitin family
CLQMQIFVKTLTGKTITLEVESSDTIDNVKAKIQDKEGIPPDQQRLIFAGKQLEDGRTLADYNIQKESTLHLVLRCVVVCRSLQ

SEQ ID NO: 90438 - protein, 58 aa, Setaria italica
  Transcript Sequence Number=SeqID_24464
  Homolog annotation: Hit_ID=Q852E1; Match level="QueryCoverage=82%, HitCoverage=12%, E-value=2e-09, Identity=57%"; Hit description =Putative regulatory protein
ATIGAACTMHANCCFGLSNKLYDLREVLGQWRNFTGLTPEEKSRKFLWKDPTKCGSPD

SEQ ID NO: 90439 - protein, 52 aa, Setaria italica
  Transcript Sequence Number=SeqID_24465
  Gene Ontology: Mol. function=zinc ion binding; Cellular component =COPII vesicle coat; Biological process=ER to Golgi vesicle-mediated transport
  Homolog annotation: Hit_ID=Q9FG78; Match level="QueryCoverage=100%, HitCoverage=7%, E-value=8e-14, Identity=69%"; Hit description =Protein transport protein SEC23
NQHGSQARFLLARLNPSVTQKTQLSEGSEVIFTDDVSLQVFIEHLQELAVQG

SEQ ID NO: 90440 - protein, 50 aa, Setaria italica
  Transcript Sequence Number=SeqID_24466
MARFHLYVAAACAVVLALAAPTLAGDPDMLQDVCVADLASPIKLNGFPCK

SEQ ID NO: 90441 - protein, 119 aa, Setaria italica
  misc_feature (73)..(73): Xaa can be any naturally occurring amino acid
  Transcript Sequence Number=SeqID_24467
  Gene Ontology: Mol. function=nutrient reservoir activity; Cellular component=extracellular region
  Homolog annotation: Hit_ID=B6TKA5; Match level="QueryCoverage=96%, HitCoverage=52%, E-value=9e-39, Identity=71%"; Hit description =Rhicadhesin receptor
MARFHLYVAAACAVVLALAAPTLAGDPDMLQDVCVADLASPIKLNGFPCKANISADDFFFDGLRNPGNTNNPXGSLVTAANVASFPGVNTLGVSMARIDYAPGGQKPDRQQPNPTTTNR

SEQ ID NO: 90442 - protein, 200 aa, Setaria italica
  misc_feature (32)..(32): Xaa can be any naturally occurring amino acid
  misc_feature (68)..(68): Xaa can be any naturally occurring amino acid
  misc_feature (91)..(91): Xaa can be any naturally occurring amino acid
  misc_feature (102)..(102): Xaa can be any naturally occurring amino acid
  misc_feature (144)..(144): Xaa can be any naturally occurring amino acid
  Transcript Sequence Number=SeqID_24468
  Gene Ontology: Mol. function=nutrient reservoir activity; Cellular component=extracellular region
  Homolog annotation: Hit_ID=B6TKA5; Match level="QueryCoverage=100%, HitCoverage=100%, E-value=4e-72, Identity=67%"; Hit description =Rhicadhesin receptor
  Pfam annotation: Domain name=Cupin_1; Domain location=53-191; Score =101.6; E_value=2.6e-27; Accession=PF00190.14; Description=Cupin
  Pfam annotation: Domain name=Cupin_2; Domain location=89-153; Score =7.4; E_value=0.056; Accession=PF07883.3; Description=Cupin domain
  Pfam module annotation: Pfam domain module=Cupin_1::Cupin_2; Domain location=53-191::89-153
MARIHLYVAAACAVVLVLAAPTIAGDPDHLQXPIKINGFTCKANVTADDFFFPGLRYPGNTNNPAGSXVTAANVETFPGVNTLGVSLARIXDFAPGGQNPPXLERALEVGFITNPNKLFTKTVNKGDIFVFPRGLVHFQQNRGXGPAAVIAAFNSQLQGTQAIAMTLFGATPPVSTDILAKAFRIGNGEVNAIKAKFAPK

SEQ ID NO: 90443 - protein, 218 aa, Setaria italica
  Transcript Sequence Number=SeqID_24469
  Gene Ontology: Mol. function=nutrient reservoir activity; Cellular component=extracellular region
  Homolog annotation: Hit_ID=B6TKA5; Match level="QueryCoverage=100%, HitCoverage=100%, E-value=6e-95, Identity=79%"; Hit description =Rhicadhesin receptor
  Pfam annotation: Domain name=Cupin_1; Domain location=61-209; Score =173.1; E_value=8.3e-49; Accession=PF00190.14; Description=Cupin
  Pfam annotation: Domain name=Cupin_2; Domain location=96-171; Score =49.7; E_value=1.1e-11; Accession=PF07883.3; Description=Cupin domain
  Pfam module annotation: Pfam domain module=Cupin_1::Cupin_2; Domain location=61-209::96-171
MARIHLYVAAACAVVLVLAAPTIAGDPDHLQDVCVADRASPIKLNGFPCKANISADDFFFDGLRNPGNTNNPAGSLVTAANVASFPGVNTLGVSMARIDYAPGGQNPPHTHPRATEIIFVLEGTLEVGFITTANKLFTKTVTKGDVFVFPRGLVHFQQNRGYCPAAVIAAFNSQLQGTQAIAMTLFGATPPVSTDVLAKAFRIGNGKVAAIKGRFGPK

SEQ ID NO: 90444 - protein, 189 aa, Setaria italica
  Transcript Sequence Number=SeqID_24470
  Gene Ontology: Mol. function=transferase activity, transferring phosphorus-containing groups; Cellular component=membrane; Biological process=two-component signal transduction system (phosphorelay)
  Homolog annotation: Hit_ID=Q67WC2; Match level="QueryCoverage=100%, HitCoverage=19%, E-value=2e-81, Identity=77%"; Hit description =Putative histidine kinase 1
  Pfam annotation: Domain name=HATPase_c; Domain location=10-120; Score= 89.2; E_value=1.5e-23; Accession=PF02518.18; Description=Histidine kinase-, DNA gyrase B-, and HSP90-like ATPase
ENPCVSPRNCDKDSLNCSKHEDAVHNGVPTCENFREDHEGEEVVWLRCDVYDTGIGIPVKSLPLLFKRYMQASADHARKYGGTGLGLAICKQLVELMGGTLTVVSKENEGSKFTFVLPCKIPVKEEHSDDPDEVDSSQSGFTNSDIEGSFIFKPQMRTSLLSSGVSVMNNTKLFGAKLMCYDPPSILDD

SEQ ID NO: 90445 - protein, 102 aa, Setaria italica
  Transcript Sequence Number=SeqID_24471
DKTKENSFAEEAPQIAETEANRWSGNPKKGSPRLLLHPCIYPSYPSSRQKSHLELPSIAARCPRLRRGCRCPDGGSSSDGAGASMPPAFPAWPSSSSSAARC

SEQ ID NO: 90446 - protein, 269 aa, Setaria italica
  misc_feature (206)..(206): Xaa can be any naturally occurring amino acid
  Transcript Sequence Number=SeqID_24472
  Gene Ontology: Mol. function=serine-type endopeptidase inhibitor activity; Cellular component=extracellular region; Biological process=defense response
  Homolog annotation: Hit_ID=B6TJI3; Match level="QueryCoverage=89%, HitCoverage=53%, E-value=1e-111, Identity=80%"; Hit description =Protein Z
  Pfam annotation: Domain name=Serpin; Domain location=1-267; Score= -48.0; E_value=3.6e-09; Accession=PF00079.12; Description=Serpin (serine protease inhibitor)
  Subcellular localization annotation: CTP_CleavageSite=46; ConfidenceScore=5.08e-01
RRQLLQVLGCGGGGKGAAADAANVASRVVKRVLRDRSPSGGPQLAFAGGVWADASTRLSPGFVETARNVYCSAARTADFLNKPEDAAKQINLWVQESTKCTVTSLQPDVSIDQNTGLVLGSALYFRGRWLNRADIRSTTAQKFYCLDGTCVDVPFVEYDRTRPFAVHEGFKVIKLPYQRGWTERKFSMYIFLPDTHDGLFELTKKXFAEPLFLEQNLPTEKCHVDIRVPNFTVSFQIDMKEFLKEMGLELPFQRDADFTDMVKEDEPSG

SEQ ID NO: 90447 - protein, 220 aa, Setaria italica
  Transcript Sequence Number=SeqID_24473
  Gene Ontology: Mol. function=transferase activity, transferring glycosyl groups; Cellular component=integral to membrane; Biological process=cell wall organization and biogenesis
  Homolog annotation: Hit_ID=Q9LUD7; Match level="QueryCoverage=90%, HitCoverage=10%, E-value=6e-73, Identity=63%"; Hit description =Putative callose synthase 8
AKQSKTFLGMFCLSKYMVVVALYLASNVIGMALFFVPAVTNYIETSTWRICSMLSWWCQPQLYVGRGMQEGLVPLLKYTAFWMILLSSKFLFSYYFEIKPLVGPTKEIMKINVNKYEWHEFFPQVKSNAGAILAVWTPIILVYFMDTQIWYSVFCTIFGGMCGIIHHLGEIRTMGMVRSRFSTLPEAFNMSLVPPAMPKEKKGVFSSFLEKKIFKKVGKA

SEQ ID NO: 90448 - protein, 91 aa, Setaria italica
  Transcript Sequence Number=SeqID_24474
  Subcellular localization annotation: CTP_CleavageSite=29; ConfidenceScore=5.28e-01
QAASSSNASVATSLTQIKQESTLTVRHLTLNHLKGTGAFSNSLYLLFPPPNMICQFAGALCWNVGIQLLDEPVIFTKTLIVVNGIKFSILS

SEQ ID NO: 90449 - protein, 121 aa, Setaria italica
  Transcript Sequence Number=SeqID_24475
  Gene Ontology: Mol. function=Rho guanyl-nucleotide exchange factor activity
  Subcellular localization annotation: CTP_CleavageSite=25; ConfidenceScore=5.07e-01
MSDGSGFPGFHSHSYDRNYSRPLFRVASFSDSGDEQERHAASPRGHSQSMSRTASYKGAAPSRLSPSMSKMSMKKLQQVVDEKSMEDEEMELMKEKYTKLLLGEDMSGSGKGVCTAVAITN

SEQ ID NO: 90450 - protein, 52 aa, Setaria italica
  misc_feature (22)..(22): Xaa can be any naturally occurring amino acid
  Transcript Sequence Number=SeqID_24476
ARCSICNEEVDAASLFPNLVLXLALRAVATVVKMEDDRRLFHNAALRKRRKE

SEQ ID NO: 90451 - protein, 273 aa, Setaria italica
  misc_feature (15)..(15): Xaa can be any naturally occurring amino acid
  Transcript Sequence Number=SeqID_24477
  Gene Ontology: Mol. function=ubiquitin-protein ligase activity; Cellular component=ubiquitin ligase complex; Biological process =ubiquitin-dependent protein catabolic process
  Homolog annotation: Hit_ID=Q6DBN5; Match level="QueryCoverage=64%, HitCoverage=45%, E-value=4e-37, Identity=43%"; Hit description=U-box domain-containing protein 62
FRLMPRADAIFGLVXLPNFLAASHCIPQIYQPISACQFMDDLRAEEHIVSHHSEAPCESQGNFVNEPSLRSVLSDPLSGAFLEDAMVLSCGHSFGGLMLKKVLEMARCSICNEEVDAASLFPNLALRAVATVVKMEDDRRLFHNAALRKRRKEVTELMDARNGSSKENSEVGLDAENSRAFKGVQYPFTVGDRVLIMGNKRTPDKFVGKEAVITSQCLNGWYLVKAVDSGESIRLQYRSLKKAGEPQVQAQAQAQAQAEMRSQQALAFLQNKQ

SEQ ID NO: 90452 - protein, 211 aa, Setaria italica
  misc_feature (18)..(18): Xaa can be any naturally occurring amino acid
  Transcript Sequence Number=SeqID_24478
  Subcellular localization annotation: CTP_CleavageSite=21; ConfidenceScore=5.25e-01
FLIGDRKASAKGKQDFFXTLRSKSANGSSTATESPSSLVDDQQNSCPEFIENGSSSCEEAYSCEGSQQHLSDNEEIIPPSESHNVLDEGSLGIQVDDRDASSLPVFAGTEDLASKKPQPDNIEDVLPVKPAYINDSSVISNSVDNEADLPLEGAHPAHEFEHTGAGEEKPCPAQEFESIGAGEEEELNLLRSMGWDENEVVQPLQQEEIAD

SEQ ID NO: 90453 - protein, 384 aa, Setaria italica
  Transcript Sequence Number=SeqID_24479
  Gene Ontology: Mol. function=nucleic acid binding; Cellular component= nucleosome; Biological process=methylation-dependent chromatin silencing
  Homolog annotation: Hit_ID=Q8W121; Match level="QueryCoverage=98%, HitCoverage=48%, E-value=0.0, Identity=81%"; Hit description =Chromatin complex subunit A101
  Pfam annotation: Domain name=Helicase_C; Domain location=261-340; Score=99.7; E_value=1e-26; Accession=PF00271.23; Description =Helicase conserved C-terminal domain
  Pfam annotation: Domain name=SNF2_N; Domain location=1-205; Score =100.3; E_value=6.8e-27; Accession=PF00176.15; Description=SNF2 family N-terminal domain
  Pfam module annotation: Pfam domain module=Helicase_C::SNF2_N; Domain location=261-340::1-205
LALIFLIVVTSYEMAMSDAKFLAHYKWKYVVVDEGHRLKNSKCKLLREIKRIPMDNKLLLTGTPLQNNLAELWSLLNFILPDIFASHQEFESWFDFSAKGSEEKEETEEKRRVHVVSKLHAILRPFLLRRMKEDVEQMLPRKKEIIIYANMTELQKRIQDHLVEKTFDVYLNEESDIVLRRPGIKAKLNSLFIQLRKNCSHPDLLEAAFGTTSLYPPVDKLLEQCGKFQLLDRLLTSLLARKHKVLIFSQWTKVLDIMEYYLDSKGLEVCRIDGGVKLEERRRQIAEFNDVNSNLNVFILSTRAGGLGINLTSADTCILYDSDWNPQMDLQAMDRCHRIGQTRPVHVYRLATSNSVEGRIIKKAFGKLKLEHVVIGKGQFEQER

SEQ ID NO: 90454 - protein, 156 aa, Setaria italica
  misc_feature (136)..(136): Xaa can be any naturally occurring amino acid
  Transcript Sequence Number=SeqID_24480
  Gene Ontology: Mol. function=phenylalanine-tRNA ligase activity; Cellular component=cytoplasm; Biological process=tRNA aminoacylation for protein translation
  Homolog annotation: Hit_ID=B6SS66; Match level="QueryCoverage=82%, HitCoverage=28%, E-value=6e-68, Identity=87%"; Hit description =Phenylalanyl-tRNA synthetase alpha chain
  Pfam annotation: Domain name=tRNA-synt_2d; Domain location=2-156; Score=84.8; E_value=3e-22; Accession=PF01409.12; Description=tRNA synthetases class II core domain (F)
YLFFVVKLKSKFLPNSWGSYGSKGYGYDWKRDEAEKNLLRTHTTAVSTRILYKLAQEKPFAPKRYYSIDRVFRNEAVDRTHLAEFHQIEGLICDYGLTLGDLIGVLEDFFSSLGMSKLRFKPAYNPYTEPSMEIFXMFRPEMLLPMGLPEGVNVIA

SEQ ID NO: 90455 - protein, 498 aa, Setaria italica
  Transcript Sequence Number=SeqID_24481
  Gene Ontology: Mol. function=phenylalanine-tRNA ligase activity; Cellular component=cytoplasm; Biological process=tRNA aminoacylation for protein translation
  Homolog annotation: Hit_ID=B6SS66; Match level="QueryCoverage=100%, HitCoverage=100%, E-value=0.0, Identity=94%"; Hit description =Phenylalanyl-tRNA synthetase alpha chain
  Pfam annotation: Domain name=tRNA-synt_2b; Domain location=231-418; Score=-45.8; E_value=0.022; Accession=PF00587.17; Description=tRNA synthetase class II core domain (G, H, P, S and T)
  Pfam annotation: Domain name=tRNA-synt_2d; Domain location=210-491; Score=527.4; E_value=1.8e-155; Accession=PF01409.12; Description =tRNA synthetases class II core domain (F)
  Pfam module annotation: Pfam domain module=tRNA-synt_2b::tRNA-synt _2d; Domain location=231-418::210-491
MAEKSPAADVEAGLLAHLNSTGEVPDSRAFASSLGVSHLELEGVIKSLSAFRIVDSTDIIKETWVLTDEAKGYAARGSPEAQLVAAIPPEGASKDALKAKLGDAFDVGMKAAARNKWIGFEKGNKDLVLRKVENVEDELQEQLKRLENGEVVPDKVIDDLKRRKLITKEKSIWYSLKKGPEFVVKRKTLATDVTTEHLRSGDWKDLEFKDYNYGAQGQPIAKGYVQPLMEVREAIENIFIMMGFTEMPTNNFVESSFWNFDALFQPQQHPARDSHDTFFLKAPAATSQLPEDYLEKVKQVHQSGGYGSKGYGYDWKRDEAEKNLLRTHTTAVSTRILYKLAQEKPFAPKRYYSIDRVFRNEAVDRTHLAEFHQIEGLICDYGLTLGDLIGVLEDFFSSLGMSKLRFKPAYNPYTEPSMEIFSYHDGLKKWVEVGNSGMFRPEMLLPMGLPEGVNVIAWGLSLERPTMILYGIDNIRDLFGPKVDFNLIKSNPLCRLGL

SEQ ID NO: 90456 - protein, 66 aa, Setaria italica
  Transcript Sequence Number=SeqID_24482
KYITIFFHLQLKGNERKKNGKNPHALLAESSTYFCRPNLEDRVGERGGNGHIVRGQTVYRPAPARQ

SEQ ID NO: 90457 - protein, 87 aa, Setaria italica
  Transcript Sequence Number=SeqID_24483
  Homolog annotation: Hit_ID=B6SJK3; Match level="QueryCoverage=78%, HitCoverage=16%, E-value=1e-13, Identity=58%"; Hit description=mTERF family protein
MFASICRRRLLRLRQIPSAAGTNPSWPNPIDAPPSHGYSAAALAGATVSEPCPITVSYLISCGLSPAVAAAHKLRIRSTDRADTVRA

SEQ ID NO: 90458 - protein, 80 aa, Setaria italica
  Transcript Sequence Number=SeqID_24484
  Homolog annotation: Hit_ID=B6SVA8; Match level="QueryCoverage=98%, HitCoverage=11%, E-value=1e-29, Identity=81%"; Hit description =Protein phosphatase type 2A regulator/ signal transducer
ACRFYNQSGENIKLEKELFVQGKKKSSASRINSLKFCTSDSNRIIITSADSKIRVADGDSIKKFEGPWKSKALSSPSLTS

SEQ ID NO: 90459 - protein, 288 aa, Setaria italica
  Transcript Sequence Number=SeqID_24485
  Gene Ontology: Mol. function=protein serine/threonine kinase activity; Cellular component=integral to membrane; Biological process=protein amino acid phosphorylation
  Homolog annotation: Hit_ID=B9RC79; Match level="QueryCoverage=98%, HitCoverage=26%, E-value=1e-113, Identity=69%"; Hit description =Leucine-rich repeat receptor protein kinase EXS, putative
  Pfam annotation: Domain name=Pkinase; Domain location=17-286; Score =124.6; E_value=3.2e-34; Accession=PF00069.17; Description=Protein kinase domain
  Pfam annotation: Domain name=Pkinase_Tyr; Domain location=17-286; Score=74.4; E_value=4.1e-19; Accession=PF07714.9; Description =Protein tyrosine kinase
  Pfam module annotation: Pfam domain module=Pkinase::Pkinase_Tyr; Domain location=17-286::17-286
YKQRLTFSDILNATNNFDQQNIIGCGGNGLVYRAELPCGSKLAIKKLNGEMCLMEREFKAEVEALSMAQHENLVPLWGYCIQGSSRLLIYSFMENGSLDDWLHNKDDPNSFLDWPIRLKIAQGAGRGLSYIHNTCKPHIIHRDVKSSNILLDREFNAYVADFGLARLILPYDTHVTTELVGTLGYIPPEYGQAWVATLRGDIYSFGVVLLELLTGKRPVQVLTKSKELVQWVREIRSQGKDVEVLDPALRGRGHDDQMLNVLEVACKCINHNPCLRPTMQEVVSCLDS

SEQ ID NO: 90460 - protein, 85 aa, Setaria italica
  misc_feature (34)..(34): Xaa can be any naturally occurring amino acid
  misc_feature (45)..(45): Xaa can be any naturally occurring amino acid
  misc_feature (59)..(59): Xaa can be any naturally occurring amino acid
  Transcript Sequence Number=SeqID_24486
  Subcellular localization annotation: CTP_CleavageSite=60; ConfidenceScore=5.76e-01
SHFPSRSPSSLPPPNPTTSRLAAVSLLTPHPSPXSSSRPPPPPTXEPRSIPPPPPRPPXPATTPSSPSPPPPSPPAHSPPSFLPY

SEQ ID NO: 90461 - protein, 46 aa, Setaria italica
  Transcript Sequence Number=SeqID_24487
YKEMNDELAKYLKDISLLESLDGRKVKGGKLGKYFAQISGNLIGGT

SEQ ID NO: 90462 - protein, 121 aa, Setaria italica
  Transcript Sequence Number=SeqID_24488
  Gene Ontology: Mol. function=transferase activity; Cellular component= mitochondrion
  Homolog annotation: Hit_ID=B9T6M2; Match level="QueryCoverage=96%, HitCoverage=73%, E-value=1e-29, Identity=33%"; Hit description =Pentatricopeptide repeat-containing protein, putative
  Pfam annotation: Domain name=PPR; Domain location=24-58; Score=35.5; E_value=2.1e-07; Accession=PF01535.12; Description=PPR repeat
  Pfam annotation: Domain name=PPR; Domain location=59-93; Score=40.4; E_value=7.1e-09; Accession=PF01535.12; Description=PPR repeat
  Pfam module annotation: Pfam domain module=PPR::PPR; Domain location =24-58::59-93
GKFEKAMRVWEQLVRDPGASPNLATYKVMLDGLCKLGRFKEAGVVWSRMVANNHQPDTVTHGILIHGLCRSGDVDGAARVYSEMVKAGLILDVAVYNSLIKGFCEVGKTGEAWKFWGFRRV

SEQ ID NO: 90463 - protein, 78 aa, Setaria italica
  Transcript Sequence Number=SeqID_24489
QIQNLPCKLPSHIGGPCLLPSLSIPTYESHSRLITGCKHNTVHHTCNQMKPESSVDPNNVSLLLVEQKHGKGRMKTMV

SEQ ID NO: 90464 - protein, 164 aa, Setaria italica
  misc_feature (152)..(152): Xaa can be any naturally occurring amino acid
  Transcript Sequence Number=SeqID_24490
EWFGSLKNKSTTMELHVVTSQCKQTFIEGERHGTFNWEGSLDQLGSDVGNKHRELFTQLEAAQLKIEDINSKRSRLLSEISKVKQILEQEKNIFAGFPAALQQMDMKSLEEEYKALQGDKAVEIEYFHSLEETISGMKGISEPVKCCCGLEXKVELGGETMDLS

SEQ ID NO: 90465 - protein, 57 aa, Setaria italica
  Transcript Sequence Number=SeqID_24491
TILDQVLYNRSICGATNRHDSRYRWTLLAYNTNLNHLVQSTAKNDSKTKINQVITWA

SEQ ID NO: 90466 - protein, 94 aa, Setaria italica
  Transcript Sequence Number=SeqID_24492
  Homolog annotation: Hit_ID=B6SLV3; Match level="QueryCoverage=67%, HitCoverage=35%, E-value=2e-12, Identity=57%"; Hit description =Arabinogalactan protein
MACLARSLVVCLPLVVLAAVVCLPSRGDAMGLPQPPPDLNFTIAVEGVVWCKTCRYAGYVRSMDASPLPNATALLRCRRDGDPRALSVSNTTDA

SEQ ID NO: 90467 - protein, 178 aa, Setaria italica
  Transcript Sequence Number=SeqID_24493
  Homolog annotation: Hit_ID=Q259G9; Match level="QueryCoverage=98%, HitCoverage=19%, E-value=3e-59, Identity=62%"; Hit description =H0103C06.5 protein
  Pfam annotation: Domain name=DUF789; Domain location=1-173; Score =31.7; E_value=2.3e-13; Accession=PF05623.4; Description=Protein of unknown function (DUF789)
FEYFETEQPSFRPPLFEKIKELVSGANVSDHRIFGDPEKLQNTKLCELHPASWFCVAWYPVYRVPRGNFRAAFLTYHSLGKLVPQKCSMDMTGGHPRVVSPVVGLQSYNAKGEQWFQLRCPDLKQLPTDEASCAEVQKERLRTLKMGALAMARAVVPKGSGESVNHHPDYEFFLSRCS

SEQ ID NO: 90468 - protein, 111 aa, Setaria italica
  Transcript Sequence Number=SeqID_24494
ASRWLHLFMDFRTWCNINTHKILVMSAPQVYLLHKLIGPALCQGCAWFANRCFFMSPCFQSISLVVSKEEIVVTDRWTHLGFLYAITLLYNSTKILALIPLFVETIILYSD

SEQ ID NO: 90469 - protein, 51 aa, Setaria italica
  Transcript Sequence Number=SeqID_24495
MQDRMRRQGQYGEADITSMVAAQLHHYKAQQRVQQHPENSYTGRDPGQASG

SEQ ID NO: 90470 - protein, 308 aa, Setaria italica
  Transcript Sequence Number=SeqID_24496
MQDRMRRQGQYGEADITSMVAAQLHHYKAQQRVQQHPENSYTGRDPGQASGEHQYTPPKVRQSQWDRGGPNMPSKVPSYAYNEGQGAAGAQSFYDGQRSDAKVGLEKQTSKETRDHARTDRTETRYEDYNLPRTFEGLEQSFHEDIMMLSKELHDAEDAENSRHRERLKEINTQYQEKLLALRARQANYRDEFLRKESLARQQQYQQASMSHYANNSAGGEQHGYHPTALPGEQHGYHPTAATTPAAGGAGGAYGEAHRGYASGQYESFSDRPDYPEFHGGGRGRGRGFERRGQYPGGRDYNSGGRRF

SEQ ID NO: 90471 - protein, 82 aa, Setaria italica
  Transcript Sequence Number=SeqID_24497
  Gene Ontology: Mol. function=nucleic acid binding; Cellular component= nucleosome; Biological process=methylation-dependent chromatin silencing
  Homolog annotation: Hit_ID=Q8W121; Match level="QueryCoverage=100%, HitCoverage=11%, E-value=9e-30, Identity=76%"; Hit description =Chromatin complex subunit A101
AKPNVLEEGELLALLRDEQAEEDRMIQTDISDEDLLKLMDRSDLSGPPGAADATPLIPLKGPGWEVVVPTKSGGGMLSSLTS

SEQ ID NO: 90472 - protein, 104 aa, Setaria italica
  Transcript Sequence Number=SeqID_24498
  Subcellular localization annotation: CTP_CleavageSite=59; ConfidenceScore=5.55e-01
MGRKDSSSSSSSAAAGGGKKDKPMSVSAMLASMDAPAAKGKSSKSAAPSKPKGKPSKAPASSYMGDIDLPPSDDEEDEAELAAAAAKPKPSRAATVDLSSGVAP

SEQ ID NO: 90473 - protein, 197 aa, Setaria italica
  Transcript Sequence Number=SeqID_24499
  Gene Ontology: Mol. function=microtubule motor activity; Cellular component=microtubule associated complex; Biological process =microtubule-based movement
  Homolog annotation: Hit_ID=Q6K990; Match level="QueryCoverage=100%, HitCoverage=21%, E-value=1e-107, Identity=95%"; Hit description =Putative phragmoplast-associated kinesin
  Pfam annotation: Domain name=Kinesin; Domain location=1-157; Score= -3.4; E_value=2.7e-15; Accession=PF00225.15; Description=Kinesin motor domain
KAKNATYICGNEAGKISREVAKVEKRRTVKSTLCNERSSRSHCMIILDIPSVGGRLMLVDMAGSENIEAAGQTGFEAKIQTAKINQGNTALKRVVESIANGDSHVPFRDSKLTMLLQDSFEDDKSKILMILCASPDPKELHKTVSTLEYGAKAKCIIRSAHAATPREKMSSEESSAMLNSRIVAMNQFIYKLQKENR

SEQ ID NO: 90474 - protein, 185 aa, Setaria italica
  Transcript Sequence Number=SeqID_24500
  Gene Ontology: Mol. function=RNA-directed DNA polymerase activity; Biological process=RNA-dependent DNA replication
  Homolog annotation: Hit_ID=Q9SLQ0; Match level="QueryCoverage=96%, HitCoverage=11%, E-value=2e-74, Identity=70%"; Hit description=Gag -pol polyprotein (Fragment)
KTAKQLEPSTSLNSEIKLNAPVLLATRAEFDELRDAPLPCYALICSSVLVSLDDAPSLDIPPAVANILQEYADVFPKDLPPGLPPLRGIEHQIDLIPGAQLPNRAPYRTNPDETKEIQRQVQALLDKGYIRESLSPCSVPVLLVPKKDGSWRMCVDCRAINNITIRYRYPIPRLDDMLDELSGAI

SEQ ID NO: 90475 - protein, 224 aa, Setaria italica
  Transcript Sequence Number=SeqID_24501
  Homolog annotation: Hit_ID=B6T4H2; Match level="QueryCoverage=100%, HitCoverage=53%, E-value=2e-84, Identity=70%"; Hit description=F-box domain containing protein
VCSPLSPAGDTTVVPPPPPPPPIQLANDDECVIYQYCEFLPDDGDGGSYFCVVMGYSELQTNVYLYELQDMNWVVRASAAAQLALSPRRSRVMLFSNEKFYILSATNKILVCDFPSSSISFMELPSGVENKHGGCIMLSRGDGSGIYLMHVKESQLQIFHCRKDSDNPGNWVLVDYICLRQVCANLDIATWPSVGGHTASVKICAVGDNARFVFLEMFGTVVFL

SEQ ID NO: 90476 - protein, 668 aa, Setaria italica
  Transcript Sequence Number=SeqID_24502
  Gene Ontology: Cellular component=plasma membrane
  Homolog annotation: Hit_ID=Q9SY82; Match level="QueryCoverage=97%, HitCoverage=78%, E-value=0.0, Identity=55%"; Hit description =F14N23.28
LLSIRNMLNTQAALIHGLSEGVQIDSLTSGPEGSAEDNISNVEDQEPSEIQKWSADFPDMLDVLLAERRVDEALDALDEAERVAVDAKRKQTLTAAEVSALRRSISDNRQRLADQLAEAACQSSTRGIELRAAASALKRLGDGPRAHSLLLSAHNQRLQCNMQTIHPSSTSYGGAYTAALAQQVFSVIAQALSDSVDVFGDESCYASELVTWATKQVMSFALLVKRHVLSSCAAAGGLRAAAECVQISLGHCSLLEARGLSVSSVLLKQFKPSLEQALDANLRRIEESTAALAAADNWILTYPPTGIRPLTRSSAANLALQPKLSSSAHRFNSMVQDFFEDVAPLLSLQLGGSTMDGITQIFNSYVNLLVSALPGSMDDEANLDGLGHKIVRMAETEEQQLALLANASLLAEELLPRAAMKLSSINQSSMDDLRKRGTDKQNRVPEQREWKRKLQRMVDRLRDSFCRQHALELIFTDDGDTHLSAEMYINMDNTVEEPDWVPSPIFQELYAKLNRMASIAAEMFVGRERFATLLMMRLTETVILWLSEDQAFWEEIEQGPKPLGPLGLQQFYLDMQFVIIFGQGRFLSRHVHQVILDIIDRAMAAFSATGINPDSVLPGDDWFMDVAQEVASMISGKGRAANGDREVNSPTASVSAHSISSFKSHGSS

SEQ ID NO: 90477 - protein, 206 aa, Setaria italica
  Transcript Sequence Number=SeqID_24503
  Homolog annotation: Hit_ID=O04624; Match level="QueryCoverage=89%, HitCoverage=21%, E-value=3e-25, Identity=38%"; Hit description=A _IG002N01.30 protein (Fragment)
  Pfam annotation: Domain name=Peptidase_C12; Domain location=2-183; Score=43.7; E_value=3.2e-10; Accession=PF01088.13; Description =Ubiquitin carboxyl-terminal hydrolase, family 1
ELFRLVGDPGPDASGNAFLELVSWDDKLAKSVIELKADKEANVVGIRPRPNFTVKMPKGFYLKKEMREWVRDWLELPYVSPYANASNLDPASPKAEKRSIGVLHEVLSLTVERRMAVPVIGKFCEEYRLPNAFANAFTRHPGIFYVSLKGGIKTAVLREAYDEKGKLVDRDPMLELKERFVAVMEEGHKKYLEDLKMKREELQKER

SEQ ID NO: 90478 - protein, 77 aa, Setaria italica
  Transcript Sequence Number=SeqID_24504
MKKGKLVDRDPMLELKERFVAVMEEGHKKYLEDLKMKREELQKEREVAGHEDVKVAAEIEDQLEEEWHSGGSGDNDT

SEQ ID NO: 90479 - protein, 58 aa, Setaria italica
  Transcript Sequence Number=SeqID_24505
  Gene Ontology: Mol. function=nucleic acid binding
  Homolog annotation: Hit_ID=Q0D3J9; Match level="QueryCoverage=100%, HitCoverage=8%, E-value=2e-25, Identity=94%"; Hit description=Zinc finger CCCH domain-containing protein 53
MDAYEATKVVFSRIQALDPDHAAKIMGLLLIQDHGEKEMIRLAFGPESLLHAVMAKAR

SEQ ID NO: 90480 - protein, 132 aa, Setaria italica
  Transcript Sequence Number=SeqID_24506
  Gene Ontology: Mol. function=nucleic acid binding
  Homolog annotation: Hit_ID=B6UER2; Match level="QueryCoverage=99%, HitCoverage=20%, E-value=2e-48, Identity=78%"; Hit description =Nucleic acid binding protein
MDAYEATKVVFSRIQALDPDHAAKIMGFLLIQDHGEKEMIRLAFGPEALLHTVMAKARKDLGLLPASGPGTPTSVAAAGHSPFLLSRQNSGRCGGGAGTAPSPLSVSSPSSWAPPPVFSRTNSATNGAAEER

SEQ ID NO: 90481 - protein, 283 aa, Setaria italica
  Transcript Sequence Number=SeqID_24507
  Gene Ontology: Mol. function=zinc ion binding; Cellular component =nucleus
  Homolog annotation: Hit_ID=Q10NX9; Match level="QueryCoverage=99%, HitCoverage=28%, E-value=1e-134, Identity=80%"; Hit description =Transposon protein, putative, unclassified, expressed
  Pfam annotation: Domain name=MULE; Domain location=45-142; Score =108.6; E_value=2.1e-29; Accession=PF10551.1; Description=MULE transposase domain
KFVETMQCKKPNFIHSWDLDRERRVKNFFWTDSRAQAQYRYFGDVITLDVMYLQHSRSSLPLATLLGVNNHGHLVLLGCGLLSGDTKENYLWLLKRWLNCMNGKPPEAITTGYSDVIAEAVAEVFPNARHRFCFWHILKKLLENVGRTHEKEAISSRFKEVVYDSVTLTDFEREWGAMVDQYNLKDNEWFSALYSCRKQWAPGYVNHSFWAGTSAIRKVEKPDPYFDGVVTKTTLPVFLEQYETTLKGKLEREAYDDLRSYYSRLTLLSGLPFEEQLVEIYTT

SEQ ID NO: 90482 - protein, 169 aa, Setaria italica
  Transcript Sequence Number=SeqID_24508
  Gene Ontology: Mol. function=microtubule motor activity; Cellular component=microtubule associated complex; Biological process =microtubule-based movement
  Homolog annotation: Hit_ID=Q75LL2; Match level="QueryCoverage=91%, HitCoverage=12%, E-value=2e-51, Identity=67%"; Hit description =Kinesin-like protein
SNFALMNEKKEQLNLLQTRKNQLSAMRTRAHESETELRSKIDGLKLKLRSYEAQRKEEEKVLFAIDNLDTSTALTHKPKNFSKATDLLKSEEERIKLSCELQNAREQLRIVHKEIKSMQKCDYIDCEMALLETEIEDCCLSLLEADIEKFVRDNTLAEGLGRVEGRKKQ

SEQ ID NO: 90483 - protein, 206 aa, Setaria italica
  Transcript Sequence Number=SeqID_24509
  Gene Ontology: Biological process=response to stress
  Homolog annotation: Hit_ID=Q42376; Match level="QueryCoverage=100%, HitCoverage=100%, E-value=9e-60, Identity=64%"; Hit description=Late embryogenesis abundant protein, group 3
  Pfam annotation: Domain name=CRA_rpt; Domain location=108-143; Score =11.9; E_value=0.05; Accession=PF07046.3; Description=Cytoplasmic repetitive antigen (CRA)
  Pfam annotation: Domain name=CRA_rpt; Domain location=57-99; Score =5.7; E_value=0.29; Accession=PF07046.3; Description=Cytoplasmic repetitive antigen (CRA)
  Pfam annotation: Domain name=LEA_4; Domain location=118-161; Score =24.5; E_value=0.00042; Accession=PF02987.8; Description=Late embryogenesis abundant protein
  Pfam annotation: Domain name=LEA_4; Domain location=5-48; Score=17.4; E_value=0.03; Accession=PF02987.8; Description=Late embryogenesis abundant protein
  Pfam annotation: Domain name=LEA_4; Domain location=74-117; Score =35.7; E_value=1.9e-07; Accession=PF02987.8; Description=Late embryogenesis abundant protein
  Pfam module annotation: Pfam domain module=CRA_rpt::CRA_rpt::LEA _4::LEA_4::LEA_4; Domain location=108-143::57-99::118-161::5-48::74 -117
MASHQDKASYQAGETKARTEEKTGQAMGATKDTAQHAKDRASGAAGHAAGKGHDAKEATKQKASDTGSYLGQKTDEAKHKAGETTEATKHKAGETTEATKQKAGETTEAAKQKAGETTEAAKQKTAEALEATKQKAGEAGQYAKDSAVAGKDKTGSVIQQATDQVKTAAAGAKDAVMNTLGMGEGNKQGGDTGNTNKDSSTITRDH

SEQ ID NO: 90484 - protein, 613 aa, Setaria italica
  misc_feature (163)..(163): Xaa can be any naturally occurring amino acid
  misc_feature (462)..(462): Xaa can be any naturally occurring amino acid
  Transcript Sequence Number=SeqID_24510
  Gene Ontology: Mol. function=ion channel activity; Cellular component= integral to membrane; Biological process=metabolic process
  Homolog annotation: Hit_ID=Q5N941; Match level="QueryCoverage=99%, HitCoverage=63%, E-value=0.0, Identity=94%"; Hit description =Probable ion channel DMI1, chloroplastic
  Pfam annotation: Domain name=DUF1012; Domain location=156-370; Score =11.7; E_value=6.2e-05; Accession=PF06241.4; Description=Protein of unknown function (DUF1012)
  Pfam annotation: Domain name=TrkA_N; Domain location=80-217; Score= -3.4; E_value=0.037; Accession=PF02254.10; Description=TrkA-N domain
  Pfam module annotation: Pfam domain module=DUF1012::TrkA_N; Domain location=156-370::80-217
LYVVSGSGFLEALWLSWTFVADSGNHADQVGLGPRIVSVSISSGGMLVFATMLGLVSDAISEKVDSWRKGKSEVIEINHILILGWSDKLGSLLKQLAIANKSIGGGVVVVLAERDKEEMEMDIAKLEFDFMGTSVICRSGSPLILADLKKVSVSKARAIIVFXSDENADQSDARALRVVLSLTGVKEGLRGHVVVEMSDLDNEPLVKLVGGELIETVVAHDVIGRLMIQCALQPGLAQIWEDILGFENAEFYIKRWPELDGMRFGDVLISFPDAVPCGVKVASKAGKILMNPDDEYVLREGDEVLVIAEDDDTYAPAPLPEVNKGFLPNIPTPPKYPEKILFCGWRRDIHDMIMVLEAFLAPGSELWMFNEVPEKEREIKLTDGGLDICGLTNIKLVHKEGNAVIRRHLENLPLETFDSILILADESVEDSIVHSDSRSLATLLLIRDIQSKRLPFKELKSXTVNTGYTGFCHSAWIREMQNASDKSIIISEILDSRTRNLVSVSKISDYVLSNELVSMALAMVAEDKQINRVLEELFAEEGNEMCIRSAEFYLYEQEELSFFDIMVRAREREEIVIGYRLANTDQAIINPERKSEIRKWSVDDVFVVISKGD

SEQ ID NO: 90485 - protein, 200 aa, Setaria italica
  Transcript Sequence Number=SeqID_24511
  Gene Ontology: Mol. function=serine-type carboxypeptidase activity; Cellular component=extracellular region; Biological process =proteolysis
  Homolog annotation: Hit_ID=B6T4S1; Match level="QueryCoverage=100%, HitCoverage=40%, E-value=5e-58, Identity=52%"; Hit description=SCPL33
  Pfam annotation: Domain name=Peptidase_S10; Domain location=1-199; Score=-135.5; E_value=4.2e-07; Accession=PF00450.14; Description =Serine carboxypeptidase
DEKGLVEFAWSHSVISDQLYKHVTNVCKFRTIFFTGECARAMNLVYTQYNKIDIYNVYAPKCNTDHSAFSSSSDSTTEKTAKKKYKRLRMYSGYDPCYSIHIEDYLNSIDVQKSLHANISGWIKDRRWSICSYSIFNNYDDNIFTVRPLYSKLVKTGLRVWVYSGDMDGRVPVIGTRYWVEALDLPIKSQWQPWYLNNQV

SEQ ID NO: 90486 - protein, 108 aa, Setaria italica
  Transcript Sequence Number=SeqID_24512
  Homolog annotation: Hit_ID=B6UGX4; Match level="QueryCoverage=71%, HitCoverage=42%, E-value=3e-09, Identity=48%"; Hit description=GDU1
MRPGAGFNVTAAAAAKAVAAPAVAGSAAHSAWHSPVPYLFGGLAAMLGLIAFALLILACSYWKLSGYLEGGAGRGDEDGSGADGAKPAASDLPPPIWEEKILVIMAGD

SEQ ID NO: 90487 - protein, 24 aa, Setaria italica
  Transcript Sequence Number=SeqID_24513
NLPVDLSLILNHCGKTVPTGFKCL

SEQ ID NO: 90488 - protein, 86 aa, Setaria italica
  Transcript Sequence Number=SeqID_24514
  Gene Ontology: Mol. function=DNA binding; Cellular component=nuclear origin of replication recognition complex; Biological process=DNA replication
  Homolog annotation: Hit_ID=B9S8V3; Match level="QueryCoverage=100%, HitCoverage=29%, E-value=2e-33, Identity=79%"; Hit description =Origin recognition complex subunit, putative
  Pfam annotation: Domain name=ORC6; Domain location=3-86; Score=-59.7; E_value=0.095; Accession=PF05460.5; Description=Origin recognition complex subunit 6 (ORC6)
MDMSAIAARLGLSESRPVVRKAGELRRLCDVNFDSSVLGIGEVCKAIICLEIAASKFQVIFDRAEAVRMSGMSEKAYIRSFNALQN

SEQ ID NO: 90489 - protein, 149 aa, Setaria italica
  misc_feature (26)..(26): Xaa can be any naturally occurring amino acid
  misc_feature (37)..(37): Xaa can be any naturally occurring amino acid
  misc_feature (109)..(109): Xaa can be any naturally occurring amino acid
  Transcript Sequence Number=SeqID_24515
YWYGTHVFGSDYNLHDKSETNIISVXDCSIKCRCRQXSLVQFIDINIAGYHHARPGPARIFGFIAARDEIEPLRNYVYRRQISNCESVPVKRNTPLQVPDKLFKYYCAXGVARLSLTSPARVISMVARALIEFELYVRTKDRPEDEPKD

SEQ ID NO: 90490 - protein, 129 aa, Setaria italica
  Transcript Sequence Number=SeqID_24516
LVQFIDINIAGYHHARPGPARIFGFIAARDEIEPLRNYVYRRQISNCESVPVKRNTYLINYLNIIVLRGVARLSLTSPARVISMVARALIEFELYVRTKDRPEDEPKDDCLIEGCTEFTNLISSVSYVE

SEQ ID NO: 90491 - protein, 204 aa, Setaria italica
  misc_feature (12)..(12): Xaa can be any naturally occurring amino acid
  misc_feature (67)..(67): Xaa can be any naturally occurring amino acid
  Transcript Sequence Number=SeqID_24517
  Gene Ontology: Mol. function=DNA-directed RNA polymerase activity
  Homolog annotation: Hit_ID=Q2QYS5; Match level="QueryCoverage=75%, HitCoverage=34%, E-value=2e-11, Identity=28%"; Hit description=DNA -directed RNA polymerase
GDCSIKCRCAQXSLVQFIDINIAGYHHARPGPARIFGFIAARDEIEPLRNYVYRRQISNCESVPVKXTRPARVISMVARALIEFELYVRTKDRPEDEPKDDCLIEGCTEFTNLISSVSYVEHRRLYGNNCALDVKFAVLINAVEARIDVEVLRLGDIASGINLKVYAKTSGFREVIRLFEDAAPKPGAVMSFVVAVETHNYLDL

SEQ ID NO: 90492 - protein, 425 aa, Setaria italica
  Transcript Sequence Number=SeqID_24518
  Gene Ontology: Mol. function=DNA-directed RNA polymerase activity
  Homolog annotation: Hit_ID=Q2QYS5; Match level="QueryCoverage=55%, HitCoverage=53%, E-value=6e-12, Identity=26%"; Hit description=DNA -directed RNA polymerase
MDVATVPPLQLGFVGEIEKQPIETEAGGSNPARGKKRPPSPPGCDEEPSSDDDEESSSDDDSDDDDEWLVSDSGGEDCDQDENQGADALGNFPKAGCSYEEQNHILFTYPNIKLLGPPPIRLYPAFKNGTHVFGSDYNLHDKSETNIISVGDCSIKCRCRPMSLVQFIDINIAGYHHARPGPARIFGFIAARDEIEPLRNYVYRRQISNCESVPVKRNTGVARLSLTSPARVISMVARALIEFELYVRTKDRPEDEPKDDCLIEGCTEFTNLISSVSYVEHRRLYGNNCALDVKFAVLINAVEARIDVEVLRLGDIASGINLKVYAKTSGFREVIRLFEDAAPKPGAVMSFVVAVETHNYLDLYIEGSPGNNPVLGQKEEQVSRSWWKCSFGSSYHCMEEEVAELGNFGEVSVKVNWKSYTKRES

SEQ ID NO: 90493 - protein, 107 aa, Setaria italica
  Transcript Sequence Number=SeqID_24519
PKAMTTSADGVFLREGIVKATFAPPLLEFLGENLVRPAGRAVVTTQCHILVGGVALGSRLSCLAMVEVPLFPVQGSKVKYLRCLRSLSKSTPYDFYVIAISRAVGRF

SEQ ID NO: 90494 - protein, 165 aa, Setaria italica
  Transcript Sequence Number=SeqID_24520
  Gene Ontology: Mol. function=DNA binding; Cellular component=nucleus; Biological process=regulation of transcription
  Homolog annotation: Hit_ID=Q84U75; Match level="QueryCoverage=98%, HitCoverage=47%, E-value=6e-19, Identity=45%"; Hit description=R2R3 Myb transcription factor MYB-IF25
EKDKGKNKAAEAEQQLKLEEEDMAVSTPSSHSQPCATDKSGEEQAQASASGVTSDDGPEEDPLALSEEMMSALLGPVSPKLEVGPDGSGMDSDSGPSSLVVDSESGPGGPTGDVAQELGENDKAIMDWDLMALDISTAGDMWDPLVWDYADMDIVVPDGGHQQQQ

SEQ ID NO: 90495 - protein, 79 aa, Setaria italica
  Transcript Sequence Number=SeqID_24521
  Gene Ontology: Mol. function=catalytic activity
MRCGELVRTNSELDCNELLCQSFIGGPVMDFERRVLGITFSYRETTPFLPVEIAARCLKYYKQSKTLPWLRIRGQALHT

SEQ ID NO: 90496 - protein, 328 aa, Setaria italica
  misc_feature (140)..(140): Xaa can be any naturally occurring amino acid
  misc_feature (170)..(170): Xaa can be any naturally occurring amino acid
  Transcript Sequence Number=SeqID_24522
  Gene Ontology: Mol. function=catalytic activity; Cellular component =nucleus; Biological process=ribosome biogenesis
  Homolog annotation: Hit_ID=B8B5M4; Match level="QueryCoverage=52%, HitCoverage=36%, E-value=9e-14, Identity=35%"; Hit description =Superoxide dismutase [Cu-Zn]
WRARARLYSGTVVDHVGQETWILNSASLVRKSDTQFEAYKPGDIKIEVFLHNGQTVEGSLVMCNLHYNIAIVTIKFPGSRIYLPVVELSDLPECYSLQPRPVVALGRDMYSKDFQMRCGELVRTNSELDCNELLVCTCAXCQSFIGGPVMDFERRVLGITFSYRETTPFXLPVEIAARCLKYYKQSKTLPWLRIRGQALHTLDLYVLESIWCKFSEPPSGVLVNKICGLSAEKCGGIAVGDVISQLDGVNLCSVAQFSAIFLDKMVDATGTQNTVTLQAVVHRPTDQTTFVAKLNVQHVASDECDKSFQNRWMRGRSYGSREHFAVRR

SEQ ID NO: 90497 - protein, 383 aa, Setaria italica
  Transcript Sequence Number=SeqID_24523
  Gene Ontology: Cellular component=integral to membrane
  Homolog annotation: Hit_ID=B9SKH5; Match level="QueryCoverage=93%, HitCoverage=97%, E-value=1e-113, Identity=58%"; Hit description =ATPUP11, putative
  Pfam annotation: Domain name=Nuc_sug_transp; Domain location=121-325; Score=-175.0; E_value=0.068; Accession=PF04142.7; Description =Nucleotide-sugar transporter
  Pfam annotation: Domain name=TPT; Domain location=217-366; Score =199.8; E_value=7.5e-57; Accession=PF03151.8; Description=Triose -phosphate Transporter family
  Pfam annotation: Domain name=UAA; Domain location=52-375; Score= -169.0; E_value=0.067; Accession=PF08449.3; Description=UAA transporter family
  Pfam module annotation: Pfam domain module=Nuc_sug_transp::TPT::UAA; Domain location=121-325::217-366::52-375
MAGDDGSSGGAGVGGGGSREDEVQIQITGSSKPETSSANETAPQNSPTKHWHWWLMVALNIFFLIAGQTASTLLGRFYYNQGGNSKWMSTFVQTAGFPVLFIALYLFRSKSTQTTTASPETSVTKITLIYIALGLIIAADDLMYSYGLLYLPVSTYSLICASQLAFNAVFSYFLNAQKFTALIFNSVILLTFSAALLGVDEDSQGTNGLSHGRYILGFMLTLGASATYSLILSLMQVTFEKVIKRETFSVVLNMQIYTALVATIASLIGLFASGEWKTLKGEMHAFSSGRLSYVMTLLWTAISWQIASVGVVGLIFVVSSLFSNVISTLALPIIPVFAVIFFHDKMDGVKIIAMLLAIWGFISYGYQIYVNDKKARKTSVSVE

SEQ ID NO: 90498 - protein, 56 aa, Setaria italica
  Transcript Sequence Number=SeqID_24524
  Gene Ontology: Mol. function=oxidoreductase activity; Cellular component=glyoxysome; Biological process=fatty acid metabolic process
  Homolog annotation: Hit_ID=Q6L4L7; Match level="QueryCoverage=96%, HitCoverage=7%, E-value=6e-20, Identity=90%"; Hit description =Putative glyoxysomal fatty acid beta-oxidation multifunctional protein
MVCHARISTPSAQLGLPELQLGIIPGLGGTQRLPRLVGLQKALEMLLMSKAIKGRR

SEQ ID NO: 90499 - protein, 134 aa, Setaria italica
  misc_feature (43)..(43): Xaa can be any naturally occurring amino acid
  misc_feature (89)..(89): Xaa can be any naturally occurring amino acid
  Transcript Sequence Number=SeqID_24525
  Gene Ontology: Mol. function=protein dimerization activity; Cellular component=nucleus; Biological process=regulation of RNA metabolic process
  Homolog annotation: Hit_ID=Q2QPQ7; Match level="QueryCoverage=80%, HitCoverage=17%, E-value=2e-17, Identity=45%"; Hit description=HAT family dimerisation domain containing protein
  Pfam annotation: Domain name=hATC; Domain location=22-106; Score =116.2; E_value=1.1e-31; Accession=PF05699.6; Description=hAT family dimerisation domain
NDPWTAWDRQLSNDLQSQMSTELDRYLDLSNPVPRSKEFDILXWWMGNATKYSILARIARDLLAIPASSVASESAFSTSERIISDFRSXLDTPETVEALICTQDWYRAEGSSEFRMVSINDLIMGEMAENNTRL

SEQ ID NO: 90500 - protein, 64 aa, Setaria italica
  Transcript Sequence Number=SeqID_24526
  Subcellular localization annotation: CTP_CleavageSite=31; ConfidenceScore=5.61e-01
SVLASSSFAPPHPLSGLVLHLHPFPKQPRSVAERLKQWATGRTRGPPSRSPCAPPTAPRTAAAP

SEQ ID NO: 90501 - protein, 397 aa, Setaria italica
  misc_feature (314)..(314): Xaa can be any naturally occurring amino acid
  Transcript Sequence Number=SeqID_24527
  Gene Ontology: Mol. function=4 iron, 4 sulfur cluster binding; Cellular component=nucleus; Biological process=regulation of transcription, DNA-dependent
  Homolog annotation: Hit_ID=B8YIE8; Match level="QueryCoverage=97%, HitCoverage=21%, E-value=1e-132, Identity=64%"; Hit description=DNA glycosylase/lyase 701
NNTLQASTKLPQPCMDALYESSYIKFMTKKRSQKARPHCSSFIHPNDELENRFSAESNFYGGSNGSIISEDTFPNSSPLTLGNERINSDTHCDVPEGSSANTSTGKYMDYLQGVASKLKHLDLNIEQVHGTEMHLSLSTPAVISFGETDGLSNALVPYGGGVIIPYERPLQLVKKQRPQAKVELDFETTRVWNLLMGKASEPDGTDIEKERWWQQEREVFQGRANSFIARMRLVQGDRRFSPWKGSVVDSVVGVFLTQNVADHLSSSAYMSLAATFPSQSVNSNCKDDATTTKDNEQTISASALGEKNIFDLFXNGTRPDRGVGCEELSMTYEKIHMGPKDNTRTSELIEGETYSFGYKSANGSVFNHQVTGIEHKEQQFPDFSLVELTEPTEFIQQ

SEQ ID NO: 90502 - protein, 121 aa, Setaria italica
  Transcript Sequence Number=SeqID_24528
TRDLARANFIGSLRVRTGRFSQMFCVACGDCGHRCREGDRGHLRLWEAEPTRHGHGFRAFRVGNAPALQYVAGGRSIEPAGWPMFSFRAVLSPLYLWPVQELGRFVIMSLSSAAGLPHPGP

SEQ ID NO: 90503 - protein, 69 aa, Setaria italica
  Transcript Sequence Number=SeqID_24529
LVHCSYSFHQQCNTQLHLHASSRLDPVQHYHLWLLSIDHQSTWCTVPHYSRLVEIWHPHLALQPLRCSP

SEQ ID NO: 90504 - protein, 198 aa, Setaria italica
  Transcript Sequence Number=SeqID_24530
VRLQIKTTVVDNAAEGQEVVEEECAIVDRDAATDDIAVEDQEKEVKQSAGDESRATKDGNAVEVNEKMVDQEDVIDKHGVIKDGNGVVLLEENIVVVVEQGGDAISLPDVSNVEQYTIDQLRATTDDNAAENQEIGEQGAVVEGVVTTDGIDIEDQEKEVEHSSGDELTSTKNENGVEDNEKVDQEDIIDKQGVIKDG

SEQ ID NO: 90505 - protein, 81 aa, Setaria italica
  Transcript Sequence Number=SeqID_24531
  Subcellular localization annotation: CTP_CleavageSite=48; ConfidenceScore=5.98e-01
MTSSPCSATTTSSSSSCDPTATPSSAASSMLTAPSCSHSSTARPSFSRSSAVGHTCSSAGTSPRSSSPIPAPSPATRSSPC

SEQ ID NO: 90506 - protein, 343 aa, Setaria italica
  Transcript Sequence Number=SeqID_24532
AEEEMERDGDGEDRRRKERATEYYTTLEAIEECTNDESRVAKDGNVVEEKERPVKQEGAVGVLNAAKDGFIVELQEEDVMVAEQCEGDIFVRNQDKVVELCTSGQIKTTVVDNAAEGQEVVEEECAIVDRDAATDDIAVEDQEKEVKQSAGDESRATKDGNAVEVNEKMVDQEDVIDKHGVIKDGNGVVLLEENIVVVVEQGGDAISLPDVSNVEQYTIDQLRATTEDCAAVVEDQSNNAAVEQCAGDETRAVKDDNAVEVNEKVTEQEGAVSILDAAEDGVAVGSQEEEEDVVVAEQGEDVISVQDQLEVVELCTGDQLRTTTEDNAGRDQDLVKQEEGKPK

SEQ ID NO: 90507 - protein, 123 aa, Setaria italica
  misc_feature (88)..(88): Xaa can be any naturally occurring amino acid
  misc_feature (116)..(116): Xaa can be any naturally occurring amino acid
  misc_feature (118)..(118): Xaa can be any naturally occurring amino acid
  Transcript Sequence Number=SeqID_24533
  Homolog annotation: Hit_ID=Q8LPX2; Match level="QueryCoverage=92%, HitCoverage=44%, E-value=6e-49, Identity=79%"; Hit description=36I5.7
MLIYDDIPFLSVFRRPYCDDFLNFCALNFELGVWSSRKKENVASVVNIVMRDFKPRLLFCWDMSKCTFTGHKTLENMHKPLVLKELRXWNKEEPDLPWEEGDYSASNTLLVDDSPXKXLRNPP

SEQ ID NO: 90508 - protein, 354 aa, Setaria italica
  misc_feature (192)..(192): Xaa can be any naturally occurring amino acid
  Transcript Sequence Number=SeqID_24534
  Homolog annotation: Hit_ID=Q8LPX2; Match level="QueryCoverage=70%, HitCoverage=96%, E-value=6e-99, Identity=69%"; Hit description=36I5.7
  Pfam annotation: Domain name=NIF; Domain location=124-321; Score= -72.9; E_value=0.06; Accession=PF03031.10; Description=NLI interacting factor-like phosphatase
MAVVSENTTSCLEPKEQRENQNQNKVAMTNLVPLDNAERSEAYGVNLNRATEKRCELGTSNLDSTFEKRSELGKSSLDYTNMERNGLQEQDVLCSSNDHNANYLSTSHFAEAYMEKLNLFFSPGRSLGFPKKKLLILDLNGLLADINDDYHNAHMADAKVRGKLVFRRPYCDDFLNFCALNFELGVWSSRKXENVASVVNIVMRDFKPRLLFCWDMSKCTFTGHKTLENMHKPLVLKELRKLWNKEEPDLPWEEGDYSASNTLLVDDSPYKALRNPPHTAIFPRSYSYLNWNDNSLGPGGDLRMYLQNLAAADDVECFVRNNPFGQPFITECDPHWNFYAQIADKGHSPLTCCA

SEQ ID NO: 90509 - protein, 95 aa, Setaria italica
  Transcript Sequence Number=SeqID_24535
  Subcellular localization annotation: CTP_CleavageSite=42; ConfidenceScore=5.27e-01
QTLYALKRGEGKRHTVPQYHSSICSSCINSPSIRLGQLSRLRSRQESGRLTTSPSPLGRLLLRFRSTNQSLSLDANRAIHAKVRELENFNLAHTS

SEQ ID NO: 90510 - protein, 134 aa, Setaria italica
  Transcript Sequence Number=SeqID_24536
  Gene Ontology: Mol. function=DNA binding; Cellular component=nucleus
MGRGRGRGKKLTIVRSHEDKGSSGEEVVPARKRRGRPQKRFTDKIDQTDVENLVEKVDGDGEEVDDVKLKNSTSSVGNKRGRPLKEGSNLVLEENNSSVRSSSDESTRTNGFRQIGSRRKNKPRRAAEAGLECK

SEQ ID NO: 90511 - protein, 164 aa, Setaria italica
  Transcript Sequence Number=SeqID_24537
  Gene Ontology: Mol. function=oxidoreductase activity, acting on the CH-OH group of donors, NAD or NADP as acceptor; Biological process =oxidation reduction
  Homolog annotation: Hit_ID=B4FJW4; Match level="QueryCoverage=98%, HitCoverage=44%, E-value=9e-43, Identity=56%"; Hit description =Mannitol dehydrogenase
  Pfam annotation: Domain name=2-Hacid_dh_C; Domain location=27-151; Score=-98.4; E_value=0.034; Accession=PF02826.11; Description=D -isomer specific 2-hydroxyacid dehydr
  Pfam annotation: Domain name=ADH_zinc_N; Domain location=72-159; Score=-9.0; E_value=0.0041; Accession=PF00107.18; Description=Zinc -binding dehydrogenase
  Pfam module annotation: Pfam domain module=2-Hacid_dh_C::ADH_zinc_N; Domain location=27-151::72-159
SDENYCDKLVLTYNGILSDGSVTYGGYSEMLVVHKKFVARIPDTLPLDAAAPLLCAGITVYSPMRRHGMVKAGGSLGVVGLGGLGHIAVKFGKAFGLRVTVVSTSPDKEKEAREGLKADDFIVSTDKKQMQAKSRSLDYIIDTVPVKHSLGPLLELLKVDGVPT

SEQ ID NO: 90512 - protein, 85 aa, Setaria italica
  Transcript Sequence Number=SeqID_24538
  Gene Ontology: Mol. function=binding
  Homolog annotation: Hit_ID=Q84UC4; Match level="QueryCoverage=100%, HitCoverage=7%, E-value=2e-14, Identity=57%"; Hit description=HASTY
  Pfam annotation: Domain name=Xpo1; Domain location=1-85; Score=-21.9; E_value=0.1; Accession=PF08389.4; Description=Exportin 1-like protein
ALVAEVVRREGVALWNTILPSIVSLSNSGPIEAELVAMILRWLPEDITVHNEDLEGDRRRSLLRGLTESLPQILPLLYSLLEKHF

SEQ ID NO: 90513 - protein, 238 aa, Setaria italica
  Transcript Sequence Number=SeqID_24539
  Gene Ontology: Mol. function=transcription regulator activity; Cellular component=nucleus; Biological process=regulation of transcription
  Homolog annotation: Hit_ID=Q6ZGM4; Match level="QueryCoverage=100%, HitCoverage=100%, E-value=4e-69, Identity=59%"; Hit description=BHLH transcription factor
  Pfam annotation: Domain name=HLH; Domain location=69-120; Score=42.1; E_value=2.1e-09; Accession=PF00010.18; Description=Helix-loop-helix DNA-binding domain
MDGCVGGDPVEDFLLGGAGDDGDLALFCDGVPNLAGDGGLGIDGVSGDACGFEQSNLGKRARDEPSSSGPKSKACREKMRRDRLNDRFLELSSVMNPGKQAKLDKANILSDAARMVAQLRGEAEKLKESNEKLRENIKDLKEEKNELREEKVRLKAEKERLEQQVKAISTAPTGYVPHLPHPAAYHPAAFAPFAPPQQAPTNKGAPIPAAFPGMAMWQWMPPTVVDTTQDPKLWPPNA

SEQ ID NO: 90514 - protein, 417 aa, Setaria italica
  Transcript Sequence Number=SeqID_24540
  Gene Ontology: Mol. function=zinc ion binding; Cellular component =intracellular
LIQTKVSMQLPVSSNELFSVLDEASEKTFLCTNTAACIQKFLFDGEADKIATELKNVVACASYMLEQKLVEAWCAEKAAEALRCQKLLVEEEEAAQKRQAELMERKRMKKLRQKEQRLKDLKDHDVAIQLPKIMDDATCYPGIQSFKAISDPDLHEQEGSQYIQFPPPVTSETDNGFNANLLVEDVSCDSGPVMDKGAVLRPQVISRHHLGRTEKLAENSIISGSAVASKQLALARSSNYRDPNVCSSPNRNKTWARKVQAEIEKQCPKHGLDVDDEHNMAPSKNSRVLIGSISVAIEDGSEHLKDFRSKDDPVTPSTKTVKHASVKMMRPVTHVENKNEGIPHSDGNSVPAEEKHSCFSGITDEKSYSTCRSADLAEGEHLRRTVFSSKEATAFLSQRWKEAIAADHVKLVLCHDK

SEQ ID NO: 90515 - protein, 161 aa, Setaria italica
  misc_feature (102)..(102): Xaa can be any naturally occurring amino acid
  Transcript Sequence Number=SeqID_24541
  Gene Ontology: Mol. function=protein serine/threonine kinase activity; Cellular component=plasma membrane; Biological process =protein amino acid phosphorylation
  Homolog annotation: Hit_ID=B9SGR8; Match level="QueryCoverage=100%, HitCoverage=17%, E-value=1e-48, Identity=59%"; Hit description =Nodulation receptor kinase, putative
MPGFVSIDCGGSANYTDELGLQWTGDGGWFPFGETATIAVPSEKRTQYSTVRYFPSSSAAAPSSKHCYTLGVRTRTRYLVRATFLYGNFDSSNVFPEFDLYXGASRWSTIVIYDDAKVVTREAVVRPAGPSLSVCLSNATTGQAFISTLELRQLNGSLYYT

SEQ ID NO: 90516 - protein, 150 aa, Setaria italica
  misc_feature (80)..(80): Xaa can be any naturally occurring amino acid
  Transcript Sequence Number=SeqID_24542
  Homolog annotation: Hit_ID=B9T7N9; Match level="QueryCoverage=34%, HitCoverage=18%, E-value=1e-12, Identity=73%"; Hit description =Arginine/serine-rich coiled coil protein, putative
  Subcellular localization annotation: CTP_CleavageSite=44; ConfidenceScore=5.70e-01
RSPSPSPRRRKSRSPSPRRRKSQSPSQKHYRRKRSPSVTSSPITASQSSHLGLAENKNATDKQRLEEEKKRLFRRKLLLXRQKEVEMRLLEEETAKRVEQAIRKKVEESLNREEIKHEIQRRIEEGRKRIHEEVAVQIEKEKEAALNEAK

SEQ ID NO: 90517 - protein, 150 aa, Setaria italica
  Transcript Sequence Number=SeqID_24543
  Homolog annotation: Hit_ID=B9T7N9; Match level="QueryCoverage=36%, HitCoverage=19%, E-value=4e-14, Identity=76%"; Hit description =Arginine/serine-rich coiled coil protein, putative
  Subcellular localization annotation: CTP_CleavageSite=60; ConfidenceScore=5.95e-01
MPLYLSSQCQSLYRRRRSPSPSPRRRKSRSPSPRRRKSQSPSQKHYRRKRSPSVTSSPITASQSSHLGLAENKNATDKQRLEEEKKRRQKEVEMRLLEEETAKRVEQAIRKKVEESLNREEIKHEIQRRIEEGRKRIHEEVAVQIEKEKE

SEQ ID NO: 90518 - protein, 183 aa, Setaria italica
  Transcript Sequence Number=SeqID_24544
  Homolog annotation: Hit_ID=B9T7N9; Match level="QueryCoverage=29%, HitCoverage=19%, E-value=1e-12, Identity=72%"; Hit description =Arginine/serine-rich coiled coil protein, putative
  Pfam annotation: Domain name=MAP7; Domain location=5-165; Score= -76.7; E_value=0.09; Accession=PF05672.3; Description=MAP7 (E-MAP -115) family
KIGIGHALPPWFVSLTCYITCRRQKEVEMRLLEEETAKRVEQAIRKKVEESLNREEIKHEIQRRIEEGRKRIHEEVAVQIEKEKEAALNEAKQKAEREKQEREEQEKKLEEERKKAEEALMKEAMEQQQKELERYQELEKLQKEREEAMKRKQMEEEQQRQNQMKLLGKNKSRPKLSFALGMK

SEQ ID NO: 90519 - protein, 125 aa, Setaria italica
  misc_feature (103)..(103): Xaa can be any naturally occurring amino acid
  misc_feature (113)..(113): Xaa can be any naturally occurring amino acid
  Transcript Sequence Number=SeqID_24545
  Homolog annotation: Hit_ID=B6UH56; Match level="QueryCoverage=55%, HitCoverage=47%, E-value=2e-15, Identity=73%"; Hit description =Virulent strain associated lipoprotein
  Subcellular localization annotation: CTP_CleavageSite=60; ConfidenceScore=5.94e-01
MPLYLSSQCQSLYRRRRSPSPSPRRRKSRSPSPRRRKSQSPSQKHYRRKRSPSVTSSPITASQSSHLGLAENKNATDKQRLEEEKKRWEVSALLHSLDYSFYXTKMLLLLPFXCISSAMLTLNFY

SEQ ID NO: 90520 - protein, 120 aa, Setaria italica
  Transcript Sequence Number=SeqID_24546
  Gene Ontology: Mol. function=DNA binding
MNGLPDADAAAPLATAAPPQKRDEWSEGGIVRLLEAYEAKWLLRNRAKLKWSDWVDIAREVSAHCADDAAAAGKAPGGGGGNSAKTPNQCKNKIESMKKRYRAESAAVARAGPAAAGPSW

SEQ ID NO: 90521 - protein, 126 aa, Setaria italica
  misc_feature (7)..(7): Xaa can be any naturally occurring amino acid
  Transcript Sequence Number=SeqID_24547
QQRRRRXEHYYHDDGHGHGHYHLQQEPLHSHQQQPAYGDHYYQQPLYATPPAPLARTSSVLDRLRSFGLYRFRSGDFPPEYGAAAGPNHSQDASAPVEEEAAAQQLPEVHYARSRSEPAPAREERR

SEQ ID NO: 90522 - protein, 101 aa, Setaria italica
  Transcript Sequence Number=SeqID_24548
  Gene Ontology: Mol. function=transferase activity; Cellular component= cytoplasm
  Homolog annotation: Hit_ID=B6T7H0; Match level="QueryCoverage=100%, HitCoverage=44%, E-value=8e-52, Identity=95%"; Hit description =Glutathione S-transferase 6
  Pfam annotation: Domain name=GST_N; Domain location=3-78; Score=35.3; E_value=2.4e-07; Accession=PF02798.12; Description=Glutathione S -transferase, N-terminal domain
MAAGLQVFGQPASTDVARVLTCLFEKKLEFELVRIDTFKTHHKLPEFIRLRDPNGQVTLKHGDNTLVHSRDICRYVCNQFPNDGNKSLYGSGALERASIEQ

SEQ ID NO: 90523 - protein, 62 aa, Setaria italica
  Transcript Sequence Number=SeqID_24549
MAPAASILSATSAAAASKRPPASDAEPLLQGDGEAARKGQQPSRQQQLECPRCQSTNTKFLA

SEQ ID NO: 90524 - protein, 149 aa, Setaria italica
  Transcript Sequence Number=SeqID_24550
  Gene Ontology: Mol. function=electron carrier activity; Biological process=oxidation reduction
  Homolog annotation: Hit_ID=Q2QY23; Match level="QueryCoverage=100%, HitCoverage=9%, E-value=5e-74, Identity=86%"; Hit description =Cytochrome P450 family protein
IAGRETTSSALTWFFWLVSSRPDVVSRIADEVRAVRESTGTRAGEPFGFDALRGMHYLHAALTESMRLYPPVPIDSQSCAADDTLPDGTHVGAGWSVTYSAYAMGRLAAIWGEDCAEYRPERWLGEDGAFRPESPFRYTVFHAGPRMCL

SEQ ID NO: 90525 - protein, 107 aa, Setaria italica
  Transcript Sequence Number=SeqID_24551
  Gene Ontology: Mol. function=hydrolase activity, hydrolyzing O -glycosyl compounds; Cellular component=cytosolic ribosome; Biological process=carbohydrate metabolic process
  Homolog annotation: Hit_ID=B6T7E0; Match level="QueryCoverage=91%, HitCoverage=19%, E-value=2e-49, Identity=93%"; Hit description=Non -cyanogenic beta-glucosidase
  Pfam annotation: Domain name=Glyco_hydro_1; Domain location=7-106; Score=-331.4; E_value=0.053; Accession=PF00232.10; Description =Glycosyl hydrolase family 1
NCRVLLAKRTIPDNATADVAVDEYHRYKEDVNIMKNMGFDAYRFSISWSRIFPNGTGEVNQEGVDYYNRLIDYMIQQGITPYANLYHYDLPLALHEQYLGWLSPKIV

SEQ ID NO: 90526 - protein, 434 aa, Setaria italica
  Transcript Sequence Number=SeqID_24552
  Gene Ontology: Mol. function=hydrolase activity, hydrolyzing O -glycosyl compounds; Cellular component=cytosolic ribosome; Biological process=carbohydrate metabolic process
  Homolog annotation: Hit_ID=B6T7E0; Match level="QueryCoverage=100%, HitCoverage=84%, E-value=0.0, Identity=90%"; Hit description=Non -cyanogenic beta-glucosidase
  Pfam annotation: Domain name=Glyco_hydro_1; Domain location=1-434; Score=569.3; E_value=4.3e-168; Accession=PF00232.10; Description =Glycosyl hydrolase family 1
AFIKVPGTIPDNATADVAVDEYHRYKEDVNIMKNMGFDAYRFSISWSRIFPNGTGEVNQEGVDYYNRLIDYMIQQGITPYANLYHYDLPLALHEQYLGWLSPKIVEAFADYAEFCFQMFGDRVKNWFTFNEPRCVAALGYDNGLHAPGRCSGCAAGGNSTTEPYLVAHHLILSHAAAVKRYRDKYQLYQKGRIGILLDFVWYEPFSDSNADRAAAQRARDFHLGWFLDPIVNGRYPYSMQEIVEDRLPLFSDEESRMVKGSIDYVGINHYTSFYMKDPGTWNLMPISYQYDWHASFVYERNGVPIGAHANSYWLYIVPWGINKAVNYVKETYENPIMILAENGMDQPGNISISQGVHDTIRIRYYRDYITELKKAIDDGARVIGYFAWSLLDNFEWRLGYTSRFGLVYVDYKTLKRYPKDSAFWFKHMLSKKRS

SEQ ID NO: 90527 - protein, 95 aa, Setaria italica
  Transcript Sequence Number=SeqID_24553
VSMASRAAALARELKNIKSELHFMQERCGLLEEENKRLREGNDSGVSPEEDDLVRLQLEALLAEKSRLAQENANLTRENQSLMQLVEYHQLTSQD

SEQ ID NO: 90528 - protein, 569 aa, Setaria italica
  misc_feature (206)..(206): Xaa can be any naturally occurring amino acid
  misc_feature (242)..(242): Xaa can be any naturally occurring amino acid
  misc_feature (271)..(271): Xaa can be any naturally occurring amino acid
  misc_feature (312)..(312): Xaa can be any naturally occurring amino acid
  misc_feature (340)..(340): Xaa can be any naturally occurring amino acid
  misc_feature (444)..(444): Xaa can be any naturally occurring amino acid
  misc_feature (502)..(502): Xaa can be any naturally occurring amino acid
  Transcript Sequence Number=SeqID_24554
  Gene Ontology: Mol. function=aspartic-type endopeptidase activity; Cellular component=chromatin; Biological process=RNA-dependent DNA replication
  Homolog annotation: Hit_ID=Q8SA91; Match level="QueryCoverage=99%, HitCoverage=24%, E-value=1e-169, Identity=51%"; Hit description =Putative gag-pol polyprotein
  Pfam annotation: Domain name=RVT_1; Domain location=115-284; Score =111.2; E_value=3.5e-30; Accession=PF00078.19; Description=Reverse transcriptase (RNA-dependent DNA pol
  Pfam annotation: Domain name=RnaseH; Domain location=357-477; Score= -29.0; E_value=0.077; Accession=PF00075.16; Description=RNase H
  Pfam module annotation: Pfam domain module=RVT_1::RnaseH; Domain location=115-284::357-477
MVIPYKDSSVTLFGLLPDLPEGSVVQVFSVEVSVGNSVEASIPLEIQQLVEDFAELFEVPSDLSPPRYCDHTIPLVPGAAPFSVRPYQFARHLKDEVEKQVKEMLATVLIQKSSSPFSSLVLLVKKKDNSCRFCVDYRHLNAITIKGKYPVPIIDEFLDELSNASWFTNLDLRSRFHQIRLKPGEEFKIAFQTHCGQFEFGVVPFXLTGAPGTFQDAMNTTLAPFLRKFVLVFFDDILIYSXTLEEHVVHFRLVFELLAKDKWNVKLSKCXFTQRKISYLGQMIGEHGVGTGRSKIAAIASWPSPSSAKELXKFVRNFGIISKPLTELLKKHVLFVWTQXMENHLLLSPVLTLPNFSKVFCIETDASGYWIEAVLLQEGHPLAFLSRALGPKSQGLSNYENEYMAILLAVQQWRQYLQHAEFIIYTDQKSLAQLNEQRVNTQWXQKVFTKLLGLQYKVVYKKGTDNGVANALSRKSTHDVHCATVSTTSPQWLLEVQFGYQXDEHALSLIAKLSIDLAAVPNLSLTNGLLRYKNRIWVGKNAQLHLRLLHACHSSAIGGHSGIPVTYIR

SEQ ID NO: 90529 - protein, 304 aa, Setaria italica
  misc_feature (8)..(8): Xaa can be any naturally occurring amino acid
  Transcript Sequence Number=SeqID_24555
FVCDGGKXIRSRLGGLDIRVVKTLLEISVEHSWAKVVHSKLICMLTNMLYHVSDVTQNGVRDTHFVPERIDLLGGIDYICLEYSRANSREEKRDLFFVIFDYVVHQINETCLAGSVSTYTYDDAQPLASLLAFADAPEAFYISVKHGVEGVGDMLRKAISAALSQSAQYDQLNVLLDKVMRKLDGTVSTFSRIDNEFAYMIQVTKSYKCFSSIKDGCDDADVALRARLCWATLHSLLHSQISSYRHHGYIWLVELLLSEISEETDGSIWSKIQKLQEEIEVAGSQDLSCSEVSLPVCMLCGLLK

SEQ ID NO: 90530 - protein, 487 aa, Setaria italica
  misc_feature (91)..(91): Xaa can be any naturally occurring amino acid
  misc_feature (473)..(473): Xaa can be any naturally occurring amino acid
  misc_feature (480)..(480): Xaa can be any naturally occurring amino acid
  Transcript Sequence Number=SeqID_24556
  Gene Ontology: Mol. function=metal ion binding
  Homolog annotation: Hit_ID=B6TBE8; Match level="QueryCoverage=92%, HitCoverage=87%, E-value=0.0, Identity=82%"; Hit description=Zinc ion binding protein
  Pfam annotation: Domain name=DUF500; Domain location=396-486; Score =40.0; E_value=5.4e-09; Accession=PF04366.4; Description=Family of unknown function (DUF500)
  Pfam annotation: Domain name=FYVE; Domain location=215-283; Score =98.4; E_value=2.5e-26; Accession=PF01363.13; Description=FYVE zinc finger
  Pfam module annotation: Pfam domain module=DUF500::FYVE; Domain location=396-486::215-283
MAGTERAHRPIDPPRPGGGGSGDAGGGDSPARWDDDGERVEGLAGLNIFDQEADESPAKNGTGNSHDASCAPIANGCITDTTETLIETEPXNSFYDEPLHEHTGIWVPVSVPPMTAQDREEWHRGFGCNGGYFPEEEFSWELDEDNKEMTMWDVFADMVVAAKDRVKSAATYDFGRCGMSVVSNFFLQEAWKDMAQTLADANAGIANELLETEPTKWLPDSAATSCMLCSVRFHPIICSRHHCRFCGGVFCNGCTKGRSLMPPKFRTSEPQRVCDVCGVRLESIQPQLMNQISRASQLPTRDVTDLSTLRSWLNFPWAHTMEYEIYKAANSLRSYCKVGRLKPEKAIPDAILRQAKGLAIVTVVKVGMMVTYKLGTGLVVARRADGSWSPPSAISTCGVGYGAQAGGEIADFIIVLRNTDAIRTFSGKAHLSVGAGVSASAGHVGRVAEADFRAGDGGYAACYTYSCSKGAFXGCAFNAXIVSTRDT

SEQ ID NO: 90531 - protein, 98 aa, Setaria italica
  Transcript Sequence Number=SeqID_24557
  Gene Ontology: Mol. function=oxidoreductase activity, acting on the CH-OH group of donors, NAD or NADP as acceptor; Biological process =cellular carbohydrate metabolic process
  Subcellular localization annotation: CTP_CleavageSite=61; ConfidenceScore=5.50e-01
MAAAAIAALSFASVPCREHQLRHGASTFNAQQFSASSSHRHTANLKSGGPRRLRAAKRVIVAQAGTGRYKVAILGAAGDIGQPLSLLIKMSPLVSALH

SEQ ID NO: 90532 - protein, 394 aa, Setaria italica
  Transcript Sequence Number=SeqID_24558
  Homolog annotation: Hit_ID=B6TPT8; Match level="QueryCoverage=100%, HitCoverage=100%, E-value=0.0, Identity=83%"; Hit description=ENT domain containing protein
  Pfam annotation: Domain name=ENT; Domain location=51-124; Score =144.1; E_value=4.5e-40; Accession=PF03735.6; Description=ENT domain
MKAAGYDLYDSSGTDDDLPPAQNRGLRGRSFSGNGRASAGAFPYMRANNDLESEIHRVEQDAYTGVLRAFKVQSDAISWEKESLITELRKELRVSDEEHRELLNKVNEDGTIRRMRELRQAGGTPSALHRGSRALYDAEPGPIAKRQRPSHSIPSQSAGLQSPVMPSHSVPSAKWGPLSARGKKPKTPMPSALPSADPNSLINHKVYTRWPDDNNFYEATITRYNPVTGEHALVYDIGTQAETWEMVRLCDMPPEDIRWEFDGHLSNRDGWGPSGPMLTRHPTNNGAMTGPIRGRGRLSINEPVKDYTPPQNGINRNFDNIDIPNTESVVTEVERVLSNPNMREIEKARKLLKDQEQSLLDAIARLDEASDSESEDMATAGRTGPAGDGNGIAT

SEQ ID NO: 90533 - protein, 119 aa, Setaria italica
  Transcript Sequence Number=SeqID_24559
MASSRRIATVAAAVLLVCAILAWTPEAARMGRRGDVAVAGVDGGGGDSGNVRYWEWEQQRGFVGRRPRLASFTRRDGVALPNGQAAGGEDGGSKREVPSGPDPIHHGGVAPSSAAPTTP

SEQ ID NO: 90534 - protein, 69 aa, Setaria italica
  Transcript Sequence Number=SeqID_24560
  Gene Ontology: Mol. function=transferase activity, transferring glycosyl groups; Cellular component=membrane
  Homolog annotation: Hit_ID=Q9ZQZ7; Match level="QueryCoverage=73%, HitCoverage=11%, E-value=1e-11, Identity=58%"; Hit description =Putative glycosylation enzyme
GAWCDGSSDGGADPCLSRGEDSVFEPGPGAERLRGLMKKVLSWDYRNGSCSSLAYDQTKRDWYVPKSKG

SEQ ID NO: 90535 - protein, 47 aa, Setaria italica
  Transcript Sequence Number=SeqID_24561
LVPYHKCILCLQLLQICQLQNLTPAPVATSFGPNADVPTGYSYIISS

SEQ ID NO: 90536 - protein, 74 aa, Setaria italica
  misc_feature (54)..(54): Xaa can be any naturally occurring amino acid
  Transcript Sequence Number=SeqID_24562
  Homolog annotation: Hit_ID=B9RFB6; Match level="QueryCoverage=81%, HitCoverage=10%, E-value=2e-09, Identity=51%"; Hit description =Pentatricopeptide repeat-containing protein, putative
  Pfam annotation: Domain name=PPR; Domain location=7-41; Score=42.5; E_ value=1.6e-09; Accession=PF01535.12; Description=PPR repeat
KKRANVATYNVFLKYFCKMGKMEEANELLNEMLEKGRVPNGMTYEIINVGMVEXGFVPDIRGYAADISKTLTSS

SEQ ID NO: 90537 - protein, 121 aa, Setaria italica
  Transcript Sequence Number=SeqID_24563
  Gene Ontology: Mol. function=hydrolase activity, acting on ester bonds; Biological process=lipid metabolic process
  Homolog annotation: Hit_ID=B6T560; Match level="QueryCoverage=98%, HitCoverage=31%, E-value=7e-22, Identity=39%"; Hit description=GSDL -motif lipase
  Subcellular localization annotation: CTP_CleavageSite=52; ConfidenceScore=5.20e-01
GMNQLAAGFDAALKSLLAGLAPKLPGFTYSLADSFGLTQDTFANPLALGFVSSDSACCGSGRLGAQGECTPTATLCPDRDRYIFWDSVHPSQRSAMLGAKAYYDGPARYTTPINFKQLARA

SEQ ID NO: 90538 - protein, 81 aa, Setaria italica
  Transcript Sequence Number=SeqID_24564
TTWESAALQLLTQFCQLHPLEVTLDPIGLFPARNRLDPAWLDRVRNIEVLATTYSMVTISTNIRCMTALYRLIELQGRAMT

SEQ ID NO: 90539 - protein, 82 aa, Setaria italica
  Transcript Sequence Number=SeqID_24565
  Subcellular localization annotation: CTP_CleavageSite=76; ConfidenceScore=5.22e-01
SLEAASCWDPSWGCGDLTLQPESSKRARASGGTCLLPGTRHPLRAASPRPGARPPPLSQRRLPELAARCLVLAPVPAATASA

SEQ ID NO: 90540 - protein, 53 aa, Setaria italica
  Transcript Sequence Number=SeqID_24566
STASLHFCVCDCASVKSFTSILVMQSLIRSCCSLRICSLKPHELDEASGFGFY

SEQ ID NO: 90541 - protein, 124 aa, Setaria italica
  Transcript Sequence Number=SeqID_24567
CNNFLHSSSMIQNLRTQASFDGPPSFLEHHHCAAGLRIKGSKFTASFAELIFGSGGLDSGGGGTNRMTTFGQVSWKPADDVKLSFSGLWQVRSLSPRFNNLGILAIPLGSMKQENPTATATEEQ

SEQ ID NO: 90542 - protein, 74 aa, Setaria italica
  Transcript Sequence Number=SeqID_24568
  Subcellular localization annotation: CTP_CleavageSite=17; ConfidenceScore=5.12e-01
TSPPRGRDRRRRHTISSAATLVSVLPRPACPVSAHAGPIRRIARTGGPPPRRPLGRFSLGSHHFFLISVPTQRR

SEQ ID NO: 90543 - protein, 69 aa, Setaria italica
  Transcript Sequence Number=SeqID_24569
  Subcellular localization annotation: CTP_CleavageSite=49; ConfidenceScore=5.45e-01
VSDDHVVMTAGPPALVNKCAPTPVASTHLFPTESASSRTFELYHVKVKRVSTGRRARPVRPPTRRLRAG

SEQ ID NO: 90544 - protein, 147 aa, Setaria italica
  Transcript Sequence Number=SeqID_24570
  Gene Ontology: Mol. function=nucleotide binding; Biological process =defense response
  Homolog annotation: Hit_ID=A0SEC2; Match level="QueryCoverage=89%, HitCoverage=38%, E-value=9e-40, Identity=60%"; Hit description=Pib (Fragment)
DIKKNFSCRAWVRISHPFNPNDFIQSLVRQFRSAVGVDVLLETKKTGKELAEEFSGYLSENSFLIVLNNLSTFEEWNGVKACLPPNHKKGSRIIVCSLQVEVASLCAGQECQALELKQFSAHQTIYAFYEKDCQDTNKNTSGSVQLR

SEQ ID NO: 90545 - protein, 705 aa, Setaria italica
  Transcript Sequence Number=SeqID_24571
  Gene Ontology: Mol. function=peptidyl-prolyl cis-trans isomerase activity; Cellular component=small-subunit processome; Biological process=rRNA processing
  Homolog annotation: Hit_ID=B9T842; Match level="QueryCoverage=100%, HitCoverage=78%, E-value=0.0, Identity=67%"; Hit description=WD -repeat protein, putative
  Pfam annotation: Domain name=Utp21; Domain location=463-702; Score =308.3; E_value=1.7e-89; Accession=PF04192.4; Description=Utp21 specific WD40 associated putative domain
  Pfam annotation: Domain name=WD40; Domain location=105-143; Score =23.9; E_value=0.00067; Accession=PF00400.24; Description=WD domain, G-beta repeat
  Pfam annotation: Domain name=WD40; Domain location=15-54; Score=18.9; E_value=0.022; Accession=PF00400.24; Description=WD domain, G-beta repeat
  Pfam annotation: Domain name=WD40; Domain location=265-303; Score =17.1; E_value=0.075; Accession=PF00400.24; Description=WD domain, G -beta repeat
  Pfam annotation: Domain name=WD40; Domain location=307-344; Score =8.0; E_value=4.5; Accession=PF00400.24; Description=WD domain, G -beta repeat
  Pfam annotation: Domain name=WD40; Domain location=348-386; Score =50.8; E_value=5.2e-12; Accession=PF00400.24; Description=WD domain, G-beta repeat
  Pfam annotation: Domain name=WD40; Domain location=59-97; Score=18.4; E_value=0.03; Accession=PF00400.24; Description=WD domain, G-beta repeat
  Pfam module annotation: Pfam domain module=Utp21::WD40::WD40::WD40::WD 40::WD40::WD40; Domain location=463-702::105-143::15-54::265-303::307- 344::348-386::59-97
CSDGTVHVHNIRYDEELMSFNHQIRGAVTALSFRTDGQPLLASGGSSGVISIWNLEKRRLHSVIREAHDQSIVSLHFFANEPILMSSAADNSIKMWIFDNNDGGARLLRFRSGHSAPPRCIRFYGNGKCILSAGQDRAFRLFSVVQDQQSRELSQRHVTKRAKKLRVKEEEIKLKPVITFDCAEIRARDWCNVVTCHMDTPRAYVWRLQNFVIGEHILTPSSGTETPIKACVISACGNFTILGTEGGWIEKFNLQSGISRGSYIDTSLAMQCAHDGEVVGLACDATNGSLITAGYHGDIKVWDFKTCKLKSRLDVGKSVTKIAYHRANGILATVVDDMVLVLFDTVAMKMVRRFEGHTDRITDLCFSEDGKWLISSSMDGTLRIWDISLARQIDAMHVDVSITSLSMSPNMDVLATTHVDQNGVYLWVNQSLFSTSTNIENYASGKHVRNVCLPAVSSTERSEEEQAHNSGDSNQSNVKPFVIMDDQIPNMITLSLLPRSQWQSLTNLDIIKVRNKPIEPPKKPEKAPFFLPSVPSLSGEILFEPPASSKETNSSTTENTNQKKMAELSSQFSQLLQSCGETKNYSAFTDYMKGLSPSSLDMELRLLQIIDDEESEDLEQRPELQSILSLLDYFIHELSCRNNFEFVQAVLKLFLKIHGETIRRHSILQSKVKKLLEVQSLVWQKIDKMFQSARCMVTFLSNSQF

SEQ ID NO: 90546 - protein, 83 aa, Setaria italica
  Transcript Sequence Number=SeqID_24572
  Subcellular localization annotation: CTP_CleavageSite=48; ConfidenceScore=5.20e-01
AEARLWPSHQCKSTRFRFKPLPHAVHRGLENPGQGSCSSSFHRHPASKSNTNNSIASGTCLFLLNPPETPQVSWINKINKFTW

SEQ ID NO: 90547 - protein, 44 aa, Setaria italica
  Transcript Sequence Number=SeqID_24573
SNNRSNYIDINKLLLKFMWNRPQTVLVHEKYQQISGKYSPVLQT

SEQ ID NO: 90548 - protein, 59 aa, Setaria italica
  Transcript Sequence Number=SeqID_24574
  Homolog annotation: Hit_ID=Q5ZDT5; Match level="QueryCoverage=100%, HitCoverage=10%, E-value=5e-11, Identity=59%"; Hit description =Putative HGA6
DNKSGIERKTASSAKSGSPPENSFTNFQQSVTDIEVPKPKSKIYCDDKGKDEGFPYARP

SEQ ID NO: 90549 - protein, 144 aa, Setaria italica
  Transcript Sequence Number=SeqID_24575
LSSRVSSGDGVYLAEGNYVISSEDAEGAGALNSFQQGIVDGHGPPGPIAPVPARFGADPVRSLDTGVENSNAENRTDFDNKSGIERKTASSAKSGSPPENSFTNFQQSGEMTNRNTNCFYHEIGPSIILIWILISNINKLHVTL

SEQ ID NO: 90550 - protein, 128 aa, Setaria italica
  Transcript Sequence Number=SeqID_24576
NGRIDLRELKAQLEKRVGPDRSRRYFGYLNGYLSERLSRQDFEKLCLQTLGRENLQLHNRLIRSVLYNAYQAKCPPPPSDVGRPVGASVKKVSQAAEVLNTCNGDARLLQLQGSRPIGTVQDHALKNR

SEQ ID NO: 90551 - protein, 171 aa, Setaria italica
  Transcript Sequence Number=SeqID_24577
  Gene Ontology: Mol. function=substrate-specific transmembrane transporter activity; Cellular component=integral to membrane; Biological process=transmembrane transport
  Homolog annotation: Hit_ID=Q2R4G0; Match level="QueryCoverage=84%, HitCoverage=19%, E-value=3e-67, Identity=86%"; Hit description =Hexose transporter, putative, expressed
MRGAVLVAIAAAIGNMLQGWDNATIAGAVLYIKREFHLEAHPAMEGLVVATSLIGATVITTFSGPVSDSVGRRPMLIASSLLYFAAGLLMLWSPNVHVLLLSRLVDGFAIGLAVTLVPVYISETAPPEIRGLLNTLPQFTGSGGMFLSYCMVFAMTLALGFMATWFLAASP

SEQ ID NO: 90552 - protein, 111 aa, Setaria italica
  Transcript Sequence Number=SeqID_24578
  Gene Ontology: Mol. function=nutrient reservoir activity
  Homolog annotation: Hit_ID=Q43557; Match level="QueryCoverage=92%, HitCoverage=28%, E-value=5e-24, Identity=52%"; Hit description =Unidentified
  Pfam annotation: Domain name=DUF642; Domain location=1-102; Score= -102.4; E_value=2.3e-05; Accession=PF04862.4; Description=Protein of unknown function, DUF642
REAALLQEVPTTPGRWYGLSFSVGDAGNGCAEPMVVEAYAARATARVSYESRGTGGFKRASLEFAAAANLTRVVFQSYNHHMKPDGTLCGPVLDDVSLVSVRRHAARRLLL

SEQ ID NO: 90553 - protein, 183 aa, Setaria italica
  Transcript Sequence Number=SeqID_24579
  Gene Ontology: Mol. function=protein serine/threonine kinase activity; Cellular component=plasma membrane; Biological process =protein amino acid phosphorylation
  Homolog annotation: Hit_ID=Q10P10; Match level="QueryCoverage=86%, HitCoverage=23%, E-value=3e-78, Identity=90%"; Hit description =Protein kinase domain containing protein, expressed
  Subcellular localization annotation: CTP_CleavageSite=31; ConfidenceScore=5.06e-01
SSNGNASISSWVDGVRRSSRDWASGEFVPKSGGAVSSTPSMRGTVCYVAPEYGGGGPLSEKCDIYSFGVLLLVLISGRRPLQMATSPMSEFEKASLISWARHLAQVGRLLDLVDPALQDVDRDQALLCITVALLCIQRSPARRPSSTEVLDMLAGEGEPPPLPIGFSPSPPGGFPFKSRRKGR

SEQ ID NO: 90554 - protein, 99 aa, Setaria italica
  Transcript Sequence Number=SeqID_24580
  Homolog annotation: Hit_ID=B9RDF9; Match level="QueryCoverage=74%, HitCoverage=2%, E-value=5e-11, Identity=51%"; Hit description =Nucleotide binding protein, putative
APPEVVRAVEAAIAGGPDLLREVASQEQGDLAHSVVDVLLGTMGGADEAGDSTGTGAPPSVMSNARAAVVAAELLPCLPCDDQPSPRTRMVAGLHAALR

SEQ ID NO: 90555 - protein, 112 aa, Setaria italica
  Transcript Sequence Number=SeqID_24581
  Gene Ontology: Mol. function=transferase activity, transferring glycosyl groups; Cellular component=integral to membrane; Biological process=cellulose biosynthetic process
  Homolog annotation: Hit_ID=Q7XUT9; Match level="QueryCoverage=94%, HitCoverage=13%, E-value=6e-45, Identity=76%"; Hit description =Cellulose synthase-like protein H2
LFEILVSRNNPILLSICKRLHFRQCLAYLVIDVWPLRAPFELCYSLLGPYCLLTNHSFLPKSSEPGFSITLALFLTYNIYNFMEYMDCQLSARAWWNNQRMQRIISSSDLGT

SEQ ID NO: 90556 - protein, 84 aa, Setaria italica
  misc_feature (23)..(23): Xaa can be any naturally occurring amino acid
  Transcript Sequence Number=SeqID_24582
  Homolog annotation: Hit_ID=B9RUS0; Match level="QueryCoverage=98%, HitCoverage=1%, E-value=6e-35, Identity=87%"; Hit description =Vacuolar protein sorting-associated protein, putative
MQLKPEALNSLKLPVRVKAGFLXGSVKLKVPWSRLGQEPVLVYLDRIFILAEPATQVEGCSEDAVQEAKRSRVREMEIKLLERQ

SEQ ID NO: 90557 - protein, 67 aa, Setaria italica
  Transcript Sequence Number=SeqID_24583
MRPPPSSLLHLILLLFLAAVPNALSKSTLESCASSTACPALLSYTLYADLKLAELAALFAADPLAIL

SEQ ID NO: 90558 - protein, 50 aa, Setaria italica
  Transcript Sequence Number=SeqID_24584
ALFLIGVALVYALTGTLNLADLALRVPTVTGPEAAVLQAAALMLLVVFGF

SEQ ID NO: 90559 - protein, 169 aa, Setaria italica
  Transcript Sequence Number=SeqID_24585
VVEAGDCAAGEGGEGCSGGERRASRGGGREGEGDVTCDDTGLIRRRNRRHRRKRPERAEHPPRRGAVRPVVLRRLGEGAVSNRAVRVAACCLRGSCCCKGRRSRIREKETTTVAWRWRRPSASAAGSRRSARRRTSRRCGRSTWAAGSAASAPRRWATRSAARPGRYNQ

SEQ ID NO: 90560 - protein, 127 aa, Setaria italica
  Transcript Sequence Number=SeqID_24586
  Gene Ontology: Mol. function=hydrolase activity, hydrolyzing O -glycosyl compounds; Cellular component=extracellular region; Biological process=carbohydrate metabolic process
  Homolog annotation: Hit_ID=Q0IQJ7; Match level="QueryCoverage=99%, HitCoverage=33%, E-value=4e-58, Identity=80%"; Hit description =Mannan endo-1,4-beta-mannosidase 8
RALGIDLASVHIYSDTWLPHSVEDSHLQFVNTWMQQHIDDAANLLGMPILIGEFGVSLKDGRFGNEFRESFMETVYTIFLSSWKSGVVGGGCLVWQLFPESAEHMDDGYAVIFAKSSSTLNVLANHS

SEQ ID NO: 90561 - protein, 85 aa, Setaria italica
  Transcript Sequence Number=SeqID_24587
  Gene Ontology: Mol. function=oxidoreductase activity
  Homolog annotation: Hit_ID=B6TCN8; Match level="QueryCoverage=100%, HitCoverage=24%, E-value=5e-31, Identity=75%"; Hit description =NAD(P)H-dependent oxidoreductase
RRLGLAKMIGVSNFTTRKLKELLATANVPPAVNQVELNPSWQQRKLIEFCKDKGIHVTAYSPLGGQFRSKVLPSKVLDGIAKARG

SEQ ID NO: 90562 - protein, 166 aa, Setaria italica
  misc_feature (145)..(145): Xaa can be any naturally occurring amino acid
  Transcript Sequence Number=SeqID_24588
  Gene Ontology: Mol. function=nucleic acid binding; Cellular component= intracellular
TTAIRHSKEKVAGSWCGKIWMSNQVHPLLDREREEQDHDMVYSKAMVSVNSYDRIQEPSARSTSLINRSLSKRVSRRKEGDSVERAKKKRYTASDVATFDQPRNFDDHGKHESDGDENENEDAQKTLQHQHESEKTNKNSSSKKXRKDDKRNNNFYERHNDSDDHD

SEQ ID NO: 90563 - protein, 65 aa, Setaria italica
  Transcript Sequence Number=SeqID_24589
NDKQCFCLLEKYAFNYFCSCLILLQYYRAMASPSIFFTGCARNCHSLDVPILFLLTYHMSNLFVT

SEQ ID NO: 90564 - protein, 119 aa, Setaria italica
  Transcript Sequence Number=SeqID_24590
  Gene Ontology: Mol. function=electron carrier activity; Cellular component=integral to membrane; Biological process=protein retention in ER lumen
  Homolog annotation: Hit_ID=Q2QY23; Match level="QueryCoverage=100%, HitCoverage=7%, E-value=2e-49, Identity=79%"; Hit description =Cytochrome P450 family protein
LPLLRRNASGDGGGAVLDLQDVLERFAFDTICMVAFGHDPCCLADGGVMAEARSDFMHTFGEAQDLIVRRFLEPIEVSWKIKKWLNIGTERRLKKAISDIHAFAMDIVRARRQSASPDD

SEQ ID NO: 90565 - protein, 87 aa, Setaria italica
  Transcript Sequence Number=SeqID_24591
  Gene Ontology: Mol. function=glycerophosphodiester phosphodiesterase activity; Cellular component=anchored to membrane; Biological process=glycerol metabolic process
  Homolog annotation: Hit_ID=Q9FZI0; Match level="QueryCoverage=93%, HitCoverage=7%, E-value=3e-15, Identity=44%"; Hit description =F1O19.6 protein
AVTQAIWSRTYRFDSGGYSILSVTDLLSSVKQPSVWLNVQHDTFYKEHGLNMRNYILSIQKRVSVDYISSPELGFLQNISGTVHRQN

SEQ ID NO: 90566 - protein, 62 aa, Setaria italica
  Transcript Sequence Number=SeqID_24592
TSLILQARETRTRYPVSGWAPGRRRARPAMASAMNGGGGGGGVLKRVGPLRLQYYIVMGAVA

SEQ ID NO: 90567 - protein, 170 aa, Setaria italica
  Transcript Sequence Number=SeqID_24593
  Homolog annotation: Hit_ID=B9RTG0; Match level="QueryCoverage=55%, HitCoverage=15%, E-value=1e-16, Identity=44%"; Hit description =Serine-threonine protein kinase, plant-type, putative
  Pfam annotation: Domain name=LysM; Domain location=62-103; Score =10.2; E_value=0.053; Accession=PF01476.12; Description=LysM domain
LRKYNTTNQPKTRQEILTQYQAVERVNPTLVPTNLDVGVMVTFPVFCQCPAVTDNATALVTYVMQPGDTYATIAAAFAVDSQSLVSLNGPEPRTQQFAEILVPLRRPVSDFLPPIVRVNNASVKPASPPPSASPNTTVVSNDRNGVVTGLAVGLGVVGALWLLQYCLVLS

SEQ ID NO: 90568 - protein, 70 aa, Setaria italica
  Transcript Sequence Number=SeqID_24594
  Subcellular localization annotation: CTP_CleavageSite=39; ConfidenceScore=5.24e-01
ATSGLDLPCTGSSRTHVWLFAPALSSYLSLLSGREGTVRLSGEGGRVRDLRAGNMPPAAGTASTNASLSP

SEQ ID NO: 90569 - protein, 45 aa, Setaria italica
  Transcript Sequence Number=SeqID_24595
ALLCRGDEKWYCKTHSFIVKIDQLNIDLNPRLLVMLLPRLLKMQF

SEQ ID NO: 90570 - protein, 90 aa, Setaria italica
  Transcript Sequence Number=SeqID_24596
YSLLICETLQDRSQCPSIMKETAPDGSSSSSRYLQDLITFNNHFVKWLPYLFRGTYIVLYTSGARLTSNLKSISGNSSFEFHFSSRFQRK

SEQ ID NO: 90571 - protein, 88 aa, Setaria italica
  Transcript Sequence Number=SeqID_24597
MAGVEVGGEQDKEQAEKTSSAADAAAVKNPSDGGATGRPGDLVDRLIVDVLKDNLRLLQNIRARMDRVDVQEPTIEVRFRDLSVEAEC

SEQ ID NO: 90572 - protein, 147 aa, Setaria italica
  Transcript Sequence Number=SeqID_24598
  Gene Ontology: Mol. function=amino acid transmembrane transporter activity; Cellular component=integral to membrane; Biological process=amino acid transport
  Homolog annotation: Hit_ID=B9HWC4; Match level="QueryCoverage=95%, HitCoverage=32%, E-value=2e-59, Identity=79%"; Hit description=Amino acid transporter
  Subcellular localization annotation: CTP_CleavageSite=43; ConfidenceScore=5.00e-01
NPPLSSLWHKVNKQEVPINAVWFSAFISLCMALPSLGSLVAFQAMASVATTAVYIAYALPILFRVTLAYKSFVPGPFNLGRYSVLVGWIAVLWVATITVLFSLPVSYPVTKDTLNYTPVAVGGLFTLILWSWIVRARHWFKGPSQIW

SEQ ID NO: 90573 - protein, 68 aa, Setaria italica
  Transcript Sequence Number=SeqID_24599
MADDGYGAGSLRRPSWICHLAVISTTFWALLFYFHYAMQGNMASIFLKPSSFSLPSLPPSLSGWLGQD

SEQ ID NO: 90574 - protein, 125 aa, Setaria italica
  Transcript Sequence Number=SeqID_24600
  Subcellular localization annotation: CTP_CleavageSite=54; ConfidenceScore=5.32e-01
QWKYSVIQEFPDIDLLQPSTSAPSTFASSQSHLKAITASKRMKSGPNQVWMNIPANTFQPRARPLFQYRHYSEQQPLRLNPAEISEVIAEVCSEATSNASQSIAQTRLSTQSRQPSADVAFSVLI

SEQ ID NO: 90575 - protein, 105 aa, Setaria italica
  Transcript Sequence Number=SeqID_24601
  Gene Ontology: Mol. function=nucleotide binding; Biological process =defense response
DEECKGPSSRSGLRDLFNRAKEASKLLVISRVSNEKVLPWMISSSGSVRCFDTISLSQKLSLHRLAVRPIELHLLAWEKPAGPVGRIFHSPKLPLPSTLLPQPHQ

SEQ ID NO: 90576 - protein, 78 aa, Setaria italica
  misc_feature (55)..(55): Xaa can be any naturally occurring amino acid
  Transcript Sequence Number=SeqID_24602
  Gene Ontology: Mol. function=oxidoreductase activity; Biological process=metabolic process
  Homolog annotation: Hit_ID=B6SUB7; Match level="QueryCoverage=60%, HitCoverage=14%, E-value=5e-14, Identity=76%"; Hit description =Carbonyl reductase 3
KAAMNAYSRVLARRHPALRVNVVDPGYVRTNMTRNSGLLAPDEGGARVVAVAAWXLLPEGGATGAFFGGGEEASSSFV

SEQ ID NO: 90577 - protein, 83 aa, Setaria italica
  Transcript Sequence Number=SeqID_24603
  Gene Ontology: Mol. function=iron-sulfur cluster binding; Cellular component=chloroplast
  Homolog annotation: Hit_ID=B6SUB5; Match level="QueryCoverage=89%, HitCoverage=38%, E-value=8e-29, Identity=81%"; Hit description =Electron carrier/ electron transporter/ iron ion binding protein
DAEEADELHGGSHFPAVCEAVEEPSVDFAFVSPRLLPDGTPDVHYRTARGGQKLRDIMLEGYIDLYGPYDKFLLNCSGGGVCG

SEQ ID NO: 90578 - protein, 169 aa, Setaria italica
  Transcript Sequence Number=SeqID_24604
  Gene Ontology: Mol. function=iron-sulfur cluster binding; Cellular component=chloroplast
  Homolog annotation: Hit_ID=B6SUB5; Match level="QueryCoverage=98%, HitCoverage=85%, E-value=3e-70, Identity=78%"; Hit description =Electron carrier/ electron transporter/ iron ion binding protein
  Pfam annotation: Domain name=Fer2; Domain location=56-144; Score =27.0; E_value=7.6e-05; Accession=PF00111.19; Description=2Fe-2S iron- sulfur cluster binding domain
GGAKKQVCSLRAPRQQSRRRLRVAHAVEMGAPGSAGAPEEEVEEPSVDFAFVSPRLLPDGTPDVHYRTARGGQKLRDIMLEGYIDLYGPYDKFLLNCSGGGVCGTCIVEVVEGKEMLSPKTEKEKEMLKRKPKTWRLACQATVGNADSTGQMVIQQLPEWKIHEWDKQK

SEQ ID NO: 90579 - protein, 90 aa, Setaria italica
  Transcript Sequence Number=SeqID_24605
  Subcellular localization annotation: CTP_CleavageSite=38; ConfidenceScore=5.24e-01
LGGVGSGGWVGTLSTYKIKKKLDSASGGGASIPWRAVRSDNASSPRPAAAGGRRIGAAAEGGVARAREGDPGKAHSQVVAGGIRSPHLSL

SEQ ID NO: 90580 - protein, 175 aa, Setaria italica
  Transcript Sequence Number=SeqID_24606
  Gene Ontology: Mol. function=binding
  Homolog annotation: Hit_ID=Q6H7S8; Match level="QueryCoverage=100%, HitCoverage=6%, E-value=6e-57, Identity=65%"; Hit description =Putative LvsC
FEADGKFLPMLCGLPRIIDVVRQFYSDKVDSRSSKPLLVSKKVIGERPSMEQIRKIRLLLLSLAEMSLKLKVSQHDIKALVSFLERSQDVACIEDILHMIIRALSQNSLLPSFLEQVNSLGGCYIFINLLKREFEPIRLLGLQLLGKLIGWSSTLRKRTKIFGLPVGRPRSIAED

SEQ ID NO: 90581 - protein, 103 aa, Setaria italica
  Transcript Sequence Number=SeqID_24607
PWERDCWWLQNAKPRIRRTPEGLETPSSSRYCGFQPSTSCCQGGRERRDDLPTPGKNGLLSLRKHSGGNYRSGPRSWSNSPTNTLSEKTYFPLSMETLRADPV

SEQ ID NO: 90582 - protein, 192 aa, Setaria italica
  Transcript Sequence Number=SeqID_24608
  Gene Ontology: Cellular component=plasma membrane
  Homolog annotation: Hit_ID=B9RY40; Match level="QueryCoverage=89%, HitCoverage=43%, E-value=8e-12, Identity=31%"; Hit description=DNA binding protein, putative
  Subcellular localization annotation: CTP_CleavageSite=46; ConfidenceScore=5.03e-01
SKWDDAEKWISSPTSNRTGRAGPATGTVPKKSALAFPEHGGRPPAVAKVVVDVPTNTAPLVKNSDGLIQSDLFKPAQSASIVDEPAPAIRSVSMRDMGTEMTPIASQEPSRTGTPIIASSPTSSRTPTPQRMTEFSISNIDSNKKEMSEEELQMNTRQEIMDLGQRLGKTTIAAWASKEEKASAHFRSTTTD

SEQ ID NO: 90583 - protein, 94 aa, Setaria italica
  Transcript Sequence Number=SeqID_24609
TPLWEEEQLWSYLVLEEAAEVAEACKVTAGSRDIINKPTQVAECFLYMLDLCCKGSQSIDYDLATHGANYWVCDRNRIVHQLQHEERDVNGGDK

SEQ ID NO: 90584 - protein, 191 aa, Setaria italica
  Transcript Sequence Number=SeqID_24610
  Gene Ontology: Mol. function=sequence-specific DNA binding; Cellular component=nucleus; Biological process=regulation of transcription, DNA-dependent
  Homolog annotation: Hit_ID=Q0E0A6; Match level="QueryCoverage=88%, HitCoverage=57%, E-value=9e-51, Identity=60%"; Hit description =Homeobox-leucine zipper protein HOX7
  Pfam annotation: Domain name=HALZ; Domain location=83-127; Score =74.5; E_value=4e-19; Accession=PF02183.10; Description=Homeobox associated leucine zipper
  Pfam annotation: Domain name=Homeobox; Domain location=28-82; Score =62.8; E_value=1.3e-15; Accession=PF00046.21; Description=Homeobox domain
  Pfam module annotation: Pfam domain module=HALZ::Homeobox; Domain location=83-127::28-82
MEVPVRQAADQEAAEDEENSGVGGGARKKLRLSKEQSAFLEDSFKEHSTLTPKQKSDLAKRLNLRARQVEVWFQNRRARTKLKQTEVDCEYLKRCCETLAQENRRLQREVAELRALRTAPYPFYGHLPASGFSTARVCPCDNKVITAHHPGITTSSTVVAPPSPVSTLFARPQFGPFTVHPVLRRQPSATS

SEQ ID NO: 90585 - protein, 111 aa, Setaria italica
  misc_feature (104)..(104): Xaa can be any naturally occurring amino acid
  Transcript Sequence Number=SeqID_24611
  Homolog annotation: Hit_ID=B6SXP2; Match level="QueryCoverage=98%, HitCoverage=19%, E-value=2e-52, Identity=89%"; Hit description =Pentatricopeptide repeat protein PPR986-12
HRLKLEPSCAATHVQLANLYASIGCWSDVARVRKVMKERGLKTNIGCSWIEVGNKVYTFTAENRSKSQVNDVLAILDCLQSHMDHKYDILIDGLDWDDPEHIKXSLNTIYI

SEQ ID NO: 90586 - protein, 89 aa, Setaria italica
  Transcript Sequence Number=SeqID_24612
  Gene Ontology: Mol. function=nucleotide binding; Cellular component =integral to membrane
  Homolog annotation: Hit_ID=Q2R4A9; Match level="QueryCoverage=76%, HitCoverage=12%, E-value=1e-28, Identity=86%"; Hit description=Plant protein family protein, expressed
MKTSSEIVTKHLNLWSSGSSIFSHRLAEDIDDPELQRLRCRVNYHALRFKPHIMKTSSDIVSGAYYLRSEGHFMSIHLRFELDMLAYAG

SEQ ID NO: 90587 - protein, 108 aa, Setaria italica
  misc_feature (32)..(32): Xaa can be any naturally occurring amino acid
  Transcript Sequence Number=SeqID_24613
  Gene Ontology: Mol. function=nucleic acid binding; Cellular component= integral to membrane
  Homolog annotation: Hit_ID=Q2R4A9; Match level="QueryCoverage=91%, HitCoverage=19%, E-value=3e-39, Identity=73%"; Hit description=Plant protein family protein, expressed
AIAPIFMDREEGRASGFEERVRQVMFNTHFGXPHKRNHPESFYTNSWPECFCQTKARNHADQCPPDSLNDVLVSQFQDKEDTEVEATNQTDSTSQTEELADGTGLATV

SEQ ID NO: 90588 - protein, 486 aa, Setaria italica
  Transcript Sequence Number=SeqID_24614
  Gene Ontology: Mol. function=nucleic acid binding; Cellular component= integral to membrane
  Homolog annotation: Hit_ID=Q2R4A9; Match level="QueryCoverage=97%, HitCoverage=89%, E-value=0.0, Identity=83%"; Hit description=Plant protein family protein, expressed
  Pfam annotation: Domain name=DUF246; Domain location=56-401; Score =461.1; E_value=1.6e-135; Accession=PF03138.6; Description=Plant protein family
ISTKLYLILTSVLLLQDYVVNKLWRTADSNGWRASSAPRTYWSPPPIESESNGYLRVRCNGGLNQQRSAICNAVVAARIMNATLVLPELDTNSFWHDESGFVGIYDVPHFIKTLKYDVRIVMSVPEITAQGKTKKLRAYKIDPPRDAPVTWYRTTALEKIRKYGAIYLTPFSHRLAEEIDDPELQRLRCRVNYHALRFKSNIMKTSSDIVNKLRSEGHFMSIHLRFELDMLAYAGCVDIFTPKEREILLKYRADHFPEKSLVSKERRLIGKCPLTPEEVGLILRAMGFDNTTRIYLASGELFGGKRFMKPFKAMFPRLENHSTVGPGKLEENTQGLAGSAVDYMVCLLSDIFIPTYDGPSNFANNLMGHRLYYGFRTTITPNRKALAPIFIDRAQGRTAGFEQRIRQVMFNTHFGGPHKRIHPESFYTNSWPECFCQTNTRNHADQCPPDNINDVLESQFQSEEEMEEARATNQTDSSGQAEETMI

SEQ ID NO: 90589 - protein, 95 aa, Setaria italica
  misc_feature (76)..(76): Xaa can be any naturally occurring amino acid
  Transcript Sequence Number=SeqID_24615
  Gene Ontology: Mol. function=hydrolase activity, hydrolyzing O -glycosyl compounds; Cellular component=extracellular region; Biological process=carbohydrate metabolic process
  Homolog annotation: Hit_ID=B6T289; Match level="QueryCoverage=100%, HitCoverage=20%, E-value=2e-43, Identity=87%"; Hit description =Glucan endo-1,3-beta-glucosidase 7
KIKYTNMFDAQLDAVKSAMVRAGYGNVDIVVAETGWPTKGDAGEPGATVENARAYVSNLVSHLRSGAGTPLVPGSXVETYLFALYDEDLKPGPES

SEQ ID NO: 90590 - protein, 103 aa, Setaria italica
  Transcript Sequence Number=SeqID_24616
MLSGRAVTLSERGDSGTRLDEDVAPEAGDEEAESTARVLYRASFQELMPGYLQYDTIIWAAISLLLVLAWGIGLLLLLYLPYKRYVLKRDIMSLLSTLFFFVT

SEQ ID NO: 90591 - protein, 65 aa, Setaria italica
  Transcript Sequence Number=SeqID_24617
  Gene Ontology: Mol. function=DNA-directed RNA polymerase activity; Cellular component=DNA-directed RNA polymerase III complex; Biological process=transcription
  Homolog annotation: Hit_ID=B2BXR4; Match level="QueryCoverage=100%, HitCoverage=59%, E-value=8e-23, Identity=73%"; Hit description =RNApol24
  Pfam annotation: Domain name=RNA_pol_L; Domain location=10-65; Score =20.6; E_value=0.0029; Accession=PF01193.16; Description=RNA polymerases L  13 to 16 kDa subunit
MEHGSATDSTASTFSIMEEDHTLANSARFVLNQDPRVAFCGYSIPHPAENKVNIRLQTTGDPAND

SEQ ID NO: 90592 - protein, 48 aa, Setaria italica
  Transcript Sequence Number=SeqID_24618
IINSVSFYLVTRETDTVLSALGISGKRLNFLDPMDAQDTTIGPVQLTN

SEQ ID NO: 90593 - protein, 149 aa, Setaria italica
  misc_feature (68)..(68): Xaa can be any naturally occurring amino acid
  Transcript Sequence Number=SeqID_24619
  Gene Ontology: Mol. function=hydrolase activity, hydrolyzing O -glycosyl compounds; Cellular component=extracellular region; Biological process=carbohydrate metabolic process
  Homolog annotation: Hit_ID=Q0J930; Match level="QueryCoverage=100%, HitCoverage=23%, E-value=2e-71, Identity=83%"; Hit description =Endoglucanase 13
  Pfam annotation: Domain name=Glyco_hydro_9; Domain location=1-149; Score=-269.9; E_value=0.034; Accession=PF00759.11; Description =Glycosyl hydrolase family 9
GWSVLEFSWDNKYAGLQVLLSKVLFEGGAGVAAYADTLKQFQAKAEFFLCACLQKNNGHNIRMTPGGXLLYVDDWNNMQYVSSATFLLTVYADYLAVSHGSLKCPDGEVKPDEIVRFAKSQVDYVLGKNPKGMSYMVGYGSYFPTHVHH

SEQ ID NO: 90594 - protein, 107 aa, Setaria italica
  Transcript Sequence Number=SeqID_24620
  Gene Ontology: Mol. function=metalloendopeptidase activity; Cellular component=mitochondrial intermembrane space; Biological process =proteolysis
  Homolog annotation: Hit_ID=B9RMK4; Match level="QueryCoverage=100%, HitCoverage=15%, E-value=4e-32, Identity=61%"; Hit description =Oligopeptidase, putative
KQIAVAYGQKGGKDNLGILENLVQLRHKFARLLGYGNYADFAIEPRMPRTSRKVLEFLEEMSEQLSDVANRELSILKDLKMKEEGNAQFGMEDLLYYVKRAEEFKVD

SEQ ID NO: 90595 - protein, 53 aa, Setaria italica
  Transcript Sequence Number=SeqID_24621
VSLVFNKKSLAQENFIKQNTVTGVQYSILLLRNIQICKTVFLTNHKWRTYWYG

SEQ ID NO: 90596 - protein, 66 aa, Setaria italica
  Transcript Sequence Number=SeqID_24622
  Gene Ontology: Mol. function=protein kinase activity; Cellular component=integral to membrane; Biological process=protein amino acid phosphorylation
  Homolog annotation: Hit_ID=B9GUS3; Match level="QueryCoverage=95%, HitCoverage=10%, E-value=4e-25, Identity=82%"; Hit description =Leucine-rich repeat transmembrane protein
ADPRRVSQKADVYSFGVLLLEMLTGKAPTHAVLHDEGVDLPRWARSVVKEEWTAEVFDTELLRHPG

SEQ ID NO: 90597 - protein, 223 aa, Setaria italica
  misc_feature (11)..(11): Xaa can be any naturally occurring amino acid
  misc_feature (15)..(15): Xaa can be any naturally occurring amino acid
  Transcript Sequence Number=SeqID_24623
  Gene Ontology: Mol. function=RNA binding; Cellular component =chloroplast
  Homolog annotation: Hit_ID=B9SU41; Match level="QueryCoverage=100%, HitCoverage=64%, E-value=1e-58, Identity=33%"; Hit description =Pentatricopeptide repeat-containing protein, putative
  Pfam annotation: Domain name=PPR; Domain location=106-140; Score =30.2; E_value=8.5e-06; Accession=PF01535.12; Description=PPR repeat
  Pfam annotation: Domain name=PPR; Domain location=141-175; Score =10.0; E_value=0.59; Accession=PF01535.12; Description=PPR repeat
  Pfam annotation: Domain name=PPR; Domain location=36-70; Score=20.8; E_value=0.0055; Accession=PF01535.12; Description=PPR repeat
  Pfam annotation: Domain name=PPR; Domain location=71-105; Score=49.4; E_value=1.4e-11; Accession=PF01535.12; Description=PPR repeat
  Pfam module annotation: Pfam domain module=PPR::PPR::PPR::PPR; Domain location=106-140::141-175::36-70::71-105
RRLEEARMLFXKMEXGNNPSLFLRLTLGANQVRDRESLQKLVDSMCQSGQVLKAYKLLRGIIDSGVVPDVVTYNTMINGLCKVRNLDGALRLFKELQPKGFTPDEITYGTLIDSLLRAHRDDDAMMLFQDMLQSGGTPSLSIYNSMMRSLCRKNKLSQAIKLWFDHLPQKYNLSAEDEVIASARKKFEDGSLDEAVRELIKIDQEHGSVNSSPYTIWLIGLCQ

SEQ ID NO: 90598 - protein, 61 aa, Setaria italica
  Transcript Sequence Number=SeqID_24624
  Subcellular localization annotation: CTP_CleavageSite=33; ConfidenceScore=5.25e-01
NPTAHAYLQADGFICNHDLVIKTHGVAFSSAPSAAPRRAVRRQRRRRGRRDVAALNELEAL

SEQ ID NO: 90599 - protein, 268 aa, Setaria italica
  Transcript Sequence Number=SeqID_24625
  Gene Ontology: Mol. function=structural constituent of ribosome; Cellular component=large ribosomal subunit; Biological process =translation
  Homolog annotation: Hit_ID=B9S876; Match level="QueryCoverage=80%, HitCoverage=78%, E-value=1e-73, Identity=67%"; Hit description=60S ribosomal protein L10, mitochondrial, putative
  Pfam annotation: Domain name=L15; Domain location=158-191; Score =19.3; E_value=0.014; Accession=PF00256.15; Description=Ribosomal protein L15
  Pfam annotation: Domain name=Ribosomal_L15; Domain location=44-143; Score=132.9; E_value=1e-36; Accession=PF01305.9; Description =Ribosomal protein L15 amino terminal region
  Pfam module annotation: Pfam domain module=L15::Ribosomal_L15; Domain location=158-191::44-143
  Subcellular localization annotation: CTP_CleavageSite=22; ConfidenceScore=5.24e-01
YPLCALPPPPRVASASSSYATQAAAAAAASAPAPRPLRTVGSLLRLNDLRDNPGARKQKTRKGRGIGSGKGKTAGRGHKGQKARGTARFGFEGGQTPLRRRLPRRGFKNRFSLTFQPCGLGKIAKLINAGKIDSSELITMKTLKETGAIGKQIKDGIRLMGRGAEEIKWPIHLEVSRTTARAKAAVEAAGGTVRLVYYNKLGFRALLKPEWFEKKGRLLPKAARPPPKQQDKVDSIGRLPAPTKPLPFTPEELEFAAKRDAARVTVTA

SEQ ID NO: 90600 - protein, 85 aa, Setaria italica
  Transcript Sequence Number=SeqID_24626
  Gene Ontology: Mol. function=transferase activity, transferring glycosyl groups; Cellular component=membrane; Biological process =cell wall biogenesis
  Homolog annotation: Hit_ID=B9HI99; Match level="QueryCoverage=83%, HitCoverage=10%, E-value=7e-09, Identity=43%"; Hit description =Glycosyltransferase family-37
VLLVHEPPEMQGLFCEPFPGTSWVLPPDFPYTDSFSADTKESYVNMLENNIVRYNGGGDARALPPYVYFHLEQISLRLQNHTFCE

SEQ ID NO: 90601 - protein, 318 aa, Setaria italica
  misc_feature (303)..(303): Xaa can be any naturally occurring amino acid
  Transcript Sequence Number=SeqID_24627
  Gene Ontology: Mol. function=binding; Biological process=inositol lipid-mediated signaling
  Homolog annotation: Hit_ID=B9S6P3; Match level="QueryCoverage=75%, HitCoverage=6%, E-value=2e-97, Identity=75%"; Hit description =Inositol or phosphatidylinositol kinase, putative
MIISSIAALGLYSSSGCPEDPGVSILGIDAPPGDITQRGCKPGSTFTLLLKSSAKIIAMFFKSLTCRTTEIVNVAKEGLRQVVQQQRMPKDLLQSSLRPILVNLANTKSLTMPLLQGLARLLELLSNWFNVTLGAKLLDHLKKWLEPEKLAQAPKSWKTGDEPKIAAAMIELFHLLPPAASKFLDELVTLVIDVEKALPEDQFYSEINSPYRAPLAKFLNRYAADAVDYFLARLSHPKYFRRFMYIICSDTGELRDELARSPQKILASAFSQFYPQTEAAATQLSSVKDEALAGAISDSFTGXQQSSSNMVSSSDSYL

SEQ ID NO: 90602 - protein, 522 aa, Setaria italica
  misc_feature (41)..(41): Xaa can be any naturally occurring amino acid
  Transcript Sequence Number=SeqID_24628
  Gene Ontology: Mol. function=binding; Cellular component=NuA4 histone acetyltransferase complex; Biological process=regulation of transcription, DNA-dependent
  Homolog annotation: Hit_ID=B9S6P3; Match level="QueryCoverage=93%, HitCoverage=12%, E-value=0.0, Identity=77%"; Hit description =Inositol or phosphatidylinositol kinase, putative
  Subcellular localization annotation: CTP_CleavageSite=27; ConfidenceScore=5.28e-01
AATQLSSVKDEALAGAISDSFTGQQSSSNMVSSSDSYFNGXLELVSALVKLMPEWLRNNRVVFDTLLLAWKSPARLARLQNEQDLSLPQVMESKRLIKCFLNYLRHDRAEVGALFDMLSIFLYRSRIDYSFLKEFYVIEVAEGYTPSLKKTILNHFLNIFQSKQYGQDHLVVTMQILILPMLAHSFQNGQSWEVVDPSIIKTIVDKLLDPPEEVSAEYDEPLRIELLQLATLLLKYLQNDLVHHRKELIKFGWNHLKREDNSSKQWAFVNVCHFLEAYQAPEKIILQVFIALLRTCQPENKLLVKQALDILMPALPRRLPPGDSRMPIWIRYTKKVLVEEGHSIPNMIHIFQLIVRHADLFYSCRAHFVPQMVNSLSRLGLPYNTTAENRRLAIELAGLVVAWERQRQSEMKVVQESESQNQIGDMLNPSVVGGDPKRSSDAPSFADDLSKRVKVEPGLQPLCVMSPGGASIPNIETPGSSGQPDEEYKPNAAMEEMIITFLIRVSLVIEPKDKESSSMYKQ

SEQ ID NO: 90603 - protein, 55 aa, Setaria italica
  Transcript Sequence Number=SeqID_24629
RLSEKDPEFYKYLEENDKGLLEFDDDDEIKETGISDDEEPVSKDEPKQSAKPFPL

SEQ ID NO: 90604 - protein, 153 aa, Setaria italica
  Transcript Sequence Number=SeqID_24630
  Gene Ontology: Mol. function=transferase activity, transferring groups other than amino-acyl groups
  Homolog annotation: Hit_ID=Q9FWI8; Match level="QueryCoverage=100%, HitCoverage=34%, E-value=6e-42, Identity=54%"; Hit description =Putative hsr201 hypersensitivity-related protein
EGVAFVEADADVRLEEFGEPLLPPYPCVEELLCDAGDTRTIIGRPLLLMQLTRLKCGGFVAGFHMCHSIADGFGMIQLMIAIAEMACGAEAPSILPVWKREILSTAHSPTPSTHPNPSYEPLLNSLDYASESDDVMLSTPLDEMVVDYFVFGP

SEQ ID NO: 90605 - protein, 48 aa, Setaria italica
  Transcript Sequence Number=SeqID_24631
WTDISIHIDGEVSRKWRFWLSELDEVHLVCIVPYYHPLHIHRNLVLLF

SEQ ID NO: 90606 - protein, 60 aa, Setaria italica
  Transcript Sequence Number=SeqID_24632
  Gene Ontology: Mol. function=holo-[acyl-carrier-protein] synthase activity; Biological process=macromolecule biosynthetic process
  Homolog annotation: Hit_ID=Q2RAV1; Match level="QueryCoverage=95%, HitCoverage=20%, E-value=4e-19, Identity=80%"; Hit description=4' -phosphopantetheinyl transferase superfamily protein
LHRFVKEDDRKRALVSRLLQYSLVHHVLRIPFHQINICRTPEGKPYLQKNCSNFPNFNFN

SEQ ID NO: 90607 - protein, 44 aa, Setaria italica
  Transcript Sequence Number=SeqID_24633
MASNRPPPCPCRFVKEDDRKRALVSRLLQYSLVRRVLRIPFHQI

SEQ ID NO: 90608 - protein, 273 aa, Setaria italica
  Transcript Sequence Number=SeqID_24634
  Gene Ontology: Mol. function=holo-[acyl-carrier-protein] synthase activity; Cellular component=cytoplasm; Biological process =macromolecule biosynthetic process
  Homolog annotation: Hit_ID=Q2RAV1; Match level="QueryCoverage=84%, HitCoverage=88%, E-value=2e-95, Identity=70%"; Hit description=4' -phosphopantetheinyl transferase superfamily protein
  Pfam annotation: Domain name=ACPS; Domain location=114-184; Score =29.7; E_value=3.2e-06; Accession=PF01648.12; Description=4' -phosphopantetheinyl transferase superfamily
EEAGVRRWLVDITRWRPSPAQFDAAASLLPSHERPAIARFVKEDDRKRALVSRLLQYSLVRRVLRIPFHQINICRTPEGKPYLHKNCLTFPNFNFNTSHQGDYVGIASEPLCLVGLDIVSISKPQGETTTEFIINFSSYLTDHEWNCILRAGTHSEVLTEFYRYWCLKEAFVKAIGAGVGFGLHRLEFHHEHWTNISIHIDGQVSRKWRFWLFELDEVHLASIAKGHPEDAVSNYKKTLSNATVVQEQLHSTLESPEGAFTLWTVEQLTQSLE

SEQ ID NO: 90609 - protein, 105 aa, Setaria italica
  misc_feature (68)..(68): Xaa can be any naturally occurring amino acid
  Transcript Sequence Number=SeqID_24635
  Gene Ontology: Mol. function=hydrolase activity; Biological process =lipid catabolic process
  Homolog annotation: Hit_ID=Q9FZ09; Match level="QueryCoverage=96%, HitCoverage=23%, E-value=5e-21, Identity=51%"; Hit description =Patatin-like protein 1
MELDGSNARLANYFDVIAGTSTGGLITAMLATPSLSNAKQPCCEAKDIVPFYLKHCPHIFPCRTGFFXWFCKILHIIKMIFGPKYNGGTCTNINDLLGDTRVKEH

SEQ ID NO: 90610 - protein, 65 aa, Setaria italica
  Transcript Sequence Number=SeqID_24636
SKAELEFSNHDTVSTASCQVCFDMEDCKREMENILQLTEVTINNFMWSYLHPLQSSRPNNKTNTK

SEQ ID NO: 90611 - protein, 424 aa, Setaria italica
  misc_feature (80)..(80): Xaa can be any naturally occurring amino acid
  Transcript Sequence Number=SeqID_24637
  Gene Ontology: Mol. function=translation initiation factor activity
  Homolog annotation: Hit_ID=B6TZD9; Match level="QueryCoverage=90%, HitCoverage=71%, E-value=1e-143, Identity=71%"; Hit description =Eukaryotic translation initiation factor 4B
  Pfam annotation: Domain name=eIF-4B; Domain location=1-424; Score =576.6; E_value=2.8e-170; Accession=PF06273.3; Description=Plant specific eukaryotic initiation factor
ERSAEELDRSRGFRSYGGGGGFGGGERRGGFDDEGRRGPGRSSDLDMPSRADEVDDWGAGKKFTPAAADSGRRDRFGGPXPLGRADDIDDWSRDKKPLPSRYPSLGSGGGGGFRSSPGFRDSPGFRDSAASSDSDRWVRGATPLPHNGEGMGERPRIVLNAPKRDPSATTTPPAEVARNRPSPFGAARPREDVLAEKGVDWRKIESEIEQKTSRPTSSHSSRPNSAHSSRPGSPGSQVSAVGSEGAPRARPKVNPFGDAKPRELVLQEKGKDWRKIDLELEHRAVNRPESDEERNLKEEINLMKVDLKEIEGKISDDSDQASVDAKNLAEKITQLESQLEQLTRELDDKIRFGQRPRSGAGRVTALPPSPAEEPQATVVDRPHSRGGMEPHARPEERWGFQGSRERGSFDGSRSSDRPMTRQRW

SEQ ID NO: 90612 - protein, 80 aa, Setaria italica
  Transcript Sequence Number=SeqID_24638
  Gene Ontology: Mol. function=protein serine/threonine kinase activity; Biological process=protein amino acid phosphorylation
  Homolog annotation: Hit_ID=B8K1X4; Match level="QueryCoverage=91%, HitCoverage=9%, E-value=8e-28, Identity=84%"; Hit description =Putative ethylene constitutive triple response protein
ADDPEAVSYRLWVNGCLSWGDKIAHGFYNIMGIDPHLWAMCNAAEEGRRLPSLAALRAVDATESSPEVVLVDKGADSVLL

SEQ ID NO: 90613 - protein, 83 aa, Setaria italica
  Transcript Sequence Number=SeqID_24639
  Gene Ontology: Mol. function=hydroxyethylthiazole kinase activity; Biological process=thiamin biosynthetic process
  Homolog annotation: Hit_ID=Q5ZDB4; Match level="QueryCoverage=91%, HitCoverage=35%, E-value=9e-24, Identity=73%"; Hit description =Hydroxyethylthiazole kinase-like protein
MDDAAKAERDPAWWGRRAWSLLSAVRARAPLVQCITNLVSMDIAANALLAAGASPAMVHSLREVPDFTPRCDAVYVNVGTLSE

SEQ ID NO: 90614 - protein, 76 aa, Setaria italica
  Transcript Sequence Number=SeqID_24640
  Homolog annotation: Hit_ID=Q10KD2; Match level="QueryCoverage=84%, HitCoverage=12%, E-value=4e-10, Identity=57%"; Hit description=IQ calmodulin-binding motif family protein, expressed
MVWLGCRERTVVALIALGAAPGALTDPSPDFPERTPADLASANGQKGISGFLAESSLTSHLTRTLKYLKERLNNRN

SEQ ID NO: 90615 - protein, 145 aa, Setaria italica
  Transcript Sequence Number=SeqID_24641
MLEEDFMHIVLVHYLETKGGKSSRTRVNNNMIQEAAVDSPSSQLPSQTIEGESSFSGQASEYEDAESDIYSGGAGYHSFTRMQQHENGTGPVIDSSVFNSYTPTSSIGNYQGLHAMTQNTSFYPGNQHNSPWFLMDQAPWLQRTG

SEQ ID NO: 90616 - protein, 737 aa, Setaria italica
  misc_feature (120)..(120): Xaa can be any naturally occurring amino acid
  Transcript Sequence Number=SeqID_24642
  Gene Ontology: Mol. function=calcium ion binding; Cellular component =nucleus; Biological process=regulation of transcription, DNA -dependent
  Homolog annotation: Hit_ID=Q7XI44; Match level="QueryCoverage=100%, HitCoverage=70%, E-value=1e-155, Identity=43%"; Hit description =Putative anther ethylene-upregulated protein ER1
  Pfam annotation: Domain name=Ank; Domain location=585-617; Score=2.2; E_value=17; Accession=PF00023.22; Description=Ankyrin repeat
  Pfam annotation: Domain name=Ank; Domain location=618-650; Score =35.4; E_value=2.2e-07; Accession=PF00023.22; Description=Ankyrin repeat
  Pfam annotation: Domain name=CG-1; Domain location=1-61; Score=58.5; E_value=2.6e-14; Accession=PF03859.8; Description=CG-1 domain
  Pfam module annotation: Pfam domain module=Ank::Ank::CG-1; Domain location=585-617::618-650::1-61
RKKNDQKTVKEAHERLKSGSIDVLHCYYAHGEDNINFQRRTYWMLEEDFMHIVLVHYLETKGGKSSRTRVNNNMIQEAAVDSPSSQLPSQTIEGESSFSGQASEYEDAESEYLKQNSVQXDIYSGGAGYHSFTRMQQHENGTGPVIDSSVFNSYTPTSSIGNYQGLHAMTQNTSFYPGNQHNSPLVLNGSSTMVAANGRANQTDVPSWNPVIELDNGPVQMPPLQFSVPPDQGTSTEGLGIDYLTFDEVYSDGLSLKDIGAAGADGESFWQFPSATGDLSTAENSFPQQNDGSLEAAIGGYPFLKTQSSNLSDILKDSFKKTDSFTRWMSKELPEVEDSQIQSSSGVYWSTEEADNIIEASSREPLDQFTVSPMLSQDQLFSIVEFAPSWTYVGSKTKILVTGNILNNSQVTERCKWSCMFGEVEVPAKILADGTLICYSPQHKPGRVPFYITCSNRLACSEVREFEFRPTVTQYMDAPSPHGATNKVYFQIRLDKLLSLGPDEYQATVSNPSLEMIELSKKIGSLMMSNDEWSNLLKLAVDNNEHSTDDQQDQFAENLIKDKLHVWLLNKVGVGGKGPSVLDDEGQGVLHLAAALGYDWAIRPTLAAGVNINFRDVHGWTALHWAAFCGRERTVVALIALGAAPGALTDPSPDFPERTPADLASANGQKGISGFLAESSLTSHLQALNLKEANMAEISGLPGIGDVNERNSLQPQAEIHWSCSNAAQAAARIYLSF

SEQ ID NO: 90617 - protein, 347 aa, Setaria italica
  misc_feature (13)..(13): Xaa can be any naturally occurring amino acid
  Transcript Sequence Number=SeqID_24643
  Gene Ontology: Mol. function=calcium ion binding; Cellular component =nucleus; Biological process=regulation of transcription, DNA -dependent
  Homolog annotation: Hit_ID=Q7XI44; Match level="QueryCoverage=95%, HitCoverage=34%, E-value=6e-91, Identity=55%"; Hit description =Putative anther ethylene-upregulated protein ER1
  Pfam annotation: Domain name=Ank; Domain location=3-35; Score=17.2; E_ value=0.07; Accession=PF00023.22; Description=Ankyrin repeat
  Pfam annotation: Domain name=IQ; Domain location=166-186; Score=24.7; E_value=0.00039; Accession=PF00612.19; Description=IQ calmodulin -binding motif
  Pfam annotation: Domain name=IQ; Domain location=189-209; Score=28.9; E_value=2.1e-05; Accession=PF00612.19; Description=IQ calmodulin -binding motif
  Pfam module annotation: Pfam domain module=Ank::IQ::IQ; Domain location=3-35::166-186::189-209
VGSISIALHWAAXCGRERTVVALIALGAAPGALTDPSPDFPERTPADLASANGQKGISGFLAESSLTSHLQALNLKEANMAEISGLPGIGDVNERNSLQPPSGDSLGPVRNAAQAAARIYQVFRVQSFQRKQAAQYEDDKGGMSDERALSLLSVKPSKPGQLDPLHSAATRIQNKFRGWKGRKEFLLIRQRIVKIQAHVRGHQVRKHYRKIVWSVGIVEKIILRWRRRGAGLRGFRSTEGSTEGSSGGTSSSLIQDKPSRDDYDFLQEGRKQTEERLQKALARVKSMAQYPDARDQYHRIYTVVSKMQESQAMQEKMVEESAEMDDGYLMNELQELLNDDTSIHGYF

SEQ ID NO: 90618 - protein, 117 aa, Setaria italica
  misc_feature (97)..(97): Xaa can be any naturally occurring amino acid
  Transcript Sequence Number=SeqID_24644
  Gene Ontology: Mol. function=chitinase activity; Cellular component =extracellular region; Biological process=carbohydrate metabolic process
  Homolog annotation: Hit_ID=B6TAN9; Match level="QueryCoverage=100%, HitCoverage=27%, E-value=7e-52, Identity=82%"; Hit description =Hydrolase, hydrolyzing O-glycosyl compounds
MQEHTRVSENRSQRHFPNPVLAYVTPWNSKGYDMAKLFSAKLTHISPVWYDLKSYRNMLVLEGEHNFDATWVSELQSNGSLVVPRVVLEAFPAVVLXKRKQKDKSYDLIVSECRDKG

SEQ ID NO: 90619 - protein, 342 aa, Setaria italica
  Transcript Sequence Number=SeqID_24645
  Gene Ontology: Mol. function=chitinase activity; Cellular component =extracellular region; Biological process=carbohydrate metabolic process
  Homolog annotation: Hit_ID=B6TAN9; Match level="QueryCoverage=100%, HitCoverage=80%, E-value=1e-164, Identity=83%"; Hit description =Hydrolase, hydrolyzing O-glycosyl compounds
  Pfam annotation: Domain name=Glyco_hydro_18; Domain location=18-334; Score=-26.7; E_value=0.00021; Accession=PF00704.20; Description =Glycosyl hydrolases family 18
MQEHTRVSENRSQRHFPNPVLAYVTPWNSKGYDMAKLFSAKLTHISPVWYDLKSYRNMLVLEGEHNFDATWVSELQSNGSLVVPRVVLEAFPAVVLLEKKQKTKAIDLIVSECRDKGYNGIVLESWSRWAAYGVLDDPHLRSMALQFVKELGEALHSISSKSSSHHLELIYVIPAPRMQELNNQDFGPEDLLQLADSVDGFSLMTYDFSAPQNPGPSAPLNWVQHSLTTLLSAKGSSRDHSRMIFLGINFYGNDFLLSRGSGGGAITGRDFVLLLEKYKPSLQWDEKSVEHFFIYSDEGVRHAVFYPTLMSLSVRLDEARNWGTGLSIWEIGQGLDYFFDVL

SEQ ID NO: 90620 - protein, 278 aa, Setaria italica
  Transcript Sequence Number=SeqID_24646
  Homolog annotation: Hit_ID=Q7F2I6; Match level="QueryCoverage=93%, HitCoverage=16%, E-value=3e-74, Identity=57%"; Hit description =P0432B10.2 protein
SPVIICTTILLGALLSYGEINLPEASEDHKGTPEVLAFKVGNSSSDIHFEANQRLSVPEFREDTSNFKERGIQTVSFGERASEHIDLDDDVPLLRKADEEDERGDLRNIPRTLTPFPSMVNLRQESVIREDLIFNKKREPEGSFFIQDRADGQTSLFDVAHLSVLNDKDTSFGLFSSSENAHKHVDMEENLNQDRVTAAASKERDVSEKNQTEELAGTSKSAFSISIHQWEKTDRLNVDTSNAVEDNLLDSSLGSPWARVSSQDGSSGFDSDGAESSS

SEQ ID NO: 90621 - protein, 166 aa, Setaria italica
  Transcript Sequence Number=SeqID_24647
  Gene Ontology: Mol. function=serine-type endopeptidase activity; Biological process=proteolysis
  Homolog annotation: Hit_ID=Q2L3T0; Match level="QueryCoverage=96%, HitCoverage=22%, E-value=3e-79, Identity=89%"; Hit description =Subtilisin-like protease
  Subcellular localization annotation: CTP_CleavageSite=62; ConfidenceScore=5.23e-01
APFMAAFSSQGPNTVTPQILKPDITAPGVSILAAFTGLAGPTGLPFDERRVLFNAESGTSMSCPHVAGVAGLLKALHPDWSPAAIKSAIMTTARVQDNMRKPMSNSSFLRATPFGYGAGHVQPNRAADPGLVYDADATDYLGFLCALGYNSSAIAAFTAGDGDGHT

SEQ ID NO: 90622 - protein, 72 aa, Setaria italica
  Transcript Sequence Number=SeqID_24648
SGSDPEKPPSTREAGRPCQLPKAVSQGNGGIILYAWFKPIYDCTANQGSSKAHHPEVNTSNKVSSSLLNSTV

SEQ ID NO: 90623 - protein, 77 aa, Setaria italica
  Transcript Sequence Number=SeqID_24649
MKDSKISSSQERETIYPVSNFQPKSMASRSSTGKPWRYHHLSTLLSSAVLEWILMLLLLLEGLLSYLVTAFARLCKL

SEQ ID NO: 90624 - protein, 122 aa, Setaria italica
  Transcript Sequence Number=SeqID_24650
  Gene Ontology: Mol. function=protein serine/threonine kinase activity; Biological process=protein amino acid phosphorylation
  Homolog annotation: Hit_ID=Q7F9G0; Match level="QueryCoverage=97%, HitCoverage=22%, E-value=1e-56, Identity=87%"; Hit description =OSJNBa0024J22.11 protein
  Pfam annotation: Domain name=Pkinase; Domain location=2-122; Score= -100.8; E_value=0.017; Accession=PF00069.17; Description=Protein kinase domain
  Pfam annotation: Domain name=Pkinase_Tyr; Domain location=1-122; Score=-143.8; E_value=0.00036; Accession=PF07714.9; Description =Protein tyrosine kinase
  Pfam module annotation: Pfam domain module=Pkinase::Pkinase_Tyr; Domain location=2-122::1-122
SVIIQQSEIKQFINEVAILSQINHRNIVKLFGCCLETEVPLLVYDFIPNGSLFQALHSASDSNFTLSWDDCMRIACEAAGALCYLHSAAAVSVFHRDVKSSNILLDANYTAKVSDFGASRLV

SEQ ID NO: 90625 - protein, 69 aa, Setaria italica
  Transcript Sequence Number=SeqID_24651
  Gene Ontology: Mol. function=P-P-bond-hydrolysis-driven protein transmembrane transporter activity; Cellular component=endoplasmic reticulum membrane; Biological process=intracellular protein transmembrane transport
  Homolog annotation: Hit_ID=B6SPB6; Match level="QueryCoverage=100%, HitCoverage=100%, E-value=1e-22, Identity=79%"; Hit description =Protein transport protein SEC61 gamma subunit
  Pfam annotation: Domain name=SecE; Domain location=10-66; Score=89.9; E_value=8.8e-24; Accession=PF00584.12; Description=SecESec61-gamma subunits of protein translocation complex
MDAVDSVVDPLREFAKDSIRLVKRCHKPDRKEFTKVAARTAIGFVVMGFVGFFVKLIFIPINNIIVGSG

SEQ ID NO: 90626 - protein, 69 aa, Setaria italica; identical to SEQ ID NO: 90625
  Transcript Sequence Number=SeqID_24652
  Gene Ontology: Mol. function=P-P-bond-hydrolysis-driven protein transmembrane transporter activity; Cellular component=endoplasmic reticulum membrane; Biological process=intracellular protein transmembrane transport
  Homolog annotation: Hit_ID=B6SPB6; Match level="QueryCoverage=100%, HitCoverage=100%, E-value=1e-22, Identity=79%"; Hit description =Protein transport protein SEC61 gamma subunit
  Pfam annotation: Domain name=SecE; Domain location=10-66; Score=89.9; E_value=8.8e-24; Accession=PF00584.12; Description=SecESec61-gamma subunits of protein translocation complex

SEQ ID NO: 90627 - protein, 117 aa, Setaria italica
  Transcript Sequence Number=SeqID_24653
  Gene Ontology: Mol. function=transporter activity; Cellular component= integral to membrane; Biological process=transport
  Homolog annotation: Hit_ID=Q84LK4; Match level="QueryCoverage=98%, HitCoverage=21%, E-value=2e-58, Identity=94%"; Hit description =Putative high affinity nitrate transporter
  Subcellular localization annotation: CTP_CleavageSite=86; ConfidenceScore=5.14e-01
TEDATAASKFDLPVDSEHKAKTIRLFSFANPHMRTFHLSWISFFTCFVSTFAAAPLVPIIRDNLNLTKADIGNAGVASVSGSIFSRLAMGAVCDLLGPRYGCAFLIMLAAPTVFCMA

SEQ ID NO: 90628 - protein, 54 aa, Setaria italica
  Transcript Sequence Number=SeqID_24654
  Subcellular localization annotation: CTP_CleavageSite=31; ConfidenceScore=5.15e-01
GDSSLPCCPPRRGGQRPTAPPARPSGTADCPARLPPSRALALLFSPTPPSRPNP

SEQ ID NO: 90629 - protein, 120 aa, Setaria italica
  Transcript Sequence Number=SeqID_24655
  Gene Ontology: Mol. function=inositol-1,3,4-trisphosphate 5/6-kinase activity; Cellular component=intracellular; Biological process =inositol trisphosphate metabolic process
  Homolog annotation: Hit_ID=Q84Y01; Match level="QueryCoverage=52%, HitCoverage=17%, E-value=7e-14, Identity=57%"; Hit description =Inositol-tetrakisphosphate 1-kinase 1
RRRRGPLPPNQSPLPPAPPPAGDAEMPPQDFVNRVARELRRALGLHLINFDLIWARDADGNAKYFILDINYCPGYSKMPGFEPVLLEFFLEMLRGRPAHEQPCPGAGSGLGAEAHKTEVE

SEQ ID NO: 90630 - protein, 114 aa, Setaria italica
  Transcript Sequence Number=SeqID_24656
  Homolog annotation: Hit_ID=B6SYG4; Match level="QueryCoverage=100%, HitCoverage=67%, E-value=4e-58, Identity=97%"; Hit description=Acid phosphatase/vanadium-dependent haloperoxidase related
  Pfam annotation: Domain name=DUF212; Domain location=1-107; Score =200.1; E_value=6.1e-57; Accession=PF02681.6; Description=Divergent PAP2 family
  Subcellular localization annotation: CTP_CleavageSite=47; ConfidenceScore=5.11e-01
WDPKQLIGSGGMPSSHSATVTALAVAIGFQDGFNCSLFATATIFASVVMYDASGIRLHAGKQAEVLNQIVCELPSEHPLSEARPLRELLGHTPTQVVAGALLGCTIATAGQLFV

SEQ ID NO: 90631 - protein, 414 aa, Setaria italica
  Transcript Sequence Number=SeqID_24657
  Gene Ontology: Mol. function=metal ion binding; Cellular component =plasma membrane
  Homolog annotation: Hit_ID=B9RS95; Match level="QueryCoverage=99%, HitCoverage=95%, E-value=2e-96, Identity=45%"; Hit description=Ring finger protein, putative
  Pfam annotation: Domain name=zf-C3HC4; Domain location=338-378; Score= 34.6; E_value=3.9e-07; Accession=PF00097.17; Description=Zinc finger, C3HC4 type (RING finger)
MEQACCDDVHEHVINVAHGETASTSTSHQDMYSDSDEPHQEDRPSISTRTPSSQSSPSTSPTYSSRNLSFPRRDSIYGHGRSPWNSGLWISFEIVMYIAQVVAAIVILIFSRHEHPHAPLFAWIVGYTVGCIACVPLIYWRYVHRNRPLDQEPQQPPTTYPTLTPSQSSEGRTHRTSGIILHLGCTTITCPRLSVLAYHFKTAVDCFFAVWFVVGNVWIFGGRSISSDAQDAPNMYRLCLAFLALSCVGYAIPFIMCAAICCCFPCLISVLRLQEDLGQSRGATQELINALPTYKFKPKRNKNWGMDHASSSENLDEGGILGPGTKKERVVSAEDAVCCICLTKYGDDDELRELPCTHFFHVQCVDKWLKINAVCPLCKTEIGGVVRSFFGLPFGRRRVDRMAGRGVASSRFNV

SEQ ID NO: 90632 - protein, 96 aa, Setaria italica
  Transcript Sequence Number=SeqID_24658
MEDDSSLFMQWAMDTLQHERPMAAVVNDDCGSEATLFPSLRALREASHAAEMVQELIAAAPASSWSSGSGDTTEGSSGGNNSAGGAAMDHDAWPPT

SEQ ID NO: 90633 - protein, 77 aa, Setaria italica
  Transcript Sequence Number=SeqID_24659
  Gene Ontology: Mol. function=ATP binding; Biological process=apoptosis
  Homolog annotation: Hit_ID=Q2R8J8; Match level="QueryCoverage=100%, HitCoverage=7%, E-value=2e-14, Identity=57%"; Hit description=NB-ARC domain containing protein, expressed
DPRNICDTDLVGIDGLRADLLEQLSEAKGQLKVIAIVGFCGLGKTALAAQVYNREIGDRRFEKHAWVCAAGKQPTEV

SEQ ID NO: 90634 - protein, 91 aa, Setaria italica
  Transcript Sequence Number=SeqID_24660
IPKHRKEIIGNSQKDLRNPKKCLNLFPVKQIRQLLLIFLENKKLHRRLQRRRPRSPRVLTRVSQYPREQFIDASSPELFMFNLRACLTLHH

SEQ ID NO: 90635 - protein, 146 aa, Setaria italica
  Transcript Sequence Number=SeqID_24661
  Gene Ontology: Mol. function=cysteine-type endopeptidase activity
  Homolog annotation: Hit_ID=B6SZV3; Match level="QueryCoverage=81%, HitCoverage=32%, E-value=1e-19, Identity=55%"; Hit description=Thiol protease SEN102
  Pfam annotation: Domain name=Inhibitor_I29; Domain location=49-109; Score=98.2; E_value=2.9e-26; Accession=PF08246.4; Description =Cathepsin propeptide inhibitor domain (
  Subcellular localization annotation: CTP_CleavageSite=3; ConfidenceScore=5.05e-01
MASTSTNRGSPPRVLLLLLLAAVFLHGCSSATAAHGRAGGGSPMMVERFQRWKAEYNRSYATAAEERRRFRVFARNLAYIEATNAEAEAAGLTYELGETAFTDLTNEEFTAMYTAAAPLPPADDEDVAAVITTRAGPVDAGGVRGA

SEQ ID NO: 90636 - protein, 86 aa, Setaria italica
  Transcript Sequence Number=SeqID_24662
  Gene Ontology: Mol. function=mismatched DNA binding; Biological process=mismatch repair
  Homolog annotation: Hit_ID=Q6DTM5; Match level="QueryCoverage=100%, HitCoverage=10%, E-value=5e-35, Identity=76%"; Hit description=MSH4
SEAIHNLANKYREEYNMPTLKIPYNIRQGFYFIIPQKDITDRLPNKFIQVVRHGKNVHCSSLELASLNVRNKSAAAECFFRTELCL

SEQ ID NO: 90637 - protein, 81 aa, Setaria italica
  Transcript Sequence Number=SeqID_24663
FLCVISGAALVATNSLLLLLISEGNALLSLNLLPVQGLVGVLAYHATPTEDSMRDEAFEAGIKTGRKVALFATATAFAVQT

SEQ ID NO: 90638 - protein, 72 aa, Setaria italica
  Transcript Sequence Number=SeqID_24664
  Gene Ontology: Cellular component=membrane
  Homolog annotation: Hit_ID=B6U1N6; Match level="QueryCoverage=98%, HitCoverage=18%, E-value=5e-13, Identity=46%"; Hit description =Nodulin-like protein
MGNGKVYATVVLIRLIYAGMHILTKASFNEGMSTTVFVFYRHAVAAIFLLPFAFLEIRKRPAPPLNFKLTAK

SEQ ID NO: 90639 - protein, 82 aa, Setaria italica
  Transcript Sequence Number=SeqID_24665
  Gene Ontology: Mol. function=transcription regulator activity; Cellular component=nucleus
  Subcellular localization annotation: CTP_CleavageSite=21; ConfidenceScore=5.17e-01
SPSSYFSSSVVSTATTTSATPAAASSPTCSSYLDLAPAYHQMLSFAGQGQYHGGDGIFGLQYYGGDQAIPMAVPVPQKSSPN

SEQ ID NO: 90640 - protein, 440 aa, Setaria italica
  Transcript Sequence Number=SeqID_24666
  Gene Ontology: Mol. function=nucleotide binding; Biological process =defense response
  Homolog annotation: Hit_ID=Q84NY1; Match level="QueryCoverage=100%, HitCoverage=45%, E-value=1e-176, Identity=70%"; Hit description =Putative disease resistance complex protein
  Pfam annotation: Domain name=NB-ARC; Domain location=101-387; Score =227.0; E_value=4.9e-65; Accession=PF00931.14; Description=NB-ARC domain
YKFELLRRRMDDPDSLHEDRSTRKRKRKGDKKEPETNPVMIPVPDELAVRVKRILERFKEITKAWNDLHLDEADAPFREEEEDFVPRLTTPHVDEPTVIGRDDDKENIVKLLLSLNGACGENNASVLPIIGMGGVGKTTLAQIVYNDQRITKQFDLMGWVHVSENFDLKSIMSKIIMSFTRKPCQITELDQLEYMLMEQVVGRKFLLVLDDVWSERKDLWDALLSVMSTAQLGAILVTTRNVNVSSIIQTMPPYNVGCLPFDESWQLFKQMAFCDLDQNIEKPFEEIGRKIVQKCGGLPLAVRAIGSALRFEENEETWCDILDSEYWDLPTREDTVLPALKLSYVRMPIHLKRCFVFFTLFPKGHIFVKENVIYLWISLGILKQTRHRHLENIGNRYFNDLLQRTMVQRVLLDGGHNCFTIHDLFLAFVKFVSGEDYFEI

SEQ ID NO: 90641 - protein, 114 aa, Setaria italica
  Transcript Sequence Number=SeqID_24667
  Gene Ontology: Mol. function=histone-lysine N-methyltransferase activity; Cellular component=nucleus; Biological process=chromatin modification
  Homolog annotation: Hit_ID=Q6GV25; Match level="QueryCoverage=100%, HitCoverage=15%, E-value=1e-24, Identity=58%"; Hit description=SET domain protein
  Subcellular localization annotation: CTP_CleavageSite=50; ConfidenceScore=5.14e-01
MNRPSNFMPTPDQDVLDIKPLRTLAPMFPAPLGVNTSNQSTTPPLIFVTPAEQFQGGFGAWNKSSAQSFFAFGGKDACGGKAHTFGDQNVDGGKAATFCDQDTVGSENAAVGDQ

SEQ ID NO: 90642 - protein, 77 aa, Setaria italica
  Transcript Sequence Number=SeqID_24668
PIPSCALPTPSLRVSGVRLYKEEEEEKRGVGAGEEFEGACKRRHGGGSDLNFYLLLAHSSLSLPPRSLACVLPSLST

SEQ ID NO: 90643 - protein, 81 aa, Setaria italica
  Transcript Sequence Number=SeqID_24669
  Pfam annotation: Domain name=Myb_DNA-binding; Domain location=1-47; Score=20.5; E_value=0.0069; Accession=PF00249.23; Description=Myb -like DNA-binding domain
MEWSDSENERFERALATYGIDAWERVAAAVGGGRTADDARRHFDHLQEDVGDIESRGRAHDARDARNGNRNNRGRANRPQT

SEQ ID NO: 90644 - protein, 86 aa, Setaria italica
  misc_feature (14)..(14): Xaa can be any naturally occurring amino acid
  Transcript Sequence Number=SeqID_24670
DSSKSALCRCMLWXHGGGGDSSDASSGGEDDDEAGGKYNSGASGGDGELVAIDRGFRVELDELLRSSAYVLGKGGKGIVYKVVVAN

SEQ ID NO: 90645 - protein, 81 aa, Setaria italica
  Transcript Sequence Number=SeqID_24671
  Subcellular localization annotation: CTP_CleavageSite=57; ConfidenceScore=5.10e-01
KGSILGLQVPVIMPLFIDNNSSSWNSAYPSFFCAILHPVFTPFLLYVQCKESTILVSAQPVGHQSVLLARFAPAPSRSLPP

SEQ ID NO: 90646 - protein, 48 aa, Setaria italica
  Transcript Sequence Number=SeqID_24672
MSMPWAMAVSVVDMVWELLAEWVSTCLSAATAVARAARTGEIGHLHIA

SEQ ID NO: 90647 - protein, 106 aa, Setaria italica
  misc_feature (56)..(56): Xaa can be any naturally occurring amino acid
  Transcript Sequence Number=SeqID_24673
  Subcellular localization annotation: CTP_CleavageSite=100; ConfidenceScore=5.54e-01
VDFSSAAAAAFFGGLAWFATAAAALFFGGAASSSAVAAWRPPSPPPSSPARAQLGXPASPPPASPARAAWRPPSPPPSSPARAAWRPPSPPASGGSSLLRAAAGTL

SEQ ID NO: 90648 - protein, 79 aa, Setaria italica
  Transcript Sequence Number=SeqID_24674
  Homolog annotation: Hit_ID=Q5BQ30; Match level="QueryCoverage=96%, HitCoverage=87%, E-value=7e-09, Identity=53%"; Hit description =Thionin-like peptide
MEGKGTTALMVIMCLVILSLNVNPATAAQCGCCESQQAKKCCSACTAVGVFDAVCEITCCGRGCGPFDPVAARMEEGQP

SEQ ID NO: 90649 - protein, 76 aa, Setaria italica
  Transcript Sequence Number=SeqID_24675
ESVKFETEVLSYESFSGFALSRTATWPPPTMCESANVGRPSSCKWACRRAFVCLLGLFLGSFVPLCGLRCRSWPGR

SEQ ID NO: 90650 - protein, 71 aa, Setaria italica
  Transcript Sequence Number=SeqID_24676
VGCISSFTGTRKQGEPINCRVTADISNSILHSRMFLMPLGRSQAKFEYKCAQVHEESFRSIVFRAASNLVS

SEQ ID NO: 90651 - protein, 165 aa, Setaria italica
  misc_feature (52)..(52): Xaa can be any naturally occurring amino acid
  Transcript Sequence Number=SeqID_24677
  Gene Ontology: Mol. function=protein serine/threonine kinase activity; Cellular component=plasma membrane; Biological process =protein amino acid phosphorylation
  Homolog annotation: Hit_ID=B6SZP3; Match level="QueryCoverage=98%, HitCoverage=36%, E-value=3e-66, Identity=77%"; Hit description =Protein kinase
  Pfam annotation: Domain name=Pkinase; Domain location=1-127; Score= -78.2; E_value=0.00078; Accession=PF00069.17; Description=Protein kinase domain
LRVSRKPGSFGCSGEAGAWGKSYSFVGTEEYVAPEMVRGEGHGFAVDWWAVXGMLVHEMAFGRTPFKGQNRKETFRNVLHKELEFPGDSRRRMPELTDLISRLLDRDPRRRLGYAGGADEVREHPFFAGVAWDMLTEVSRPPYIPPPADEDLVAGEGFDVRDHFR

SEQ ID NO: 90652 - protein, 71 aa, Setaria italica
  Transcript Sequence Number=SeqID_24678
  Subcellular localization annotation: CTP_CleavageSite=13; ConfidenceScore=5.20e-01
QPTPPPPPHHQLLCSLPPCGSPPGIPPRIPSPPQLPAPIPPQPPALCCRLPPSAPPFAFQAPPASGPAGGL

SEQ ID NO: 90653 - protein, 86 aa, Setaria italica
  Transcript Sequence Number=SeqID_24679
ACLSGFEEYVEPLKHYLRMAFKTEGDTKGSKSSDQAGKKEILLSVEPGSSVIFTTLCQNAIKQSSFRHVTSHLFFCNIYKIMYVSV

SEQ ID NO: 90654 - protein, 140 aa, Setaria italica
  Transcript Sequence Number=SeqID_24680
  Gene Ontology: Mol. function=sequence-specific DNA binding; Cellular component=intracellular; Biological process=regulation of transcription, DNA-dependent
  Homolog annotation: Hit_ID=Q65XK1; Match level="QueryCoverage=87%, HitCoverage=86%, E-value=5e-54, Identity=81%"; Hit description =Nuclear transcription factor Y subunit B-4
  Pfam annotation: Domain name=CBFD_NFYB_HMF; Domain location=22-87; Score=119.4; E_value=1.2e-32; Accession=PF00808.15; Description =Histone-like transcription factor (CBFNF-Y) and archaeal histone
SEAEGAPEAGGGGSFGGKEQDRFLPIANISRIMRRGVPDNGKIAKDAKESVQECVSEFISFITSEASDKCMKEKRKTINGDDLIWSLGTLGFEEYVEPLKHYLKLYRETEGDTKGSKSSDQAGKKEILLSVEPGSSFDGL

SEQ ID NO: 90655 - protein, 86 aa, Setaria italica
  Transcript Sequence Number=SeqID_24681
  Subcellular localization annotation: CTP_CleavageSite=53; ConfidenceScore=5.53e-01
APERSYQASNPRPAGPSVGSCRGCFIKAAAALPVSLSPRITPPLTRSNRHYPRSSTVPSVRPSIARASQTSRRRVLPLPQSSRPLL

SEQ ID NO: 90656 - protein, 69 aa, Setaria italica
  Transcript Sequence Number=SeqID_24682
RAFPYAELSHPLLSFLFPVLLDWKTVAGITAWRNSSELPPPPLTDEPEAPPCLSLSLLLPFSGQNTNQS

SEQ ID NO: 90657 - protein, 51 aa, Setaria italica
  Transcript Sequence Number=SeqID_24683
  Gene Ontology: Mol. function=metal ion binding; Cellular component =intracellular
  Homolog annotation: Hit_ID=B6U6I5; Match level="QueryCoverage=98%, HitCoverage=10%, E-value=2e-16, Identity=82%"; Hit description =Ubiquitin-protein ligase/ zinc ion binding protein
  Pfam annotation: Domain name=PHD; Domain location=16-51; Score=0.2; E_ value=0.025; Accession=PF00628.21; Description=PHD-finger
RNEGYGFSRSWVGLGACYQCHSREPEELLLSCHVCRSQWVHSYCLDPPLTP

SEQ ID NO: 90658 - protein, 110 aa, Setaria italica
  Transcript Sequence Number=SeqID_24684
  Gene Ontology: Mol. function=metal ion binding
EEEDSDEDDRKEEAIELEMLRSARRAVRMPRSHSTGHSLSAAAAAAAEEGDHERFTLRLPEHVREQVLRSLRLRHATSLINLSDMSSEGSSRGGRRLGGGGGSFGTAAAA

SEQ ID NO: 90659 - protein, 37 aa, Setaria italica
  Transcript Sequence Number=SeqID_24685
MDTSHHYPWLNFSLAHHCDLEEEERGAAAELAAIAGA

SEQ ID NO: 90660 - protein, 366 aa, Setaria italica
  misc_feature (23)..(23): Xaa can be any naturally occurring amino acid
  misc_feature (137)..(137): Xaa can be any naturally occurring amino acid
  Transcript Sequence Number=SeqID_24686
  Gene Ontology: Mol. function=protein serine/threonine kinase activity; Biological process=protein amino acid phosphorylation
  Homolog annotation: Hit_ID=Q25AR5; Match level="QueryCoverage=97%, HitCoverage=86%, E-value=1e-146, Identity=71%"; Hit description =H0114G12.5 protein
  Pfam annotation: Domain name=Pkinase; Domain location=36-308; Score =133.0; E_value=9.4e-37; Accession=PF00069.17; Description=Protein kinase domain
  Pfam annotation: Domain name=Pkinase_Tyr; Domain location=36-308; Score=78.9; E_value=1.8e-20; Accession=PF07714.9; Description =Protein tyrosine kinase
  Pfam module annotation: Pfam domain module=Pkinase::Pkinase_Tyr; Domain location=36-308::36-308
SFNSVGTDMKQKVDGEGGNKVKXFSYSEMRKATHSFSGANKIGEGGFGSVFRGRLKDGTIVAVKVLSADSRQGIKEFVTELTAISDIVHENLITLVGCCAEGSHRILVYNYLENNSLAYTLLGSGRSNIRFNWRARXVKIAVGVARGLAYLHEEIRPPIIHRDIKASNILLEKDLTPRISDFGLARLLPPNATHVSTGVKGTIGYLAPEYAVRGQVTKKSDIYSFGVLLLEIVTGRCNHNARLPKGDQFLLERTWTYYEQGKLEEIIDIDIGDDLDVEEACRFLKVGLLCTQDAMKLRPNMTNIVHMLTGEKGVSMDRVKKPAVIGDLDLNGNNEQRPTDADSTTMRSFATTEPLTSSEANTETSL

SEQ ID NO: 90661 - protein, 65 aa, Setaria italica
  Transcript Sequence Number=SeqID_24687
  Homolog annotation: Hit_ID=Q53JH6; Match level="QueryCoverage=100%, HitCoverage=7%, E-value=1e-09, Identity=52%"; Hit description=Coiled- coil protein, putative, expressed
LNGKLAAGVNLNDSSPENGQSVEQHVSSNVRDEEVKETVRSLNEKLSAALLTIRAKEDLVKQHAK

SEQ ID NO: 90662 - protein, 85 aa, Setaria italica
  Transcript Sequence Number=SeqID_24688
  Gene Ontology: Cellular component=nucleus
  Homolog annotation: Hit_ID=Q2QYC5; Match level="QueryCoverage=98%, HitCoverage=80%, E-value=4e-18, Identity=58%"; Hit description=ZF-HD protein dimerisation region containing protein
  Pfam annotation: Domain name=ZF-HD_dimer; Domain location=21-80; Score=125.6; E_value=1.6e-34; Accession=PF04770.4; Description=ZF-HD protein dimerisation region
MGPQQDRQSSLANGTAPRKETKVVHYRECQRNHAASIGGYAVDGCREFMASGAEGTAAALLCAACGCHRSFHRREVEADCDCSST

SEQ ID NO: 90663 - protein, 166 aa, Setaria italica
  Transcript Sequence Number=SeqID_24689
  Gene Ontology: Mol. function=nucleotide binding
  Homolog annotation: Hit_ID=Q1EP28; Match level="QueryCoverage=100%, HitCoverage=20%, E-value=4e-62, Identity=72%"; Hit description =Dynamin family protein
LLEQRCSEVSMELTRIDSKLQATSDVSQLRRSAMLHAASICTHLRALLDGAADPAPEIWGKTTDEEQMHSGIVSWPGINVPVKPANSTLKLYGGAAFERVMHEFRCATYSMECPQVSREKVANILLAHAGRGGSSGLTEAAAEIARAAARSWLAPLIDTACDRLAF

SEQ ID NO: 90664 - protein, 118 aa, Setaria italica
  Transcript Sequence Number=SeqID_24690
  Gene Ontology: Mol. function=electron carrier activity; Cellular component=extracellular region; Biological process=response to oxidative stress
  Homolog annotation: Hit_ID=B6UBB5; Match level="QueryCoverage=78%, HitCoverage=28%, E-value=2e-44, Identity=90%"; Hit description =Peroxidase 51
  Pfam annotation: Domain name=peroxidase; Domain location=43-118; Score=-91.5; E_value=0.0076; Accession=PF00141.15; Description =Peroxidase
MARPPLLVLAVAAAAVCGLAQPGAADLKVDYYASTCPNVEAIVRGVVQQKMQATIRSIGSTIRLFFHDCFVEGCDGSVLIESTPDNQAEKDASDNKSLAFEGFDTVRSAKAAVEAACP

SEQ ID NO: 90665 - protein, 62 aa, Setaria italica
  Transcript Sequence Number=SeqID_24691
NGDTSEQPAAPDAEHQNSTASVEDSIKSGEKEVKKFPLAKDSLDYKLKDLFSTKDHMPIALN

SEQ ID NO: 90666 - protein, 85 aa, Setaria italica
  Transcript Sequence Number=SeqID_24692
  Subcellular localization annotation: CTP_CleavageSite=55; ConfidenceScore=5.81e-01
MNSSSPPQPPLPPPPHGVPSSLLDSSVPTTGPSGPLTKPPQELPSNRLPFSPPPRLSSVGPPPPPPPPPPLSGSKHILSPPPPPP

SEQ ID NO: 90667 - protein, 336 aa, Setaria italica
  Transcript Sequence Number=SeqID_24693
  Gene Ontology: Mol. function=phosphoprotein phosphatase activity; Biological process=actin cytoskeleton organization and biogenesis
  Homolog annotation: Hit_ID=Q7G6K7; Match level="QueryCoverage=71%, HitCoverage=19%, E-value=1e-117, Identity=87%"; Hit description =Formin-like protein 3
  Pfam annotation: Domain name=PTEN_C2; Domain location=2-103; Score =96.4; E_value=9.8e-26; Accession=PF10409.1; Description=C2 domain of PTEN tumour-suppressor pr
GKNASMVNMIFSMPKKKSLRHYRQEDCDVIKIDIQCLVQGDIVLECVHLDLDPEKEVMMFRIMFNTAFIRSNVLMLNSDDVDILWGSKDRYPKNFRAEVLFCEIGGMSPTRAPTATLNGDMKGGLPIEAFSAVQELFNGVDWIESNDDAAYWLLKEFSANSLQEKFQKLILNDMKELSKMQAKVGLQMPLMSPLDSDEEKYSVASDSVGSADHEKVQHGGNSSDSENIDRDPTTEDSESSATLSMNSSSPPQPPLPPPPHGVPSSLLDSSVPTTGPSGPLTKPPQELPSNRLPFSPPTPPPPPPPPPPSGSKHAFSSPPPPPPPPPRLSSVGPPPP

SEQ ID NO: 90668 - protein, 62 aa, Setaria italica
  Transcript Sequence Number=SeqID_24694
MPHRARPMTGLLVFMGVNLVLVNTISPVYDFVCLHPYWERRRERRQREREALQVKGSLETTS

SEQ ID NO: 90669 - protein, 150 aa, Setaria italica
  Transcript Sequence Number=SeqID_24695
  Gene Ontology: Mol. function=histone-lysine N-methyltransferase activity; Cellular component=nucleus; Biological process=chromatin modification
  Homolog annotation: Hit_ID=Q8L821; Match level="QueryCoverage=100%, HitCoverage=21%, E-value=2e-84, Identity=95%"; Hit description=SET domain-containing protein SET118
  Pfam annotation: Domain name=SET; Domain location=23-150; Score=66.0; E_value=1.4e-16; Accession=PF00856.20; Description=SET domain
PKAVVFECGANCSCNHNCVNRTSQQGLQYRLEVFKTASKGWGVRTWDTILPGAPICEYTGVLRRTEDLDGSQNNYCFDIDCLQTMKGLDGREKRAGSEMHLPNLHPDNDSEAPPAPEYCIDASSIGNFARFINHSCQPNLFVQCVLSSHN

SEQ ID NO: 90670 - protein, 157 aa, Setaria italica
  misc_feature (107)..(107): Xaa can be any naturally occurring amino acid
  Transcript Sequence Number=SeqID_24696
  Homolog annotation: Hit_ID=B6TK80; Match level="QueryCoverage=97%, HitCoverage=36%, E-value=2e-22, Identity=41%"; Hit description=F-box domain containing protein
  Subcellular localization annotation: CTP_CleavageSite=34; ConfidenceScore=5.33e-01
GRNEASFGVIWMAQCKAKLVAFAFSSGTGQWRAVASLAWRDLMSGVGVSSRSPAFSGRQYARGCFYWVMDWRDKLLVLDTGRMEFSIADLPPGCHRRQIAIVEAGEXRVGMFALRDHVADGAVSLYYTVRQDDGNGSSHWQMEKTIPLDPEFRHYIR

SEQ ID NO: 90671 - protein, 291 aa, Setaria italica
  Transcript Sequence Number=SeqID_24697
  Gene Ontology: Cellular component=small-subunit processome; Biological process=rRNA processing
  Homolog annotation: Hit_ID=B9SMZ8; Match level="QueryCoverage=74%, HitCoverage=60%, E-value=1e-50, Identity=52%"; Hit description =Something about silencing protein sas10, putative
  Pfam annotation: Domain name=Sas10_Utp3; Domain location=1-69; Score =67.6; E_value=4.6e-17; Accession=PF04000.7; Description=Sas10Utp3 family
KETNNNYGKVKENKLPTANGIGYLEAKNHLLLGYCQDIVYYLLRKAKGLSVDGHPVVRSLVEIRLFLEKIRPIDKKAEYQIQKLTNAADGATAREKAGNTEVKGNGEHSDEEDLLKYRPNPDMMDTKSAPDGQDNDGVYHPPKFMPAIMEEEDKRRKQDSRKDKAIARMAKENPYIKEMIDDAADRPEEWKETVGDESKEFVRYMRQREEQEKQEEELFTRAPVTKRDKQIEKRIRRQLHGLGGLADGFDLGMNMLFDGDKEDDGGSSKSHGKSGKRKKHLKSSSKKRKRH

SEQ ID NO: 90672 - protein, 79 aa, Setaria italica
  Transcript Sequence Number=SeqID_24698
WTKDAKKWVFNPKQYESSYQECMDDDDAYCNYVMRYAYDLVTKSQGQEELRKALWETLESGEKELEKHLGNGTQYAAYA

SEQ ID NO: 90673 - protein, 142 aa, Setaria italica
  Transcript Sequence Number=SeqID_24699
  Homolog annotation: Hit_ID=B9RDF9; Match level="QueryCoverage=94%, HitCoverage=4%, E-value=3e-15, Identity=41%"; Hit description =Nucleotide binding protein, putative
YKYLTILSSGGVEALLVLLQREAKAGNKNILDDSGANLSENDVHRDQSSSRKVESADARCQVDETQSTEHHETIFHEEADEHEASNANDMLESNIGSRVPGSENGLLKNLGGISFSITSDNVRNNVYNVDKGDGIVVGIIHI

SEQ ID NO: 90674 - protein, 153 aa, Setaria italica
  Transcript Sequence Number=SeqID_24700
  Gene Ontology: Mol. function=protein serine/threonine kinase activity; Cellular component=integral to membrane; Biological process=protein amino acid phosphorylation
  Homolog annotation: Hit_ID=Q2L3U3; Match level="QueryCoverage=100%, HitCoverage=46%, E-value=3e-52, Identity=38%"; Hit description =CLAVATA-like kinase
  Pfam annotation: Domain name=LRR_1; Domain location=112-134; Score =10.0; E_value=3.6; Accession=PF00560.25; Description=Leucine Rich Repeat
  Pfam annotation: Domain name=LRR_1; Domain location=136-150; Score =0.9; E_value=2e+02; Accession=PF00560.25; Description=Leucine Rich Repeat
  Pfam annotation: Domain name=LRR_1; Domain location=16-38; Score =16.5; E_value=0.11; Accession=PF00560.25; Description=Leucine Rich Repeat
  Pfam annotation: Domain name=LRR_1; Domain location=40-62; Score=9.4; E_value=4.9; Accession=PF00560.25; Description=Leucine Rich Repeat
  Pfam annotation: Domain name=LRR_1; Domain location=64-86; Score=4.2; E_value=49; Accession=PF00560.25; Description=Leucine Rich Repeat
  Pfam annotation: Domain name=LRR_1; Domain location=88-110; Score =18.6; E_value=0.025; Accession=PF00560.25; Description=Leucine Rich Repeat
  Pfam module annotation: Pfam domain module=LRR_1::LRR_1::LRR_1::LRR _1::LRR_1::LRR_1; Domain location=112-134::136-150::16-38::40-62::64 -86::88-110
NSLTGSIPATLGGLPNLQQLQLSTNQLTGVIPPELSNCTSLTDIEVDNNALSGEIRLDFPSLRNLTLFYAWKNRLTGGLPASLAEAPSLQAIDLSYNNLTGPIPKDLFGLQNLTKLLLLSNELTGFIPPEIGNCTSLYRLRLNGNRLSGTIPA

SEQ ID NO: 90675 - protein, 198 aa, Setaria italica
  Transcript Sequence Number=SeqID_24701
RLIGEMQAQMDDLVWVNKELEEKLQAALREQEAMDALLDEMEDQNEDAFARIHDLEAQLKALRQENMRLNEHKGKSMWDKAPPPPDRRGHGKDGNTKASESETKQARSPPVASGRERAEEEAVAGTQEEAGAAAAAAALKVKSADPASVLSLTTTAPAADDALARQAKAVARRRSLFSLAMSLAVGGVAWSADAPCLP

SEQ ID NO: 90676 - protein, 106 aa, Setaria italica
  misc_feature (97)..(97): Xaa can be any naturally occurring amino acid
  Transcript Sequence Number=SeqID_24702
  Gene Ontology: Biological process=cell redox homeostasis
  Homolog annotation: Hit_ID=B9S0G2; Match level="QueryCoverage=91%, HitCoverage=76%, E-value=5e-29, Identity=60%"; Hit description =Thioredoxin, putative
MAEKANGKEDTKRTGLEGTGLPLQGSSHGNLRSAGSDQQLRQLLDSLKSSKSPAVVNYGASWCRVCSQILPSFCKLSNEFENLTFIYADIDECPETXQSIRYTPTS

SEQ ID NO: 90677 - protein, 264 aa, Setaria italica
  Transcript Sequence Number=SeqID_24703
  Gene Ontology: Mol. function=ubiquitin-protein ligase activity; Cellular component=nucleus; Biological process=ubiquitin-dependent protein catabolic process
  Homolog annotation: Hit_ID=B3F0L1; Match level="QueryCoverage=98%, HitCoverage=87%, E-value=1e-147, Identity=95%"; Hit description=SINA1
  Pfam annotation: Domain name=Sina; Domain location=45-244; Score =427.9; E_value=1.6e-125; Accession=PF03145.8; Description=Seven in absentia protein family
  Subcellular localization annotation: CTP_CleavageSite=46; ConfidenceScore=5.13e-01
SSAPSCTNSMFPPIHQCQNGHTLCSTCKARVHNRCPTCRQELGDIRCLALEKVAESLELPCRYYSLGCQEIFPYYSKIKHEAQCSLRPYNCPYAGSECAAAGDIPYLVSHLRDDHKVDMHSGCTFNHRYVKSNPREVENATWMLTVFHCFGQYFCLHFEAFQLGMAPVYMAFLRFMGDENDAKNYSYSLEVGANGRKMVWEGTPRSVRDSHRKVRDSHDGLIIQRNMALFFSGGDRKELKLRITGRIWKEQQTPDGACIPNLCS

SEQ ID NO: 90678 - protein, 59 aa, Setaria italica
  Transcript Sequence Number=SeqID_24704
  Subcellular localization annotation: CTP_CleavageSite=32; ConfidenceScore=5.00e-01
LSPAALRHSRSLRFPSVRRLWLREITKSDKLRASPSGSGPATFSSHTKQRGRSFRGGAA

SEQ ID NO: 90679 - protein, 123 aa, Setaria italica
  Transcript Sequence Number=SeqID_24705
  Gene Ontology: Mol. function=calcium ion binding; Cellular component =membrane
  Homolog annotation: Hit_ID=C4P7Y1; Match level="QueryCoverage=99%, HitCoverage=38%, E-value=2e-61, Identity=94%"; Hit description =Calcineurin B-like protein 07
  Pfam annotation: Domain name=efhand; Domain location=20-48; Score =23.4; E_value=0.00095; Accession=PF00036.24; Description=EF hand
  Pfam annotation: Domain name=efhand; Domain location=64-92; Score =27.9; E_value=4.2e-05; Accession=PF00036.24; Description=EF hand
  Pfam module annotation: Pfam domain module=efhand::efhand; Domain location=20-48::64-92
FDEFIHALSVFHPLAPMEDKIKFAFRLYDLRQTGFIEREEVKQMVIAILLESYVDLSDDLLEAIIDKTFEDADADRDGKINQEEWKEFVLRHPNLLKNMTLPYLRDITTVFPSFIFNTAVEDD

SEQ ID NO: 90680 - protein, 294 aa, Setaria italica
  Transcript Sequence Number=SeqID_24706
EEPPGRTATQRIDLFKLLYSLREKNIIEKQQLEISKLSTQRDNEVMKLKEVCHAVVQHIRISDIDEEIRNDQIKLVINWFTMLMYAFLAHMKLQLSKLEARQSSTWVEEQLMKEKLKHEVLSGPLDQFLDLCNTLPDSNFAVEEFIHFKKQNGDNHVDNILALGCDQLMDDGLMEITLVRNSVPSEAFSTCVVRNEPTETHMRSGGGAASESLDLPDDNISCSSDGVDLQRTCSASTIPANHDSINQESSTGEARSVEHAKRDNIADPSILPGSVTSPVMGTNADDDGTVAADP

SEQ ID NO: 90681 - protein, 148 aa, Setaria italica
  Transcript Sequence Number=SeqID_24707
  Gene Ontology: Mol. function=protein serine/threonine kinase activity; Cellular component=integral to membrane; Biological process=protein amino acid phosphorylation
  Homolog annotation: Hit_ID=Q8W0U9; Match level="QueryCoverage=81%, HitCoverage=12%, E-value=3e-51, Identity=83%"; Hit description =Putative receptor protein kinase
  Pfam annotation: Domain name=LRRNT_2; Domain location=19-61; Score =45.7; E_value=1.8e-10; Accession=PF08263.4; Description=Leucine rich repeat N-terminal domain
  Pfam annotation: Domain name=LRR_1; Domain location=114-136; Score =16.5; E_value=0.11; Accession=PF00560.25; Description=Leucine Rich Repeat
  Pfam annotation: Domain name=LRR_1; Domain location=66-88; Score=4.8; E_value=36; Accession=PF00560.25; Description=Leucine Rich Repeat
  Pfam annotation: Domain name=LRR_1; Domain location=90-112; Score =8.6; E_value=6.9; Accession=PF00560.25; Description=Leucine Rich Repeat
  Pfam module annotation: Pfam domain module=LRRNT_2::LRR_1::LRR_1::LRR_ 1; Domain location=19-61::114-136::66-88::90-112
MTRLLRALAAFLLLAAVAVADDGATLLEIKKSFSNGGNALHDWSGEGASPTYCSWRGVLCDNVTFAVAALNLSGLNLEGEISPAIGSLKRVISIDLKSNGLSGQIPDEIGDCSLLETLDLSSNNLEGDIPFSISKLKHLENLILKNNQ

SEQ ID NO: 90682 - protein, 804 aa, Setaria italica
  Transcript Sequence Number=SeqID_24708
  Gene Ontology: Mol. function=protein serine/threonine kinase activity; Cellular component=integral to membrane; Biological process=protein amino acid phosphorylation
  Homolog annotation: Hit_ID=Q8W0U9; Match level="QueryCoverage=100%, HitCoverage=93%, E-value=0.0, Identity=56%"; Hit description =Putative receptor protein kinase
  Pfam annotation: Domain name=LRR_1; Domain location=119-141; Score =15.3; E_value=0.26; Accession=PF00560.25; Description=Leucine Rich Repeat
  Pfam annotation: Domain name=LRR_1; Domain location=143-165; Score =16.4; E_value=0.12; Accession=PF00560.25; Description=Leucine Rich Repeat
  Pfam annotation: Domain name=LRR_1; Domain location=167-189; Score =7.4; E_value=12; Accession=PF00560.25; Description=Leucine Rich Repeat
  Pfam annotation: Domain name=LRR_1; Domain location=191-213; Score =14.2; E_value=0.56; Accession=PF00560.25; Description=Leucine Rich Repeat
  Pfam annotation: Domain name=LRR_1; Domain location=215-237; Score =14.7; E_value=0.4; Accession=PF00560.25; Description=Leucine Rich Repeat
  Pfam annotation: Domain name=LRR_1; Domain location=239-261; Score =18.2; E_value=0.035; Accession=PF00560.25; Description=Leucine Rich Repeat
  Pfam annotation: Domain name=LRR_1; Domain location=24-46; Score=2.6; E_value=97; Accession=PF00560.25; Description=Leucine Rich Repeat
  Pfam annotation: Domain name=LRR_1; Domain location=263-285; Score =13.6; E_value=0.74; Accession=PF00560.25; Description=Leucine Rich Repeat
  Pfam annotation: Domain name=LRR_1; Domain location=287-309; Score =6.4; E_value=18; Accession=PF00560.25; Description=Leucine Rich Repeat
  Pfam annotation: Domain name=LRR_1; Domain location=311-332; Score =12.4; E_value=1.3; Accession=PF00560.25; Description=Leucine Rich Repeat
  Pfam annotation: Domain name=LRR_1; Domain location=334-354; Score =4.3; E_value=46; Accession=PF00560.25; Description=Leucine Rich Repeat
  Pfam annotation: Domain name=LRR_1; Domain location=48-70; Score =18.1; E_value=0.038; Accession=PF00560.25; Description=Leucine Rich Repeat
  Pfam annotation: Domain name=LRR_1; Domain location=71-92; Score=9.0; E_value=5.8; Accession=PF00560.25; Description=Leucine Rich Repeat
  Pfam annotation: Domain name=LRR_1; Domain location=95-117; Score =14.7; E_value=0.39; Accession=PF00560.25; Description=Leucine Rich Repeat
  Pfam annotation: Domain name=Pkinase; Domain location=471-738; Score =113.8; E_value=5.6e-31; Accession=PF00069.17; Description=Protein kinase domain
  Pfam annotation: Domain name=Pkinase_Tyr; Domain location=471-738; Score=105.1; E_value=2.3e-28; Accession=PF07714.9; Description =Protein tyrosine kinase
  Pfam module annotation: Pfam domain module=LRR_1::LRR_1::LRR_1::LRR _1::LRR_1::LRR_1::LRR_1::LRR_1::LRR_1::LRR_1::LRR_1::LRR_1::LRR _1::LRR_1::Pkinase::Pkinase_Tyr; Domain location=119-141::143 -165::167-189::191-213::...
  Pfam module annotation: Domain location=215-237::239-261::24-46::263 -285::287-309::311-332::334-354::48-70::71-92::95-117::471-738::471 -738
MSIRGLRSNNLEGSLSPDMCQLTGLWYFDVKNNSLMGTIPETIGNCTSFQVLDLSNNQLTGEIPFNIGFLQVATLSLQGNKFSGPIPSVIGLMQALAVLDLSFNELSGPIPSILGNLTYTEKLYLQGNRLTGSIPPELGNMTTLHYLELNDNLLTGFIPPDLGKLTELFDLNLANNNLGGPIPDNISSCINLISLNAYDNKLNGTIPRSFQKLESLTYLNLSSNHLSGALPIEVARMRNLDTLDLSCNMITGSIPSAIGRLEHLLRLNLSKNALVGHIPAEFGNLRSIMEIDLSSNYLRGLIPQEVGMLQNLILLKLENNSITGDVSPLTNCFSLNNLNVSYNDLAGIVPTDNNFSRFSPDSFLGNPGLCGYWRGSRSSCSPLSSSIERKRRSSISKAAFLGIGVGGLVILLVILAAACWPHNSPVLKDVSVSKPDNLVAASSSVPPKLVILHMNMALYVYDDIMRMTENLSEKYIIGYGASSTVYRCDLKNCKSVAIKKLYTHYPQSLKEFETELETVGSIKHRNLVSLQGYSLSPAGNLLFYDYMENGSLWDVLHVASSKKEKLDWEARLKIALGAAQGLAYLHHECSPRIIHRDVKSKNILLDKDYEAHLADFGIAKSLCVSLTHTSTYVMGTIGYIDPEYARTSRLNEKSDVYSYGIVLLELLTGKKPVDDECNLHHLILSKAADNTVMEMVDPDITDTCKDLGEVKKVFQLALLCSKRQPSDRPTMHEVVRVLDSLVCPDPPPKQAQPQGSEQSATAPSYVSEYVSLRGGTALSCANSSSASDAELFMKFGEVISRNTE

SEQ ID NO: 90683 - protein, 164 aa, Setaria italica
  Transcript Sequence Number=SeqID_24709
  Gene Ontology: Mol. function=nucleoside-triphosphatase activity; Cellular component=membrane
  Homolog annotation: Hit_ID=Q10A32; Match level="QueryCoverage=96%, HitCoverage=30%, E-value=6e-50, Identity=61%"; Hit description=ABC-2 type transporter family protein
  Pfam annotation: Domain name=ABC2_membrane; Domain location=1-164; Score=10.9; E_value=0.0014; Accession=PF01061.16; Description=ABC-2 type transporter
  Subcellular localization annotation: CTP_CleavageSite=69; ConfidenceScore=5.00e-01
QFSLLFSFCIGTVFYNISDTGLGSIQARISLIMCITSILTMASLGGFPSFAEDMKVFRKERLNGRYGATAFVISNTLSSAPFLGLNCIIPGAIIYYMTGLRRGIDHFIYFVVVLWASTMLVEGLMMIVAAIVPDFLLGIVIGSGIQALLLLGCGFFRLPNDLPK

SEQ ID NO: 90684 - protein, 48 aa, Setaria italica
  Transcript Sequence Number=SeqID_24710
QLRSQVTTWQCQQHMTRETSSLLHSSHPQVPPSTKLFMFHLWEEQSKL

SEQ ID NO: 90685 - protein, 152 aa, Setaria italica
  Transcript Sequence Number=SeqID_24711
  Gene Ontology: Mol. function=flavin-containing monooxygenase activity; Cellular component=intrinsic to endoplasmic reticulum membrane; Biological process=oxidation reduction
  Homolog annotation: Hit_ID=B6SWP3; Match level="QueryCoverage=99%, HitCoverage=28%, E-value=2e-57, Identity=73%"; Hit description =Monooxygenase/ oxidoreductase
HFGVLGCIRFGHRVVGMEYDGVAEEAVAAWGEWAGNGQAFGSGDGEWRLSVADAEGHVEMHTADFVVLCIGRFSGVPSIPTFPAGKGPEAFDGQVIHSMEYAKMGTTKAKEMIRGKRVTVVGYLKSALDIAAECAEVNGIAHPCTMVVRNKA

SEQ ID NO: 90686 - protein, 90 aa, Setaria italica
  Transcript Sequence Number=SeqID_24712
RALLRQQRLLPGVPGHGRPGIRVRDLHHRQLPAEEPEGHLRHLGVAGRVRTGGLWVHLTLTGIGEATSYICEYLYTCRFVSRLPRVIGKW

SEQ ID NO: 90687 - protein, 86 aa, Setaria italica
  Transcript Sequence Number=SeqID_24713
  Gene Ontology: Mol. function=aspartyl esterase activity; Cellular component=cell wall; Biological process=cell wall modification
  Subcellular localization annotation: CTP_CleavageSite=67; ConfidenceScore=5.06e-01
MAVHRAAALCALLLLSFSCLALSDDAPPSTPVSPSDACNATTDPSFCRSVLPPRGKGDLYTYGRFSVAESLAGARKFAALVDRYLA

SEQ ID NO: 90688 - protein, 74 aa, Setaria italica
  Transcript Sequence Number=SeqID_24714
HHNFGAFCYFFCIVHDLCFSAKTAGIMCLLFLPACLSSVYTWDGMSLFICVVRGFSHLFLCLRAVIQVQTILLP

SEQ ID NO: 90689 - protein, 155 aa, Setaria italica
  misc_feature (112)..(112): Xaa can be any naturally occurring amino acid
  Transcript Sequence Number=SeqID_24715
MAKTSVEFCVISARGLGRRSSLLKPQWFSVAWVDPNSKYCTKVDASGSSDPSWGMKFSVSADEHDLSSLQRKALTVEVYRREPIFLREHLQGAAIVQMKEYFDKFANGDEHXGLIEETASFQLRRKKSDKAHGFVDISIRIWEWGLELERWPLEL

SEQ ID NO: 90690 - protein, 114 aa, Setaria italica
  Transcript Sequence Number=SeqID_24716
  Gene Ontology: Cellular component=integral to membrane
  Homolog annotation: Hit_ID=B9RJS5; Match level="QueryCoverage=87%, HitCoverage=28%, E-value=1e-24, Identity=55%"; Hit description =Purine transporter, putative
  Pfam annotation: Domain name=TPT; Domain location=5-114; Score=11.6; E_value=0.00013; Accession=PF03151.8; Description=Triose-phosphate Transporter family
RRDGGPAAARAPPPSYATVMQIQAVMGAAGTAVCLVGMAIAKDFQAIPTEAAAFGLGETNYYLLLIFGAVSWQLSNLGIMGLIVCSSSLLAGIMIALVLPLSEVLAVIFLHEKF

SEQ ID NO: 90691 - protein, 37 aa, Setaria italica
  Transcript Sequence Number=SeqID_24717
MVVSTFTGPGIGIGFGVGCGFGVGWGFGGMPLNMFGL

SEQ ID NO: 90692 - protein, 135 aa, Setaria italica
  Transcript Sequence Number=SeqID_24718
MDPRPPSGSSSNCKSCPNEPLGRPNPMNFHHTQFPHHVSFSQPSHSMNFPHHQYPQQHLYPPHVQYVVVQPQYGPFSLPQPPPSRAMLTQPPPPPPPAGVIPLPLPSSPLPPPPAGVVPLSVSESGTPHSVTGSG

SEQ ID NO: 90693 - protein, 168 aa, Setaria italica
  Transcript Sequence Number=SeqID_24719
LVLAVNSIDTEIHLNEKTTIKPCVKYIAIMLLTNKSVFAQKFNNNGTSLLEGFNKLKIIQSNNKSFQQKKKFYEDMSIEKMKENMIKYEPDKYMTKDNTNFYYTTEGKYYHPGLKHMIDPSNELEAIFHYKYSYMREFFCIRNITPLNYSELKRDSLLLDAYKRGKES

SEQ ID NO: 90694 - protein, 102 aa, Setaria italica
  Transcript Sequence Number=SeqID_24720
  Gene Ontology: Cellular component=plasma membrane
  Homolog annotation: Hit_ID=Q9FHR5; Match level="QueryCoverage=100%, HitCoverage=8%, E-value=3e-36, Identity=68%"; Hit description =Similarity to COP1-interacting protein 7
MRPDARLDSVVFQLTPTRTRFDLVLIANGRKEKFASGLLKPFLAHLKAAQDQIAKGGYSITLEPSSGFDAPWFTRGTVERFVRFVSTPEVLERVTTLESEIL

SEQ ID NO: 90695 - protein, 832 aa, Setaria italica
  misc_feature (556)..(556): Xaa can be any naturally occurring amino acid
  misc_feature (566)..(566): Xaa can be any naturally occurring amino acid
  Transcript Sequence Number=SeqID_24721
  Gene Ontology: Mol. function=transmembrane receptor activity; Cellular component=plasma membrane; Biological process=innate immune response
  Homolog annotation: Hit_ID=Q9FHR5; Match level="QueryCoverage=32%, HitCoverage=26%, E-value=1e-51, Identity=36%"; Hit description =Similarity to COP1-interacting protein 7
  Pfam annotation: Domain name=MFMR; Domain location=230-382; Score= -72.8; E_value=0.073; Accession=PF07777.3; Description=G-box binding protein MFMR
NTQGNQLTLGIEPSSGFDAPWFTRGTVERFVRFVSTPEVLERVTTLESEILQLEDAIAIQSNDNLGLRSVEDHGRKLTESNEGGRANYDPDAATAIVVYKPGSTPPVQNETTAQEENSKIQLLRVLETRKTVLRKEQAMAFARAVAAGFDIDNLGCLIAFAERFGASRLMKACSHFVELWKQKHETGQWIEVEPEAMSTRSEFPPFNASGIVFMGDNMKQNMESGSVDGEANGEDAAKSDQKSGQQMGTHAAYPPWAMHPPSGGVVYPPYAMQGMPFYPGVNPYYHPYPPVDDPRYHYSGRKSSRKHSSDSKDPETLDVESDHSGSERGSSHGRKSHRKSKRSGKKKPSVVVIKNVNVTSKKHGSSESESQSSSDVSEDSDDSHTKSRERKHKSSSSKKKEGRKTTSDSGDEYSKDETSNGQDAEQGNWSAFQNFLLRAEEKTRSSDADMFAGEKEPPSRRKKNVNTADPMLLAERDSGNVHERNTVGFDSANGRTRAIRVMSNDELVMSGEGRGYIDGEMKEIEAGGGRYRRGTGDDFMINGQESHIDRSSLLDXSCRGPLQESXHQDKNRNGVADESFMIPLRSSSQDNFGAENRTTIDIDVELPASIHKTSDEKAGHQLFYEPDELVPERGFEDVSFGYDPAMDYESHMLMQTTVKVEDAKADDVLPVTEGDVKKAEKEKLRNAKDGSDKRRKDALLRRLSAPRTPLNDAQKRAQNLRAYKADLQKLKKEQEEEQIKRLERLKLERQKRIATRGNGKGPGSDSPKANGINGLSKSVPSITGLKKERSGTTESLSDRLKRLSEPKSIGGVEHSSNPRSNGADHSRRRSMA

SEQ ID NO: 90696 - protein, 142 aa, Setaria italica
  misc_feature (2)..(2): Xaa can be any naturally occurring amino acid
  Transcript Sequence Number=SeqID_24722
  Gene Ontology: Mol. function=protein disulfide oxidoreductase activity; Cellular component=mitochondrion; Biological process=cell redox homeostasis
  Homolog annotation: Hit_ID=Q257C6; Match level="QueryCoverage=71%, HitCoverage=55%, E-value=3e-27, Identity=49%"; Hit description =Putative thioredoxin
  Pfam annotation: Domain name=Thioredoxin; Domain location=32-138; Score=67.4; E_value=5.4e-17; Accession=PF00085.12; Description =Thioredoxin
  Subcellular localization annotation: CTP_CleavageSite=22; ConfidenceScore=5.72e-01
PXPPSSSSSPSPAFPPLSRLFSSSAGGSSSSMVVVGSADSFASILSKVQDEKLPAVFYYTAVWCGPCRAIAPFISKLSGQYPSIPVYKVDIDMEGLGSKLGDLKVYSVPTFHFYHKGQKTNEIVGADAKKLEVAMESLHKQQ

SEQ ID NO: 90697 - protein, 257 aa, Setaria italica
  misc_feature (84)..(84): Xaa can be any naturally occurring amino acid
  misc_feature (97)..(97): Xaa can be any naturally occurring amino acid
  Transcript Sequence Number=SeqID_24723
  Gene Ontology: Mol. function=nucleoside-triphosphatase activity; Cellular component=mitochondrion; Biological process=regulation of ARF GTPase activity
  Homolog annotation: Hit_ID=B9SQL2; Match level="QueryCoverage=99%, HitCoverage=56%, E-value=1e-100, Identity=63%"; Hit description =Rnase l inhibitor, putative
  Pfam annotation: Domain name=ABC_tran; Domain location=146-256; Score= -47.0; E_value=0.015; Accession=PF00005.19; Description=ABC transporter
RAMENADVYMFDEPSCYLDVKQRLKAAQVIRSLLQPKNYVIVVEHDLSILDYLSDYICCLYGTPGAYGVVTLPSSVREGINIFXLNGFIPSENMRFXREEKLTFRVTESAEEIIEGETYQSYKYPTMVKTRPGFKLSVMNGSFTGSQIIVLLGENGTGKTTFIRMLEGRVKPDKVGDKEVDMPAYTVSYKPQEMTPKISSTVKEVLHKKIPGSCSHAQFRSDVMKPLKIEELMDRQFANLSGGELQRVALCLCLGKP

SEQ ID NO: 90698 - protein, 222 aa, Setaria italica
  misc_feature (22)..(22): Xaa can be any naturally occurring amino acid
  Transcript Sequence Number=SeqID_24724
  Homolog annotation: Hit_ID=Q9M9X3; Match level="QueryCoverage=98%, HitCoverage=10%, E-value=2e-62, Identity=51%"; Hit description =F18C1.5 protein
VSPRLAECAADLSFMFPTFAVXFGVVCHLITSAVACWPLYNWAPGLFHYLLENVEATNASVPLGPKAAFSLLCLLGDLFPDEGIWLWKRELPSLSAIRSLSTSTVLGPQVEKEVNWYLQPEHVAILLVRLMPQLDRLARIIDNFATSALMVIQDTLRIFIVRVALEKIECAVVLLRPIFIWLDDKVDETSLSEREVFKVHQLLQFIVKLSEHPNGKALLWKM

SEQ ID NO: 90699 - protein, 191 aa, Setaria italica
  misc_feature (149)..(149): Xaa can be any naturally occurring amino acid
  misc_feature (163)..(163): Xaa can be any naturally occurring amino acid
  Transcript Sequence Number=SeqID_24725
  Gene Ontology: Mol. function=protein serine/threonine kinase activity; Cellular component=cytoplasm; Biological process=protein amino acid phosphorylation
  Homolog annotation: Hit_ID=B9T411; Match level="QueryCoverage=100%, HitCoverage=64%, E-value=1e-74, Identity=72%"; Hit description =Catalytic, putative
NTSLLIDYCQDEGAHKYIIIDVGKTFREQVLRWFVHHKIPCVDSILLTHEHADAILGLDDVRVVQPFSPTNDIDPTPIYLSQFAMDSISQKFPYLVKKKLKEGEEVRRVAQLDWRIIESDLQKPFTTSGLEFVPLPVIHGEDYICLGFXFGRKSKVAYISDVXRGFPPSTEYAISKSGGGQLDLLILDCLY

SEQ ID NO: 90700 - protein, 178 aa, Setaria italica
  Transcript Sequence Number=SeqID_24726
  Gene Ontology: Mol. function=protein serine/threonine kinase activity; Biological process=protein amino acid phosphorylation
  Homolog annotation: Hit_ID=B9T411; Match level="QueryCoverage=97%, HitCoverage=58%, E-value=8e-69, Identity=71%"; Hit description =Catalytic, putative
MFIVNNSISQKFPYLVKKKLKEGEEVRRVAQLDWRIIESDLQKPFTTSGLEFVPLPVIHGEDYICLGFLFGRKSKVAYISDVSRFPPSTEYAISKSGGGQLDLLILDCLYRTGSHNVHLCWDQTLDAVKRICPKRALLIGMTHEMDHHKDNQTLEEWSRREGIDVQLAHDGLRVYIDL

SEQ ID NO: 90701 - protein, 103 aa, Setaria italica
  Transcript Sequence Number=SeqID_24727
LLLPEPLPQRLEARLQRRLVRRRRRHGGSRFWGRALIDFDPASSWDSEKIVALVGAGREGRFACVAAPERYKWRRAGGAGGGRWLGGEERNTAGRWPGGWARH

SEQ ID NO: 90702 - protein, 113 aa, Setaria italica
  Transcript Sequence Number=SeqID_24728
LVACCWSSDPLPAAAASPTAPSQPFLSYILLHLSVSISILLLHILRADRSAADCVARAGGDGVHGRPGVAARCCLQRSTSRVCRRRRRRPPPSACVAADSGQRHDAAPPAAGS

SEQ ID NO: 90703 - protein, 159 aa, Setaria italica
  Transcript Sequence Number=SeqID_24729
  Gene Ontology: Mol. function=selenium binding; Cellular component =endoplasmic reticulum lumen; Biological process='de novo' posttranslational protein folding
  Homolog annotation: Hit_ID=B6T325; Match level="QueryCoverage=91%, HitCoverage=88%, E-value=4e-73, Identity=93%"; Hit description =Selenoprotein
  Pfam annotation: Domain name=Sep15_SelM; Domain location=78-154; Score=144.7; E_value=2.9e-40; Accession=PF08806.3; Description =Sep15SelM redox domain
MGRSLYAAAAVALVCFSGFCHGERLGARQCEDLGFTGLALCSDCNALSEFVKDQELVEDCRKCCTEDSDDSISKLTFSGAIIEVCMRKLVFYPEVVGFLEEDKDDFPYVEARYSYGSPPKLIMLDDKGEHKETIRIDNWKREHIRQFLKEKVKLVKSDS

SEQ ID NO: 90704 - protein, 107 aa, Setaria italica
  misc_feature (84)..(84): Xaa can be any naturally occurring amino acid
  Transcript Sequence Number=SeqID_24730
  Gene Ontology: Mol. function=oxidoreductase activity; Cellular component=chloroplast; Biological process=cell redox homeostasis
  Homolog annotation: Hit_ID=Q10ME7; Match level="QueryCoverage=59%, HitCoverage=8%, E-value=2e-29, Identity=87%"; Hit description=HAD -superfamily hydrolase, subfamily IA, variant 3 containing protein, expressed
  Pfam annotation: Domain name=NHL; Domain location=33-61; Score=27.6; E_value=5e-05; Accession=PF01436.13; Description=NHL repeat
IDFLQILDLPQLAILSLLSSDYKGGGQGTDQVLNSPWDVCYDPSQETVYIAMAGQHQIWKHNIRDGVTKVLSGDGYEKNLNGSXELQELFVADSESSSIRAVNLKTG

SEQ ID NO: 90705 - protein, 42 aa, Setaria italica
  Transcript Sequence Number=SeqID_24731
  Gene Ontology: Mol. function=oxidoreductase activity; Cellular component=membrane; Biological process=cell redox homeostasis
  Homolog annotation: Hit_ID=Q10ME7; Match level="QueryCoverage=100%, HitCoverage=5%, E-value=5e-12, Identity=80%"; Hit description=HAD -superfamily hydrolase, subfamily IA, variant 3 containing protein, expressed
AVTTTLEEDALQEGSPSLIRKNIGDVSINDILYGGSNARHSM

SEQ ID NO: 90706 - protein, 119 aa, Setaria italica
  Transcript Sequence Number=SeqID_24732
  Gene Ontology: Mol. function=oxidoreductase activity; Cellular component=chloroplast; Biological process=cell redox homeostasis
  Homolog annotation: Hit_ID=B9RFK4; Match level="QueryCoverage=100%, HitCoverage=11%, E-value=9e-49, Identity=73%"; Hit description=2 -deoxyglucose-6-phosphate phosphatase, putative
AGQHQIWKHNIRDGVTKVLSGDGYEKNLNGSSATSTSFAQPSGISLAPELQELFVADSESSSIRAVNLKTGGSRLLAGGDPVFAENLFRFGDYDGTGSDVLLQHPLGVVYASDNQVYVA

SEQ ID NO: 90707 - protein, 733 aa, Setaria italica
  misc_feature (729)..(729): Xaa can be any naturally occurring amino acid
  Transcript Sequence Number=SeqID_24733
  Gene Ontology: Mol. function=oxidoreductase activity; Cellular component=chloroplast; Biological process=cell redox homeostasis
  Homolog annotation: Hit_ID=Q10ME7; Match level="QueryCoverage=92%, HitCoverage=84%, E-value=0.0, Identity=77%"; Hit description=HAD -superfamily hydrolase, subfamily IA, variant 3 containing protein, expressed
  Pfam annotation: Domain name=AhpC-TSA; Domain location=343-463; Score= -4.7; E_value=0.002; Accession=PF00578.13; Description=AhpCTSA family
  Pfam annotation: Domain name=Hydrolase; Domain location=1-183; Score =65.4; E_value=2.2e-16; Accession=PF00702.18; Description=haloacid dehalogenase-like hydrolase
  Pfam annotation: Domain name=NHL; Domain location=512-540; Score =25.7; E_value=0.00019; Accession=PF01436.13; Description=NHL repeat
  Pfam annotation: Domain name=NHL; Domain location=567-595; Score =33.1; E_value=1.2e-06; Accession=PF01436.13; Description=NHL repeat
  Pfam annotation: Domain name=NHL; Domain location=626-654; Score =27.6; E_value=5e-05; Accession=PF01436.13; Description=NHL repeat
  Pfam annotation: Domain name=NHL; Domain location=683-711; Score =16.2; E_value=0.14; Accession=PF01436.13; Description=NHL repeat
  Pfam annotation: Domain name=Redoxin; Domain location=325-481; Score =15.8; E_value=0.00031; Accession=PF08534.2; Description=Redoxin
  Pfam module annotation: Pfam domain module=AhpC-TSA::Hydrolase::NHL::N HL::NHL::NHL::Redoxin; Domain location=343-463::1-183::512-540::567 -595::626-654::683-711::325-481
MDGVLCNSEEPSRQAGVDVFAEMGVEVTVDDFVPFMGTGEANFLGGVARVKGVKDFNPESAKKRFFEIYLDKYAKLNSGIGFPGALELIMECKNAGLKVAVASSADRIKVDANLAAAGLPVSLFDAIVSADAFEKLKPAPDIFLAASKNLGVDTSECIVIEDALAGVQAAKAAEMRCIAVTTTLEEDALQEGSPSLIRKNIGDVSINDILYGGSNARHNEGAESSGNISSIGNASPENLNGATDAGVSGTQSSPTSKTEGLLGSRREILRYGSLGIAVSCVFVAVRNWKAMQFASPKGLLNFFTGGSSSIFVNNEGESLSSRAQQIKKYLADFESGGSATYVPEFPRKLDWLNTAPLQFGRDLKGKVVLLDFWTYCCINCMHVLPDLEFVEKKYKDKPFTVVGVHSAKFDNEKDLDAIRNAVLRYNITHPVVNDGDMYLWRELGVNSWPTFVLIGPNGKVLAQISGEGHRKDLDDVVGAALEFYEERKLLQNDPLPLALEKDKDSRLLTSPLKFPGKLALDVENNRLFISDSNHNRIVVTNLEGQFICQVGSSEEGLLDGSFDAALFNRPQGLAYNSKKNVLYVADTENHALREINFVDETVRTLAGNGTKGSDYKGGGQGTDQVLNSPWDVCYDPSQETVYIAMAGQHQIWKHNIRDGVTKVLSGDGYEKNLNGSSATSTSFAQPSGISLAPELQELFVADSESSSIRAVNLKTGGSRLLAGGDPVIXENLF

SEQ ID NO: 90708 - protein, 148 aa, Setaria italica
  Transcript Sequence Number=SeqID_24734
  Gene Ontology: Mol. function=oxidoreductase activity; Cellular component=membrane; Biological process=cell redox homeostasis
  Homolog annotation: Hit_ID=Q10ME8; Match level="QueryCoverage=86%, HitCoverage=12%, E-value=1e-50, Identity=77%"; Hit description=HAD -superfamily hydrolase, subfamily IA, variant 3 containing protein, expressed
HKIKRLDPVTRKVTTVAGTGRAGYKDGPGLSAQLSEPAGLVEVGEGRLLVADTNNSAIRYITLSEKGAEVKTLDLIGVQPPSPKPKTLKRLRRRLSVDTDVINVDGGSSMEGFLSLAITVPDGYHFSKVNNIQRILFLLSCFASLHYC

SEQ ID NO: 90709 - protein, 302 aa, Setaria italica
  Transcript Sequence Number=SeqID_24735
  Gene Ontology: Mol. function=oxidoreductase activity; Cellular component=membrane; Biological process=cell redox homeostasis
  Homolog annotation: Hit_ID=Q10ME8; Match level="QueryCoverage=90%, HitCoverage=25%, E-value=1e-118, Identity=78%"; Hit description=HAD -superfamily hydrolase, subfamily IA, variant 3 containing protein, expressed
  Pfam annotation: Domain name=NHL; Domain location=100-127; Score =15.8; E_value=0.18; Accession=PF01436.13; Description=NHL repeat
  Pfam annotation: Domain name=NHL; Domain location=45-72; Score=39.9; E_value=1e-08; Accession=PF01436.13; Description=NHL repeat
  Pfam module annotation: Pfam domain module=NHL::NHL; Domain location =100-127::45-72
VKSSSIRAVNLKTGGSRLLAGGDPVFAENLFRFGDYDGTGSDVLLQHPLGVVYASDNQVYVADSYNHKIKRLDPVTRKVTTVAGTGRAGYKDGPGLSAQLSEPAGLVEVGEGRLLVADTNNSAIRYITLSEKGAEVKTLDLIGVQPPSPKPKTLKRLRRRLSVDTDVINVDGGSSMEGFLSLAITVPDGYHFSKEARSKFDVETEPSNAIEIEPANGFLNSEGLASLKFKRISSVSSMGRINCKVYYCKEDEVCLYQSIAFDVKFHEGPEPSPTQITLSYSVTPRDNSGGAQLIAGRKNAKV

SEQ ID NO: 90710 - protein, 104 aa, Setaria italica
  misc_feature (30)..(30): Xaa can be any naturally occurring amino acid
  Transcript Sequence Number=SeqID_24736
  Gene Ontology: Mol. function=hydrolase activity, acting on glycosyl bonds; Cellular component=beta-galactosidase complex; Biological process=carbohydrate metabolic process
  Homolog annotation: Hit_ID=Q5N8X6; Match level="QueryCoverage=98%, HitCoverage=12%, E-value=2e-39, Identity=76%"; Hit description=Beta -galactosidase 3
  Pfam annotation: Domain name=Gal_Lectin; Domain location=26-103; Score=116.7; E_value=7.9e-32; Accession=PF02140.10; Description =Galactose binding lectin domain
  Subcellular localization annotation: CTP_CleavageSite=50; ConfidenceScore=5.27e-01
YFYPRTLSLWKDSITNDATAAAKVQLSCPXGKNISSVKFASLGNPSGTCRSYQKGSCHHPNSLSVVEKACLNTNSCAVSLSDGGFGEDLCPGVTKTLAVEADCS

SEQ ID NO: 90711 - protein, 562 aa, Setaria italica
  Transcript Sequence Number=SeqID_24737
  Gene Ontology: Mol. function=hydrolase activity, acting on glycosyl bonds; Cellular component=beta-galactosidase complex; Biological process=carbohydrate metabolic process
  Homolog annotation: Hit_ID=B6U0W2; Match level="QueryCoverage=98%, HitCoverage=65%, E-value=0.0, Identity=86%"; Hit description=Beta -galactosidase
  Pfam annotation: Domain name=Gal_Lectin; Domain location=484-561; Score=116.3; E_value=9.8e-32; Accession=PF02140.10; Description =Galactose binding lectin domain
  Pfam annotation: Domain name=Glyco_hydro_2_N; Domain location=157 -277; Score=-43.4; E_value=0.0054; Accession=PF02837.10; Description =Glycosyl hydrolases family 2, sugar binding domain
  Pfam module annotation: Pfam domain module=Gal_Lectin::Glyco_hydro_2 _N; Domain location=484-561::157-277
YRKLTQVSDILFMYHGGTNFGRTTGGPFITTSYDYDAPIDEYGLRRFPKWAHLRELHKSIKLCEHALLYGNTTFLSLGPKQEADIYTDRSGGCVAFLANIDPEKDKIVTFNNRKYDLPAWSVSILPDCKNVVFNTAKVQSQTSMVTMVPESLQASKSDRWSIFRERTGIWGKNDFVQNGFVDHINTTKDSTDYLWYTTSFSVDGSYPSKGSHAVLNIDSKGHGVHAFLNNEFIGSAYGNGSKSSFTVELPINLRTGKNELALLSMTVGLQNAGPSYEWIGAGFTNVNISGLKNGAIDLSSNNWAYKIGLEGEYYSLFKPDQRSNKRWIPQSEPPKNQPLTWYKVNVDVPQGDDPVGIDMQSMGKGLAWLNGNAIGRYWPRTSSSDDRCTPSCNYRGAFNPDKCRTGCGQPTQRWYHVPRSWFHPSENTLVVFEEKGGDPTKITFSRRVVSSVCSFVSEHYPSIDLESWDKSITNDATAAAKVQLSCPKGKNISSVKFASLGNPSGTCRSYQKGSCHHPNSLSVVEKACLNTNSCAVSLSDGGFGEDLCPGVTKTLAVEADCS

SEQ ID NO: 90712 - protein, 95 aa, Setaria italica
  Transcript Sequence Number=SeqID_24738
LSGCDTSDSYGKKLLLFLKWKCMEAKAVAYYYHGLVLDKGGETANHISAVCCLSAAEDLLSDSKRACLSFCLANPVTRVPPPWGVMKNMHKKIPD

SEQ ID NO: 90713 - protein, 85 aa, Setaria italica
  Transcript Sequence Number=SeqID_24739
WKARPGTGGHLPRIDLATLAAHEDIRYTTMELAKASVPAGKQDAVACVCCSVLATYRNSHAHHDEAILLPVNLIILETPKVICCA

SEQ ID NO: 90714 - protein, 170 aa, Setaria italica
  Transcript Sequence Number=SeqID_24740
LPSSTEKNLNGEDAMAAPTPARPPDPHHAARIRTLAMARLECRSAKSGLGGRPGHPWSLPVAGSRAAHHRHRPDRALPTSAAPWGRTWVHMAPLWIRCLQRWRRQGIAERPVVLAWREGRVGSTPVRVRDSVGRSEAARRGGAQRRRMEDSGRRGRGEEARCLTSQPYLL

SEQ ID NO: 90715 - protein, 149 aa, Setaria italica
  Transcript Sequence Number=SeqID_24741
  Gene Ontology: Mol. function=pseudouridine synthase activity; Cellular component=nucleus; Biological process=pseudouridine synthesis
  Homolog annotation: Hit_ID=B4FYI2; Match level="QueryCoverage=100%, HitCoverage=32%, E-value=1e-66, Identity=82%"; Hit description =Pseudouridylate synthase
CSMTIKGTAFLWHQVRCMVAVLFLIGQGLESPSVVDSLLDITKTPRKPQYKMAAELPLILRSCQFDKADFMCSSDVSQSLTEHLNDEYHHYMLQAEIFHEALSCLPCPESNPLETLQKKRNHIPLLSRQTEPSYEERIAKVKTKQTNIL

SEQ ID NO: 90716 - protein, 131 aa, Setaria italica
  Transcript Sequence Number=SeqID_24742
  Gene Ontology: Mol. function=protein serine/threonine kinase activity; Cellular component=ubiquitin ligase complex; Biological process=ubiquitin-dependent protein catabolic process
  Homolog annotation: Hit_ID=B9RDS8; Match level="QueryCoverage=100%, HitCoverage=40%, E-value=2e-42, Identity=63%"; Hit description =Receptor protein kinase, putative
  Subcellular localization annotation: CTP_CleavageSite=59; ConfidenceScore=5.40e-01
SFVSKLGDFGICRLLSQSNTARSNATRSITTKLHRTTTPKGTFAYMDPEFLSTGELTPRSDVYSFGIIILRLLTGRPPKRIAEVVEDAMERGELHAILDPTAGSWPFVQANQLAHIGLRCAEMSRRRRPDL

SEQ ID NO: 90717 - protein, 70 aa, Setaria italica
  Transcript Sequence Number=SeqID_24743
KDEVLLILLHKVFNLDILSVYFWSNIQLYLIYVISLLHQGSTLICPYLSTHLSNTKAVDLFMCIFSVFTL

SEQ ID NO: 90718 - protein, 88 aa, Setaria italica
  misc_feature (1)..(20): Xaa can be any naturally occurring amino acid
  Transcript Sequence Number=SeqID_24744
  Subcellular localization annotation: CTP_CleavageSite=81; ConfidenceScore=5.43e-01
XXXXXXXXXXXXXXXXXXXXPFRVKKVASSTDSCFVPTYSVRCAPSSYNTGYSYRLHSTAGCNSLTVNQFTLGLSGPVIWYAAAMASL

SEQ ID NO: 90719 - protein, 234 aa, Setaria italica
  Transcript Sequence Number=SeqID_24745
  Gene Ontology: Mol. function=protein dimerization activity
  Homolog annotation: Hit_ID=B9REN7; Match level="QueryCoverage=81%, HitCoverage=26%, E-value=6e-37, Identity=38%"; Hit description=DNA binding protein, putative
  Pfam annotation: Domain name=hATC; Domain location=55-144; Score =22.4; E_value=0.00014; Accession=PF05699.6; Description=hAT family dimerisation domain
EKQLHSPLHGAGCFFNPGIYFSPSFKMQSYAFRGLMKTIASLVPDVEVQDKIFLQLEEYKKSTGDFGLPIAVRQRQKLNPVAWWDNFGNGTLELQSLAVRVLSQCCSATGCERNWDIFNYLHSMKLSRLERSRLHDIVFVRYNLKLRERNKLKDTIDPISLDNINVLDEWVSEHPSLLCRDDLNWESVDAPFAEPTSDDEELIAVDNDEDASVAALSWSAADDLYCPQPDLSTP

SEQ ID NO: 90720 - protein, 95 aa, Setaria italica
  Transcript Sequence Number=SeqID_24746
  Gene Ontology: Cellular component=nucleus; Biological process=cell division
  Homolog annotation: Hit_ID=Q7F830; Match level="QueryCoverage=97%, HitCoverage=18%, E-value=5e-33, Identity=72%"; Hit description =Cyclin-A1-1
  Pfam annotation: Domain name=Cyclin_C; Domain location=1-94; Score =66.7; E_value=8.4e-17; Accession=PF02984.11; Description=Cyclin, C -terminal domain
AKCFLRRFLHAARACDEDPAYIEVLANYITELSLLEYNLLCYPPSQIAASAIFLAKYILYPTKQPWNPTLARYTRYKPSELCECVKAMHRVFSKN

SEQ ID NO: 90721 - protein, 238 aa, Setaria italica
  misc_feature (15)..(15): Xaa can be any naturally occurring amino acid
  Transcript Sequence Number=SeqID_24747
  Gene Ontology: Mol. function=protein dimerization activity; Cellular component=nucleus; Biological process=regulation of transcription, DNA-dependent
  Homolog annotation: Hit_ID=Q52MZ2; Match level="QueryCoverage=97%, HitCoverage=46%, E-value=1e-73, Identity=54%"; Hit description=TGA10 transcription factor
CLLGAGEQPAGFPSXPSPAAVFDMEYGRWVEEHSKLMFQLRAALNEHMADEQLQAFVNGAMAQHEELLNLKGAMARADVFHLLSGVWASPAERCFLWLGGFRPSEVIKVMLKHVEPLSEGQILGIYNLQQSVQEREEALNHTMEATQQSISDIVAAPDVAPATFMGHMSLAMNKVASMESFVLQADGLRQQTLHKLHHILTTRQAARCMVAIADYFHRLRALSTLWVARPRQEDGPGL

SEQ ID NO: 90722 - protein, 123 aa, Setaria italica
  Transcript Sequence Number=SeqID_24748
  Gene Ontology: Mol. function=nucleic acid binding
  Homolog annotation: Hit_ID=B9SD37; Match level="QueryCoverage=70%, HitCoverage=33%, E-value=6e-33, Identity=75%"; Hit description=RNA -binding region-containing protein, putative
  Pfam annotation: Domain name=RRM_1; Domain location=30-99; Score =72.4; E_value=1.7e-18; Accession=PF00076.14; Description=RNA recognition motif. (a.k.a. RRM, RBD, o
MTMMAPQPQPLPLAQPPAAAAFGDTTLTKVFVGGLAWETHKDTLREHFERYGDILEAVIISDKLTGRSKGYGFVTFKEADAAKKACEDATPVINGRRANCNLASLGAKPRPQPPHLLRPSPPA

SEQ ID NO: 90723 - protein, 80 aa, Setaria italica
  Transcript Sequence Number=SeqID_24749
KTFLATMYMKCMRRSKVSWKLKVCEPFKFYGMQGLFSTARLTNKDAAFIFVVCLVRLLYWLHWPYTQSTLTILFSMKCYF

SEQ ID NO: 90724 - protein, 234 aa, Setaria italica
  Transcript Sequence Number=SeqID_24750
  Gene Ontology: Mol. function=catalytic activity; Cellular component =plasma membrane; Biological process=cellular metabolic process
  Homolog annotation: Hit_ID=C3VPA5; Match level="QueryCoverage=100%, HitCoverage=71%, E-value=1e-64, Identity=49%"; Hit description =Cinnamoyl-CoA reductase
ILHPTQDPQKELVEPAVKGTLGVLQAARDCGVGRVVMVSSQTAMVPNPNWPADKVIDEDSWADIDLLKELQLWYSVSKTLAEKAAWDFAEEQGLQLAVLNPVLVLGPTLTPSITGSLQVFLQIMKGQRFDMDEYFLGCVDVRGVAQSLVALYENSSAQGRHLCVESTERMVDFTNKLADLYPELPVQRIQEDKQEWVVRAKDPSKKLIELGVRFIPFDRIITDTMDCFRSKGLI

SEQ ID NO: 90725 - protein, 132 aa, Setaria italica
  Transcript Sequence Number=SeqID_24751
  Gene Ontology: Mol. function=nucleic acid binding
  Homolog annotation: Hit_ID=Q53JN6; Match level="QueryCoverage=51%, HitCoverage=17%, E-value=2e-17, Identity=56%"; Hit description =Transposon protein, putative, Mutator sub-class
PYTALADKSQWPKLSHDFFMHPPLLKATAGRSQNERYKSCSEKKRTKGQHQCPICKGYGHHWHNCKNGNPEDIAAMMELRGPPKKKRRPPKHQLRKAIVPWNGEAPASSVFPTKVGYLRFWRLSKVMACSDM

SEQ ID NO: 90726 - protein, 111 aa, Setaria italica
  misc_feature (53)..(53): Xaa can be any naturally occurring amino acid
  Transcript Sequence Number=SeqID_24752
  Pfam annotation: Domain name=UBX; Domain location=37-111; Score=6.6; E_value=0.02; Accession=PF00789.12; Description=UBX domain
TRLRTNWQGQAPTVRKPAEQPVATAVAVAPTSQQPASVEMKVCKLRVRLPDGXVVAKEFGIQCAVAELFAYCRSEMGAGAAAARPFRLLRFVGAARVEIGNDDASFESLRL

SEQ ID NO: 90727 - protein, 115 aa, Setaria italica
  misc_feature (100)..(100): Xaa can be any naturally occurring amino acid
  Transcript Sequence Number=SeqID_24753
  Homolog annotation: Hit_ID=B6UF38; Match level="QueryCoverage=71%, HitCoverage=13%, E-value=1e-13, Identity=59%"; Hit description =Serine hydroxymethyltransferase
MDLSRPASSDLSLGLHSHGPSHAHARVHAVAAPLRLFDDSEDAKPERLEGGEADGEREDEEDGGDQHFSLLGHSLCVKRPRRAVNGGGGGGGETSSCSSXSPALRPAKRQAMGEG

SEQ ID NO: 90728 - protein, 80 aa, Setaria italica
  Transcript Sequence Number=SeqID_24754
  Gene Ontology: Mol. function=isomerase activity
  Homolog annotation: Hit_ID=Q53LS7; Match level="QueryCoverage=100%, HitCoverage=20%, E-value=3e-24, Identity=80%"; Hit description =ProFAR isomerase associated family protein, expressed
QEPYFTQLRAEAKTVEGRLATGDYNRITQGSLLLFNKCLMLNVEAVRKYSSFSEMLQAETISNVLPGISSVEEGVKVYRK

SEQ ID NO: 90729 - protein, 119 aa, Setaria italica
  Transcript Sequence Number=SeqID_24755
  Gene Ontology: Mol. function=oxidoreductase activity; Cellular component=extracellular region; Biological process=oxidation reduction
  Homolog annotation: Hit_ID=B9S8L8; Match level="QueryCoverage=84%, HitCoverage=18%, E-value=3e-30, Identity=62%"; Hit description =Multicopper oxidase, putative
  Pfam annotation: Domain name=Cu-oxidase; Domain location=2-119; Score= 86.6; E_value=9e-23; Accession=PF00394.14; Description=Multicopper oxidase
LRQALDAGAAALPPPDGLLINGAQSATFVGDLGRTYLFRVSNVGLKASVNVRIQGHSLRLAEVEGTHPVQNAYDSLDVHPGQSLAFLVTLDKPPLDYAVVVSTRFAAANLTAVGTLHYA

SEQ ID NO: 90730 - protein, 78 aa, Setaria italica
  Transcript Sequence Number=SeqID_24756
MPASSPDMDGEATEKEAAPAPAPPPAGGSPSMSVFAHADKVDVVLMLLGLVGAVGDGISYPLTLILFIRITNDIGHRP

SEQ ID NO: 90731 - protein, 95 aa, Setaria italica
  Transcript Sequence Number=SeqID_24757
  Gene Ontology: Mol. function=protein kinase activity; Biological process=protein amino acid phosphorylation
  Homolog annotation: Hit_ID=B6SRI6; Match level="QueryCoverage=100%, HitCoverage=22%, E-value=1e-36, Identity=79%"; Hit description =Protein kinase APK1A
NLKSMLKLSSVANRCLVRMPKSRPKMSEVYEMVQKIVDSVETGPPQPPLHYHGSVSEPGAKRTKKGSLKRRLQEFKFGCRNIVWRGWKPEIVKTF

SEQ ID NO: 90732 - protein, 60 aa, Setaria italica
  Transcript Sequence Number=SeqID_24758
PGRNRACRSAKSGYLYSPFFLTSSCLAPECFSNQLPLVFTLLLQPLFTSQVGRCQIDILP

SEQ ID NO: 90733 - protein, 90 aa, Setaria italica
  Transcript Sequence Number=SeqID_24759
  Gene Ontology: Mol. function=RNA binding
  Homolog annotation: Hit_ID=B9SPX7; Match level="QueryCoverage=77%, HitCoverage=11%, E-value=3e-18, Identity=58%"; Hit description=RNA binding protein, putative
SPFFPSAAPPAAVDAGRYTFSPKLRWQPEVEEYFAAAYGRDRFARISEALAHPSRYSCIRVNTLKSSTDTVMQKLMDLVCENGVSDGING

SEQ ID NO: 90734 - protein, 823 aa, Setaria italica
  misc_feature (268)..(268): Xaa can be any naturally occurring amino acid
  misc_feature (685)..(685): Xaa can be any naturally occurring amino acid
  Transcript Sequence Number=SeqID_24760
  Gene Ontology: Mol. function=nucleoside-triphosphatase activity; Cellular component=mitochondrial matrix; Biological process=ATP -dependent proteolysis
  Homolog annotation: Hit_ID=P93648; Match level="QueryCoverage=100%, HitCoverage=84%, E-value=0.0, Identity=88%"; Hit description=Lon protease homolog 2, mitochondrial
  Pfam annotation: Domain name=AAA; Domain location=301-496; Score =185.7; E_value=1.3e-52; Accession=PF00004.21; Description=ATPase family associated with various cellular activities (AAA)
  Pfam annotation: Domain name=AAA_2; Domain location=299-439; Score= -41.5; E_value=0.018; Accession=PF07724.6; Description=ATPase family associated with various
  Pfam annotation: Domain name=AAA_3; Domain location=302-438; Score= -8.2; E_value=0.003; Accession=PF07726.3; Description=ATPase family associated with various
  Pfam annotation: Domain name=AAA_5; Domain location=301-444; Score =4.1; E_value=0.00043; Accession=PF07728.6; Description=ATPase family associated with various
  Pfam annotation: Domain name=LON; Domain location=1-149; Score=35.5; E_value=2.1e-07; Accession=PF02190.8; Description=ATP-dependent protease La (LON) domain
  Pfam annotation: Domain name=Lon_C; Domain location=609-816; Score =357.0; E_value=3.6e-104; Accession=PF05362.5; Description=Lon protease (S16) C-terminal proteolytic domain
  Pfam module annotation: Pfam domain module=AAA::AAA_2::AAA_3::AAA _5::LON::Lon_C; Domain location=301-496::299-439::302-438::301-444::1- 149::609-816
SEKSIDDLKGKDLLKRLHEVGTLAQITSIQGDQVVLLGHRRLRITEMVEEDPLTVKVDHLKENPYNKDDDVIKATSFEVISTLREVLRASSLWKDHVQTYTQHIGDFNYPRLADFGAAISGANKLLCQEVLEELDVYKRLKLTLELVKKEMEISKLQQSIAKAIEEKISGDQRRYLLNEQLKAIKKELGLETDDKTALSAKFRERIESKKDKCPPHVLQVIEEELTKLQLLEASSSEFNVTRNYLDWLTVLPWGNYSDENFDVHHAQXILDEDHYGLSDVKERILEFIAVGKLRGTSQGKIICLSGPPGVGKTSIGRSIARALNRQFYRFSVGGLADVAEIKGHRRTYVGAMPGKMVQCLKSVGTANPLVLIDEIDKLGRGHSGDPASALLELLDPEQNVNFLDHYLDVPIDLSKVLFVCTANVIEMIPNPLLDRMEIIAIAGYITDEKMHIARDYLEKNTREACGIKPEQVEVTDAALLALIENYCREAGVRNLQKQIEKIYRKIALQLVRQGVSNEPDQEALIVTANEEPSSGDGAIAKDEILKDSAVEANEANLAKEAVLHEVHTTEAVLHEVHTTEAPKEDSVSEGKDTDGAKEDGADKAIEKVVVDSSNLGDFVGKPVFQAERIYEQTPVGVVMGLAWTAMGGSTLYVETTKVEEGEGKGALVLTGQLGDVMKESAQIAXTVGRAILLEKEPDNQFFAKSKVHLHVPAGATPKDGPSAGCTMITSMLSLAMGKPVKKDLAMTGEVTLTGRILPIGGVKEKTIAARRSAIKTLIFPAANKRDFDELASNVKEGLEVHFVDTYGEIYDLAFQSDARTETS

SEQ ID NO: 90735 - protein, 135 aa, Setaria italica
  misc_feature (116)..(116): Xaa can be any naturally occurring amino acid
  Transcript Sequence Number=SeqID_24761
TTAVLTGPIGGFSGKLNLSIPWNKGCLNFEKIDADVSVDSLELRLQISSIRWIMNVWDSLQRKPVDEQNSAHNAADISISSFRSTLCSPASSSLKSGSDSVIGTSECLAHSTFSQXRQEKIQDSFLTRAYVITDW

SEQ ID NO: 90736 - protein, 72 aa, Setaria italica
  misc_feature (64)..(64): Xaa can be any naturally occurring amino acid
  Transcript Sequence Number=SeqID_24762
  Gene Ontology: Mol. function=protein disulfide oxidoreductase activity; Biological process=intracellular signaling cascade
  Homolog annotation: Hit_ID=B9RY43; Match level="QueryCoverage=98%, HitCoverage=10%, E-value=1e-20, Identity=67%"; Hit description =Electron transporter, putative
ILEAYASDDRRHLDYSRIAASEEFRRYANLVQELQRADMTALPAEERLPFFLNLHNAMAIHAVXRVGQPRGR

SEQ ID NO: 90737 - protein, 109 aa, Setaria italica
  Transcript Sequence Number=SeqID_24763
  Subcellular localization annotation: CTP_CleavageSite=33; ConfidenceScore=5.67e-01
GGRAVRSRAGPAPPRPDPTTRRRLPLSSLRSAAAAMDPSRPPPPQRNPNPSLTTSMPPPNPTSASMPPPPPPNPSPPPPRPEAESQAASSAVEVVGRAGPTPSSSMPPP

SEQ ID NO: 90738 - protein, 88 aa, Setaria italica
  Transcript Sequence Number=SeqID_24764
TAAPPRSGATPPISSRARRRFHAPADPWEMEPSSEDYTCVISRGPNPRTVHIFGDRVVEAGAAEASAAESSPRPINLPARGDRGFLSL

SEQ ID NO: 90739 - protein, 253 aa, Setaria italica
  Transcript Sequence Number=SeqID_24765
MFLRSKIQEMILRRRSRSMNSGAAAQRGHASDQLASSSTVPCDGDSAGAGGRKSATARALFASPRLLHSSSLPTGTVFAKGPVPDAESETAFSMSPTSVLDAAASFRSGTDAAGSSRRRPWRDNALHGLADALDCGDQQPEGIVLAATSPSLLVRSCSLDRRVEFGVKNKSSWLPLRACSGREATPPAPADPWEMEPSSEDYTCVISRGPNPRTVHIFGDRVVEAGAAEASAAESSPRPINLPARGDRGFLSL

SEQ ID NO: 90740 - protein, 67 aa, Setaria italica
  Transcript Sequence Number=SeqID_24766
RGQRTCRTAEALTQAPRARARAAGAPIRSPRAHRVRAGDQESEHGVHADERNSTTTRFFTAALEGRG

SEQ ID NO: 90741 - protein, 131 aa, Setaria italica
  Transcript Sequence Number=SeqID_24767
  Gene Ontology: Mol. function=protein serine/threonine kinase activity; Biological process=protein amino acid phosphorylation
  Homolog annotation: Hit_ID=B9T3P6; Match level="QueryCoverage=74%, HitCoverage=25%, E-value=1e-14, Identity=42%"; Hit description =Protein kinase atn1, putative
LQSTGVNNTVSCSYEQQKRPTLPEDTPQELVFIVQSCWVEDPSMRPSFSQIIRMLETFLMTIPPPPPSEPNEDEESEETRSSLSSRSSSGSSLVSRATSKLSVVRHLFASKRQAMEGVMRRPRCFLGAVRC

SEQ ID NO: 90742 - protein, 64 aa, Setaria italica
  misc_feature (17)..(17): Xaa can be any naturally occurring amino acid
  Transcript Sequence Number=SeqID_24768
  Gene Ontology: Mol. function=protein serine/threonine kinase activity; Cellular component=plasma membrane; Biological process =protein amino acid phosphorylation
  Homolog annotation: Hit_ID=Q8L6Y9; Match level="QueryCoverage=68%, HitCoverage=13%, E-value=9e-18, Identity=93%"; Hit description =Protein kinase ATN1-like protein
GEKKHYTNKVDVYSFGXVLWELLTNRMPFEGMSNLQAAYAAAFQVSMKLLLPILAQVSNASFCG

SEQ ID NO: 90743 - protein, 424 aa, Setaria italica
  Transcript Sequence Number=SeqID_24769
  Gene Ontology: Mol. function=protein serine/threonine kinase activity; Cellular component=plasma membrane; Biological process =protein amino acid phosphorylation
  Homolog annotation: Hit_ID=B9T3P6; Match level="QueryCoverage=78%, HitCoverage=89%, E-value=1e-128, Identity=66%"; Hit description =Protein kinase atn1, putative
  Pfam annotation: Domain name=Pkinase; Domain location=100-361; Score =206.9; E_value=5.4e-59; Accession=PF00069.17; Description=Protein kinase domain
  Pfam annotation: Domain name=Pkinase_Tyr; Domain location=100-361; Score=218.5; E_value=1.7e-62; Accession=PF07714.9; Description =Protein tyrosine kinase
  Pfam module annotation: Pfam domain module=Pkinase::Pkinase_Tyr; Domain location=100-361::100-361
  Subcellular localization annotation: CTP_CleavageSite=16; ConfidenceScore=5.31e-01
MPRLSCKFADPDNVVSSSAAAAAAARRVRPDTMSCGSDGCRDGGSSGSDEFRRPRPSKVAADDSVAPARCSDAAAPARSSDAMAPASWIERKLLVDPKMLFVGDKIGEGAHGKVYKGKYGDQIVAIKVLNRGSTPEEKATLEARFIREVNMMCKVKHENLVKFIGACKEPLMVIVSELLPGMSLKNYLNSIRPSQLDTHTAIGYALDIAHAMDCLHANGIIHRDLKPDNLLLTANRKKLKLTDFGLAREETVTEMMTAETGTYRWMAPELYSTVTLRRGEKKHYTNKVDVYSFGIVLWELLTNRMPFEGMSNLQAAYAAAFQQKRPTLPEDTPQELVFIVQSCWVEDPSMRPSFSQIIRMLETFLMTIPPPPPSEPNEDEESEETRSSLSSRSSSGSSLVSRATSKLSVVRHLFASKKAGNGKA

SEQ ID NO: 90744 - protein, 194 aa, Setaria italica
  Transcript Sequence Number=SeqID_24770
  Pfam annotation: Domain name=Pollen_Ole_e_I; Domain location=59-186; Score=-38.9; E_value=0.082; Accession=PF01190.9; Description=Pollen proteins Ole e I family
MLLLRRRAAAALLLVFAAAAAMEEASSLPVVEPMELYFSPAELARIAGYGEEPVSSVSVSGHVACELCLRPGSDLLAFELPGAKVAVLCETECPNDQAANSALATTDEFGNFTIDLPSQLHATANLERACTVKVLQLPADSSCRLRHQPSTTYGLMLASQEDGVRAYTTGVIRLQNNDTPHGKCVSVEERTGRR

SEQ ID NO: 90745 - protein, 62 aa, Setaria italica
  Transcript Sequence Number=SeqID_24771
MASNSMLQNIFKLFLDYTYAVSYLKINPIQILQTYEINKEILKTLLHQRYNVINHPIKFQLK

SEQ ID NO: 90746 - protein, 88 aa, Setaria italica
  Transcript Sequence Number=SeqID_24772
  Gene Ontology: Mol. function=transcription factor activity; Cellular component=nucleus
  Homolog annotation: Hit_ID=Q6ZD37; Match level="QueryCoverage=100%, HitCoverage=19%, E-value=8e-46, Identity=94%"; Hit description=AP2 domain-containing protein AP29-like
RIDCYGGLNQLRRDLCDGIGVARLLNATMVLPKFEVAAYWNESSGFADVFDVDYFIEQTRGYVEIVKEIPAEIASKEPFKVDCSKRKG

SEQ ID NO: 90747 - protein, 53 aa, Setaria italica
  misc_feature (46)..(46): Xaa can be any naturally occurring amino acid
  Transcript Sequence Number=SeqID_24773
MASTSSSRYAKHRRIGEDEETEEDEEEAEEELERFDDFTIASSWEXFLSEIEA

SEQ ID NO: 90748 - protein, 77 aa, Setaria italica
  Transcript Sequence Number=SeqID_24774
  Gene Ontology: Mol. function=nucleic acid binding; Cellular component= nucleus; Biological process=DNA replication
  Subcellular localization annotation: CTP_CleavageSite=48; ConfidenceScore=5.77e-01
KPTLPPESGVSNSNSMRADQFNGTPGSTAGSTLSTVARSTNNALVIQRSMAGNSSNMIPRPSDNAQVFQPTVQPSYR

SEQ ID NO: 90749 - protein, 69 aa, Setaria italica
  Transcript Sequence Number=SeqID_24775
QTDQRQKRTAGSVKKCTERWCIGWTAVGFQGRRHMASNHACLEVIDKGNYPLGACNLVYLRSCSYLVLT

SEQ ID NO: 90750 - protein, 306 aa, Setaria italica
  Transcript Sequence Number=SeqID_24776
  Gene Ontology: Mol. function=serine-type endopeptidase activity; Biological process=negative regulation of catalytic activity
  Homolog annotation: Hit_ID=Q5ZBS1; Match level="QueryCoverage=68%, HitCoverage=68%, E-value=2e-83, Identity=75%"; Hit description =Subtilisin-like serine proteinase-like protein
  Pfam annotation: Domain name=Inhibitor_I9; Domain location=33-113; Score=84.5; E_value=3.9e-22; Accession=PF05922.8; Description =Peptidase inhibitor I9
METPSSYHRRLAPLLLLLCFCTLQVEVHASRKKLYVAYLGERKHGHPDHVVASHHETLSSVLESKQDILDSIIYSYKHGFSGFAAMLTKEQAQQLADLPEVISVQPSRRYQTTTTRSWDFLGLGLNDKVPSDLLHRSRYGEDTIIGIIDTGIWPESRSFSDDGYEPVPSRWKGVCQVGVGWDRSNCSRKIIGARFYHAGVAEEELKSDYLSARDANGHGTHTASTAAGSVVEAASFHGLASGTARGGAPRARIAVYKSVWGSGRGAGSGNTATVLAAIDDAIHDGVDVLSLSLVVEENSFGALHAV

SEQ ID NO: 90751 - protein, 181 aa, Setaria italica
  Transcript Sequence Number=SeqID_24777
  Gene Ontology: Mol. function=sequence-specific DNA binding; Cellular component=intracellular; Biological process=regulation of transcription, DNA-dependent
  Homolog annotation: Hit_ID=B6SI55; Match level="QueryCoverage=92%, HitCoverage=65%, E-value=7e-81, Identity=88%"; Hit description =Repressor protein
  Pfam annotation: Domain name=CBFD_NFYB_HMF; Domain location=21-85; Score=71.9; E_value=2.3e-18; Accession=PF00808.15; Description =Histone-like transcription factor (CBFNF-Y) and archaeal histone
  Pfam annotation: Domain name=Histone; Domain location=15-88; Score =1.4; E_value=0.065; Accession=PF00125.16; Description=Core histone H2AH2BH3H4
  Pfam module annotation: Pfam domain module=CBFD_NFYB_HMF::Histone; Domain location=21-85::15-88
MALFAVLRPSPAAKMRKKLGTRFPAARIKKIMQADEDFGKIALAVPVLVSRALELFLQDLIDRTYEITLQSGAKTLNSFYLKQCVKRYSSFDFLTEVVNKVPDLGGADSCGDERGLPRRRKSNGSDPENDESRSSKMAIRSVNISPRGRGRGRGRGRGRPPTKRKEVGYVQFEDESSMFAE

SEQ ID NO: 90752 - protein, 60 aa, Setaria italica
  misc_feature (60)..(60): Xaa can be any naturally occurring amino acid
  Transcript Sequence Number=SeqID_24778
  Subcellular localization annotation: CTP_CleavageSite=23; ConfidenceScore=5.04e-01
RVQITPNSPVSQSPLASRTDSVGCETPANLSILTPPTEALPPSPTHHEQRTSRRNSQPPX

SEQ ID NO: 90753 - protein, 203 aa, Setaria italica
  Transcript Sequence Number=SeqID_24779
  Homolog annotation: Hit_ID=B6SI55; Match level="QueryCoverage=93%, HitCoverage=73%, E-value=5e-71, Identity=75%"; Hit description =Repressor protein
LVPNGSIFIFFIFRKQCVKRYSSFDFLTEVVNKVPDLGGADSCGDERGLPRRRKSNGSDPENDESRSSKMAIRSVNISPRGRGRGRGRGRGRPPTKRKEVGYVQFEDESSMFAEQGEPLPGEETVPESNHNNENIPPSAQPPQEAPLPAAVPGTSSKVEEANTDHQSDWPMPDAAIGSIGVGPSGFGHLTVQVDEDEDYDNED

SEQ ID NO: 90754 - protein, 197 aa, Setaria italica
  Transcript Sequence Number=SeqID_24780
  Gene Ontology: Mol. function=sequence-specific DNA binding; Cellular component=intracellular; Biological process=regulation of transcription, DNA-dependent
  Homolog annotation: Hit_ID=B6SI55; Match level="QueryCoverage=91%, HitCoverage=70%, E-value=5e-88, Identity=89%"; Hit description =Repressor protein
  Pfam annotation: Domain name=CBFD_NFYB_HMF; Domain location=7-71; Score=85.3; E_value=2.2e-22; Accession=PF00808.15; Description =Histone-like transcription factor (CBFNF-Y) and archaeal histone
  Pfam annotation: Domain name=Histone; Domain location=1-74; Score =11.4; E_value=0.0067; Accession=PF00125.16; Description=Core histone H2AH2BH3H4
  Pfam module annotation: Pfam domain module=CBFD_NFYB_HMF::Histone; Domain location=7-71::1-74
MRKKLGTRFPAARIKKIMQADEDVGKIALAVPVLVSRALELFLQDLIDRTYEITLQSGAKTLNSFHLKQCVKRYSSFDFLTEVVNKVPDLGGADSCGDERGLPRRRKSNGSDPENDESRSSKMAIRSVNISPRGRGRGRGRGRGRPPTKRKEVGYVQFEDESSMFAEQGEPLPGEETVPESNHNNENKRRNNIPQSA

SEQ ID NO: 90755 - protein, 61 aa, Setaria italica
  Transcript Sequence Number=SeqID_24781
  Subcellular localization annotation: CTP_CleavageSite=30; ConfidenceScore=5.30e-01
PPRASPTSPTPPPPLRQHPTTDWPMRVPIDASLRAQLVVILLKPATLFASVFLQSSLALAL

SEQ ID NO: 90756 - protein, 139 aa, Setaria italica
  misc_feature (137)..(137): Xaa can be any naturally occurring amino acid
  Transcript Sequence Number=SeqID_24782
  Gene Ontology: Mol. function=binding; Cellular component=nucleus
  Homolog annotation: Hit_ID=Q5N857; Match level="QueryCoverage=97%, HitCoverage=13%, E-value=2e-70, Identity=91%"; Hit description =Cyclin-like
MGVMSRRVLPACSSLCYFCPSLRARSRQPVKRYKKIISDIYQLPPDGEPNDRRIGKLCDYVSRNPTRIPKITEYLEQRFYKDLRHENFTLAKVVPCIYRKLLCSCKEHRPLLATSSLSTIRTLLDQKAHDDLRVLGXYG

SEQ ID NO: 90757 - protein, 138 aa, Setaria italica
  misc_feature (15)..(15): Xaa can be any naturally occurring amino acid
  Transcript Sequence Number=SeqID_24783
  Gene Ontology: Mol. function=nucleoside-triphosphatase activity; Cellular component=intrinsic to membrane; Biological process=defense response
  Homolog annotation: Hit_ID=Q2L3S2; Match level="QueryCoverage=97%, HitCoverage=13%, E-value=2e-44, Identity=67%"; Hit description =Putative ATPase
TNNKEGRKKDYPPEXETEVLRKFDERLGRLSFGLWVVGSLLSELMIAPSTLFEAVERISLSENLFPIGANDDGFCRNNSFLIKVLVFCFALMDRAKGGSLTSRMVIAGSWLAPAPVSSTLLAATASKLPMKGSGMHLL

SEQ ID NO: 90758 - protein, 73 aa, Setaria italica
  Transcript Sequence Number=SeqID_24784
DHKAWQAKQQFEHSFFRRSQNTTWTCNRKAKDHLTIRQFTIDIGYLDWMLTGCANGCGITNVFMFLHVALYFG

SEQ ID NO: 90759 - protein, 105 aa, Setaria italica
  Transcript Sequence Number=SeqID_24785
AAIAAEFSQLMYIKANTDVMPYVSLVMLGVQAVGYSVPLITGAEALFARIAAGNDGGAAVPPSYEVDKSALYWIIDCVVKILILAAFLLTLRLAQKVWRSRIRLL

SEQ ID NO: 90760 - protein, 77 aa, Setaria italica
  Transcript Sequence Number=SeqID_24786
  Gene Ontology: Mol. function=metal ion binding
  Homolog annotation: Hit_ID=B9S3V8; Match level="QueryCoverage=68%, HitCoverage=19%, E-value=2e-12, Identity=59%"; Hit description=Zinc finger protein, putative
  Pfam annotation: Domain name=zf-CHY; Domain location=36-76; Score =8.2; E_value=0.00015; Accession=PF05495.4; Description=CHY zinc finger
MGGAHFPGDNDAGEVDAACCDGEVDLRDVGKMEHGCEHYRRRCKIVAPCCKQVFPCRHCHNEATVSGDRHTVCRQDI

SEQ ID NO: 90761 - protein, 87 aa, Setaria italica
  Transcript Sequence Number=SeqID_24787
  Gene Ontology: Mol. function=metal ion binding
  Homolog annotation: Hit_ID=B9RT06; Match level="QueryCoverage=74%, HitCoverage=24%, E-value=1e-19, Identity=63%"; Hit description=Zinc finger protein, putative
  Pfam annotation: Domain name=zf-C3HC4; Domain location=8-49; Score =17.2; E_value=0.0011; Accession=PF00097.17; Description=Zinc finger, C3HC4 type (RING finger)
CPQLRTRVICYEYLFDSLQGTRVLNCGHTMHMECFTDMVKHNKYTCPICSKTALDMSHHWEMLDQEIEATIMPPVMACKLPESNKQW

SEQ ID NO: 90762 - protein, 107 aa, Setaria italica
  Transcript Sequence Number=SeqID_24788
  Gene Ontology: Mol. function=metal ion binding
  Homolog annotation: Hit_ID=B9S3V8; Match level="QueryCoverage=88%, HitCoverage=31%, E-value=6e-33, Identity=64%"; Hit description=Zinc finger protein, putative
  Pfam annotation: Domain name=zf-C3HC4; Domain location=41-83; Score =29.4; E_value=1.4e-05; Accession=PF00097.17; Description=Zinc finger, C3HC4 type (RING finger)
  Pfam annotation: Domain name=zf-MIZ; Domain location=37-86; Score= -8.8; E_value=0.02; Accession=PF02891.12; Description=MIZ zinc finger
  Pfam module annotation: Pfam domain module=zf-C3HC4::zf-MIZ; Domain location=41-83::37-86
KFLGLLFSSENFFHCVKCGSCYSVALRDNHQCVENSMRQNCPICYEYLFDSLQGTRVLNCGHTMHMECFTDMVKHNKYTCPICSKTALDMSHHWEMLDQEVLCFFPY

SEQ ID NO: 90763 - protein, 117 aa, Setaria italica
  Transcript Sequence Number=SeqID_24789
  Gene Ontology: Mol. function=metal ion binding; Cellular component =cytoplasm
  Homolog annotation: Hit_ID=B9RT06; Match level="QueryCoverage=83%, HitCoverage=36%, E-value=6e-30, Identity=59%"; Hit description=Zinc finger protein, putative
  Pfam annotation: Domain name=zf-C3HC4; Domain location=1-32; Score =4.0; E_value=0.036; Accession=PF00097.17; Description=Zinc finger, C3HC4 type (RING finger)
TGTRVLNCGHTMHMECFTDMVKHNNLYTCPICSKTALDMSHHWEMLDQEIEATIMPPVYRYKIWVLCNDCNKVSEVNFHVIGHKCSHCNSYNTRSTSRPVDSSGNSSPTTDSSDNNL

SEQ ID NO: 90764 - protein, 150 aa, Setaria italica
  Transcript Sequence Number=SeqID_24790
  Gene Ontology: Mol. function=metal ion binding
  Homolog annotation: Hit_ID=B9RT06; Match level="QueryCoverage=86%, HitCoverage=48%, E-value=1e-45, Identity=62%"; Hit description=Zinc finger protein, putative
  Pfam annotation: Domain name=zf-C3HC4; Domain location=36-78; Score =29.4; E_value=1.4e-05; Accession=PF00097.17; Description=Zinc finger, C3HC4 type (RING finger)
  Pfam annotation: Domain name=zf-MIZ; Domain location=32-81; Score= -8.8; E_value=0.02; Accession=PF02891.12; Description=MIZ zinc finger
  Pfam module annotation: Pfam domain module=zf-C3HC4::zf-MIZ; Domain location=36-78::32-81
NIPCASCVHCVKCGSCYSVALRDNHQCVENSMRQNCPICYEYLFDSLQGTRVLNCGHTMHMECFTDMVKHNKYTCPICSKTALDMSHHWEMLDQEIEATIMPPVYRYKIWVLCNDCNKVSEVNFHVIGHKCSQLANYVTNNPTTNNTTTL

SEQ ID NO: 90765 - protein, 294 aa, Setaria italica
  Transcript Sequence Number=SeqID_24791
  Gene Ontology: Mol. function=metal ion binding; Cellular component =cytoplasm
  Homolog annotation: Hit_ID=B9RT06; Match level="QueryCoverage=85%, HitCoverage=94%, E-value=1e-99, Identity=64%"; Hit description=Zinc finger protein, putative
  Pfam annotation: Domain name=zf-C3HC4; Domain location=167-209; Score= 29.4; E_value=1.4e-05; Accession=PF00097.17; Description=Zinc finger, C3HC4 type (RING finger)
  Pfam annotation: Domain name=zf-CHY; Domain location=36-114; Score =116.5; E_value=8.6e-32; Accession=PF05495.4; Description=CHY zinc finger
  Pfam annotation: Domain name=zf-MIZ; Domain location=163-212; Score= -8.8; E_value=0.02; Accession=PF02891.12; Description=MIZ zinc finger
  Pfam module annotation: Pfam domain module=zf-C3HC4::zf-CHY::zf-MIZ; Domain location=167-209::36-114::163-212
MGGAHFPGDNDAGEVDAACCDGEVDLRDVGKMEHGCEHYRRRCKIVAPCCKQVFPCRHCHNEATVSGDRHTVCRQDIEKVVCLLCDTEQPVSQACVSCGANMGEYFCDICKFYDDDTEKGQYHCNDCGICRVGGKENFFHCVKCGSCYSVALRDNHQCVENSMRQNCPICYEYLFDSLQGTRVLNCGHTMHMECFTDMVKHNKYTCPICSKTALDMSHHWEMLDQEIEATIMPPVYRYKIWVLCNDCNKVSEVNFHVIGHKCSHCNSYNTRSTSRPVDSSGNSSPTTDSSDNNL

SEQ ID NO: 90766 - protein, 82 aa, Setaria italica
  Transcript Sequence Number=SeqID_24792
  Subcellular localization annotation: CTP_CleavageSite=48; ConfidenceScore=5.16e-01
RRGKRRRLQPASRRPSLSCLSISALMRPRAPRGGAQRGGLIGGQRRPREMNKRGRQGRGRGKVFVANSTNSSILISIQKDQT

SEQ ID NO: 90767 - protein, 84 aa, Setaria italica
  Transcript Sequence Number=SeqID_24793
  Gene Ontology: Mol. function=electron carrier activity; Cellular component=extracellular region; Biological process=response to oxidative stress
  Homolog annotation: Hit_ID=B6TMI9; Match level="QueryCoverage=58%, HitCoverage=14%, E-value=3e-13, Identity=67%"; Hit description =Peroxidase 1
MAAAATVRTRSLAGGVVPVALLLLVLCTGSSSAAGQLDVGYYNKTCPAAEEIVRNETAAAVTASPDLAAALLRLHYHDCFVQGC

SEQ ID NO: 90768 - protein, 48 aa, Setaria italica
  Transcript Sequence Number=SeqID_24794
MAATLKLRILAVVAVAASSLLATASAAEGPAPAPTSGASMAAPAVAAA

SEQ ID NO: 90769 - protein, 97 aa, Setaria italica
  misc_feature (24)..(24): Xaa can be any naturally occurring amino acid
  misc_feature (38)..(38): Xaa can be any naturally occurring amino acid
  misc_feature (63)..(63): Xaa can be any naturally occurring amino acid
  Transcript Sequence Number=SeqID_24795
  Gene Ontology: Mol. function=protein serine/threonine kinase activity; Cellular component=plasma membrane; Biological process =protein amino acid phosphorylation
  Homolog annotation: Hit_ID=B6SWS1; Match level="QueryCoverage=91%, HitCoverage=14%, E-value=2e-20, Identity=59%"; Hit description =BRASSINOSTEROID INSENSITIVE 1-associated receptor kinase 1
KSLLKDSHGVPKNWDMDSVGPCAXSLVSCSPENLVIDXTALETPSKNVSGLLSPSFGGCSVLXTDNKLTGQIPREIGKVAKLRTLDLSSTWTRCTIA

SEQ ID NO: 90770 - protein, 97 aa, Setaria italica
  Transcript Sequence Number=SeqID_24796
MGKIMAMAAAIALLLLPLGQAEERPTAAHPHGLPFESPLALSPAAYDFFHPSVRARRAHGVAPAPALAPRGQRQQQQLRESAVRGATASVARADQGG

SEQ ID NO: 90771 - protein, 92 aa, Setaria italica
  Transcript Sequence Number=SeqID_24797
  Gene Ontology: Mol. function=beta-N-acetylhexosaminidase activity; Biological process=carbohydrate metabolic process
  Homolog annotation: Hit_ID=B6ST04; Match level="QueryCoverage=72%, HitCoverage=12%, E-value=4e-26, Identity=88%"; Hit description=Beta -hexosaminidase beta chain
MPPNLPAYLLLALLLGGTAAARRHPPPSNATSAGEPVYLWPLPKSVASGSRTLTVDPDLALDPQGPGGASPAVAEAFQRYRGLVFAPWAHAA

SEQ ID NO: 90772 - protein, 37 aa, Setaria italica
  Transcript Sequence Number=SeqID_24798
CNLLNFYPFPQLIKHSVSNRLIKSSPGILFSMHLCKA

SEQ ID NO: 90773 - protein, 62 aa, Setaria italica
  Transcript Sequence Number=SeqID_24799
AFSVLFFVLNFNQYIHWDLVICNTCSGSLCVSFNFTSSNIKKHERACLVEVKSMCLYLCVNM

SEQ ID NO: 90774 - protein, 234 aa, Setaria italica
  misc_feature (186)..(186): Xaa can be any naturally occurring amino acid
  Transcript Sequence Number=SeqID_24800
  Gene Ontology: Mol. function=electron carrier activity; Cellular component=transcription factor complex; Biological process=chromatin modification
  Homolog annotation: Hit_ID=B6SXR1; Match level="QueryCoverage=100%, HitCoverage=28%, E-value=1e-100, Identity=77%"; Hit description =Flowering locus D
YSHVAVGASGDDYDILAESVGDGRLFFAGEATTRRYPATMHGAFISGLREAANITLHANARVAKTKVDKSSSTNTQACATILTDLFRQPDLEFGSFSIIFGGKASDPKSPAILKVEFGGQRKKNAIEGAKAEQNHSNKLLFQQLQSHFNQQQQLYVYTLLSRQQAMELREVRGGDDMRLHYLCEKXGVKLVGRKGLGPGSDAVIASIKAERNRSRAKPGPSKLKKSMKPNVTAS

SEQ ID NO: 90775 - protein, 135 aa, Setaria italica
  Transcript Sequence Number=SeqID_24801
  Gene Ontology: Mol. function=electron carrier activity; Biological process=oxidation reduction
  Homolog annotation: Hit_ID=B6U7K2; Match level="QueryCoverage=82%, HitCoverage=21%, E-value=6e-53, Identity=87%"; Hit description =Cytochrome P450 CYP721B4
MAALFSALLLAALLAAAQYVLRLLHSFLWVPLRLERRFRRQGIRWPPRSLLSGNAADYRNLMAAARSAPLASFRHDGVVSRATPQYSVWPARYGRPFVYWFGPRPRLVISDPELVKAALTDSTGPFDKAGSGGNN

SEQ ID NO: 90776 - protein, 137 aa, Setaria italica
  Transcript Sequence Number=SeqID_24802
  Gene Ontology: Mol. function=transcription factor activity; Cellular component=nucleus
ASEHAISAGSSTDATVVKIELSESDSPLPMSSAWLDAFELNQLDGSKYLEAGGKETTEETDHENGVTADMVFGNGEVWLADEFAYYEPYPNFMQLPYLEGNSYENIDALFNGEVAQDGVNIGGLWSFDDVPMDSGVY

SEQ ID NO: 90777 - protein, 538 aa, Setaria italica
  Transcript Sequence Number=SeqID_24803
  Gene Ontology: Mol. function=catalytic activity; Cellular component =cytoplasm; Biological process=metabolic process
  Homolog annotation: Hit_ID=B8XVQ4; Match level="QueryCoverage=100%, HitCoverage=65%, E-value=0.0, Identity=74%"; Hit description =Autophagy-related 7
  Pfam annotation: Domain name=ThiF; Domain location=200-351; Score =97.9; E_value=3.6e-26; Accession=PF00899.13; Description=ThiF family
CASDNKIAITAVLGCDSYIVMRHGAGPGTSGGTDEVAAQIENLSTEDALSHQRLGCCFCNDAASLFNTIPNGTLPGLTSVASGKAVELFARMLHHPDELHAPGDIAGMETEHQLGLLPHQLQGSLPKCVLSMELGNSSGNCTACSIAVLSEYRRRGLDFVMQAINYPTYLKDLAGISNLKKPDPCPKMLPSISVNSDKISDVRCLLLGAGTLGCDVARILMDSGVRKLTVVDSGRVVVSNLARQSLYTCDDRGAPKATAILRHLVERCPSVDAQGIQMEIPMPGHPVSPSEAAGVLQDCKRLKELVASHDAIFLLTDTRESRWLPTLLCTNENKIAITAALGYDSYLVMRHGAGPGISYEASNVTTVMDKLSTKDSLGRERLGCYFCNDVVAPVDSVSNRTLDQQCTVTRPGLACIASGRAADLFTRMLHHPDGIHAPGEIAGASSGHPLGLLPHQIRGSLSQYNLLTLLGYSSSNCTACSNVVLSEYRSRGMDFVMQVINEPTYLEDLTGLTDLMKSAAYTEVEWVDEIDEDDFAEI

SEQ ID NO: 90778 - protein, 125 aa, Setaria italica
  misc_feature (112)..(112): Xaa can be any naturally occurring amino acid
  Transcript Sequence Number=SeqID_24804
  Gene Ontology: Mol. function=hydrolase activity; Cellular component =nucleus; Biological process=metabolic process
  Homolog annotation: Hit_ID=B6TKK2; Match level="QueryCoverage=83%, HitCoverage=29%, E-value=6e-49, Identity=91%"; Hit description =Gibberellin receptor GID1L2
MEAGNQGAEANRPTRPALPLWVRIQLAGLTAAIDAVERSDGTVNRCLYGAIDRLLSARANPRPDKSGVRSYDVTMDASRGIWARVFAPVSADRPLPVVVYYHGGGFALFSPXIGPFNGVCRRLCA

SEQ ID NO: 90779 - protein, 85 aa, Setaria italica
  Transcript Sequence Number=SeqID_24805
  Subcellular localization annotation: CTP_CleavageSite=33; ConfidenceScore=5.51e-01
MELSTPIGSSLATPAAMALVRPNPKITNHTCVRGMRLQCQFSHRLRSVASLMVLNTQPSQGINRKDCGLLQAASSVQRTKNLTQS

SEQ ID NO: 90780 - protein, 101 aa, Setaria italica
  Transcript Sequence Number=SeqID_24806
VLWNFLCKFSCRINRKDCGLLQAASSVQRTENLTQSSVSFKDFCVSVCTEEGGLIKIKVNVSGTMTDSIFEKVLTKKVAAAQPLPGFRQMKGGYYSLLAFY

SEQ ID NO: 90781 - protein, 78 aa, Setaria italica
  Transcript Sequence Number=SeqID_24807
RTRVSRPLVVHSPSHGMSTCEPSKKPHFIDGFYDYFSSELGHARGHASSYSYVGPRHGSHGACVGSSLKTPGDHCSFC

SEQ ID NO: 90782 - protein, 131 aa, Setaria italica
  Transcript Sequence Number=SeqID_24808
  Gene Ontology: Mol. function=carbohydrate binding; Biological process= carbohydrate metabolic process
  Homolog annotation: Hit_ID=B9SMY4; Match level="QueryCoverage=96%, HitCoverage=19%, E-value=3e-41, Identity=63%"; Hit description=Lyase, putative
  Subcellular localization annotation: CTP_CleavageSite=40; ConfidenceScore=5.02e-01
TDWFYAQVNRKVDDNTYQPTTLQIKFTLDSVSPGSTYKFRVALASSARAELQVFFNDQNRGVPHFATGLIGRDNAIARHGIHGLYWLFNINVDSAWLVQGMNTIYLKQPRNQSPFQGLMYDYLRLEGPCGC

SEQ ID NO: 90783 - protein, 478 aa, Setaria italica
  Transcript Sequence Number=SeqID_24809
  Gene Ontology: Mol. function=cysteine-type peptidase activity; Cellular component=soluble fraction; Biological process=ubiquitin -dependent protein catabolic process
  Homolog annotation: Hit_ID=Q5JK78; Match level="QueryCoverage=98%, HitCoverage=99%, E-value=0.0, Identity=88%"; Hit description =Ubiquitin carboxyl-terminal hydrolase
  Pfam annotation: Domain name=UCH; Domain location=101-469; Score =256.4; E_value=6.9e-74; Accession=PF00443.21; Description=Ubiquitin carboxyl-terminal hydrolase
  Pfam annotation: Domain name=ubiquitin; Domain location=5-75; Score =22.1; E_value=0.0018; Accession=PF00240.15; Description=Ubiquitin family
  Pfam module annotation: Pfam domain module=UCH::ubiquitin; Domain location=101-469::5-75
MPTVSVKWQKEVFPGIEIDTTQPPIVFKSQLYTLTGVPPERQKIMVKGGILKDDADWSTLGVKEGQKLMMIGTADEIVKAPEKGPVFVEDLPEEEQVVALGHSAGLYNLGNTCYMNSTLQCLHSVPELKSALLSYSDTARGNGVDQASHNLTLATRNTFGELDQSVRPVAPLQFLQTLRKKYPQFAQQHNNVYMQQDAEECWTQLVYTLSQTLTSDASESAALSMKQLFGIDLVSRVHCAESGEESMETESVYSMKCHISQDVNHLHEGLKHGLKTELEKVSPALGRTAIYTRESRINELPRYLTVQFVRFFWKRESNQKAKILRKVDYPLELDVYEFCSDELKQKLQAPRQMLRDAENAKFGLKTQGKASSSKENEGSSSSAGDSSSMDIDKADPSVPKKQLTGVYDLVAVLTHKGRSADSGHYVGWVKQDNGKWIEFDDDNPNIRKEEDILKLSGGGDWHMAYICLYKARVAESKS

SEQ ID NO: 90784 - protein, 81 aa, Setaria italica
  Transcript Sequence Number=SeqID_24810
ERKEHTTSPVKDQNPSTKTHTHTLMKNQPSLGRRGQQPNKEFLKIGCPIHTPKATFISYCLEQYMHGFEFSKHMICTAPFG

SEQ ID NO: 90785 - protein, 69 aa, Setaria italica
  Transcript Sequence Number=SeqID_24811
  Gene Ontology: Mol. function=transposase activity
  Homolog annotation: Hit_ID=Q2R911; Match level="QueryCoverage=91%, HitCoverage=68%, E-value=1e-10, Identity=53%"; Hit description =Retrotransposon protein, putative, Ty1-copia subclass
CLALHNFIRESNLCDKKFEKCNVDEEYLIQYISGTRQTQGDESDDVENKDTMNTICTRIADALVSVRGG

SEQ ID NO: 90786 - protein, 280 aa, Setaria italica
  misc_feature (28)..(28): Xaa can be any naturally occurring amino acid
  misc_feature (135)..(135): Xaa can be any naturally occurring amino acid
  misc_feature (156)..(156): Xaa can be any naturally occurring amino acid
  Transcript Sequence Number=SeqID_24812
MALQLGPTDTAGHDPAGSAPRSPLPLLXALCVVFSAVLHAEPLAAAAADLHLQPGVVAGAVLSVVAFFNLAILSLNFIVVRRPAAAGPTTATAGAAPAPAASASRSPVAFFMGLCLLMGAALHAEQLADAAKEYXIHPVVVVSVVLAASALFHLAXLTIYKSLARHQAEDEPKQLRRPRGLPLLPFVVLALAIPTAASADTVMAAGATDLPQDASVWALLALAASFNIAIGSLYCFVIAGAPPPAATDVQPRLWSKAAGAMVSCTIAAGVLVSCMLLQVE

SEQ ID NO: 90787 - protein, 130 aa, Setaria italica
  Transcript Sequence Number=SeqID_24813
  Gene Ontology: Mol. function=aspartic-type endopeptidase activity; Cellular component=chromatin; Biological process=RNA-dependent DNA replication
  Homolog annotation: Hit_ID=Q8SA93; Match level="QueryCoverage=70%, HitCoverage=3%, E-value=4e-30, Identity=60%"; Hit description =Putative polyprotein
VKYLLLHCEIHTIRRRLHAHSSSQNCQARSSSISPTEQHALAGEYTARSAYDALFQGAILFNPYERIWKSWAPPKCRFFMWLVAHRRCWTVDRLAKRGLPHPEHCPLCDQKEEDIQHLLVGRVFARQFWF

SEQ ID NO: 90788 - protein, 62 aa, Setaria italica
  Transcript Sequence Number=SeqID_24814
  Gene Ontology: Mol. function=metal ion binding; Cellular component =intracellular
  Homolog annotation: Hit_ID=B6SXM0; Match level="QueryCoverage=100%, HitCoverage=9%, E-value=3e-29, Identity=87%"; Hit description=ATBRCA1
LNVNWLRACIEARELIPEEPYEVRCDVHGSFDGPRTGRLRAMQQAPSLFAGLTFYFSGHFMP

SEQ ID NO: 90789 - protein, 385 aa, Setaria italica
  Transcript Sequence Number=SeqID_24815
  Homolog annotation: Hit_ID=B6TPV9; Match level="QueryCoverage=91%, HitCoverage=93%, E-value=1e-146, Identity=71%"; Hit description=ATP binding protein
MGGGGGGGDLTPTSIPSSPSCSSEVLPPEFAEYVAVSPVSDDEESDECSVYDHAEVDARHFGRRLQDHLREAKEFIRRYKPGDCIEGAGGAKAGDYILPEITTLLLVGPRGAGKSTLVNRITRVFDKDDDPSAPDRAQVSGNSKSNGTVFLREYPVPRNSTAICIYDTQSLSCNPQNNFKTLQKWMTKGISHGEIATGDTNEGNNTKDIKPLGNQFSYLRCKTRKVNFVIFVVDGVSILQAIESNTEDYIDILRQTFMYPCLSIGDDKPVVVVTNGERLSIQQRACVQNKLVDLLGIPVQQIFDIPGSDDYQTDLAILDMLRYCIQHAEQNLPIKLSYLLEVRGRETFEIAAEQLMALDAVIEATIIFLCIVILLLRFSDKLLQS

SEQ ID NO: 90790 - protein, 65 aa, Setaria italica
  Transcript Sequence Number=SeqID_24816
  Gene Ontology: Mol. function=DNA binding; Biological process =regulation of transcription
SKGDAEKPYLEEPNCTRQAVEYPRESKLLDFGHSCPGKKLDLNTHNVDDTDQAYRHFDLNGFSWS

SEQ ID NO: 90791 - protein, 36 aa, Setaria italica
  Transcript Sequence Number=SeqID_24817
KVITGPLFSYIYHFRLTQDQHIYRSKALTWQQIDRI

SEQ ID NO: 90792 - protein, 151 aa, Setaria italica
  Transcript Sequence Number=SeqID_24818
  Gene Ontology: Mol. function=binding; Cellular component=microtubule
  Homolog annotation: Hit_ID=B9SP95; Match level="QueryCoverage=83%, HitCoverage=15%, E-value=2e-27, Identity=48%"; Hit description =Microtubule-associated protein TORTIFOLIA1, putative
  Pfam annotation: Domain name=HEAT; Domain location=11-47; Score=20.5; E_value=0.0071; Accession=PF02985.14; Description=HEAT repeat
  Subcellular localization annotation: CTP_CleavageSite=46; ConfidenceScore=5.16e-01
KHVQAEGASTEQALSSALTSIMDALKSSDWNTRKAASLALSSIAVSSGYLVASFRTSCLRSLERSKFDKVKPVRDAIIHAIQLWKAIPGSHTPEPSEAGSSTKENFFGDHHDARSIHDGGSRDTSFRRTDHGPSVSVTSGSSITSAKRRSP

SEQ ID NO: 90793 - protein, 68 aa, Setaria italica
  Transcript Sequence Number=SeqID_24819
  Gene Ontology: Mol. function=protein serine/threonine kinase activity
MRPLRGKHGDLAILCCLALLLPLLSHGADMPLGSTLSPGNSAPWTSPNNTFSLSFTASPTSPSLFVAA

SEQ ID NO: 90794 - protein, 139 aa, Setaria italica
  Transcript Sequence Number=SeqID_24820
  Gene Ontology: Mol. function=protein serine/threonine kinase activity; Cellular component=plasma membrane; Biological process =protein amino acid phosphorylation
  Homolog annotation: Hit_ID=B6UGS9; Match level="QueryCoverage=91%, HitCoverage=37%, E-value=3e-37, Identity=65%"; Hit description =Protein kinase domain containing protein
SPRPRPSASARAVLGSPGYVDPHYLRSGVVTKKSDVYSFGVLLLELLTGVQAFCDGRLLTAAVAPRISAACDAGELVDQRLGCRYDADEAAAMVALAAACVGENPSLRPSMADVVRALERNGRASIATVGRRSDGGGKL

SEQ ID NO: 90795 - protein, 202 aa, Setaria italica
  Transcript Sequence Number=SeqID_24821
  Homolog annotation: Hit_ID=Q9ASB7; Match level="QueryCoverage=87%, HitCoverage=51%, E-value=8e-25, Identity=34%"; Hit description =Membrane-associated protein-like
  Pfam annotation: Domain name=Transposase_28; Domain location=2-152; Score=34.5; E_value=2e-09; Accession=PF04195.4; Description=Putative gypsy type transposon
GELIEWRIPTTGETPSPSILEDQFVVLSLNHIMCGLRTDASDFLVRVLEHYDIEWSHLTPNSITALSIFAHLSEAYLGVPPTVEVFAHFYRLYTNNKGETVTLGGVYFRLRDKMRRSYPVYYLKASQFGWTSLWFYAKLPQSCRLTFKGETLKETNNWKDVLLLSPEQEKQVRQIEELSNQGLTGVDIVHDYLKHRISPLRR

SEQ ID NO: 90796 - protein, 62 aa, Setaria italica
  Transcript Sequence Number=SeqID_24822
EEGTDEKETVKGKKKSSWGFDGLKKWKKAGCSSGDAAAIGEQPERALPRSSYSESPARRRRP

SEQ ID NO: 90797 - protein, 252 aa, Setaria italica
  Transcript Sequence Number=SeqID_24823
ISAFIASYEISQAEDSSLDMISSILYEVYDGEESLCMQFWDKNSFVDGPIRSVLHIVEKEYPFQISELVRFLSAVCHGTWPAQCVYNYLERMNGVTTIYAIPGHVAENVNYGHQIESHHPVSIPGIEGIKVPCGTNGYILKVLQGDAVLVRWEFPHSGVFLLLVTLAQELHSCNYKEASDIMDLLYRMVSSNKDLCFALLHVDKSPAVQKSKNLGQLENHVRIDIAKIFCNSIFKYVQDVNNADILSKTLGL

SEQ ID NO: 90798 - protein, 56 aa, Setaria italica
  misc_feature (42)..(42): Xaa can be any naturally occurring amino acid
  Transcript Sequence Number=SeqID_24824
  Gene Ontology: Mol. function=citrate transmembrane transporter activity; Cellular component=integral to membrane; Biological process=citrate transport
  Homolog annotation: Hit_ID=Q1RU51; Match level="QueryCoverage=94%, HitCoverage=9%, E-value=1e-10, Identity=64%"; Hit description =Transporter, putative
MTELAPLPKVLLGSLAFGVFWMLAVFPSVPFLPIGRTGGGAXVGAVLMIVFHVISP

SEQ ID NO: 90799 - protein, 239 aa, Setaria italica
  misc_feature (172)..(172): Xaa can be any naturally occurring amino acid
  Transcript Sequence Number=SeqID_24825
  Gene Ontology: Mol. function=ATPase activity, coupled to transmembrane movement of substances; Cellular component=integral to membrane; Biological process=transport
  Homolog annotation: Hit_ID=Q6YUU5; Match level="QueryCoverage=99%, HitCoverage=19%, E-value=7e-97, Identity=70%"; Hit description =Putative multidrug resistance protein
ELAAMGRTTIVIAHRLSTIRNADMIAVMQSGEVKELGSHDELIAKENGMYSSLVHHRHTKDSNVTHDFDGTGSTFVMQQSSNQGMSRRSSAVSKSMSTLYMSDAEDARSTEKPKLPVPSFRRLLMLNAPEWKHAVMGTISASVFGGIQPVYSYAMGSMVSIYFSTDHEEIKXKTRTYTLFFVGLTVLSFIVNIGQHYSFGAMGEYLTKRIREKMLAKFLTFEVGWFDRDENSSGTICST

SEQ ID NO: 90800 - protein, 122 aa, Setaria italica
  Transcript Sequence Number=SeqID_24826
  Homolog annotation: Hit_ID=B9RYP2; Match level="QueryCoverage=75%, HitCoverage=8%, E-value=8e-10, Identity=38%"; Hit description =Transcription factor, putative
RCSSSTDDHASLTAAGTPFYLADADQRLLGFREDCVEHHLRPGRGGVVEEAAAARGPRFCADVTKYSMDVYPLAHHARFCGLAGCLAVCVQLRRDGDDASMDDSSREGCVLEFFLPLDCRDG

SEQ ID NO: 90801 - protein, 69 aa, Setaria italica
  Transcript Sequence Number=SeqID_24827
  Gene Ontology: Mol. function=nucleic acid binding; Cellular component= nucleus; Biological process=interspecies interaction between organisms
  Homolog annotation: Hit_ID=Q0DA50; Match level="QueryCoverage=82%, HitCoverage=8%, E-value=3e-31, Identity=98%"; Hit description=Zinc finger CCCH domain-containing protein 45
  Pfam annotation: Domain name=zf-CCCH; Domain location=14-39; Score =21.6; E_value=0.0021; Accession=PF00642.16; Description=Zinc finger C-x8-C-x5-C-x3-H type (and similar)
  Pfam annotation: Domain name=zf-CCCH; Domain location=42-67; Score =12.5; E_value=0.034; Accession=PF00642.16; Description=Zinc finger C- x8-C-x5-C-x3-H type (and similar)
  Pfam module annotation: Pfam domain module=zf-CCCH::zf-CCCH; Domain location=14-39::42-67
GRGMHGRGRGRGSYRQTVCRHWLRGLCMKGDACGFLHQFDKARMPVCRFFRDFGECREPDCAYKHSYDD

SEQ ID NO: 90802 - protein, 80 aa, Setaria italica
  Transcript Sequence Number=SeqID_24828
RYTVVAFTVCICGHCVFVASFSSLRDLEFQSTYCAFAGDSSCLPSSCLVKCCILLMINSRSLYCIISGMTHLLVSTAWTS

SEQ ID NO: 90803 - protein, 82 aa, Setaria italica
  Transcript Sequence Number=SeqID_24829
ARQCARDARSRHGRHPETDPAHTARGSGWVLPWCVRRRIRGRVEGKEGPVRHGKIPSFGKEERERERGREGEARRGQWNGVG

SEQ ID NO: 90804 - protein, 101 aa, Setaria italica
  Transcript Sequence Number=SeqID_24830
  Gene Ontology: Mol. function=nucleotide binding; Cellular component =nucleus; Biological process=defense response
  Homolog annotation: Hit_ID=Q852D5; Match level="QueryCoverage=100%, HitCoverage=7%, E-value=2e-25, Identity=64%"; Hit description =Powdery mildew resistance protein PM3b, putative, expressed
ESLDIMLCRGLSEVANLPPSIKTLEIWECDNLRSLSGQLDALQTLNINRCSNLKSLESCLGRLPSLENLSLYMCRSLQSLPNGPQTYSYLRALWIQSCPGI

SEQ ID NO: 90805 - protein, 51 aa, Setaria italica
  Transcript Sequence Number=SeqID_24831
CFTSPMPHSEWLCREDRSANAMDRGAMMPAQFKAGAPTELLLSRTGLNHFG

SEQ ID NO: 90806 - protein, 308 aa, Setaria italica
  Transcript Sequence Number=SeqID_24832
  Gene Ontology: Mol. function=transferase activity, transferring glycosyl groups; Cellular component=integral to membrane; Biological process=cell wall organization and biogenesis
  Homolog annotation: Hit_ID=Q2QNS6; Match level="QueryCoverage=99%, HitCoverage=24%, E-value=1e-144, Identity=83%"; Hit description =Cellulose synthase-like protein D4
  Pfam annotation: Domain name=Cellulose_synt; Domain location=75-308; Score=-288.7; E_value=0.012; Accession=PF03552.6; Description =Cellulose synthase
VHSMKFPSGNAGCAAGGGGGGKPAEFDHARWLFETKGTYGYGNALWPKDGGHGGGATGFAGFEEPPNFGSRCRRPLTRKTSVSQAIISPYRLLIAIRLVALGFFLTWRIRHPNPEAVWLWAMSVTCEVWFAFSWLLDSLPKLCPVQRAADLDVLAERFELPTARNPKGRSDLPGIDVFVSTADPEKEPPLVTANTILSILAADYPVEKLACYLSDDGGALLTFEALAETASFARTWVPFCRKHGVEPRSPEAYFGQKRDFLKNKVRVDFVRERRKVKREYDEFKVRVNSLPEAIRRRSDAYNAGEELR

SEQ ID NO: 90807 - protein, 60 aa, Setaria italica
  Transcript Sequence Number=SeqID_24833
MAKQQQEVYFVFMNFDPVYERLRADRSKEGSATLDAYLSHKHDKLLAKLLQPDSYRKRSS

SEQ ID NO: 90808 - protein, 316 aa, Setaria italica
  misc_feature (301)..(301): Xaa can be any naturally occurring amino acid
  Transcript Sequence Number=SeqID_24834
  Gene Ontology: Mol. function=electron carrier activity; Biological process=response to oxidative stress
  Homolog annotation: Hit_ID=A5H8G4; Match level="QueryCoverage=100%, HitCoverage=86%, E-value=1e-135, Identity=77%"; Hit description =Peroxidase 1
  Pfam annotation: Domain name=peroxidase; Domain location=20-272; Score=415.5; E_value=8.7e-122; Accession=PF00141.15; Description =Peroxidase
RAQLRVGFYDTTCPNAEALVRQAVAAAFARDAGTAAGLIRLHFHDCFVRGCDASVLLTVNPGGGQTERDAAPNNPSLRGFDVIDAAKAAVEQSCPRTVSCADIVAFAARDSVALTGSVSYKVPAGRRDGHVSNASDTVDLPPPTSTAKELTDLFAAKNLSVEDMVVLSGAHTVGRSFCESFVDRVWNRSAKPPAAIVDAGLSSSYASLLRALCPSNTTRATPITTAMDPGTPNVLDNNYYKLLPRGMGLFFSDNQLRVDTAMAALVSSFAANETLWKEKFAAAMVKMGRIQVQTGTCGEVXRLNCSVVNPSSSTIE

SEQ ID NO: 90809 - protein, 74 aa, Setaria italica
  Transcript Sequence Number=SeqID_24835
  Homolog annotation: Hit_ID=B6TVQ2; Match level="QueryCoverage=87%, HitCoverage=26%, E-value=8e-12, Identity=63%"; Hit description=DNA -binding WRKY
  Pfam annotation: Domain name=VQ; Domain location=38-68; Score=42.4; E_ value=1.8e-09; Accession=PF05678.6; Description=VQ motif
  Subcellular localization annotation: CTP_CleavageSite=66; ConfidenceScore=5.25e-01
MDAGAATSAQERPAPPSPVAAALPMPMPLPQASADPSNPFPTTFVQADTTSFKQVVQILTGTPETAAAAAAGGA

SEQ ID NO: 90810 - protein, 124 aa, Setaria italica
  misc_feature (98)..(98): Xaa can be any naturally occurring amino acid
  Transcript Sequence Number=SeqID_24836
NRNRKVKVPMELFAQGNKEVLPALLMKADGNGHFSVDFHARLSALQAFSICISLLHCSEASSDIGIDKFKNKLYSSSLKMLLKEEVKQLIDSVTTKEXKKPKSRNEKAPPSIVMNPPFSPMGRV

SEQ ID NO: 90811 - protein, 76 aa, Setaria italica
  Transcript Sequence Number=SeqID_24837
MVCIHYIHFMIISCLYYILIKLINDCIFLFFTVVQLIVAFTYVESCLSFNAYSTVDRQQFNDLVGPARYDSYYWVT

SEQ ID NO: 90812 - protein, 158 aa, Setaria italica
  Transcript Sequence Number=SeqID_24838
  Homolog annotation: Hit_ID=B6U217; Match level="QueryCoverage=100%, HitCoverage=29%, E-value=3e-28, Identity=51%"; Hit description=LrgB -like family protein
  Subcellular localization annotation: CTP_CleavageSite=50; ConfidenceScore=5.67e-01
MAAIAMIGVTTLRCHHHRLSARPRSTSTARSCMLPPRCRRCGSLTPHSSSCSAASSASTSHGRPALNRIAAGNTSFMGPANNNGTAAPHRSLSSNIRRRLTVPNSTAGAGNASATSSSSGLLPTILGVAHLLVSLGIVVATDKYLKQAFVAASIKFPS

SEQ ID NO: 90813 - protein, 209 aa, Setaria italica
  misc_feature (162)..(162): Xaa can be any naturally occurring amino acid
  Transcript Sequence Number=SeqID_24839
AAVAYAIAAREERLASQEKPVAERFGTEGKPMVEKVASGKKHASIGEPRIRPQSKSPPQKAESLKRPIEGNTSSKWFSGKEPIDDGYDEEPGANVSVRRPLRPAHKKPGVISSDDKVAERLSNDSAPSIKKEPSFARKGPERKGSWKFEQDQGNQKLPPAPXPGKPMSSYSGRDSTVATPVMTFPSEAEAMADAWEKEKLAKIKKQYNE

SEQ ID NO: 90814 - protein, 123 aa, Setaria italica
  Transcript Sequence Number=SeqID_24840
  Gene Ontology: Mol. function=receptor activity; Cellular component =integral to membrane
  Homolog annotation: Hit_ID=B9RL98; Match level="QueryCoverage=99%, HitCoverage=17%, E-value=5e-13, Identity=39%"; Hit description =Xenotropic and polytropic murine leukemia virus receptor pho1, putative
LNKVNRFYKGKEEEFLERGRSLRKQMDILADLKAAAREDTTTNPSDSSVASGGCSEDESTRYAMTSETDTDQLSEQEATTPTKDPGVTAQEDRQMDLDGSGTFGRSASGCGRKSLKINIPLTN

SEQ ID NO: 90815 - protein, 88 aa, Setaria italica
  Transcript Sequence Number=SeqID_24841
YRLFQPVLKDPTLVPNCQYWYLRGFRTGTKRGFPMDNVEERQSIGEREHLVHGASQVICKGTGSALTQYRSRSQYVPGTDFPCTLKAR

SEQ ID NO: 90816 - protein, 88 aa, Setaria italica
  misc_feature (10)..(10): Xaa can be any naturally occurring amino acid
  Transcript Sequence Number=SeqID_24842
FTDHPHQRIXNVTYMLEGGVSYHDFSGHKGTINTGDVQAVSKSNSNQIFSSISKVGDREKKKPLQQGSKACSSREDSKSLLRPLLPDG

SEQ ID NO: 90817 - protein, 180 aa, Setaria italica
  Transcript Sequence Number=SeqID_24843
  Gene Ontology: Mol. function=transcription cofactor activity; Cellular component=nucleus; Biological process=transcription from RNA polymerase II promoter
  Homolog annotation: Hit_ID=Q10AP7; Match level="QueryCoverage=80%, HitCoverage=36%, E-value=2e-46, Identity=60%"; Hit description=Pirin, putative, expressed
  Pfam annotation: Domain name=Pirin; Domain location=53-149; Score =124.4; E_value=3.6e-34; Accession=PF02678.8; Description=Pirin
ERRHPGPAEAVKIESHGTEELRRPEDDDDGDVMNEPRAVVRTLTCERKPYVEGFALWRSIGRPELPELDPILSFDEFEFSAPAGFTDHPHRGFENVTYMLEGGVSYHDFSGHKGTINTGDVQWLTAGRGVVHAEVPGGEGVQRGINIWINLAAEDKMVEPMYQDLASHAIPTAAAENDGG

SEQ ID NO: 90818 - protein, 103 aa, Setaria italica
  Transcript Sequence Number=SeqID_24844
  Subcellular localization annotation: CTP_CleavageSite=88; ConfidenceScore=5.13e-01
LLHLQTIHQARSCNLSKISLSLSKMYVHQLFHSIPSQLLEFMVFASGISGSSRCLSRGACPWTCSSRCRPRRCRHGPSSATTTGGSARAAVTPSSSSGSGRRT

SEQ ID NO: 90819 - protein, 88 aa, Setaria italica
  Transcript Sequence Number=SeqID_24845
  Gene Ontology: Mol. function=aspartic-type endopeptidase activity; Biological process=proteolysis
  Homolog annotation: Hit_ID=Q8LNM3; Match level="QueryCoverage=95%, HitCoverage=20%, E-value=3e-09, Identity=44%"; Hit description =Eukaryotic aspartyl protease family protein
SKLVPPLVLHFGSGGGASSDLVVPPENYWGPVDEATACMVVFSAARPNATLPMNETTVIGNYMHQNMHLLYDMGNGVLSFQPADCSSV

SEQ ID NO: 90820 - protein, 75 aa, Setaria italica
  Transcript Sequence Number=SeqID_24846
FFWKIKADTEPFIKNVRFTVHHMVHPAYMAYKHAWAAFDPMPRRPTTVLPGKSLGILHIFTTQNKGGKKDMKKIT

SEQ ID NO: 90821 - protein, 75 aa, Setaria italica
  Transcript Sequence Number=SeqID_24847
  Homolog annotation: Hit_ID=Q108V8; Match level="QueryCoverage=46%, HitCoverage=1%, E-value=2e-11, Identity=91%"; Hit description=DNAJ heat shock N-terminal domain-containing protein, putative, expressed
CRPEPSHHGLRQPPRRRRGGHLARPPAVAPAGPPEEPEYLARYLVVKHSWRGRYRRILCIASSGVVTLDPTTLNL

SEQ ID NO: 90822 - protein, 41 aa, Setaria italica
  Transcript Sequence Number=SeqID_24848
EDASARTKILSDLLDLLDSNPSNVESLMEYGWSSWLETSAK

SEQ ID NO: 90823 - protein, 73 aa, Setaria italica
  Transcript Sequence Number=SeqID_24849
AQNIPWDYTGDDMRALFEKHGSVVGVEVGICFSPLPLLPIRSFCFLIQLCNSSSSPSVRRWMLSKAVAVGLKY

SEQ ID NO: 90824 - protein, 197 aa, Setaria italica
  Transcript Sequence Number=SeqID_24850
  Gene Ontology: Mol. function=nucleic acid binding; Cellular component= chloroplast; Biological process=mRNA processing
  Homolog annotation: Hit_ID=B6TMQ1; Match level="QueryCoverage=89%, HitCoverage=63%, E-value=4e-58, Identity=63%"; Hit description =Ribonucleoprotein
  Pfam annotation: Domain name=RRM_1; Domain location=1-66; Score=56.4; E_value=1.1e-13; Accession=PF00076.14; Description=RNA recognition motif. (a.k.a. RRM, RBD, o
  Pfam annotation: Domain name=RRM_1; Domain location=95-166; Score =86.5; E_value=9.3e-23; Accession=PF00076.14; Description=RNA recognition motif. (a.k.a. RRM, RBD, o
  Pfam module annotation: Pfam domain module=RRM_1::RRM_1; Domain location=1-66::95-166
NIPWDYTGDDMRALFEKHGSVVGVELSMYNASKNRGLAFVTMGSEEEALAALNNLNSTTLDDRKIKVDFARPRKKQPKQVKQPVVVSDSTEKYILFVGNLTWRVRNRHLRELFASAPGVLSAEVIFHTTTPRRSAGYAFVSFSSKEAAEAAISSLNGQKLMGRPINVMFKEESAKKNESSVPKEEEAEEESSEQSDS

SEQ ID NO: 90825 - protein, 233 aa, Setaria italica
  Transcript Sequence Number=SeqID_24851
  Gene Ontology: Cellular component=extracellular region; Biological process=plant-type cell wall organization and biogenesis
  Homolog annotation: Hit_ID=Q75I75; Match level="QueryCoverage=96%, HitCoverage=88%, E-value=4e-95, Identity=75%"; Hit description =Expansin-A31
  Pfam annotation: Domain name=DPBB_1; Domain location=42-129; Score =133.9; E_value=4.9e-37; Accession=PF03330.10; Description=Rare lipoprotein A (RlpA)-like double
  Pfam annotation: Domain name=Pollen_allerg_1; Domain location=140 -217; Score=114.2; E_value=4.4e-31; Accession=PF01357.13; Description= Pollen allergen
  Pfam module annotation: Pfam domain module=DPBB_1::Pollen_allerg_1; Domain location=42-129::140-217
ALAAAQGSPGTATFYGGPDGSGTMGGACGYDNLYNAGYGVLNAALSQTLFNDGASCGQCYTITCDRSRSGGQYCKPGNSITVTATNLCPANYALPNGGWCGPGRPHFDMSQPAWENIGIYQAGVIPVLYQQVKCSRSGGVRFSLAGSNYFLLVNIQNLAGSGSVGAAWVKGDNTGWIQMSRNWGANWQALAGLVGQGLSFAVTSTGGQYIQFLNVAPAWWQFGQTFTNNYQNF

SEQ ID NO: 90826 - protein, 139 aa, Setaria italica
  Transcript Sequence Number=SeqID_24852
  Gene Ontology: Mol. function=binding; Cellular component=chloroplast
  Homolog annotation: Hit_ID=Q69NX2; Match level="QueryCoverage=79%, HitCoverage=9%, E-value=2e-41, Identity=74%"; Hit description =Putative fanconi anemia, complementation group D2
KAVCHSLYYAINWIRELLNAFSTQVASRIDNFSQKARDETAVKLLKRLRNLIFLEGLLNAFLKKYPLSLPELRYLGDCSGSTSTSKFNLPKKMGEESMDGTSSNKRQKGRKDKAASERMNPDDKLKQPYGYLDCTLSEL

SEQ ID NO: 90827 - protein, 61 aa, Setaria italica
  Transcript Sequence Number=SeqID_24853
  Gene Ontology: Mol. function=inositol or phosphatidylinositol phosphatase activity; Cellular component=mitochondrion
  Homolog annotation: Hit_ID=Q6Z412; Match level="QueryCoverage=100%, HitCoverage=13%, E-value=6e-20, Identity=78%"; Hit description =Putative 3(2),5-bisphosphate nucleotidase
AVADKVSNSGSPLTQDDVLRAIDRGGKDAVSFDSNPATYWVLDPIDGTKGFLRGDDALYVV

SEQ ID NO: 90828 - protein, 332 aa, Setaria italica
  misc_feature (9)..(9): Xaa can be any naturally occurring amino acid
  Transcript Sequence Number=SeqID_24854
  Gene Ontology: Mol. function=inositol or phosphatidylinositol phosphatase activity; Cellular component=mitochondrion; Biological process=abscisic acid mediated signaling
  Homolog annotation: Hit_ID=Q6Z412; Match level="QueryCoverage=95%, HitCoverage=66%, E-value=1e-121, Identity=69%"; Hit description =Putative 3(2),5-bisphosphate nucleotidase
  Pfam annotation: Domain name=Inositol_P; Domain location=1-332; Score= 60.1; E_value=8.5e-15; Accession=PF00459.17; Description=Inositol monophosphatase family
PVTIADFGXQALVSLELQRLFPSIPLVAEEDSASLRSSEADDNSSDVLVESIFSAVADKVSNSGSPLTQDDVLRAIDRGGKDAVSFDSNPATYWVLDPIDGTKGFLRGDDALYVVGLALVVNGKVTVGVMGCPNWTNYTVANGKDDSAAACNGRGILMISHLGCGTWTRRLSAEIGQFTTAPDIWKRCFVDTCSVVHMARYCIPDSQTWDMIPLSVLFNSTTGESDPRNENEILLLSVFCGSLCKYLTVASGRASVFVLRARTTTQIKSWDHAVGVICVQEAGGQISDWSGKPLDLAADLTSRRIIYPSGGVLVTNGALHDKLVEMISANYK

SEQ ID NO: 90829 - protein, 141 aa, Setaria italica
  Transcript Sequence Number=SeqID_24855
  Gene Ontology: Mol. function=protein serine/threonine kinase activity; Cellular component=plasma membrane; Biological process =protein amino acid phosphorylation
  Homolog annotation: Hit_ID=B9SRU2; Match level="QueryCoverage=97%, HitCoverage=15%, E-value=1e-36, Identity=51%"; Hit description =Kinase, putative
LLQIIHRNINTSDILLDEDWIAKITGIGLSTTEPSTGETTTFKSSGGLIDPEYFRTFQLTEKSDVYSFGAVLFEVLCAGPVMNCIFPIRVGNVVDWALQCKQEGNIDQIVSPYIKGRINAQCFHKFIETAEKCVADRGIDR

SEQ ID NO: 90830 - protein, 70 aa, Setaria italica
  Transcript Sequence Number=SeqID_24856
  Gene Ontology: Mol. function=P-P-bond-hydrolysis-driven protein transmembrane transporter activity; Cellular component=mitochondrial outer membrane; Biological process=intracellular protein transport
  Homolog annotation: Hit_ID=B6SJR3; Match level="QueryCoverage=58%, HitCoverage=51%, E-value=7e-13, Identity=80%"; Hit description =Mitochondrial import receptor subunit TOM7-1
  Pfam annotation: Domain name=Tom7; Domain location=28-67; Score=75.6; E_value=1.8e-19; Accession=PF08038.4; Description=TOM7 family
MASGAAEKGKALADASESAAESAARRAREWTTWAMKKAKVVAHYGFIPFVILVGMNSEPKPRLTQLLSPI

SEQ ID NO: 90831 - protein, 116 aa, Setaria italica
  Transcript Sequence Number=SeqID_24857
PIQARPKLIDRRSPQRPSAARHGTQQVYKYGSVLRNLFLDVSCLLALHSSKELCSPGWSMEDNNSAAAAASVVTTSVPAEKHVAIPAAAVAAMTNGGGSAAEESKAEEDMLPPAPA

SEQ ID NO: 90832 - protein, 95 aa, Setaria italica
  Transcript Sequence Number=SeqID_24858
EHRRQRGRRRGRGRGRGRGRKGEPAGSSFCFSYTEKEMVFVTRSWAHGAIGVVNWKQECDLKHIEITIILICLLPKQVLLRLVILIYQVKQLDQR

SEQ ID NO: 90833 - protein, 70 aa, Setaria italica
  Transcript Sequence Number=SeqID_24859
MADEQLAPPVVVAMKGHPGSGKSTAARAIAAALRCPLLDKDDVRDCTLALETVAASGALNELSYAVLWRV

SEQ ID NO: 90834 - protein, 70 aa, Setaria italica
  Transcript Sequence Number=SeqID_24860
  Gene Ontology: Mol. function=protein serine/threonine kinase activity; Biological process=protein amino acid phosphorylation
  Homolog annotation: Hit_ID=Q9AUN5; Match level="QueryCoverage=100%, HitCoverage=19%, E-value=1e-14, Identity=52%"; Hit description =Disease resistance protein
  Pfam annotation: Domain name=LRR_1; Domain location=30-52; Score =12.2; E_value=1.4; Accession=PF00560.25; Description=Leucine Rich Repeat
  Pfam annotation: Domain name=LRR_1; Domain location=5-27; Score=8.6; E_value=6.8; Accession=PF00560.25; Description=Leucine Rich Repeat
  Pfam module annotation: Pfam domain module=LRR_1::LRR_1; Domain location=30-52::5-27
YNLSSLTFLGIAGNSLVGTLPSNMGNTLPNIENLVISENNFQGEIPESLANATNLEIIHLAQNSFSGVIP

SEQ ID NO: 90835 - protein, 148 aa, Setaria italica
  Transcript Sequence Number=SeqID_24861
NTDLSDCPTVHQYELHVRLDITIHTLRNGKLNNPNRSNYSQVIWIQIKHGISSVKPQFFNTGYGSTPQHIIPVAYTTETKQSELGSTTDRHQNTESTQLHHNSSHGLRIEQHEFHTEIRGQTKQLEPVATTRTHQACNLYPLGQSCSD

SEQ ID NO: 90836 - protein, 59 aa, Setaria italica
  Transcript Sequence Number=SeqID_24862
  Subcellular localization annotation: CTP_CleavageSite=12; ConfidenceScore=5.09e-01
DLLPRYDLAGVVASFRLQSSMLSLLSFSFCLGFRTFLLSIFGLVIMILSCSIYKLVLVE

SEQ ID NO: 90837 - protein, 83 aa, Setaria italica
  Transcript Sequence Number=SeqID_24863
ILWYSDLMLLCFLCRIQNKFWQHITAPKMYCQNYFPFYIMAYIFILSQLTSEVKTYPTPNPLLIKQTMQGMHLEFEVRCSMLY

SEQ ID NO: 90838 - protein, 119 aa, Setaria italica
  Transcript Sequence Number=SeqID_24864
QRKHTQITPARAVFILCHDSLLNSTVCYTGPEGEISDMEKSYATEPRPRAAREPAGAAHAALTGGPVQVAPTVLPWSHPGDGARRAPRSSNGVTASSSAPPPPAGRPLDLRLRRRLHGG

SEQ ID NO: 90839 - protein, 46 aa, Setaria italica
  Transcript Sequence Number=SeqID_24865
MRVHGEVSDDEEAAAAAGEPVPLTPPPASAGQQRLVVGYALTKKKV

SEQ ID NO: 90840 - protein, 58 aa, Setaria italica
  Transcript Sequence Number=SeqID_24866
LQIEIGAPYSSTQTVHNSVISSVKIVWPCPAAALRVQVKASELQMISGSRYHRSASFA

SEQ ID NO: 90841 - protein, 139 aa, Setaria italica
  Transcript Sequence Number=SeqID_24867
  Gene Ontology: Mol. function=metal ion binding
LSSGRFDGDTDAGSGRDLLDIFVERVPSARFAAGGAGPKQQADEEAASARAPPSPELDRHKHRIIVSDVVFKSRWSELNSADLIALDTEMLRSMSSGRFSFPDYSPEYNEAKLSLSAARGRRRRTVPCRRRRGETERKR

SEQ ID NO: 90842 - protein, 48 aa, Setaria italica
  Transcript Sequence Number=SeqID_24868
NTTCRSRQLGILVQQICKWCSIVLKSSVLLSIWIFVIPGIIGRQGSHR

SEQ ID NO: 90843 - protein, 198 aa, Setaria italica
  Transcript Sequence Number=SeqID_24869
  Gene Ontology: Mol. function=metal ion binding; Cellular component =endoplasmic reticulum membrane; Biological process=ubiquitin -dependent protein catabolic process
  Homolog annotation: Hit_ID=B9RYE5; Match level="QueryCoverage=83%, HitCoverage=20%, E-value=2e-82, Identity=84%"; Hit description=Ssm4 protein, putative
  Pfam annotation: Domain name=zf-C3HC4; Domain location=35-81; Score =71.7; E_value=2.7e-18; Accession=PF00097.17; Description=Zinc finger, C3HC4 type (RING finger)
MAEIAERAVPGELPEEPRPPPGEEEDEEEEEGDVCRICRNRGDEDHPLRYPCACSGSIKFVHQDCLLQWLDHSNSRQCEVCKHAFSFSPVYADNAPTRLPFQELIVGVGMKACHVFQFILRLAFVLSVWLMIIPFITYWIWRLTFVRSLGEAQRLFLSHISAQLILSDCLHGFLLSAIIVLIFLGATSLRDYIRHLRE

SEQ ID NO: 90844 - protein, 927 aa, Setaria italica
  Transcript Sequence Number=SeqID_24870
  Gene Ontology: Mol. function=metal ion binding; Cellular component =endoplasmic reticulum membrane; Biological process=ubiquitin -dependent protein catabolic process
  Homolog annotation: Hit_ID=Q67WE0; Match level="QueryCoverage=73%, HitCoverage=100%, E-value=0.0, Identity=87%"; Hit description=Zinc finger (C3HC4-type RING finger)protein-like
MSHISAQLILSDCLHGFLLSAIIVLIFLGATSLRDYIRHLRELGGHDAERDDGGRERHGARAVRRLAGPNNRVPADGNIDELAEAQGIGAGELLRRNAENVAARLERLEAQVEQMLDGLDDADGAEDVPFDELVGMQGPVFHLVENAITVLASNAIFLIVVIFVPFSLGRIVLYYLSWFFSSASTPMLAKMMPFTETAISIANDTLKSALNVVKNFSSDTNNEGVIGHVIEVVTQSLKINATGLSVIQGSGRGSLIKGTAIGSSYLSDLTTLAVGYMFIFCLVFLYIGSLALLRYARGERFTIGRLYGIATILEAIPSLCRQFFAGMKHLMTMVKVAFLLVIELGVFPLMCGWWLDVCTLKMLGTTIAQRVEFFTMSPLASSSIHWLVGIVYMLQISIFVSLLRGVLRNGVLYFLRDPADPNYNPFRDLIDDPVHKHARRVLLSVAVYGSLIVMLVFLPVKLAMRVAPSIFPLDITIFDPFTEIPVDVLLFQICIPFAIEHFKPRATIKSLLHHWFAAVGWALGLTDFLLPKPEENGAQENWNGRAERRDRGHVGRELVAPQVEQRMIQHVAAEDNGRGNPNEANDVAEEPDVDDQGDSEYGFVLRIVLLLVLAWMTLLIFNAGMIVIPISLGRLVFEAVPRLPITHGIKCNDLFSFSIGCYILWSAAAGTRYAIDYIRSRQLGILVQQICKWCSIVLKSSVLLSIWIFVIPVLIGLLFELLVIVPMRVPIDESPVFLLYQDWALGLIFLKIWTRLVMLDQMAPLVDESWRSKFERVRDDGFSRLRGLWVLHEIIMPIVTKLLTALCVPYVLARGVFPVLGYPLIVNSAVYRFAWLGCLIFSALFFCGKRFHVWFTNLHNTIRDDRYLIGRRLHNFGEDTPEPSESGATIGSDDQDRALVLQDHEEEMGLRLRRNNMRANQQPRLAA

SEQ ID NO: 90845 - protein, 162 aa, Setaria italica
  Transcript Sequence Number=SeqID_24871
  Gene Ontology: Mol. function=hydrolase activity, hydrolyzing O -glycosyl compounds; Cellular component=extracellular region; Biological process=cell wall organization and biogenesis
  Homolog annotation: Hit_ID=Q0J930; Match level="QueryCoverage=77%, HitCoverage=20%, E-value=3e-62, Identity=88%"; Hit description =Endoglucanase 13
  Pfam annotation: Domain name=Glyco_hydro_9; Domain location=31-162; Score=-159.1; E_value=1.9e-07; Accession=PF00759.11; Description =Glycosyl hydrolase family 9
MARLMTKTSATLVMAAAFLLLAAADASSSYDYAGAFDKCLQFFEAQRSGKLPADRRVKWRGDSALTDGFSQGVDLVGGYYDSGDHVKFGFPMAYAVTMLSWGVLEFEKEMVAANNLQRALDAIRWGTNYFIKAHTEPNGLWVQVGDGDSDHLCWERAEDMST

SEQ ID NO: 90846 - protein, 91 aa, Setaria italica
  Transcript Sequence Number=SeqID_24872
  Gene Ontology: Mol. function=oxidoreductase activity; Cellular component=intrinsic to endoplasmic reticulum membrane; Biological process=oxidation reduction
  Homolog annotation: Hit_ID=B6SWP3; Match level="QueryCoverage=100%, HitCoverage=16%, E-value=4e-41, Identity=83%"; Hit description =Monooxygenase/ oxidoreductase
MEKKRVVIIGAGVSGLAVCKHLLERGCQPVVFEAGSALGGVWARVPDCTELQTPRPMYQYSDFPWPESVTQVFPDHRQVVAYLEAYARHFG

SEQ ID NO: 90847 - protein, 83 aa, Setaria italica
  Transcript Sequence Number=SeqID_24873
  Gene Ontology: Cellular component=plasma membrane
  Homolog annotation: Hit_ID=O22632; Match level="QueryCoverage=100%, HitCoverage=100%, E-value=2e-20, Identity=63%"; Hit description =Nitrate-induced NOI protein
  Pfam annotation: Domain name=NOI; Domain location=1-76; Score=162.6; E_value=1.1e-45; Accession=PF05627.3; Description=Nitrate-induced NOI protein
MAAEKGSPLPKFGEWDVNDPASAEGFTVIFNKARDEKKTGGNSQGQDVPTKNSQPSGQGLYAAKGPSSSKKWFCCMQPTAAES

SEQ ID NO: 90848 - protein, 401 aa, Setaria italica
  misc_feature (11)..(11): Xaa can be any naturally occurring amino acid
  Transcript Sequence Number=SeqID_24874
  Gene Ontology: Mol. function=acid phosphatase activity; Cellular component=chloroplast
  Homolog annotation: Hit_ID=Q8VX11; Match level="QueryCoverage=100%, HitCoverage=65%, E-value=0.0, Identity=77%"; Hit description =Diphosphonucleotide phosphatase 1
  Pfam annotation: Domain name=Metallophos; Domain location=76-292; Score=58.0; E_value=3.7e-14; Accession=PF00149.20; Description =Calcineurin-like phosphoesterase
PAGTLTFDKNXSMCGAPARTVGWRHPGYIHTSYLKDLWPDSLYTYRLGHRLMNGTRIWSKSYSFQASPYPGQDSLQRVVIFGDMGKAEADGSNEYNNYQPGSLNTTYQIIRDLENIDMVVHIGDISYANGYLSQWDQFTAQVEPIASTVPYMIGSGNHERDWPGTGSFYGNLDSGGECGVPAQTMFYTPAENRAKFWYATDYGMFRFCIAHTEEDWRPGTEQYKFIEQCLSSVDRQKQPWLIFLAHRVLGYSSCAYYGLEGTFEEPMGREGLQELWQKYKVDLAFYGHVHNYERTCPVYQSQCIVNASDHYSGPFQATTHVVVGGGGASLTEFTTSKVQWSHFTDFDHGFVKLTAFNHSSLLFEYKKSRDGNVYDHFTISRDYRDILACSVDSCPRTTLAS

SEQ ID NO: 90849 - protein, 146 aa, Setaria italica
  Transcript Sequence Number=SeqID_24875
  Gene Ontology: Mol. function=protein binding; Cellular component =nucleus; Biological process=regulation of transcription, DNA -dependent
  Homolog annotation: Hit_ID=Q8H2X8; Match level="QueryCoverage=100%, HitCoverage=24%, E-value=3e-54, Identity=81%"; Hit description =Protein SHORT-ROOT 1
EKFARLMGVPFSFRAVHHAGDLAELDLDALDLRDGGASTALAVNCVNSLRGVVPGGARRRDAFTSSLRRLDPRVVTVVEEEADLVASDPDTSSEEGGDSEAAFLKVFGEGLRFFSAYMDSLEESFPKTSNERLALERGAGRAIVDL

SEQ ID NO: 90850 - protein, 65 aa, Setaria italica
  Transcript Sequence Number=SeqID_24876
  Gene Ontology: Mol. function=GTP binding; Cellular component =intracellular
  Homolog annotation: Hit_ID=B6TY99; Match level="QueryCoverage=100%, HitCoverage=17%, E-value=5e-30, Identity=98%"; Hit description =GTPase family protein
MRGLTRAAKRAGEMAFNAGGGAVNWFPGHMAAASRAIRDRLKLADLVIEVRDARIPLSSANEDLQ

SEQ ID NO: 90851 - protein, 129 aa, Setaria italica
  Transcript Sequence Number=SeqID_24877
  Gene Ontology: Mol. function=ligase activity; Cellular component =chloroplast envelope; Biological process=response to auxin stimulus
  Homolog annotation: Hit_ID=P0C0M2; Match level="QueryCoverage=100%, HitCoverage=21%, E-value=1e-68, Identity=94%"; Hit description =Probable indole-3-acetic acid-amido synthetase GH3.2
  Pfam annotation: Domain name=GH3; Domain location=1-129; Score= -324.4; E_value=0.011; Accession=PF03321.5; Description=GH3 auxin -responsive promoter
SNIISSHPITEFLTSSGTSAGERKLMPTIEDELNRRQMLYSLLMPVMNLYVPGLDKGKGLYFLFIKSETTTPGGLPARPVLTSYYKSDHFKHRPYDPYNVYTSPTAAILCTDSFQSMYSQMLCGLLART

SEQ ID NO: 90852 - protein, 139 aa, Setaria italica
  misc_feature (106)..(106): Xaa can be any naturally occurring amino acid
  Transcript Sequence Number=SeqID_24878
  Gene Ontology: Mol. function=potassium ion transmembrane transporter activity; Cellular component=integral to membrane; Biological process=potassium ion transport
  Homolog annotation: Hit_ID=Q8VXB1; Match level="QueryCoverage=98%, HitCoverage=17%, E-value=2e-72, Identity=95%"; Hit description =Putative potassium transporter 12
MLMASISDSETTNRGSMWELDQNLDQPMDEEASQLKNMYREKKFSSILLLRLAFQSLGVVFGDLGTSPLYVFYNIFPHGVDDDEDVIGALSLIIYTLTLIPLMKYXFVVLRANDNGQGGTFALYSLLCRHAKVSTIPNQ

SEQ ID NO: 90853 - protein, 827 aa, Setaria italica
  misc_feature (471)..(471): Xaa can be any naturally occurring amino acid
  misc_feature (616)..(616): Xaa can be any naturally occurring amino acid
  Transcript Sequence Number=SeqID_24879
  Gene Ontology: Mol. function=cysteine-type peptidase activity; Cellular component=cytoplasm; Biological process=ubiquitin-dependent protein catabolic process
  Homolog annotation: Hit_ID=Q8H557; Match level="QueryCoverage=96%, HitCoverage=83%, E-value=0.0, Identity=78%"; Hit description =Ubiquitin carboxyl-terminal hydrolase
  Pfam annotation: Domain name=DUF1055; Domain location=43-157; Score= -24.2; E_value=0.027; Accession=PF06337.4; Description=Domain of Unknown Function (DUF1055)
  Pfam annotation: Domain name=UCH; Domain location=200-824; Score =386.0; E_value=6.6e-113; Accession=PF00443.21; Description=Ubiquitin carboxyl-terminal hydrolase
  Pfam module annotation: Pfam domain module=DUF1055::UCH; Domain location=43-157::200-824
AASPSYYGLRLLHSFLHPDLVLRLERGDGRAGAGAGGGSGGGGRSYALVPADELSRALARQNSGFGLQNKHSFAGDSAGAYPLVLRISVRETSILNLRISKKDNPVENYKRANKIFNVDSQPVHVWDFSGQTNLILMNEWNRLHHDCCHADQENLLEVQVYAMSDSLTSKIGGTNKENSGDVDDLSADSSYRSFGRAGSMGLIGLENLGNTCFMNSSIQCLAHTPKLVDYFLGDYARNINRTNPLGLNGELALAFGELLRSLWTTDRKPIAPHHFKEKIACFAPQFSGFNQHDSQELLAFLLDGLHEDLNQVKCKPYEEAKDASGRPDEEVADEYWSNHLARNDSVIVDTCHGQYKSTLTCPTCSKTSVTFDPFMYLSLPVPSTAKRTMTVTVFSTDGIREPCSYDVSVPKFGTLSDLVQALSIACLLGNDEILLVTEVYNNCIIRYLEEPSDSVSLLRDGDKLAAYRLPXKYEKSPLVVFTHQHMDEYSSGDNVTPQKKEFEAPLLATLPETVNGLLLQDIYLKLLNPFRLSKGANSLSGFAGSNGDPVDLMDGMPSDSDSNFQNIQLEDDTESSNCSTTDCEIRKGPSELYDMGTADSDKGANVEEFEFYLKNXKGDGQQQKIDINEVDLLETIPSRLHVNVHWQQSASRQYDTSMLNNLPEIHKLELIPKGTEDSVALHGCLEAFLKEEPLGPEDMWYCPCCKKHQQAMKKLDLWRLPEVLVIHLKRFSYTQFTRNKLETFVDFPTTDLDLSCYIANKSEQPSSHYHLYAISNHYGNMGGGHYTASIYHEEGKGWYKFDDECVTPISEDGIKTSAAYVLFYRRE

SEQ ID NO: 90854 - protein, 58 aa, Setaria italica
  Transcript Sequence Number=SeqID_24880
  Gene Ontology: Mol. function=RNA binding; Cellular component=endosome
  Homolog annotation: Hit_ID=Q5SMR4; Match level="QueryCoverage=82%, HitCoverage=10%, E-value=3e-16, Identity=79%"; Hit description=ALM beta-like
QFLRIDTFPLFQTHPSQTCFLSSIDLHTQYSYQVMLPEAVAIVVAPTDPTRSYGIFRL

SEQ ID NO: 90855 - protein, 272 aa, Setaria italica
  Transcript Sequence Number=SeqID_24881
  Gene Ontology: Mol. function=RNA binding
  Homolog annotation: Hit_ID=Q5SMR4; Match level="QueryCoverage=99%, HitCoverage=53%, E-value=1e-128, Identity=78%"; Hit description=ALM beta-like
  Pfam annotation: Domain name=Mov34; Domain location=90-199; Score =61.5; E_value=3.2e-15; Accession=PF01398.13; Description=Mov34MPNPAD- 1 family
MSSRRCDINAWRCGTHSTPSKSMYLDAQQAVHCQATDRDAGSCAVKHHFPSPIVSWIEDLSSFGNVSFSPDTEYVDEQARASVGQSSTSSNLHDMQISVRLTDEFMELAKENTSNNLETCGILGASFRDGTYFVTMLIIPKQEGTAHSCQAVNEEEIHAVLSEQSLYPAGWIHTHPSQTCFLSSIDLHTQYSYQVMLPEAVAIVVAPTDPTRSYGIFRLTDPGGMEVLRGCDESGFHTHRETIDGSPIYETCSKVHFNPNLRFEIVDLRSGA

SEQ ID NO: 90856 - protein, 95 aa, Setaria italica
  Transcript Sequence Number=SeqID_24882
  Subcellular localization annotation: CTP_CleavageSite=74; ConfidenceScore=5.52e-01
PHSPFLQPSPRSKNSCDLTRISPNFQLDSPPPPTLPTDRALPLPPSLPPSLSPRLPPPRAPPGPPSHPPRRRARARSRSGPQIHRRPPAMNPTRP

SEQ ID NO: 90857 - protein, 162 aa, Setaria italica
  Transcript Sequence Number=SeqID_24883
APGKGGEYRPSFADDLLLAFFRSKMVEEVGWDSEKPGYAGLMEVANRLMVKGKSALETEQAAVRVLQSLFPPLLLVLYKALLSPIANGQLAAMMLARATALSCQWLMGTCSVNSVTLPDGKSWSSGVFVEKCKYLEESKCLGICINTCKLPTQTFFKDHMGV

SEQ ID NO: 90858 - protein, 105 aa, Setaria italica
  Transcript Sequence Number=SeqID_24884
  Gene Ontology: Mol. function=protein serine/threonine kinase activity; Cellular component=integral to membrane; Biological process=protein amino acid phosphorylation
  Homolog annotation: Hit_ID=B9ST85; Match level="QueryCoverage=99%, HitCoverage=9%, E-value=7e-42, Identity=79%"; Hit description =Serine/threonine-protein kinase bri1, putative
LLLVTLFKLKKNQKTEEMRTGYIESLPTSGTSSWKLSGVHEPLSINVATFEKPLRKLTFAHLLEATNGFSAETLVGSGGFGEVYKAKLKDGTVVAIKKLIHFTGQ

SEQ ID NO: 90859 - protein, 106 aa, Setaria italica
  misc_feature (88)..(88): Xaa can be any naturally occurring amino acid
  misc_feature (97)..(97): Xaa can be any naturally occurring amino acid
  Transcript Sequence Number=SeqID_24885
  Gene Ontology: Mol. function=serine-type peptidase activity; Cellular component=chloroplast; Biological process=proteolysis
  Homolog annotation: Hit_ID=B6UHC0; Match level="QueryCoverage=90%, HitCoverage=13%, E-value=6e-29, Identity=60%"; Hit description=Acyl -peptide hydrolase-like
GIVRDFFSPWSREVHNRICIAGGDPALVESPTEPKWSAKGELFFITDRQSGFWNIYKWDEQSNVVIQLYALDAEFSKPMWVFGASSYXFLGKDDSSXKIICCYRTK

SEQ ID NO: 90860 - protein, 75 aa, Setaria italica
  Transcript Sequence Number=SeqID_24886
LFLWKGTYYVKGYNLLKTEEIETEDLPEINIEKISYKTVTGTIQTVCPIPFSNYIVQQRQKYEHNQITRQLNRKR

SEQ ID NO: 90861 - protein, 67 aa, Setaria italica
  misc_feature (46)..(46): Xaa can be any naturally occurring amino acid
  Transcript Sequence Number=SeqID_24887
  Gene Ontology: Mol. function=actin binding; Cellular component=actin cytoskeleton; Biological process=actin cytoskeleton organization and biogenesis
  Homolog annotation: Hit_ID=Q2LD52; Match level="QueryCoverage=100%, HitCoverage=47%, E-value=3e-21, Identity=74%"; Hit description =Profilin
  Pfam annotation: Domain name=Profilin; Domain location=2-65; Score= -29.9; E_value=0.079; Accession=PF00235.11; Description=Profilin
MSWQAYVDDHMLCDIDGQRLTAAAAILGHDGAEWAQSDAVPQVSEXVKPEEITAIMNDFNEPGSLAP

SEQ ID NO: 90862 - protein, 102 aa, Setaria italica
  Transcript Sequence Number=SeqID_24888
  Gene Ontology: Mol. function=DNA binding; Cellular component=nucleus; Biological process=chromatin modification
  Homolog annotation: Hit_ID=B9S516; Match level="QueryCoverage=95%, HitCoverage=4%, E-value=2e-20, Identity=51%"; Hit description=DNA binding protein, putative
  Pfam annotation: Domain name=HSA; Domain location=18-84; Score=56.8; E_value=8e-14; Accession=PF07529.5; Description=HSA
RARYIEANIKRAGERSLCNVSLEKKRKSHWDFVLEEMVWMANDFMQERLWKSAAAAQMSHWISSSGRAVFEEASIQEEQKSVARILANGIMDFWHSVDTSRA

SEQ ID NO: 90863 - protein, 122 aa, Setaria italica
  Transcript Sequence Number=SeqID_24889
  Gene Ontology: Mol. function=protein binding; Biological process =protein amino acid phosphorylation
  Homolog annotation: Hit_ID=B9RAZ4; Match level="QueryCoverage=99%, HitCoverage=76%, E-value=4e-38, Identity=43%"; Hit description =Serine-threonine protein kinase, plant-type, putative
  Pfam annotation: Domain name=LRR_1; Domain location=102-121; Score =15.4; E_value=0.24; Accession=PF00560.25; Description=Leucine Rich Repeat
  Pfam annotation: Domain name=LRR_1; Domain location=29-51; Score =10.7; E_value=2.7; Accession=PF00560.25; Description=Leucine Rich Repeat
  Pfam annotation: Domain name=LRR_1; Domain location=5-27; Score=15.6; E_value=0.2; Accession=PF00560.25; Description=Leucine Rich Repeat
  Pfam annotation: Domain name=LRR_1; Domain location=53-75; Score =14.8; E_value=0.35; Accession=PF00560.25; Description=Leucine Rich Repeat
  Pfam annotation: Domain name=LRR_1; Domain location=78-100; Score =2.1; E_value=1.2e+02; Accession=PF00560.25; Description=Leucine Rich Repeat
  Pfam module annotation: Pfam domain module=LRR_1::LRR_1::LRR_1::LRR _1::LRR_1; Domain location=102-121::29-51::5-27::53-75::78-100
VNCSGLLKLSLSDNHLSGSIPPEIGRLTSLNVLNLNKNGLAGAIPPALRQCNKLYELRLSENALEGPIPPELGELSELQVILDLSRNRLSGEIPASLGDLVKLERLNLSSNRLEGQIPPSLL

SEQ ID NO: 90864 - protein, 92 aa, Setaria italica
  Transcript Sequence Number=SeqID_24890
  Subcellular localization annotation: CTP_CleavageSite=59; ConfidenceScore=5.00e-01
GAAGPETATSRGGCGIGHRSGTRRGLFLGQRRGHGSRPVHCAAINHSIRFRPSQYGVPCAAHGRRGCRRTGVSLWAVATLCSGDERWPCSRR

SEQ ID NO: 90865 - protein, 194 aa, Setaria italica
  Transcript Sequence Number=SeqID_24891
  Gene Ontology: Cellular component=nucleus; Biological process =ribosome biogenesis
  Homolog annotation: Hit_ID=B6UCL1; Match level="QueryCoverage=100%, HitCoverage=26%, E-value=1e-109, Identity=93%"; Hit description =Nucleolar protein 10
  Pfam annotation: Domain name=WD40; Domain location=37-76; Score=12.1; E_value=1.5; Accession=PF00400.24; Description=WD domain, G-beta repeat
  Pfam annotation: Domain name=WD40; Domain location=83-122; Score=8.7; E_value=3.7; Accession=PF00400.24; Description=WD domain, G-beta repeat
  Pfam module annotation: Pfam domain module=WD40::WD40; Domain location=37-76::83-122
INAVTRSMVHGLVACGGEDGAVECFDMRKKSSVGRINIPAVSSEDYDQEVTSLQFDEDQGYLMAVGSSTGKISIYDLRMSSPLRVKDHMYGSPILNIKWHQTLNSTEPKLITADKHIVRVWDPNTGNNMTSIEPDGGAINDVCIFRNSGLVLLALDNSQIPAHFIPALGPAPKWCSHLDNLTEEMEEKSDSRVY

SEQ ID NO: 90866 - protein, 82 aa, Setaria italica
  Transcript Sequence Number=SeqID_24892
  Homolog annotation: Hit_ID=B6TC67; Match level="QueryCoverage=100%, HitCoverage=62%, E-value=2e-38, Identity=93%"; Hit description =Cellular retinaldehyde-binding/triple function, C-terminal
FGRFLFSSGLYEKLRYMSRLEYVWAHMDKGQLEVPDCVREHDEELERRPLMDYGIEATESRCMYDAASMDTSASLHSLRYVS

SEQ ID NO: 90867 - protein, 98 aa, Setaria italica
  misc_feature (84)..(84): Xaa can be any naturally occurring amino acid
  Transcript Sequence Number=SeqID_24893
  Gene Ontology: Mol. function=drug transporter activity; Cellular component=membrane; Biological process=multidrug transport
  Homolog annotation: Hit_ID=Q2QYB3; Match level="QueryCoverage=91%, HitCoverage=32%, E-value=3e-21, Identity=53%"; Hit description=MatE family protein, expressed
IGSVVLDSTQGVLSGVARGCGWQHLAAWTNLVAFYIIGLPLAILFGFTLGFQTKGLWMGQICGLLCQNCVLLFITLRTDWEKFXTLTIESNRDNDFVC

SEQ ID NO: 90868 - protein, 104 aa, Setaria italica
  Transcript Sequence Number=SeqID_24894
VGKNNPNNIFCANYNLPIPKITLDSILPLIVLCTVKDPQIHLLIRSVKSAEAARRPPPLHFEPTPSQRRRQSTLRQFLVHSELLPHACFKQASELHLEHNGFLE

SEQ ID NO: 90869 - protein, 63 aa, Setaria italica
  Transcript Sequence Number=SeqID_24895
LLLQVDLLKHLFIILQNMDTVHSYMNSLYGAVAAQLADNPSPCVYFKGKIMKYSLANYIVGLK

SEQ ID NO: 90870 - protein, 229 aa, Setaria italica
  Transcript Sequence Number=SeqID_24896
  Gene Ontology: Mol. function=electron carrier activity; Cellular component=extracellular region; Biological process=response to oxidative stress
  Homolog annotation: Hit_ID=Q43729; Match level="QueryCoverage=99%, HitCoverage=69%, E-value=7e-51, Identity=47%"; Hit description =Peroxidase 57
  Pfam annotation: Domain name=peroxidase; Domain location=1-196; Score= 143.2; E_value=8.2e-40; Accession=PF00141.15; Description=Peroxidase
SVKGYDLIATIKAELEKKCPGVVSCSDIEILATRDAVALAGGPPYAVRTGRRDRRQSRAYDVKLPGADYTAAQAVAYYTRLGMNAYDTVVLLGAHTVGATHCSAIKNSRLYGYGGKPGATDPGMDPATASVYKRYVCPNVSSSDGNTVFLDDQWSAVKVDNHYYRNLQLRRGVLSVDQNLYNDGSTRWIVDQLASNAGLFQSQFARVLVKLSEVNVLTGTQGEIRKVCS

SEQ ID NO: 90871 - protein, 339 aa, Setaria italica
  Transcript Sequence Number=SeqID_24897
  Gene Ontology: Mol. function=DNA binding; Cellular component=nucleus; Biological process=regulation of transcription
  Homolog annotation: Hit_ID=Q3C253; Match level="QueryCoverage=85%, HitCoverage=40%, E-value=6e-72, Identity=52%"; Hit description=GAMYB- like1
  Pfam annotation: Domain name=Myb_DNA-binding; Domain location=105 -150; Score=46.6; E_value=9.5e-11; Accession=PF00249.23; Description =Myb-like DNA-binding domain
  Pfam annotation: Domain name=Myb_DNA-binding; Domain location=52-99; Score=47.6; E_value=4.9e-11; Accession=PF00249.23; Description=Myb -like DNA-binding domain
  Pfam module annotation: Pfam domain module=Myb_DNA-binding::Myb_DNA -binding; Domain location=105-150::52-99
PPNTEAGAGAEFSQPLSSGKEEEENDDDEDDETDSVGYDGAGNGGGAPQLKKGPWTPEEDKRLKDYVEAHGEGNWNQVQRNAGLNRCGKSCRLRWANHLRPDLKKGPFDAEEVDKIIKFHMMWGNKWAKMASHLPGRTDNEIKNYWNTRLKRHQRANLPLYPEHLCSRVLDQDMNRHIPDESRGKKRSNELTQEKVVGMDDLVGDLMVFQHLDYGKDPVVPTNPLKRHASTGDLSYVQSLDKVENFYSNDLNYVLTKSQSVPLGSATANGYPIFDGNPSTSGTIHRSKKTGLPSFQCSSYEFSNSWLLQCPTASLIEQQLDTCIQSPESMSSQNTGLLG

SEQ ID NO: 90872 - protein, 154 aa, Setaria italica
  Transcript Sequence Number=SeqID_24898
  Gene Ontology: Mol. function=hydrolase activity, acting on acid anhydrides, catalyzing transmembrane movement of substances; Cellular component=integral to membrane; Biological process=copper ion transport
  Homolog annotation: Hit_ID=A9NIX0; Match level="QueryCoverage=85%, HitCoverage=12%, E-value=2e-50, Identity=74%"; Hit description =Putative ATPase-like zinc transporter
LSDDCRTGAAEAIRELRSMGIKSVMLTGDSRSAAMRAQEQLRGAMDELHPELLPADKVRLVGELKARDGPTMMVGDGMNDAPALAMADVGVSMGLSGSAAAMETSHATLMSSDILRVPAAVGLGRRARRTIAVNVVVSVAAKAAVVALAVAWRP

SEQ ID NO: 90873 - protein, 137 aa, Setaria italica
  misc_feature (122)..(122): Xaa can be any naturally occurring amino acid
  Transcript Sequence Number=SeqID_24899
  Gene Ontology: Mol. function=structural constituent of ribosome; Cellular component=intracellular; Biological process=translation
  Homolog annotation: Hit_ID=Q84L29; Match level="QueryCoverage=72%, HitCoverage=37%, E-value=2e-35, Identity=76%"; Hit description =Mitochondrial 60S ribosomal protein L5
MALRYLARKVGSPALRRASVPRVLPSADAPRPLTSGPYQGLRHYATPSSEAVGSELDAPKVKRNRSSISKKSGTAMMLPLHLHYEDVLRQDLLLKQNHANIMQVPGLYEIRLVPKAGSDLRXPNRKLAMEILSGQRF

SEQ ID NO: 90874 - protein, 62 aa, Setaria italica
  Transcript Sequence Number=SeqID_24900
LYQNIMKDHVSAIRLSLVTTQHFINLHIPASEDLPCHASEEFADNFQAIMAMFLGDIVGSNR

SEQ ID NO: 90875 - protein, 87 aa, Setaria italica
  Transcript Sequence Number=SeqID_24901
  Gene Ontology: Mol. function=protein serine/threonine kinase activity; Biological process=protein amino acid phosphorylation
  Homolog annotation: Hit_ID=B9UN35; Match level="QueryCoverage=100%, HitCoverage=13%, E-value=4e-27, Identity=61%"; Hit description =Kinase-START domain protein
  Pfam annotation: Domain name=Pkinase_Tyr; Domain location=1-86; Score= -167.1; E_value=0.013; Accession=PF07714.9; Description=Protein tyrosine kinase
GEVYEGVLEDKSMVAVKKFIHNVKENFAKELTIHCEINHRNVVRLIGYCIDENALTMVTEYVPNGNLSDVLHHENAPIPLDIRLRIA

SEQ ID NO: 90876 - protein, 130 aa, Setaria italica
  Transcript Sequence Number=SeqID_24902
LSREAGLARPGRPTGSSRGTQPNSNCPDTGAIQLYNIGVVTKEDTARFSGSSFLFDPSSSVCRRAMAQMLQDDAHHHGVHELLRESPPPRAALIYYSLLLACPVILLLLLRRRRLTASSAAARDREARLT

SEQ ID NO: 90877 - protein, 148 aa, Setaria italica
  Transcript Sequence Number=SeqID_24903
SYCFIILTFRTVFTGLAERLSNLRGTSRSWVHFSCDHGLPAFHEILSCFGVLKDNFMPSLQNDPNGWQVQPELSCFMHMSCKDAIRMQHPTMGLFCHTIELQVQDAFSMHSGNYQLKICSLVLGSQQCRIMFLRSVFHLCKQQMVVLD

SEQ ID NO: 90878 - protein, 75 aa, Setaria italica
  Transcript Sequence Number=SeqID_24904
SALLLLLLLATRAHGIRLDRQLHEAINSKEMADPKSGDGEASIADDSVKKHCTPDGRCSGTTTKQMTPATTVVAK

SEQ ID NO: 90879 - protein, 166 aa, Setaria italica
  misc_feature (153)..(153): Xaa can be any naturally occurring amino acid
  Transcript Sequence Number=SeqID_24905
  Gene Ontology: Mol. function=glucosyltransferase activity; Cellular component=endoplasmic reticulum membrane; Biological process=GPI anchor biosynthetic process
  Homolog annotation: Hit_ID=B9RHL3; Match level="QueryCoverage=100%, HitCoverage=32%, E-value=5e-60, Identity=64%"; Hit description =Glycosyltransferase, putative
SGGDYYGTHVFHWYFTQGFPSMIWTFLPFAMCGIVKSREWRISGLIAWVLGVYSILGHKEFRFVLPVLPVALMFSGYCLAAMSQFKGKILHGKRCLSRLQLSVILLIITNVPMALYMSLFHQRGTEDVMYYLSKEAHDGRVKSVLFLMPCHSXTPYYSTLHHNVPM

SEQ ID NO: 90880 - protein, 185 aa, Setaria italica
  Transcript Sequence Number=SeqID_24906
  Gene Ontology: Mol. function=transferase activity, transferring glycosyl groups; Cellular component=endoplasmic reticulum membrane; Biological process=GPI anchor biosynthetic process
  Homolog annotation: Hit_ID=B9RHL3; Match level="QueryCoverage=89%, HitCoverage=30%, E-value=1e-57, Identity=63%"; Hit description =Glycosyltransferase, putative
ILYVQVCCLAAMSQFKGKILHGKRCLSRLQLSVILLIITNVPMALYMSLFHQRGTEDVMYYLSKEAHDGRVKSVLFLMPCHSTPYYSTLHHNVPMRFLDCTPSGNKGTLDESDRFLTSPSEFVGEVFGNLSSFSHIVLFESEERHVHHLLLGNSFLEVRRFFHTHFKVDRDLQSSVVVYSQGDVL

SEQ ID NO: 90881 - protein, 132 aa, Setaria italica
  Transcript Sequence Number=SeqID_24907
  Gene Ontology: Mol. function=sulfotransferase activity; Cellular component=integral to membrane
  Homolog annotation: Hit_ID=B6TRN9; Match level="QueryCoverage=98%, HitCoverage=39%, E-value=2e-35, Identity=58%"; Hit description =Flavonol 4-sulfotransferase
  Pfam annotation: Domain name=Sulfotransfer_1; Domain location=1-132; Score=-72.5; E_value=0.01; Accession=PF00685.19; Description =Sulfotransferase domain
RLTFAITNRSRHALAHDHPLLTRHPQDAVPFLELPDRQIHPVADLEAIPSPRLLATHIPFSLLPASVTAAGSRVVYMCREPKDVFVSKWHFENRVSEKLFVDLGLAFHLFCEGVSVLGPVWNHYLEYWNESK

SEQ ID NO: 90882 - protein, 115 aa, Setaria italica
  Transcript Sequence Number=SeqID_24908
LRSMREMNVQLRYRIQMASEAQKCRQTVTDTMLAALRSPKKTSTKTNIYYVPHHYLQYKWSHQGCLHRKREADYTEEQAVWASQEYNSKRQSYRTDFPSRVAGAEDEDPGVVVVP

SEQ ID NO: 90883 - protein, 106 aa, Setaria italica
  misc_feature (78)..(78): Xaa can be any naturally occurring amino acid
  Transcript Sequence Number=SeqID_24909
  Gene Ontology: Mol. function=oxidoreductase activity; Biological process=oxidation reduction
  Homolog annotation: Hit_ID=B9RUX7; Match level="QueryCoverage=100%, HitCoverage=33%, E-value=5e-20, Identity=44%"; Hit description =Gibberellin 20 oxidase, putative
TGDGEWIHFRPSSPASLVVIAGNELRAWTNDRVRAPFHRVTVGGDVARYSAILFALPGLKIQAPDELVDEEHPPRFKXPHCNDDFMHFCVAHGARHEDRLKDFCGV

SEQ ID NO: 90884 - protein, 225 aa, Setaria italica
  Transcript Sequence Number=SeqID_24910
  Gene Ontology: Mol. function=unfolded protein binding; Cellular component=mitochondrial inner membrane; Biological process =intracellular protein transmembrane transport
  Homolog annotation: Hit_ID=B4FBH4; Match level="QueryCoverage=100%, HitCoverage=59%, E-value=1e-117, Identity=88%"; Hit description =Import inner membrane translocase subunit TIM50
  Pfam annotation: Domain name=NIF; Domain location=31-192; Score=72.9; E_value=1.2e-18; Accession=PF03031.10; Description=NLI interacting factor-like phosphatase
AAIEMYLDVRSTIEDHVRGFTEPTSDKLLPDLLPEEQHVFTLVLDLNETLVYSDWQRERGWRTYKRPGVDAFLEHMARFYEVVVYSDQPPMYVEPVIERLNSRGTILHRLSRPATKYMDGKHYRDLSKLNRKPQQVIYLSAHALETCLQPENCVEIKPFKLESDDTRLLDLIPFLEYVAMARPSDIRTVLASYQGHDVAAEFIERSKEHQRRMHDQSKHGRLWRR

SEQ ID NO: 90885 - protein, 164 aa, Setaria italica
  misc_feature (26)..(26): Xaa can be any naturally occurring amino acid
  Transcript Sequence Number=SeqID_24911
  Gene Ontology: Mol. function=transcription regulator activity; Cellular component=nucleus; Biological process=regulation of transcription
  Homolog annotation: Hit_ID=B9RD58; Match level="QueryCoverage=57%, HitCoverage=19%, E-value=1e-24, Identity=62%"; Hit description=DNA binding protein, putative
  Pfam annotation: Domain name=HLH; Domain location=46-95; Score=61.3; E_value=3.7e-15; Accession=PF00010.18; Description=Helix-loop-helix DNA-binding domain
SAGAASDSRCFSRRSQRDGLCDEGEXVVINGDGAVRSSISTKRSRAAAIHNESERKRRDRINQKMKTLQKLVPNSSKTDKASMLDEVIDYLKQLQAQVQVMSRMSSMMMPMAMPQLQMSVMAQMAQMAQMAQMAQGMMNMGSLAQPGYAGLTPPMIAPLGPHRP

SEQ ID NO: 90886 - protein, 553 aa, Setaria italica
  Transcript Sequence Number=SeqID_24912
  Gene Ontology: Mol. function=amino-acid N-acetyltransferase activity; Cellular component=cytoplasm; Biological process=amino acid biosynthetic process
  Homolog annotation: Hit_ID=C4NFG1; Match level="QueryCoverage=99%, HitCoverage=91%, E-value=0.0, Identity=66%"; Hit description=N -acetyl-glutamate synthase
  Pfam annotation: Domain name=AA_kinase; Domain location=43-277; Score= -5.2; E_value=6.3e-05; Accession=PF00696.20; Description=Amino acid kinase family
  Pfam annotation: Domain name=Acetyltransf_1; Domain location=435-509; Score=59.9; E_value=9.7e-15; Accession=PF00583.16; Description =Acetyltransferase (GNAT) family
  Pfam module annotation: Pfam domain module=AA_kinase::Acetyltransf_1; Domain location=43-277::435-509
VRCGGARAPAGGVLPEEAEAEEGGRFVGWFREAWPYIRGHRGSTFVVVISGEVVAGPHLDGILQDISLLHGLGIKFVLVPGTHVQIDKLLAERGKKAKYAGRYRITDSDSLEAAMEAAGRIRLTIEAKLSPGPPMLNLRRHGVNGRWHEIADNVASGNFLGAKRRGVVGGTDYGFTGEVKKIDVSRIRERLDRDSIVVVSNMGYSSAGEVLNCNTYEVATACALAIEADKLICIVDGQIFDEHGRINRFMSIEEADMLIRTRAKQSEIAANYVKVVDEEDINHVRNLPMKQDTEHGLNGRSHFNGYTASFRNGVGFNNGNGLSGEQGFAIGGEERLSRSNGYLSELAAAAYVCHGGVQRVHIVDGTVGGSLLLELFTRDGVGTMIARDMYEGTRMAREEDLSGIRKIIHPLEESGVLVRRTDKELLEALTSFIVVERDGSIIACAALFPYLEDKSGEVAAIAVSEECRGQGQGDKLLDYVEKKALSLGLEKLFLLTTRTADWFVRRGFKECSIESLPAVRRKRIDLSRGSKYYMKRLQVAEIGLMAVNGFAMR

SEQ ID NO: 90887 - protein, 51 aa, Setaria italica
  Transcript Sequence Number=SeqID_24913
ASGLPPLSDADEAAQNSLDQVIDEWMAHMKPIVGEDKKQDANQILFSTVIY

SEQ ID NO: 90888 - protein, 180 aa, Setaria italica
  misc_feature (157)..(157): Xaa can be any naturally occurring amino acid
  Transcript Sequence Number=SeqID_24914
  Gene Ontology: Mol. function=kinase activity
  Homolog annotation: Hit_ID=B6TU35; Match level="QueryCoverage=100%, HitCoverage=58%, E-value=5e-77, Identity=69%"; Hit description =Choline/ethanolamine kinase
  Pfam annotation: Domain name=Choline_kinase; Domain location=25-180; Score=142.2; E_value=1.6e-39; Accession=PF01633.12; Description =Cholineethanolamine kinase
PLKGAMTNEVYQARWPAGGGGGEREERKVLVRVYGEGVEHFFDREDEVRTFECMSRHGHGPRLLGRFSNGRVEEFIHARTLSAADLRDPEISAIIASKLREFHNLDMPGPKSVLIWERLRNWLKTAKSLCSPDEAKEFCLDSMDEEIAALENEFSGXDYEYASFNPVAYDITNHFCEMAA

SEQ ID NO: 90889 - protein, 55 aa, Setaria italica
  Transcript Sequence Number=SeqID_24915
  Gene Ontology: Mol. function=kinase activity
  Homolog annotation: Hit_ID=Q1KL28; Match level="QueryCoverage=74%, HitCoverage=11%, E-value=7e-17, Identity=90%"; Hit description =Choline kinase
MILVPCLTPFQDYEYASFNPVAYDITNHFCEMAADYHSEKPHILDYTKYPGTKYI

SEQ ID NO: 90890 - protein, 87 aa, Setaria italica
  Transcript Sequence Number=SeqID_24916
  Gene Ontology: Mol. function=isomerase activity; Cellular component =outer membrane-bounded periplasmic space; Biological process=protein folding
  Homolog annotation: Hit_ID=B6U100; Match level="QueryCoverage=100%, HitCoverage=12%, E-value=5e-44, Identity=95%"; Hit description =Peptidyl-prolyl isomerase
  Pfam annotation: Domain name=FKBP_C; Domain location=1-87; Score =156.8; E_value=6.7e-44; Accession=PF00254.20; Description=FKBP-type peptidyl-prolyl cis-trans isomer
PGAGDEVEVHYTGTLLDGTKFDSSRDRDSPFKFTLGQGQVIKGWDLGIKTMKKGENAIFTIPPELAYGEDGSPPVIPPNATLQFDVE

SEQ ID NO: 90891 - protein, 74 aa, Setaria italica
  misc_feature (41)..(41): Xaa can be any naturally occurring amino acid
  Transcript Sequence Number=SeqID_24917
MGDGSRQEPAVSRLSDGLLQKPALGFSSFLQIPDKIQNSLXVHFGRFLKKDGAGRGMNAEMSPEMGKELCTAAA

SEQ ID NO: 90892 - protein, 158 aa, Setaria italica
  misc_feature (39)..(39): Xaa can be any naturally occurring amino acid
  misc_feature (53)..(53): Xaa can be any naturally occurring amino acid
  misc_feature (140)..(140): Xaa can be any naturally occurring amino acid
  Transcript Sequence Number=SeqID_24918
  Gene Ontology: Mol. function=transporter activity; Cellular component= mitochondrial inner membrane; Biological process=mitochondrial transport
  Homolog annotation: Hit_ID=Q01J70; Match level="QueryCoverage=100%, HitCoverage=51%, E-value=2e-78, Identity=86%"; Hit description =H0818E04.8 protein
  Pfam annotation: Domain name=Mito_carr; Domain location=1-81; Score =54.1; E_value=5.5e-13; Accession=PF00153.19; Description =Mitochondrial carrier protein
  Pfam annotation: Domain name=Mito_carr; Domain location=86-158; Score= 48.1; E_value=3.4e-11; Accession=PF00153.19; Description =Mitochondrial carrier protein
  Pfam module annotation: Pfam domain module=Mito_carr::Mito_carr; Domain location=1-81::86-158
QVLSSPADLIKVRMQADGRLLSQGIQPRYTGVADAFTKXIQAEGFLGLWKGLXPNAQRAFLVNMGELTCYDQAKHLIISKKICDDNLYAHTLASVVSGLSATTLSCPADVIKTRMMNQGKEGKALYRNSYDCLVKTVRHXGATALWKGFLPTWARLGP

SEQ ID NO: 90893 - protein, 73 aa, Setaria italica
  Transcript Sequence Number=SeqID_24919
TIMATKGLYISVRLLGNTNLRKIEHKRMDMKPLIMSLPKCFEDSNLKTNMFLSLKVCSSIIPIQLVTYYWCAL

SEQ ID NO: 90894 - protein, 216 aa, Setaria italica
  Transcript Sequence Number=SeqID_24920
  Gene Ontology: Mol. function=nucleic acid binding; Cellular component= intracellular
  Homolog annotation: Hit_ID=B7U385; Match level="QueryCoverage=93%, HitCoverage=23%, E-value=1e-100, Identity=83%"; Hit description=SNF2P
PKWETMGYKTLAVKEPDITASQNISDSGSVQLVYGDCTNPSKVCPAKPAIIFSCIDNSGTWGHGGMFDALTRLSTCIPDAYHRASEFDDLHMGDLHLIYLDEANCTRSLDAPLWVALAIVQSYNPRRKVPRSEISMPDLELCLSKAALSAAQRSAVIHMPRIGYQGGSQRSEWYTIERLLRKYSSLHGIDIFVYYFQRSSRQQTDSADASAGSSSS

SEQ ID NO: 90895 - protein, 99 aa, Setaria italica
  Transcript Sequence Number=SeqID_24921
  Gene Ontology: Mol. function=6-phosphofructokinase activity; Cellular component=6-phosphofructokinase complex; Biological process=glycolysis
  Homolog annotation: Hit_ID=B6SVM3; Match level="QueryCoverage=55%, HitCoverage=10%, E-value=1e-17, Identity=77%"; Hit description=6 -phosphofructokinase
MASHIILPPDDADENHHHPQEDGEEREEELGRDDGDEEREHASPERPPKAALPFSATCVRISRDSYPNLRALRNASSVSLADAAYVKISEGDFGYVLDD

SEQ ID NO: 90896 - protein, 148 aa, Setaria italica
  misc_feature (16)..(16): Xaa can be any naturally occurring amino acid
  misc_feature (47)..(47): Xaa can be any naturally occurring amino acid
  misc_feature (108)..(108): Xaa can be any naturally occurring amino acid
  misc_feature (114)..(114): Xaa can be any naturally occurring amino acid
  Transcript Sequence Number=SeqID_24922
  Gene Ontology: Mol. function=aspartic-type endopeptidase activity; Cellular component=chromatin; Biological process=chromatin assembly or disassembly
  Homolog annotation: Hit_ID=Q7X7I2; Match level="QueryCoverage=97%, HitCoverage=10%, E-value=6e-28, Identity=42%"; Hit description =OSJNBa0013A04.20 protein
  Pfam annotation: Domain name=Retrotrans_gag; Domain location=36-126; Score=30.1; E_value=9e-06; Accession=PF03732.9; Description =Retrotransposon gag protein
MRSFPRYNGSTDPIPXLHKAEQFFRADRTSEDERVWLASFYMEGDAXDWYYCLEQNHDALTWLEFVDKVQRAFDPPTRSNPLGALMKLHRTGTVKEYKAQFLPLLARXALSRNXDQIDLFIGDLRNPLQTNVELQHPATLDDAMGLAR

SEQ ID NO: 90897 - protein, 119 aa, Setaria italica
  misc_feature (85)..(85): Xaa can be any naturally occurring amino acid
  misc_feature (90)..(90): Xaa can be any naturally occurring amino acid
  Transcript Sequence Number=SeqID_24923
  Gene Ontology: Mol. function=nucleoside-triphosphatase activity; Cellular component=mitochondrion
  Homolog annotation: Hit_ID=B6SVD2; Match level="QueryCoverage=95%, HitCoverage=23%, E-value=1e-40, Identity=72%"; Hit description =Mitochondrial chaperone BCS1
WKRGYLLYGPPGTGKSSLIAAMANHLRFDIYDLELTSVQSNMDLRKLLVGISSRSILVVEDIDCTIKLQQREGGEEDTKSDSICXMLTEXERSTQVTLSGMLNFVDGLWSASGEVSKVF

SEQ ID NO: 90898 - protein, 91 aa, Setaria italica
  misc_feature (13)..(13): Xaa can be any naturally occurring amino acid
  Transcript Sequence Number=SeqID_24924
  Gene Ontology: Mol. function=oxidoreductase activity; Biological process=fatty acid metabolic process
  Homolog annotation: Hit_ID=B6U310; Match level="QueryCoverage=100%, HitCoverage=30%, E-value=2e-38, Identity=90%"; Hit description=3 -hydroxybutyryl-CoA dehydrogenase
  Pfam annotation: Domain name=3HCDH_N; Domain location=1-91; Score= -13.1; E_value=6.3e-08; Accession=PF02737.10; Description=3 -hydroxyacyl-CoA dehydrogenase, NAD binding domain
SLRRLAAKGHLSXQAACEDSIGRIRCVSAVQDLRDADLVIEAIVENEDVKKRLFVELDKITKPSTILASNTSSISITRLASATKRPAQVIG

SEQ ID NO: 90899 - protein, 268 aa, Setaria italica
  Transcript Sequence Number=SeqID_24925
RYEDASLLLLDMATVEFSILGLPFTFFQPSMYAIGDTDDGVCCLVGLVGSINNLHLQVWLLKEDGAVKTWEPEKKVPVSQVLGRDAQLHQVHVVTNGLALLCWDRCHQFAINLRKMCINAEFECSALGYPLQMPWPPAVLVETGSETINYLVDVVTQNLLVIEETEMNMMVGVQCDKMVRRSKKIPISKLGHVGDIIHYNQMVIHGCEMVQGIQKTHGNDTTESVIRTKSRCGSEMASSDHGGQMINCNQTVIYDSEMVQGIERNHDK

SEQ ID NO: 90900 - protein, 256 aa, Setaria italica
  Transcript Sequence Number=SeqID_24926
  Gene Ontology: Mol. function=sequence-specific DNA binding; Cellular component=intracellular; Biological process=regulation of transcription, DNA-dependent
  Homolog annotation: Hit_ID=B6TGA9; Match level="QueryCoverage=91%, HitCoverage=91%, E-value=4e-74, Identity=63%"; Hit description =Nuclear transcription factor Y subunit C-2
  Pfam annotation: Domain name=CBFD_NFYB_HMF; Domain location=102-166; Score=90.0; E_value=8.4e-24; Accession=PF00808.15; Description =Histone-like transcription factor (CBFNF-Y) and archaeal histone
  Pfam annotation: Domain name=Histone; Domain location=96-169; Score =51.5; E_value=3.3e-12; Accession=PF00125.16; Description=Core histone H2AH2BH3H4
  Pfam module annotation: Pfam domain module=CBFD_NFYB_HMF::Histone; Domain location=102-166::96-169
MEPSSQPQPAMGVAAGGSQEYPAPAYPPAATIAAPSAVPPAGLQPGQPFTANPAQMSAQHQIVYQQAQQFHQQLQQQQQRQLQQFWAERLADIEQTTDFKNHTLPLARIKKIMKADEDVRMISAEAPVVFAKACEIFILELTLRSWMHTEENKRRTLQKNDIAAAITRTDIYDFLVDIVPRDEMKEEGVGLPRAGLPPMGAPADAYPYYYMPQQQVPGAGMVYGAQQGHPVTYLWQEPQEQQEQPPEDQQPLHGSG

SEQ ID NO: 90901 - protein, 174 aa, Setaria italica
  misc_feature (9)..(9): Xaa can be any naturally occurring amino acid
  Transcript Sequence Number=SeqID_24927
EDFCGTALXLSTEWIRTDARRTAIGLDLDLESLEWCLENNLSKIGADGYSRMLLFHGNVLQPKEARLVKQKFSDLVQGLDVSSENGSSGSNSCEQPGLANSKCLANSTMSEAALPGRDIICAFNYSCCCLHSRKDLVLYFRHAFSSLSKRGGIFVMDAYGGTSSERKLRLQRKF

SEQ ID NO: 90902 - protein, 165 aa, Setaria italica
  misc_feature (158)..(158): Xaa can be any naturally occurring amino acid
  Transcript Sequence Number=SeqID_24928
  Gene Ontology: Mol. function=binding; Cellular component=cytoplasm; Biological process=protein folding
  Homolog annotation: Hit_ID=O04843; Match level="QueryCoverage=97%, HitCoverage=66%, E-value=4e-67, Identity=54%"; Hit description =Peptidylprolyl isomerase
  Pfam annotation: Domain name=FKBP_C; Domain location=30-128; Score =109.7; E_value=9.7e-30; Accession=PF00254.20; Description=FKBP-type peptidyl-prolyl cis-trans isomer
LHIDLELVSWKTVTLIGDRKRILKKVLKEGEGYERPNDGAVVRVRLIGKLEDGTVFVKKGHDGEEPFESKTDEEQVIEGLDITVVNMKKGEVALARIPPEHAFGSAETKQDLAVVPPNSTVFYEVELVSFEKDKESWDLKSNAEKIEAAAKKKDEGNXWFKSRES

SEQ ID NO: 90903 - protein, 97 aa, Setaria italica
  Transcript Sequence Number=SeqID_24929
ASMQKSPFNKLISRGHLDSQLHTSCSSLRMHMLELLLRTEAETTKLLSITAPKGSRSYNQKNQRVSHAQIKDLNSANTLQAPASIGIPTNSRQRDLR

SEQ ID NO: 90904 - protein, 70 aa, Setaria italica
  Transcript Sequence Number=SeqID_24930
  Homolog annotation: Hit_ID=B6TZQ3; Match level="QueryCoverage=97%, HitCoverage=14%, E-value=2e-12, Identity=60%"; Hit description =Nucleolar GTP-binding protein 1
  Subcellular localization annotation: CTP_CleavageSite=2; ConfidenceScore=5.16e-01
MRAAAGGRAVFHLQHLRPRPPCRASPAPATAVLPHSAPASRAYHRRLPKGFLPTLEPGVSAVYLCRRVHS

SEQ ID NO: 90905 - protein, 90 aa, Setaria italica
  Transcript Sequence Number=SeqID_24931
QFAKVVTNCIKASFLNHFSFLFFTDKASWWKHLRHYPDILAGALSAVNLCPIVLLSKLLVRDRTLVKSCSLGKMTHPKLLAASFLQVTRF

SEQ ID NO: 90906 - protein, 64 aa, Setaria italica
  Transcript Sequence Number=SeqID_24932
CILVARQTNHIAPLTKLGLCCWLPNDNIRTNLPAYWIFFLEYTGDLHIIALRRELWSMKHPTQH

SEQ ID NO: 90907 - protein, 151 aa, Setaria italica
  Transcript Sequence Number=SeqID_24933
  Gene Ontology: Mol. function=signal transducer activity; Biological process=two-component signal transduction system (phosphorelay)
  Homolog annotation: Hit_ID=B6SRE6; Match level="QueryCoverage=99%, HitCoverage=98%, E-value=4e-78, Identity=91%"; Hit description =Histidine-containing phosphotransfer protein 4
  Pfam annotation: Domain name=Hpt; Domain location=44-129; Score=38.8; E_value=2.2e-08; Accession=PF01627.15; Description=Hpt domain
MDYSSLRRQAASMKKSLFDQGYLDEQFCQVEDLQDETSPNFAEEVVTLFFKDSARLISNIEQALEKYPKDFNKWDAYMQQLKGSCSSIGASRMKSECMSFRDYCAQGNAEGCMKSFQKVKREHGVLRQKLEAYFQLLRQVGPSGAATRPAM

SEQ ID NO: 90908 - protein, 48 aa, Setaria italica
  Transcript Sequence Number=SeqID_24934
LNKVSPCCYARLKCSWYPPLPTCGCLFCSNLLFFLTPVVQSLFGTAVG

SEQ ID NO: 90909 - protein, 158 aa, Setaria italica
  Transcript Sequence Number=SeqID_24935
  Gene Ontology: Mol. function=inositol or phosphatidylinositol phosphatase activity; Biological process=abscisic acid mediated signaling
  Homolog annotation: Hit_ID=Q75GX7; Match level="QueryCoverage=99%, HitCoverage=27%, E-value=2e-76, Identity=87%"; Hit description =Putative phosphatase (With alternative splicing)
MRDDNSSRNKLSWSRTLVRKWFNIKTKAKDFHSDYAAEEVGVQWRTSFSDRDACKSKKSRTERLPKRNVDRDGRLGNGFDGAYITNTQDYRVFVATWNVGGRSPSSHLNLEDWLHTSPAADIYVIGFQEIVPLNAGNVLLTEDNGPAKKWVSLVRKTS

SEQ ID NO: 90910 - protein, 34 aa, Setaria italica
  Transcript Sequence Number=SeqID_24936
RRSGYSGGQQQGLQLQCRHHPMMLLHMFRLVVSL

SEQ ID NO: 90911 - protein, 80 aa, Setaria italica
  Transcript Sequence Number=SeqID_24937
HLLVDSFSYNTIRLVIETRKRTDKERGHEPRRRQLLHGSSGGGNAAGTSTTDTGGGAFASRFTPPLRRGARHPLHTAAPS

SEQ ID NO: 90912 - protein, 64 aa, Setaria italica
  Transcript Sequence Number=SeqID_24938
DLLRRVVDSGLPAESGEYPMPILDHFMVGEKYRWPVPEPYWYHGELDVDMDDDDFPGLIGRTLN

SEQ ID NO: 90913 - protein, 191 aa, Setaria italica
  Transcript Sequence Number=SeqID_24939
  Gene Ontology: Mol. function=kinase activity; Cellular component =plasma membrane
  Homolog annotation: Hit_ID=B9T6U1; Match level="QueryCoverage=96%, HitCoverage=18%, E-value=2e-34, Identity=42%"; Hit description =Myosin-1, putative
  Pfam annotation: Domain name=KIP1; Domain location=7-60; Score=76.9; E_value=7.2e-20; Accession=PF07765.4; Description=KIP1-like protein
PYVCLCADMEDRVKCILFLLGEEADSFAKRAEMYYKRRPEVISSVEEAYRAYRALAERYDHMSGELHKANHTIASTFPDQIQYSLLEEDDDNLPKAYTKVDPRKIHKSTVEGLMKKKHREKSRPKDGGKKSAVPMNKDNAQAEISRLQKEILVLQTEKEFIKSSYESGIAKYWDLEKQINEMQEEVCYFQD

SEQ ID NO: 90914 - protein, 98 aa, Setaria italica
  misc_feature (87)..(87): Xaa can be any naturally occurring amino acid
  Transcript Sequence Number=SeqID_24940
  Gene Ontology: Cellular component=plasma membrane; Biological process= protein transport
  Homolog annotation: Hit_ID=O82197; Match level="QueryCoverage=66%, HitCoverage=30%, E-value=7e-11, Identity=50%"; Hit description =Vacuolar protein sorting-associated protein 32 homolog 1
MFSWILRGCRDECSASDQLKQARDVFVAKEAVLQKKISQEMERAKEFTKSGNKQAAMQCLKRKKYYESQMSQVGSVQLRINTKEKMXIADHMGNNDTK

SEQ ID NO: 90915 - protein, 84 aa, Setaria italica
  Transcript Sequence Number=SeqID_24941
YFTLINPADARWNFFQGMFYFVLLAAVLVSLIAFSVTKHHIYLYMGLASVLLVAIYTGYFRRRIRKQFNIRGTESSLDDCVLHL

SEQ ID NO: 90916 - protein, 235 aa, Setaria italica
  Transcript Sequence Number=SeqID_24942
  Homolog annotation: Hit_ID=Q2HTU7; Match level="QueryCoverage=88%, HitCoverage=82%, E-value=1e-52, Identity=49%"; Hit description =Uncharacterized Cys-rich domain
  Pfam annotation: Domain name=PLAC8; Domain location=67-190; Score =112.3; E_value=1.6e-30; Accession=PF04749.9; Description=PLAC8 family
TEEEEEERRRGESESEGEESGMAAVLDFDMLCASVALSAERRKGAAAAEAAGDCGGGVGGGGVQRMWEGDVVLDCLEDRRIALEAACCPCYRFGKNMRRANLGSCFLQGMFYFVLLAAVLVSLIAFSVTKHHIYLYMGLASVLLVAIYTGYFRRRIRKQFNIRGTESSLDDCVLHLICPCCTLCQEARTLEMNNVQCGVWHGRGDTICLGSNGEGNKAFAALNKASLVPSKSPGS

SEQ ID NO: 90917 - protein, 110 aa, Setaria italica
  Transcript Sequence Number=SeqID_24943
  Homolog annotation: Hit_ID=Q2HTU7; Match level="QueryCoverage=80%, HitCoverage=35%, E-value=1e-17, Identity=49%"; Hit description =Uncharacterized Cys-rich domain
PDVLTIHPLLCLQGTESSLDDCVLHLICPCCTLCQEARTLEMNNVQCGVWHGRGDTICLGSNGEGNKAFAALNKASLVPSKSPGLCCMDRTSNAADEHEPLVPSAQPEQV

SEQ ID NO: 90918 - protein, 69 aa, Setaria italica
  Transcript Sequence Number=SeqID_24944
ELINSNRSLAFRSCLLYLRVKTRWTVARKRMESLVRGATWSIQHFQSYSLESTSNCVLLYYSSHHNMSI

SEQ ID NO: 90919 - protein, 282 aa, Setaria italica
  misc_feature (81)..(81): Xaa can be any naturally occurring amino acid
  Transcript Sequence Number=SeqID_24945
  Gene Ontology: Mol. function=pseudouridine synthase activity; Biological process=pseudouridine synthesis
  Homolog annotation: Hit_ID=B6SIS1; Match level="QueryCoverage=100%, HitCoverage=72%, E-value=1e-133, Identity=82%"; Hit description =Pseudouridylate synthase
  Pfam annotation: Domain name=PseudoU_synth_1; Domain location=117 -279; Score=23.4; E_value=6.6e-05; Accession=PF01416.12; Description =tRNA pseudouridine synthase
SIFCSSRTDAGVHALSNICHVDVERISKRKPGEVLTPHEPGVVKRAVNHFLQRNEGDIMVTDVRCVAPDFHARYKALERTXRYHYRLLSGPESTSVFEKNSAWHISEDLDIQAMKKACSILVGHHDFSSFRAAGCQANSPMRTLDELNVTEVFPFMFFPSSIERSEMESSDGSLIYSRTPALEPSRKESDDSCTSSGKSESENGKEFGSRLRHRCFVVTARARSFLYHQVRLMVGLLKSVGTGDLTTADVERILNAKKVTAAPPMAPACGLYLANVKYDLNV

SEQ ID NO: 90920 - protein, 119 aa, Setaria italica
  Transcript Sequence Number=SeqID_24946
RNNRIRGTTPDRRRGGRRRGGGGVGGQREEEAQAQDEQAQAPQAPEATPPPDMSALSAPVQRLLDLKPGSPMQLHTGSWLIACCGFLFGKGATCSIAAINCWVGTNSLETMTELIMKLS

SEQ ID NO: 90921 - protein, 89 aa, Setaria italica
  misc_feature (79)..(79): Xaa can be any naturally occurring amino acid
  Transcript Sequence Number=SeqID_24947
  Homolog annotation: Hit_ID=Q5N730; Match level="QueryCoverage=100%, HitCoverage=6%, E-value=4e-32, Identity=74%"; Hit description =Erythroid differentiation-related factor 1-like protein
MDAPGELQCVGRLEVAAPPPARYLRVGSLPVPTDSSASLPALLPSPSPTGAPRYQMLPLETDLNTLPMIPNIPEKVFPXDAKNTEGLRY

SEQ ID NO: 90922 - protein, 82 aa, Setaria italica
  Transcript Sequence Number=SeqID_24948
  Gene Ontology: Mol. function=catalytic activity
  Homolog annotation: Hit_ID=Q01B77; Match level="QueryCoverage=76%, HitCoverage=20%, E-value=2e-09, Identity=42%"; Hit description =CNPV141 HAL3-like domain protein (ISS)
  Pfam annotation: Domain name=Cmc1; Domain location=1-61; Score=64.4; E_value=4.3e-16; Accession=PF08583.2; Description=Cytochrome c oxidase biogenesis protein Cmc1
MHPPLTLHRHPMCAEIIEEFQKCHLDHPVKKFFGECTDLKIKLDRCFRQEKALKRKANFEESKKFKEQLQAYKREIAEKNEE

SEQ ID NO: 90923 - protein, 235 aa, Setaria italica
  Transcript Sequence Number=SeqID_24949
  Homolog annotation: Hit_ID=Q01IG4; Match level="QueryCoverage=75%, HitCoverage=11%, E-value=1e-12, Identity=35%"; Hit description =H0805A05.2 protein
IGPSKASAQETSEPSAGAKELSKSTGDAHKVELNGRDEIAVKSSGLTLSSSGLNDENQGGKLVQFTSDALASTDLISEQGKIDHAIKGCRNPAIGDAIYSVGEVVACDGENPKGSSTPWNGGERHEQIKQHDQGSHDEVVAEISNMEKDGKGTDALEKRQTNDNTSQLKKRKKAKKAGSVDRASLDTIHEKEMHGYRENAVRLDAVSTERGIVHDPLPQQPNNVHQGESNIIENP

SEQ ID NO: 90924 - protein, 73 aa, Setaria italica
  Transcript Sequence Number=SeqID_24950
  Subcellular localization annotation: CTP_CleavageSite=59; ConfidenceScore=5.15e-01
RRVRASLLVYSRPNLQPPLPPQFPSRPAPTQIRAPLIPIPAPKSNLAPSSSPDSRIDLGAEIESSLGVVLGAE

SEQ ID NO: 90925 - protein, 427 aa, Setaria italica
  Transcript Sequence Number=SeqID_24951
  Gene Ontology: Mol. function=protein serine/threonine kinase activity; Cellular component=plasma membrane; Biological process =protein amino acid phosphorylation
  Homolog annotation: Hit_ID=Q10R62; Match level="QueryCoverage=100%, HitCoverage=100%, E-value=0.0, Identity=83%"; Hit description =Serine/threonine-protein kinase NAK, putative, expressed
  Pfam annotation: Domain name=Pkinase; Domain location=87-367; Score =150.3; E_value=5.8e-42; Accession=PF00069.17; Description=Protein kinase domain
  Pfam annotation: Domain name=Pkinase_Tyr; Domain location=87-367; Score=126.5; E_value=8.7e-35; Accession=PF07714.9; Description =Protein tyrosine kinase
  Pfam module annotation: Pfam domain module=Pkinase::Pkinase_Tyr; Domain location=87-367::87-367
  Subcellular localization annotation: CTP_CleavageSite=68; ConfidenceScore=5.83e-01
MGNCMDTTARVDHSMNNATYPSKVTSKTSLSSLPSTIKSNSTRSTLTLPSMRDRSELPTPRTEGEILSSSNLKAFTFNDLKTATKNFRPDSLLGEGGFGHVYKGWIDEHTLAPSRPGSGLVVAVKKLKPEGFQGHKEWLTEVDYLGQLHHKNLVKLIGYCSDGDNRLLVYEFMPKGSLENHLFRRGADPLSWAIRLKVAIGAARGLSFLHDAENQVIYRDFKASNILLDSEFHAKLSDFGLAKAGPTGDKTHVSTQVMGTHGYAAPEYIATGRLSAKADVYSFGVVLLELLTGRRALDKSKPGIEQNLVDWARPHLGDKRRLYRIMDTKLGGQYPKKGANAIASIALQCICGDAKMRPRMSQVLEELEQLQDAKYGSASPLVDIRKASHAVPRSPRSPMRVQPSPRRSLGAAAAASPLPGYRTAQVH

SEQ ID NO: 90926 - protein, 68 aa, Setaria italica
  Transcript Sequence Number=SeqID_24952
  Subcellular localization annotation: CTP_CleavageSite=29; ConfidenceScore=5.39e-01
PVAAFIRVRSVSASASTVPVNSRRVAAVSATAVGVLDLKHTVSSLSTAIGRADLYQFPGRHGMPRTSG

SEQ ID NO: 90927 - protein, 582 aa, Setaria italica
  misc_feature (382)..(382): Xaa can be any naturally occurring amino acid
  misc_feature (410)..(410): Xaa can be any naturally occurring amino acid
  Transcript Sequence Number=SeqID_24953
  Gene Ontology: Mol. function=zinc ion binding; Cellular component =nucleus; Biological process=regulation of transcription, DNA -dependent
  Homolog annotation: Hit_ID=Q2QWZ2; Match level="QueryCoverage=97%, HitCoverage=69%, E-value=0.0, Identity=62%"; Hit description=SWIRM domain containing protein, expressed
  Pfam annotation: Domain name=Myb_DNA-binding; Domain location=273 -318; Score=44.9; E_value=3.1e-10; Accession=PF00249.23; Description =Myb-like DNA-binding domain
  Pfam annotation: Domain name=SWIRM; Domain location=40-130; Score =81.8; E_value=2.4e-21; Accession=PF04433.9; Description=SWIRM domain
  Pfam annotation: Domain name=ZZ; Domain location=212-256; Score=3.5; E_value=0.099; Accession=PF00569.9; Description=Zinc finger, ZZ type
  Pfam module annotation: Pfam domain module=Myb_DNA-binding::SWIRM::ZZ; Domain location=273-318::40-130::212-256
MLPDHPSLSYDPDKPSTYVCTPPPLMEGCGVHKQFYGKLHIVPRHSDWFVPTTVHRLERQVVPQYFSGKSQGQTPEKYMMLRNRVIAKYLERPGKRLVFAECQGLVTSTPELYDLSRIVRFLESWGIINYLATGSVHRGLRMAASLIKEETTGELHLVSAPMKSIDGLILFDRPKCSIRADDIASAVSTSSAPVVANGDANSANLDDKIWERLSETSCSFCSQPLPSLHYESQKEADIALCSDCFHNSRFVTGHSSLDFQRVDGMKDRSDTDGDRWTDQETLLLLEGIEKYNDNWNHIAGHVGTKSKAQCIQHFICLPVEDGLLENIEVPEASLPSRMQSNGFLNSDSNGSTSGCLPQSSQPGNQIPFINSANPVMSLVAFXASEVGPRVAAACASAALSVLTRDDSRMXSEGIDGVGHAAHLNYGPSSSISPETVKHAAMCGLSAAATKSKLFADQEEREIQRLAATIINHQLKRLELKLKQFAEVETMLLKESERFELTRQQLAAQRVRILSTRLPSSGGTLPGGGSTMVSNPMNQAAGLRPPMMQGSMPQSSMPAMYANHMQGHPQMAALLQQRQQMLS

SEQ ID NO: 90928 - protein, 63 aa, Setaria italica
  Transcript Sequence Number=SeqID_24954
NTLNPSTFTKRLFIHCIIKNNSRVSWSPHFQIAIGTKGGERKCSNQIHTLIATQSPSIQLKKE

SEQ ID NO: 90929 - protein, 111 aa, Setaria italica
  Transcript Sequence Number=SeqID_24955
AGGRSGVARTVLGYADAVAHHAGQAVAEGAKIINERMSTQNYKSVKQTVKRLEEVAVSSRGDDRVLVLRRWLRALQEVEAEVGGSGGTSGQNSTEPNPSKASLARVLFYDA

SEQ ID NO: 90930 - protein, 72 aa, Setaria italica
  Transcript Sequence Number=SeqID_24956
LMTCMHTKTRDAQNVIIYICNSLFRTPNQLNLDRRTHGVNYPLPTLLSMTERVDSSSSSYVIAGACPNNSYW

SEQ ID NO: 90931 - protein, 59 aa, Setaria italica
  Transcript Sequence Number=SeqID_24957
  Gene Ontology: Mol. function=DNA photolyase activity; Biological process=DNA repair
  Homolog annotation: Hit_ID=C1KGA5; Match level="QueryCoverage=98%, HitCoverage=8%, E-value=2e-24, Identity=94%"; Hit description =Cryptochrome 1
RSSWTGREGGVVPVWSPPAASGHSDPYAADEADISSRNYLDRHPQSHTMMNWSQLSQSL

SEQ ID NO: 90932 - protein, 123 aa, Setaria italica
  Transcript Sequence Number=SeqID_24958
  Gene Ontology: Mol. function=DNA photolyase activity; Biological process=DNA repair
  Homolog annotation: Hit_ID=C1KGA5; Match level="QueryCoverage=92%, HitCoverage=16%, E-value=1e-38, Identity=73%"; Hit description =Cryptochrome 1
IRAETELTADFGNISEDSRPEVPSNMHLQPRTEREETVDGGTANAVRMNGNHQQHNFQNNTHRVLGVAPSVSEASSSWTGREGGVVPVWSPPAASGHSDPYAADEADISRFNWLGVLKRELHM

SEQ ID NO: 90933 - protein, 732 aa, Setaria italica
  Transcript Sequence Number=SeqID_24959
  Gene Ontology: Mol. function=DNA photolyase activity; Cellular component=cytoplasm; Biological process=DNA repair
  Homolog annotation: Hit_ID=C1KGA5; Match level="QueryCoverage=93%, HitCoverage=97%, E-value=0.0, Identity=88%"; Hit description =Cryptochrome 1
  Pfam annotation: Domain name=DNA_photolyase; Domain location=16-188; Score=260.4; E_value=4.2e-75; Accession=PF00875.10; Description=DNA photolyase
  Pfam annotation: Domain name=FAD_binding_7; Domain location=220-497; Score=383.1; E_value=4.9e-112; Accession=PF03441.6; Description=FAD binding domain of DNA photolyase
  Pfam module annotation: Pfam domain module=DNA_photolyase::FAD _binding_7; Domain location=16-188::220-497
MSASQSSMSGAGEAGVRTLVWFRRDLRVEDNPALAAAARKAGEVVPAYVWAPEEDGAYYPGRVSRWWLSQSLKHLDASLRRLGASRLVTRRSDDAVVALLDLVRSTGATHLFFNHLYDPLSLVRDHRVKELLTAEGITVQSFNSDLLYEPWEVLDDDGCPFTMFAPFWNRCLCMPDPAAPLLPPKRINSGDLSRCPSDELIFEDESERGSNALLARAWSPGWQNADKALTAFLNGPLIDYSMNHKKADSASTSLLSPYLHFGELSVRKVFHQVRMKQLMWSNEGNHAGEESCTLFLRSIGLREYSRYLTFNHPCSHEKPLLSHLRFFPWVVNEVYFKVWRQGRTGYPLVDAGMRELWATGWLHDRIRVVVSSFFVKVLQLPWRWGMKYFWDTLLDADLESDALGWQYISGSLPDGRELDRIDNPQFEGYKFDPHGEYVRRWLPELARLPTEWIHHPWDAPESVLQAAGVELGSNYPRPIVELDAANSRLQDALSEMWELEAASRAAMENGMEEGLGDSSDVPPIAFPQELQMEVDRQPVRHATQTPMMAGRRREDQMVPSMTSSFIRAETELTADFGNISEDSRPEVPSNMHLQPRTEREETVDGGTANAVRMNGNHQQHNFQNNTHRVLGVAPSVSEASSSWTGREGGVVPVWSPPAASGHSDPYAADEADISSRNYLDRHPQSHTMMKFNWLGVSEERITYVNYHILCISSLGVHASHQSCSFLDAIMVM

SEQ ID NO: 90934 - protein, 96 aa, Setaria italica
  Transcript Sequence Number=SeqID_24960
  Gene Ontology: Mol. function=endonuclease activity; Cellular component=intracellular; Biological process=DNA repair
  Homolog annotation: Hit_ID=UPI00005DC310; Match level="QueryCoverage =95%, HitCoverage=15%, E-value=2e-26, Identity=54%"; Hit description =endonuclease/exonuclease/phosphatase family protein
QMFREWLRSMLREHGGPFLDAFRSKHPERTGAYTCFNQKIGAEEYNYGSRIDHILISGACLHHCNAVEDHSIFCCHVEECEIMNHFKRGNSESLSK

SEQ ID NO: 90935 - protein, 164 aa, Setaria italica
  misc_feature (28)..(28): Xaa can be any naturally occurring amino acid
  misc_feature (56)..(56): Xaa can be any naturally occurring amino acid
  Transcript Sequence Number=SeqID_24961
  Gene Ontology: Mol. function=endonuclease activity; Cellular component=intracellular; Biological process=DNA repair
  Homolog annotation: Hit_ID=UPI00005DC310; Match level="QueryCoverage =78%, HitCoverage=21%, E-value=1e-34, Identity=47%"; Hit description =endonuclease/exonuclease/phosphatase family protein
MLPVLRCSNFAAFRLCRTGAYTCFNQKXGAEEYNYGSRIDHILISGACLHHCNAVXDHSIFCCHVEECEIMNHFKRGNSESLSKWKGGRSSKLEGSDHIPVYILLKEIPELPVHNIPPSAARYLPEVRGRQQSIVSFFNKGKTYELQDDGNLVLSENTVNGSVL

SEQ ID NO: 90936 - protein, 192 aa, Setaria italica
  misc_feature (37)..(37): Xaa can be any naturally occurring amino acid
  misc_feature (72)..(72): Xaa can be any naturally occurring amino acid
  misc_feature (175)..(175): Xaa can be any naturally occurring amino acid
  Transcript Sequence Number=SeqID_24962
  Gene Ontology: Mol. function=endonuclease activity; Cellular component=intracellular; Biological process=DNA repair
  Homolog annotation: Hit_ID=B9S6N7; Match level="QueryCoverage=98%, HitCoverage=31%, E-value=6e-65, Identity=63%"; Hit description=Ap endonuclease, putative
SRQDLSADVIMAEGYEAFVSCNRSAKGRGAYSGVATXFCRVTSAFSSQEVALPVAAEEGFTGLHDYARNSEXFGEFVIATPVAEEGLGEITREDLLRVDNEGRCIITDHGHFVLFNIYGPAVEEDDKERVRFKLLFYKILQKRWEYLLALGKRVFVVGDLNIAPASIDRCDALPXFVEANSSVEWLRSMLRE

SEQ ID NO: 90937 - protein, 310 aa, Setaria italica
  Transcript Sequence Number=SeqID_24963
  Gene Ontology: Mol. function=endonuclease activity; Cellular component=intracellular; Biological process=DNA repair
  Homolog annotation: Hit_ID=B9S6N7; Match level="QueryCoverage=97%, HitCoverage=52%, E-value=5e-42, Identity=36%"; Hit description=Ap endonuclease, putative
  Pfam annotation: Domain name=zf-GRF; Domain location=254-304; Score =28.4; E_value=1.2e-05; Accession=PF06839.4; Description=GRF zinc finger
GNSESLSKWKGGRSSKLEGSDHIPVYILLKEIPELPVHNIPPSAARYLPEVRGRQQSIVSFFNKGKTYELQDDGNLVLSENTVNGSYYSDGLEKKAIVKEGLAAGITDLTKGGNLPSLMCKGTNPDQWRNEGLSGVSYNSQKTSPSGTKSVPNKKLKRNLSSQPTIKSFFQQPGPKTVNVSISTLVTPVETVHHTNQTCVPNDDSLPENMQCTTSAAEDQDNTNIPSCSISTDKSNAAALEWQRIQQKMKMTLPRCKGHREPCIPRSVKKGPNIGRLFYVCPRAQGPASNKEANCGHFQWAPVKSKEKRL

SEQ ID NO: 90938 - protein, 217 aa, Setaria italica
  Transcript Sequence Number=SeqID_24964
  Pfam annotation: Domain name=Collagen; Domain location=53-112; Score=- 35.9; E_value=0.032; Accession=PF01391.10; Description=Collagen triple helix repeat (20 copies)
  Subcellular localization annotation: CTP_CleavageSite=28; ConfidenceScore=5.60e-01
MPPSSGPSHGGSPPSSGYQPPSSGWSPSGQPVVAPPTEHPGGVWPPHSPSAPGTPGSTFPPTTPGAPGSPSTPTTPGTPGSTYPPTTPGAPGSPSSPTTPGGTPGSSTPGTPGSPSTPTTPGYHPPSPGTPSSPGSWSPPPHGGDHGGDHGNQHSPPSTPGGGGSGGFPFPPVHGVSYSSPPPPSDPGKLPFPFPPVHGVSYSSPPPPLLPPVHVYG

SEQ ID NO: 90939 - protein, 76 aa, Setaria italica
  Transcript Sequence Number=SeqID_24965
TRPTRSAWSGELFIGANAAFASMNPAPAELPRRFDKTRKTSGHSSPIYAILYFHTVVAQSLSAAPRLIVVADDLND

SEQ ID NO: 90940 - protein, 74 aa, Setaria italica
  Transcript Sequence Number=SeqID_24966
  Homolog annotation: Hit_ID=B6TS38; Match level="QueryCoverage=100%, HitCoverage=19%, E-value=1e-12, Identity=59%"; Hit description =Ribose-5-phosphate isomerase
MGSAATSPPPSVTQEDLKRVAAHMGDAAAASPLPSAKLTQEDLKRVAAHRAVEFVEPGMALGLGTGSTAAHALD

SEQ ID NO: 90941 - protein, 151 aa, Setaria italica
  Transcript Sequence Number=SeqID_24967
  Gene Ontology: Mol. function=ribose-5-phosphate isomerase activity; Biological process=pentose-phosphate shunt, non-oxidative branch
  Homolog annotation: Hit_ID=B6U823; Match level="QueryCoverage=64%, HitCoverage=38%, E-value=1e-37, Identity=79%"; Hit description =Ribose-5-phosphate isomerase
  Pfam annotation: Domain name=Rib_5-P_isom_A; Domain location=18-124; Score=-58.7; E_value=1.1e-06; Accession=PF06026.6; Description =Ribose 5-phosphate isomerase A (phosphoriboisomerase A)
GGGGGGSSGGGGGSGSGGGGTGGGGSGGGGTGGAPHTLGLIRKVFDGLPGFNARLRKVKKDAGEDTPFVTDNGNYIVEMFFEDGIHGDLHDISNQLLRITGVVEHGMFLGMATTVIVANKDGTVTISRHPKDPPMYCIRSVGEPQTRLSGA

SEQ ID NO: 90942 - protein, 111 aa, Setaria italica
  misc_feature (31)..(31): Xaa can be any naturally occurring amino acid
  Transcript Sequence Number=SeqID_24968
  Gene Ontology: Mol. function=ribose-5-phosphate isomerase activity; Biological process=pentose-phosphate shunt, non-oxidative branch
  Homolog annotation: Hit_ID=B6U823; Match level="QueryCoverage=100%, HitCoverage=43%, E-value=1e-45, Identity=80%"; Hit description =Ribose-5-phosphate isomerase
  Pfam annotation: Domain name=Rib_5-P_isom_A; Domain location=1-105; Score=-26.6; E_value=1.5e-09; Accession=PF06026.6; Description =Ribose 5-phosphate isomerase A (phosphoriboisomerase A)
GCTGAVPVEIIPFGAPHTLGLICKVFDGLPXFHARLRMVKKDAEEDTPFVTDNGNYIVEMFFEDGIHGDLHDISNQLLRITGVVEHGMFLGMATTVIVANKDGTVTVMDKN

SEQ ID NO: 90943 - protein, 257 aa, Setaria italica
  Transcript Sequence Number=SeqID_24969
  Gene Ontology: Mol. function=ribose-5-phosphate isomerase activity; Biological process=pentose-phosphate shunt, non-oxidative branch
  Homolog annotation: Hit_ID=B6U823; Match level="QueryCoverage=100%, HitCoverage=100%, E-value=1e-123, Identity=87%"; Hit description =Ribose-5-phosphate isomerase
  Pfam annotation: Domain name=DeoR; Domain location=18-155; Score= -62.2; E_value=0.1; Accession=PF00455.14; Description=Bacterial regulatory proteins, deoR fa
  Pfam annotation: Domain name=Rib_5-P_isom_A; Domain location=65-250; Score=248.4; E_value=1.7e-71; Accession=PF06026.6; Description =Ribose 5-phosphate isomerase A (phosphoriboisomerase A)
  Pfam module annotation: Pfam domain module=DeoR::Rib_5-P_isom_A; Domain location=18-155::65-250
MGSAAASPPPSGELLSQDDLKRVAAHRAVEFVEPGMTLGLGTGSTAAHALDRLGDLLRAGALPGVAGVPTSLKTELHAARAGIPLLPLDAASGARIRLSIDGADEVDPDLNLVKGRGGSLLREKMIEGAGERFVVIVDESKLVPRLGCTGAIPVEVVPFGAPHTLGLIRKVFDGLPGFNARLRKVKKDAGEVPFVTDNGNYIVEMFFEDGIRGDLRDISDSLLRITGVVEHGMFLGMATTVVVANRDGTVTVLHKKK

SEQ ID NO: 90944 - protein, 117 aa, Setaria italica
  Transcript Sequence Number=SeqID_24970
  Homolog annotation: Hit_ID=A7UQS8; Match level="QueryCoverage=100%, HitCoverage=25%, E-value=9e-26, Identity=53%"; Hit description=Metal ion transporter , putative
RLKENLGFITNRVTTLQASLDSWQSEQINKSLYYLSFLSIIFLPLSIVTGVFGMNVGGVPWTEQNKNPKNRDGFMNVMLICVAILLLLLLCFLFPSLYSHVTTWRTRRELKRNNSQN

SEQ ID NO: 90945 - protein, 112 aa, Setaria italica
  Transcript Sequence Number=SeqID_24971
AFSRQRSSGLAQRGGGEEEKRAAVAVRRSVDALSDAHALALYAPPAEVLLKDKFTDNEEPSKETFVFRSAYCEPAPAKGAAEAAPADGDRRRDIGTEMTPLGSSCHTPLKST

SEQ ID NO: 90946 - protein, 63 aa, Setaria italica
  misc_feature (48)..(48): Xaa can be any naturally occurring amino acid
  Transcript Sequence Number=SeqID_24972
  Gene Ontology: Mol. function=hydrolase activity, hydrolyzing O -glycosyl compounds; Biological process=carbohydrate metabolic process
  Homolog annotation: Hit_ID=Q60ES8; Match level="QueryCoverage=79%, HitCoverage=6%, E-value=1e-18, Identity=86%"; Hit description =Putative glycosyl hydrolase
IGLFSLQPVNIMDPHLVSTFHDDFKRSYLHCTLQLENKSSWIADCTLXKIQVSTELERPRDVY

SEQ ID NO: 90947 - protein, 875 aa, Setaria italica
  misc_feature (34)..(34): Xaa can be any naturally occurring amino acid
  Transcript Sequence Number=SeqID_24973
  Gene Ontology: Mol. function=hydrolase activity, hydrolyzing O -glycosyl compounds; Biological process=carbohydrate metabolic process
  Homolog annotation: Hit_ID=Q84XI2; Match level="QueryCoverage=99%, HitCoverage=89%, E-value=0.0, Identity=69%"; Hit description =Glycosyl hydrolase
  Pfam annotation: Domain name=Glyco_hydro_2; Domain location=110-229; Score=0.8; E_value=0.00071; Accession=PF00703.13; Description =Glycosyl hydrolases family 2, immunoglobulin-like beta-sandwich domain
TLTLNFRGINYSAEMYLNGHKEVLPKGMFRRHTXDITDVLHPDGNNMLAVLVHPPDHPGRIPPQGGQGGDHQIGKDVATQYVEGWDWMCPIRDRNTGIWDEVSISITGPVNIMDPHLVSTFHDDFKRSYLHCTLQLENKSSWIADCTLKIQVSTELEGNICLVEHLQSYAIAIPPQSDLEYTIPPLFFYKPNLWWPNGMGKQSLYYVEISVDVKGFGESDSWSHYFGFRKIESTIDNSTGGRIFKVNGEPIFIRGGNWILSDGLLRLTKKRYMTDIKFHADMNFNMLRCWGGGLAERPDFYHFCDVYGLMVWQEFWITGDVDGRGIPVSNPNGPLDHHLFLLCARDTIKLLRNHASLALWVGGNEQVPPVDINRALKNDLKLHPMFVSSQASNSQEKCLSEESTDPSKYLDGTRVYVQGSMWDGFANGKGDFTDGPYEIQYPESFFKDSFYKYGFNPEVGSVGVPVAATIRATMPPEGWSIPIFKKRIGGYIEEVPNPIWDYHKFIPYSKPGKVHDQIELYGHPKDLDDFCEKAQLVNYVQYRALLEGWTSFMWTKFTGLLIWKTQNPWTGLRGQFYDHLQDQTAGFYGCRCAAEPIHVQLNLASYFIEVVNTTADELADVAVEVSVWDLDGASPYYKVSEKIVVPPKKVKQIMEMKYPKMKDAKPVYFLLLKLFRLSDNGILSRNFYWLHLHGKDYKLLEQYQQKNIPLKIYTEVSVSGSRHKVRMTVENKSNKSVAENTSSVSTIDLGDASGSHNASKETTQQRNESGGSWRKIRSGLSIPRSSHNLRTLEVNGTDSGVAFFLHFSVHSSGSSTAKEKYNDTRILPVHYSDNYFSLTPGEKTAIDISFEAPPGSSPRVVLRGWNHHLDHAVMI

SEQ ID NO: 90948 - protein, 219 aa, Setaria italica
  Transcript Sequence Number=SeqID_24974
  Gene Ontology: Mol. function=receptor activity; Cellular component =endoplasmic reticulum; Biological process=intracellular protein transport
  Homolog annotation: Hit_ID=B6TG43; Match level="QueryCoverage=90%, HitCoverage=90%, E-value=8e-91, Identity=84%"; Hit description=B -cell receptor-associated protein 31-like containing protein
  Pfam annotation: Domain name=Bap31; Domain location=3-196; Score= -48.6; E_value=0.00025; Accession=PF05529.4; Description=B-cell receptor-associated protein 31-like
MIQLLFVVVLAEASVAAALLFKTPLRKLAVLGLDRLKRGRRAPVAVKTVAGVFLALLASTLYSMAEISGRASDPDSGGGLTPTDQVLFSRHLLEASLMGYTLFLMLVIDRLHQYIRDLRGFKKNLEAVSKHNNMLEEAKVGISEETKKYQEEIANLNKEMNKLKLQVQEKTEEVHVAEDKALAIQKQSEGLLIEYDRLLEDNQHLRIQLQSIDLRLSSS

SEQ ID NO: 90949 - protein, 100 aa, Setaria italica
  Transcript Sequence Number=SeqID_24975
  Gene Ontology: Mol. function=transferase activity, transferring glycosyl groups; Biological process=metabolic process
  Homolog annotation: Hit_ID=Q8LKT2; Match level="QueryCoverage=100%, HitCoverage=21%, E-value=1e-48, Identity=89%"; Hit description =Putative glucosyl transferase
WLDEFRCRVGGKGLVVGWAPQQRVLSHPSVACFISHCGWNSTMEGVRHGVPFLCWPYFADQFLNQSYICDLWGAGLRICADERGIVTKEEIRDKVARLLG

SEQ ID NO: 90950 - protein, 566 aa, Setaria italica
  Transcript Sequence Number=SeqID_24976
  Gene Ontology: Mol. function=nucleic acid binding; Cellular component= intracellular
  Homolog annotation: Hit_ID=B9RM26; Match level="QueryCoverage=90%, HitCoverage=99%, E-value=0.0, Identity=77%"; Hit description=Protein ariadne-1, putative
  Pfam annotation: Domain name=Fer4; Domain location=103-124; Score =7.7; E_value=0.026; Accession=PF00037.19; Description=4Fe-4S binding domain
  Pfam annotation: Domain name=IBR; Domain location=180-242; Score =89.1; E_value=1.6e-23; Accession=PF01485.13; Description=IBR domain
  Pfam annotation: Domain name=zf-C3HC4; Domain location=111-151; Score= 1.6; E_value=0.066; Accession=PF00097.17; Description=Zinc finger, C3HC4 type (RING finger)
  Pfam annotation: Domain name=zf-CCHC; Domain location=227-244; Score =8.0; E_value=0.033; Accession=PF00098.15; Description=Zinc knuckle
  Pfam module annotation: Pfam domain module=Fer4::IBR::zf-C3HC4::zf -CCHC; Domain location=103-124::180-242::111-151::227-244
AVVAASDDGDADYDFADRDSDDSGELLSHRQQQNYSILSEVDIKQCQEDDINRVSTVLSISKSEACVLLRNYNWSVSKVHDEWFADEERVRKVVGLPEKHMELPTDREVTCGICFESCPRGTMSAAACGHPFCSTCWRGYISTAINDGPGCLMLRCPDPSCAAAVGQEMINALADDEDKEKYGRYLRRSYIEDNRKTKWCPAPGCEYAVEFVMGSGSYDVNCNCSYGFCWNCTEEAHRPVDCATVSKWILKNSAESENMNWILANSKPCPKCKRPIEKNQGCMHITCTPPCKFEFCWLCLGPWSEHGERTGGFYACNRYESARQEGAYDESERRREMAKNSLERYTHYYERWAANQSSRQKALGDLQSLQNDKLEKLSDIQSQPESQLKFIIEAWLQIVECRRVLKWTYAYGFYLPEHEHAKRQFFEYLQGEAESGLERLHQCAEKELQVYLEAESPSKDFNDFRTKLAGLTSVTRNYFENLVRALETGLNDVGPSTSHGTCSKSATSKSLGGKSKSGKNRASSTSSKTGGSNRGVDDSNIWTCDQCTYANPKSARACQACDRQHR

SEQ ID NO: 90951 - protein, 342 aa, Setaria italica
  misc_feature (33)..(33): Xaa can be any naturally occurring amino acid
  Transcript Sequence Number=SeqID_24977
  Homolog annotation: Hit_ID=Q2QZW5; Match level="QueryCoverage=66%, HitCoverage=39%, E-value=2e-32, Identity=37%"; Hit description =Retrotransposon protein, putative, Ty3-gypsy subclass, expressed
  Pfam annotation: Domain name=Calmodulin_bind; Domain location=1-204; Score=-24.4; E_value=9.7e-09; Accession=PF07887.3; Description =Calmodulin binding protein-like
TNGEVELSQIHFKEGSCRKKFSMAARFCKTERXAGRVREAIMEPVEVKDRRNESNEKSKSPRLDDAVYRIEAIARDGAYHKRLQEANIHTVQDFLKALNKDSEELYKILKMKKKGKSWSKMTGHARKRVLEDRHELKAYQTEDGTLMLFFNCVHDLVGARFGSRYIACEQFDINHKASVKRLKEHVYNRLEDIPYDYVMKGNAPERISLGTGGAAGPSVVSVDARQPNSIANNLEAYQDHQVDARQPNSIANNLEAYQGAGAPENCPSDVFNPVTEPIDTYAYGPMYTDPLNTYDCQGQGIPPPFQEQTTLLSVGPDWQQNAQVPTNSPDLFEEFNLCSIQH

SEQ ID NO: 90952 - protein, 281 aa, Setaria italica
  Transcript Sequence Number=SeqID_24978
  Homolog annotation: Hit_ID=Q2QZW5; Match level="QueryCoverage=72%, HitCoverage=37%, E-value=1e-24, Identity=33%"; Hit description =Retrotransposon protein, putative, Ty3-gypsy subclass, expressed
  Pfam annotation: Domain name=Calmodulin_bind; Domain location=132 -281; Score=-111.3; E_value=0.0004; Accession=PF07887.3; Description =Calmodulin binding protein-like
  Subcellular localization annotation: CTP_CleavageSite=33; ConfidenceScore=5.26e-01
CRLGTGVGGGGGVLSPRSLTLRQILLVVLFLVRASARVTVTASVSQIGVTLDRTLRKYVEVFSSKLDSFQRQVEGKLKAFQGQVESKLETFHGQIEGLHEEVRQLARLHSNHHPERHTRLEPNQEHAASSGSNTNIHLRFRNKWKAPIYTDKDITDENKVAIKVEVFEGDKMITTGPLSKAKIEILVLHGSFYKKFHDNWTEEEFDKHTVQGRDGQMLVLGTVQLTNGEVELSQIHFKEGSCRKKFSMAARFCKTEKIAGRVREAIMEPVEVKDRRNECMR

SEQ ID NO: 90953 - protein, 84 aa, Setaria italica
  Transcript Sequence Number=SeqID_24979
RGLPSFVSFLPPLLMARPWPSLLLRCNLLLLHQQLRCGGRLRASVGAGRLHTHGGRHRYSRLVPLVGIGFAAALLLPHCAASPP

SEQ ID NO: 90954 - protein, 83 aa, Setaria italica
  Transcript Sequence Number=SeqID_24980
  Gene Ontology: Mol. function=hydrolase activity; Biological process =lipid catabolic process
  Homolog annotation: Hit_ID=Q2QNW3; Match level="QueryCoverage=74%, HitCoverage=12%, E-value=2e-12, Identity=58%"; Hit description =Patatin-like phospholipase family protein
TLCSATAAVDVATPENMKKLIEIGKRMLDQRVTRVNVKTGKYEDVPGDNRTNAQALEDLAKELSKERTAKRLKAGQASGGVAR

SEQ ID NO: 90955 - protein, 73 aa, Setaria italica
  Transcript Sequence Number=SeqID_24981
YLTVATHMRVSVSQNSEDEPEDGITAVLSTFGQSYLLLNFHIYWALNFCSSFDPVIHNPLAVPSSEAKLKWNS

SEQ ID NO: 90956 - protein, 362 aa, Setaria italica
  Transcript Sequence Number=SeqID_24982
  Gene Ontology: Mol. function=zinc ion binding; Cellular component =intracellular
  Homolog annotation: Hit_ID=B9S303; Match level="QueryCoverage=99%, HitCoverage=98%, E-value=8e-43, Identity=34%"; Hit description =Coiled-coil domain-containing protein, putative
MDQRKAIFRAKLRETKDKQQRRIDPSLVRYNEFDQPICRVCNITLKSEALWPAHQVSRKHHEAKAAAAAKVAPAAGAGPRLSTKQEQPVESHKQKSSTLPTNFFDNQGTKRQSDDTGSEGRSVRREVAVTQLKAKEASTDKPSVRLDQMAKKESQANTKGILPGNFFDYADEEEAPAPNELSTSGNIANSNHMQVKGVPDGFFDNNKTGNGTQSSEPTSFSKEAKSSETTQVKASLPEGFFDNKDADLRARGIQPQKVDMNDAYKEFEKEIQEDLQEVDDRLEEEEIDAAAEREEYLTLEQQEYRQRVDMLKKQLVESKAARTAKVNSKPVGMDTESSSDSSSEEEDDNTDFAVDWRAQHLK

SEQ ID NO: 90957 - protein, 376 aa, Setaria italica
  misc_feature (26)..(26): Xaa can be any naturally occurring amino acid
  Transcript Sequence Number=SeqID_24983
PIEVVIEVAAKEIRDSRLRTHILTVXKNMMSLRRKSSGNIPSGSSDSSFSAVDGNNPVELFGILGVCEKQKNPGEALLNKAKQMQWSLLAMIASCFPDVTPLSCLSVWLEITAAREMSSIKVDDISSKIAKNVESAVVATNKLPGTCRNVEFRYNRKNPKRRRFLEASPEKFTMCFSLDSSCGPNSAATSYPADIDAHQESGRSISGETIMSVDIDERLACLSSMVAVLCEQQLFLPLLRAFEMFLPSCSLLSFIRSLQAFSQMRLPEASAHLASFSVRIKDEASHTQLNSSKEVSVLAGWVAATAVKAADAVLSTCPSIYEKRCLLQLLSGVDFADSGSSSSYFSRRYWKINLSEPDLHKDTDIYDWNDFMDDAC

SEQ ID NO: 90958 - protein, 114 aa, Setaria italica
  Transcript Sequence Number=SeqID_24984
  Gene Ontology: Mol. function=molecular_function; Cellular component =mitochondrial inner membrane; Biological process=ubiquinone biosynthetic process
  Homolog annotation: Hit_ID=Q60D93; Match level="QueryCoverage=97%, HitCoverage=48%, E-value=5e-55, Identity=89%"; Hit description =Putaitve coenzyme Q biosynthesis protein
  Pfam annotation: Domain name=Coq4; Domain location=1-105; Score=44.9; E_value=7.6e-16; Accession=PF05019.5; Description=Coenzyme Q (ubiquinone) biosynthesis protein Coq4
SPNVATRAREVHDFWHVLFGLPTNLIGETALKVIEFEQMFLPMCMLSVVGGSARFSEKTRSLLSLHYFPWATKAGLKCTDLMSVYYEKHFHEDLEEVRRNWGILPCSDPKRRGV

SEQ ID NO: 90959 - protein, 127 aa, Setaria italica
  Transcript Sequence Number=SeqID_24985
  Gene Ontology: Mol. function=RNA binding
  Homolog annotation: Hit_ID=Q8LLB9; Match level="QueryCoverage=97%, HitCoverage=11%, E-value=1e-15, Identity=44%"; Hit description=BPM
RRCDDPLMDRGHLGNSYMDLLGPQKANLGPLLQSQKQDCHSNHIAFVTEVKGQKQYGYYGNLGFNLGYAGSPLTSPVLPSSPIAPGSPLRHGDRSMRFPSGMRNFGGSFGSWNSGMGGKMDANLMPS

SEQ ID NO: 90960 - protein, 29 aa, Setaria italica
  Transcript Sequence Number=SeqID_24986
LGKHIVARVEKLVAAGEKRLGLQPACTAA

SEQ ID NO: 90961 - protein, 561 aa, Setaria italica
  misc_feature (545)..(545): Xaa can be any naturally occurring amino acid
  Transcript Sequence Number=SeqID_24987
  Gene Ontology: Mol. function=RNA binding
  Homolog annotation: Hit_ID=Q94HK0; Match level="QueryCoverage=100%, HitCoverage=63%, E-value=1e-177, Identity=62%"; Hit description =Putative pumilio/Mpt5 family RNA-binding protein
  Pfam annotation: Domain name=NABP; Domain location=192-511; Score =614.3; E_value=1.3e-181; Accession=PF07990.4; Description=Nucleic acid binding protein NABP
  Pfam annotation: Domain name=PUF; Domain location=512-546; Score =34.7; E_value=3.7e-07; Accession=PF00806.11; Description=Pumilio -family RNA binding repeat
  Pfam module annotation: Pfam domain module=NABP::PUF; Domain location= 192-511::512-546
LRSGSAPPTVEGAMGAAAAAGSLFLDDDLRADPAYQSYYYSNAHGPGLRGPPLLSKEDWRSSHHRLRSSGLGGIGDGRRQQQPAAAAEGTVGLPGIDLGRHRSFSNVFQDDSYQRDMDRQTANHSSNDLLGSSGIQYGLHRGSGAMGGLHSSNNSRGLDEIQNNDLSSNTYASILGSSLSRSASPDPELVRRAPSPSLPPIGVKVGANDKKINGGSSSFRRSSSAIGESDDLVAALSGMSLSSRAMSGQTMDQSQLYQDVDNVQKFLFDRQGDQSNGNQQHSYMRRPEHGQSKVPDGYSPNLANSSTMRNQINAGSFTSFDNLSLGSGFASPRIGSRSPGGTISSRQNLAGMSNMLNYSGIGSPTASPSLQTPIDPAYIQYLAQLAASCDDPLMDRGHLGNSYMDLLGPQKANLGPLLQSQKQYGYYGNLGFNLGYAGSPLTSPVLPSSPIAPGSPLRHGDRSMRFPSGMRNFGGSFGSWNSGMGGKMDANLMPSLLEEFKSNKSKSYELSEIAGHVVEFSADQYGSRFIQQKLETASTEEKDMXFSEIMPQALTLMTDVF

SEQ ID NO: 90962 - protein, 443 aa, Setaria italica
  Transcript Sequence Number=SeqID_24988
  Gene Ontology: Mol. function=RNA binding
  Homolog annotation: Hit_ID=Q94HK0; Match level="QueryCoverage=100%, HitCoverage=52%, E-value=0.0, Identity=84%"; Hit description =Putative pumilio/Mpt5 family RNA-binding protein
  Pfam annotation: Domain name=NABP; Domain location=1-106; Score= -116.3; E_value=0.0096; Accession=PF07990.4; Description=Nucleic acid binding protein NABP
  Pfam annotation: Domain name=PUF; Domain location=107-141; Score =37.2; E_value=6.5e-08; Accession=PF00806.11; Description=Pumilio -family RNA binding repeat
  Pfam annotation: Domain name=PUF; Domain location=143-177; Score =37.5; E_value=5.2e-08; Accession=PF00806.11; Description=Pumilio -family RNA binding repeat
  Pfam annotation: Domain name=PUF; Domain location=179-213; Score =27.5; E_value=5.4e-05; Accession=PF00806.11; Description=Pumilio -family RNA binding repeat
  Pfam annotation: Domain name=PUF; Domain location=215-249; Score =31.8; E_value=2.8e-06; Accession=PF00806.11; Description=Pumilio -family RNA binding repeat
  Pfam annotation: Domain name=PUF; Domain location=251-285; Score =41.7; E_value=2.9e-09; Accession=PF00806.11; Description=Pumilio -family RNA binding repeat
  Pfam annotation: Domain name=PUF; Domain location=288-322; Score =39.4; E_value=1.4e-08; Accession=PF00806.11; Description=Pumilio -family RNA binding repeat
  Pfam annotation: Domain name=PUF; Domain location=324-358; Score =29.0; E_value=1.9e-05; Accession=PF00806.11; Description=Pumilio -family RNA binding repeat
  Pfam annotation: Domain name=PUF; Domain location=366-400; Score =37.9; E_value=4e-08; Accession=PF00806.11; Description=Pumilio -family RNA binding repeat
  Pfam module annotation: Pfam domain module=NABP::PUF::PUF::PUF::PUF::P UF::PUF::PUF::PUF; Domain location=1-106::107-141::143-177::179 -213::215-249::251-285::288-322::324-358::366-400
  Subcellular localization annotation: CTP_CleavageSite=63; ConfidenceScore=5.17e-01
LLGPQKANLGPLLQSQKQYGYYGNLGFNLGYAGSPLTSPVLPSSPIAPGSPLRHGDRSMRFPSGMRNFGGSFGSWNSGMGGKMDANLMPSLLEEFKSNKSKSYELSEIAGHVVEFSADQYGSRFIQQKLETASTEEKDMVFSEIMPQALTLMTDVFGNYVVQKFFEHGSTAQIKELAGQLIGRVLALSLQMYGCRVIQKAIEVVDLDLQTKMVAELEGHVMRCVRDQNGNHVIQKCIECIPQHAIEFIVSTFYGQVVMLSTHPYGCRVIQRVLEHCDDPKTQQIMMDEILQSVCLLAQDQYGNYVVQHVLEHGKPHERSAIIEKLIGQIVQMSQQKFASNVIEKCLAFGNPVERQVLIGEMLGSTSESEPLEVMMKDQFANYVVQKVLETCDDQQREMILTRIKTHLNTLKKYTYGKHIVARVEKLVAAGEKRLGLQPACTAA

SEQ ID NO: 90963 - protein, 130 aa, Setaria italica
  misc_feature (122)..(122): Xaa can be any naturally occurring amino acid
  Transcript Sequence Number=SeqID_24989
  Subcellular localization annotation: CTP_CleavageSite=66; ConfidenceScore=5.15e-01
CWRSLRRTPGTSDAIAVAPKATFNLCLETGDCRTRRGRSPPPLRTIAVRRRRFLSLLLPPVNTRPEATASAAYDPTKREASASARLSHPGIPPVGSGRRWRLARRTRRRCLPSLALLSLSPXLSPSLSLY

SEQ ID NO: 90964 - protein, 97 aa, Setaria italica
  Transcript Sequence Number=SeqID_24990
KLKQIVNFSCSFRKTGNLEKLSLYEKLERLVLAYQEKKLQQILRKTQKLWLKQTGHPSGPNPKPFISPFWNFLVLQAISNTVLVAVDSKGFPTLRLA

SEQ ID NO: 90965 - protein, 88 aa, Setaria italica
  Transcript Sequence Number=SeqID_24991
  Gene Ontology: Mol. function=transcription factor activity; Cellular component=nucleus; Biological process=regulation of transcription, DNA-dependent
  Homolog annotation: Hit_ID=Q84P66; Match level="QueryCoverage=96%, HitCoverage=7%, E-value=5e-26, Identity=69%"; Hit description=TF -like protein (Fragment)
  Pfam annotation: Domain name=PHD; Domain location=24-85; Score=-3.6; E_value=0.065; Accession=PF00628.21; Description=PHD-finger
NGRDGSVPQLVQEIQDKLARGAVECMICYDMVRRSAPIWSCDSCFSIFHLPCIRKWVRSPASAADASPAADPASPSWRCPGCQSVYDP

SEQ ID NO: 90966 - protein, 83 aa, Setaria italica
  Transcript Sequence Number=SeqID_24992
NLILGSVNDGAATGWWGDANPISDREKRKHSSIRTNIRVEYLGNHSLLRPPFSYLFPSVGQPKEKEIRQALDSRTMQACSSSG

SEQ ID NO: 90967 - protein, 58 aa, Setaria italica
  Transcript Sequence Number=SeqID_24993
KLLVIDLLGETVIKIPSWLRLVGCLVSRNELSFACPEVGDALAWLLSVTKQEIGRLLL

SEQ ID NO: 90968 - protein, 85 aa, Setaria italica
  Transcript Sequence Number=SeqID_24994
AGVSSMGVTGNGKDQLEVVGDGVDTVCLVKCLRKKLGHADILKVEEVKDKKPEEKKPEEPKVVDLPPYYYPGYYYHHHHLPAPWW

SEQ ID NO: 90969 - protein, 109 aa, Setaria italica
  Transcript Sequence Number=SeqID_24995
  Gene Ontology: Mol. function=metal ion binding; Biological process =metal ion transport
  Homolog annotation: Hit_ID=Q01IL4; Match level="QueryCoverage=62%, HitCoverage=50%, E-value=6e-16, Identity=70%"; Hit description =OSIGBa0150F01.6 protein
  Pfam annotation: Domain name=HMA; Domain location=7-75; Score=13.5; E_ value=0.072; Accession=PF00403.18; Description=Heavy-metal-associated domain
MTKQKIVIRVSQLASEKTRSKAMALVAKADGVSSMGVTGDGKDQLEVVGDGVDTVCLVQCLRRKIGPAEILKVEEVKPAEKKPEEKKPEPLPYWWYHNYYHYHPPPPCW

SEQ ID NO: 90970 - protein, 66 aa, Setaria italica
  Transcript Sequence Number=SeqID_24996
SYIKILGNSRIALFFIACMHEAECTKTEHCNSRNLFGLFGSSQMVRLCLSCALRENSPTEMKVSEI

SEQ ID NO: 90971 - protein, 80 aa, Setaria italica
  Transcript Sequence Number=SeqID_24997
  Gene Ontology: Mol. function=transferase activity, transferring nitrogenous groups; Cellular component=endoplasmic reticulum membrane; Biological process=biosynthetic process
  Homolog annotation: Hit_ID=A9XU57; Match level="QueryCoverage=72%, HitCoverage=19%, E-value=8e-25, Identity=87%"; Hit description =Serine C-palmitoyltransferase
GKPAAILFGMGYVTNSAIIPCLIGKGGLIISDSLNHNSIVNGARGSGATVRVFQHNSPRITLIAEITCCTAGGDMEVAYR

SEQ ID NO: 90972 - protein, 176 aa, Setaria italica
  Transcript Sequence Number=SeqID_24998
  Gene Ontology: Mol. function=transferase activity, transferring nitrogenous groups; Cellular component=endoplasmic reticulum membrane; Biological process=biosynthetic process
  Homolog annotation: Hit_ID=Q852R1; Match level="QueryCoverage=97%, HitCoverage=34%, E-value=3e-76, Identity=80%"; Hit description =Serine palmitoyltransferase
FGSCGGYIAASKEIIQHLKHSCPAHLYATSMSPPAVQQVISAIKVILGEDGSNRGAQKLARIRENSNFFRSELKKMGFEVLGDNDSPVMPIMLYNPAKIPAFSRECLRQKVAVVTVAFPATPLLLARARICISASHTREDLMKALDVISRVGDLVGIKYFPAEPPKIAEVGHDKLE

SEQ ID NO: 90973 - protein, 404 aa, Setaria italica
  Transcript Sequence Number=SeqID_24999
  Gene Ontology: Mol. function=transferase activity, transferring nitrogenous groups; Cellular component=endoplasmic reticulum membrane; Biological process=biosynthetic process
  Homolog annotation: Hit_ID=Q852R1; Match level="QueryCoverage=100%, HitCoverage=82%, E-value=0.0, Identity=85%"; Hit description=Serine palmitoyltransferase
  Pfam annotation: Domain name=Aminotran_1_2; Domain location=100-403; Score=99.5; E_value=1.2e-26; Accession=PF00155.13; Description =Aminotransferase class I and II
  Pfam annotation: Domain name=Beta_elim_lyase; Domain location=139 -397; Score=-122.7; E_value=0.036; Accession=PF01212.13; Description =Beta-eliminating lyase
  Pfam module annotation: Pfam domain module=Aminotran_1_2::Beta_elim _lyase; Domain location=100-403::139-397
MVRLPYTTALTTLFSYGLLFAFGQLRDFFRKLVDWFKAKNVKGYAPICLGLEDFYVRRLYLRIQDCFGRPIASAPDSWFDVVERTSNDNNKTLQRTSNTTRCLNLGSYNYLGFAAADEYCTPRVIQSLKKYSASTCSVRVDGGTTKLHTELEELAARFVGKPAAILFGMGYVTNSAIIPCLIGKGGLIISDSLNHNSIVNGARGSGATVRVFQHNSPAHLEEVLREQIAGGQPRTHRPWKKIIVIVEGIYSMEGELCKLPEIIAVCKKYKAYTYLDEAHSIGAVGQSGRGVCELLGVDPADVDIMMGTFTKSFGSCGGYIAASKEIIQHLKHSCPAHLYATSMSPPAVQQVISAIKVILGEDGSNRGAQKLARIRENSNFFRSELKKMGFEVLGDNDSPVMPIM

SEQ ID NO: 90974 - protein, 127 aa, Setaria italica
  Transcript Sequence Number=SeqID_25000
PGSVMARIDLFTDEDDEHHVHFMVGSSSDEDTEAQYIALINGYGYTGPGDKLSAQGPGSTSASDLDQLIFDIDDEGSVTGRTEEAPSCVRSKCSQNSVTVPSKASRIPLHKIPPIVMEQMTNQDSAI

SEQ ID NO: 90975 - protein, 44 aa, Setaria italica
  Transcript Sequence Number=SeqID_25001
NNIFAIDFTRKILLPGRPSEETKVDDIVTGEDKIITVSSNTNIL

SEQ ID NO: 90976 - protein, 57 aa, Setaria italica
  misc_feature (41)..(41): Xaa can be any naturally occurring amino acid
  Transcript Sequence Number=SeqID_25002
MTKQKIVIKVQMTCDKCRRSALTLAGSTYGVQSVAIGGGGXDQLVVVGDGVDATSLA

SEQ ID NO: 90977 - protein, 74 aa, Setaria italica
  Transcript Sequence Number=SeqID_25003
  Subcellular localization annotation: CTP_CleavageSite=65; ConfidenceScore=5.13e-01
KQKTKVVCCTPTKANNQKNRATLQSTCRNIDRIMLVSLHFPTQTYTNVNRQNPKKVGIIPQLFTRDSTSMRTAT

SEQ ID NO: 90978 - protein, 49 aa, Setaria italica
  Transcript Sequence Number=SeqID_25004
PISLCKSRLFEKLSCTEPLKQLLAIFQQLDSCIQYNCKWSIDHIIDHLI

SEQ ID NO: 90979 - protein, 322 aa, Setaria italica
  Transcript Sequence Number=SeqID_25005
  Homolog annotation: Hit_ID=Q7XS27; Match level="QueryCoverage=63%, HitCoverage=28%, E-value=6e-28, Identity=44%"; Hit description =OSJNBa0080E14.9 protein
  Pfam annotation: Domain name=Filament; Domain location=24-304; Score=- 190.6; E_value=0.058; Accession=PF00038.13; Description=Intermediate filament protein
GDEGPNARLEEAAAERARSLKLLREKEAEVAAVSSEVARLEALLAELQGKNSELFGEKGELAEKLEEAKKVVRVVSSEKMEVERHLQQFRKAAETYRVEMECKLKAKVEELKVLGAKKVEIEARVESLETKLVAAMAEKRELEAEVVAKKRESDLVKGENDKLQSEVVAAEKKHTVAVAEVESLRTELGTVLTAKEAAAKAFDAEKARLVGELEGLKRKLEETQADKEAAEGATREKDAQAGKLRAELEELHTSMSQLQASCNDLDMKRLRLHDEKNSVLKALDAEKAEAVKLSSKIEELEKCNGKKDGDIGKLKAALEEKK

SEQ ID NO: 90980 - protein, 96 aa, Setaria italica
  Transcript Sequence Number=SeqID_25006
GGGDGRAPRLSLSASSSASIVIERGSKSEEEEAARWEGQWEKKRRKKKTAGAAWSFSMVDPRWHEEVARHVIKSGNIVASFVRGWQICRCIHKDGN

SEQ ID NO: 90981 - protein, 107 aa, Setaria italica
  misc_feature (53)..(53): Xaa can be any naturally occurring amino acid
  Transcript Sequence Number=SeqID_25007
  Subcellular localization annotation: CTP_CleavageSite=32; ConfidenceScore=5.42e-01
QPNPTRPAGRQRRTNAKRRLTHPPTHKPARSPAATRSCPRPHLPPPPPQRPRXPHHATPHRVVRAPTVAGPPQIKPPPRSDPVATAWSAAAPPEPRRKGGAQGGMLE

SEQ ID NO: 90982 - protein, 148 aa, Setaria italica
  Transcript Sequence Number=SeqID_25008
  Gene Ontology: Mol. function=ubiquitin-protein ligase activity; Cellular component=ubiquitin ligase complex; Biological process =ubiquitin-dependent protein catabolic process
  Homolog annotation: Hit_ID=B6SV52; Match level="QueryCoverage=100%, HitCoverage=19%, E-value=2e-34, Identity=52%"; Hit description =Ubiquitin-protein ligase
EAFHEFLKDDSGTCTLQARRAGIHFFLAFLSSGRDRIPSVCEDVVLLIALLLDSEFKREALLIVHELLQEQRCQKSSLMASIVAPLVFGALDSGDTKCLDLALKIICKISSDNDIKPDLVSSGIISKLSPLLSEGRMTESSLKILRNL

SEQ ID NO: 90983 - protein, 82 aa, Setaria italica
  Transcript Sequence Number=SeqID_25009
  Gene Ontology: Mol. function=sulfotransferase activity
  Homolog annotation: Hit_ID=B6TRN9; Match level="QueryCoverage=100%, HitCoverage=25%, E-value=4e-18, Identity=55%"; Hit description =Flavonol 4-sulfotransferase
VPFTDEEESRGAVEEVVRLCSFQHLKSLPVNSQGVTERIGTDNSLFFRTGKVGDWANHMTVEMARKLDCMTEEKLRGSGLTF

SEQ ID NO: 90984 - protein, 65 aa, Setaria italica
  Transcript Sequence Number=SeqID_25010
YPAYASAALGGSGGSGLLPSLLMPGGGPLGQVEGLKLPMLAQSSLQQQHPLLRHRQAMQAAGLVA

SEQ ID NO: 90985 - protein, 136 aa, Setaria italica
  Transcript Sequence Number=SeqID_25011
  Gene Ontology: Mol. function=protein serine/threonine kinase activity; Biological process=protein amino acid phosphorylation
  Homolog annotation: Hit_ID=Q9FZP3; Match level="QueryCoverage=51%, HitCoverage=8%, E-value=3e-19, Identity=57%"; Hit description=S -receptor kinase
IVRGRKNSKKQPEEEEEHATTGSSGGASSEHTTSGYFPAVAVELHEQGRHAELLDPRLEGRADVAQVERVVRVALCCLHEDAALRPTMAIVSAMLDGSMDAAEPRPDLLRYLRMYGRGLVDLRPAAVGWMAKGSDT

SEQ ID NO: 90986 - protein, 76 aa, Setaria italica
  Transcript Sequence Number=SeqID_25012
TCSLRVFNMCNLPKAECIGKSLIYSTYATKNISIGLLIVCNRYRTKSIIRLGNGFAISMIENDYFFNLKNIKNPKA

SEQ ID NO: 90987 - protein, 87 aa, Setaria italica
  Transcript Sequence Number=SeqID_25013
LAQKVWRSRIRLLTRSPLEPGRVPSDRRVLLYSSGAHLVGFTVILAAHYVSVYGRPVRDDGSYMDARGRTHALREWAVTLEEYVGMA

SEQ ID NO: 90988 - protein, 189 aa, Setaria italica
  Transcript Sequence Number=SeqID_25014
MGSSSKVVRPEDVLESLKNDGSIDALRMKIIAQLKANEDMKKNTMMMVEQSKVLNTPGAEKKTKRELFDALRQELETPVLEKASKAVWELILDNGGLGKEITETVEKVFCRLSGIDMMPPPPPSAAGAHQEKVDMAIDEGEKSKEMDSFEPSSSRKRPFSDVNRKGAGAVPNGSATDQHDESDDSDQKM

SEQ ID NO: 90989 - protein, 161 aa, Setaria italica
  misc_feature (106)..(106): Xaa can be any naturally occurring amino acid
  Transcript Sequence Number=SeqID_25015
  Gene Ontology: Mol. function=RNA binding; Cellular component =ribonucleoprotein complex; Biological process=mRNA processing
  Homolog annotation: Hit_ID=Q84N48; Match level="QueryCoverage=97%, HitCoverage=19%, E-value=3e-51, Identity=69%"; Hit description=CRS2 -associated factor 2, chloroplastic
  Pfam annotation: Domain name=CRS1_YhbY; Domain location=12-90; Score =39.9; E_value=1e-08; Accession=PF01985.13; Description=CRS1  YhbY domain
YPKLIKEAPEGLTKEEADEMRGKGRNLPPICKLAKNGIYITLVKDVRDAFEGNDLVKIDCEGLNPSDYKKIGAKLRVLFIPMNFTVFISLPIVEVNPVYIFFLTPXLKLFTYLYLQDLVPCVLLSFDNEQILMYRGKEWKSRYSKPLTLIPKVPKNNPKYP

SEQ ID NO: 90990 - protein, 311 aa, Setaria italica
  Transcript Sequence Number=SeqID_25016
  Gene Ontology: Mol. function=RNA binding; Cellular component =ribonucleoprotein complex; Biological process=mRNA processing
  Homolog annotation: Hit_ID=Q84N48; Match level="QueryCoverage=100%, HitCoverage=49%, E-value=1e-122, Identity=72%"; Hit description=CRS2- associated factor 2, chloroplastic
  Pfam annotation: Domain name=CRS1_YhbY; Domain location=41-124; Score= 80.9; E_value=4.7e-21; Accession=PF01985.13; Description=CRS1  YhbY domain
VSTIYCTLRYDVRTRPRYPLMLWKPATPVYPKLIKEAPEGLTKEEADEMRSKGRNLPPICKLAKNGIYITLVKDVRDAFEGNDLVKIDCEGLNPSDYKKIGAKLRDLVPCVLLSFDNEQILMYRGKEWKSRYSKPLTLIPKVPKNNPTPKVPKNNPTMSSDASGSDVNEATDANTQFTVREVLRPKMFKLWESAVDSSLALLLDDAEANDLTPDSLLTRVEEFSVTSQAVEHSFPALLVANCEVNTESPSAEYINDESETSIAGNQEEQLEQSPDLSSDEHFELDMLERLESSVPLGSLPIDTMIEQLNSE

SEQ ID NO: 90991 - protein, 297 aa, Setaria italica
  misc_feature (65)..(65): Xaa can be any naturally occurring amino acid
  Transcript Sequence Number=SeqID_25017
  Gene Ontology: Mol. function=RNA binding; Cellular component =ribonucleoprotein complex; Biological process=mRNA processing
  Homolog annotation: Hit_ID=Q84N48; Match level="QueryCoverage=77%, HitCoverage=37%, E-value=1e-108, Identity=81%"; Hit description=CRS2- associated factor 2, chloroplastic
  Pfam annotation: Domain name=CRS1_YhbY; Domain location=75-158; Score= 97.4; E_value=5e-26; Accession=PF01985.13; Description=CRS1  YhbY domain
PTMPRPWTGKAPLLTKEEKARRRGVRLHTPLGQEPAQTVSPHGIMMEVFGRLLGVVLGLSAATGXTRDEVLGEPLTPAEVRALVKPHISHNRQLNIGRDGLTHNMLEMIHCHWRRQEVCKVRCRGVPTVDMNNLCYHLEEKSGGKVIHRVGGVVFLYRGRHYDPRTRPRYPLMLWKPATPVYPKLIKEAPEGLTKEEADEMRSKGRNLPPICKLGINLLVHLILMDNCSDSQTRQSDQAILVAKPDGLLFVFMSFTNFLFLTKKQYGEWPIRCRNLNPALHHVLDYILSITKCHNTN

SEQ ID NO: 90992 - protein, 101 aa, Setaria italica
  Transcript Sequence Number=SeqID_25018
  Subcellular localization annotation: CTP_CleavageSite=57; ConfidenceScore=5.42e-01
MAWLFAVWFLHRPNPIITVTFVGALPAVTFVVVLVTFAGGFPCIASLGVLITFLGVRTMRLVPRLLLVSSGYVDGEEEGEEEKNYYRSHGVRSLSYRQGSS

SEQ ID NO: 90993 - protein, 100 aa, Setaria italica
  misc_feature (85)..(85): Xaa can be any naturally occurring amino acid
  Transcript Sequence Number=SeqID_25019
  Gene Ontology: Mol. function=nucleic acid binding; Cellular component= nucleus; Biological process=nuclear mRNA splicing, via spliceosome
  Homolog annotation: Hit_ID=A7Y0E4; Match level="QueryCoverage=98%, HitCoverage=25%, E-value=2e-47, Identity=97%"; Hit description =Putative splicing factor 3b (Fragment)
MEVEKQDMSGDVACLAIAPVPEGRQRSRFLAVGSYDNTIRILSLDPDDCLQPLSVQSVSSAPESLLFLEVQASVGGEDGGDYPAXNLFLNAGLQNGVLSG

SEQ ID NO: 90994 - protein, 73 aa, Setaria italica
  Transcript Sequence Number=SeqID_25020
  Subcellular localization annotation: CTP_CleavageSite=38; ConfidenceScore=5.66e-01
MEATSPRLTRSASLSANRLPRSRTARFPPSPHLCPLSSAAAASPRALLPLRRARSDADLASFARSAVLLRHHT

SEQ ID NO: 90995 - protein, 80 aa, Setaria italica
  misc_feature (62)..(62): Xaa can be any naturally occurring amino acid
  Transcript Sequence Number=SeqID_25021
  Gene Ontology: Mol. function=structural constituent of ribosome; Cellular component=intracellular; Biological process=translation
  Homolog annotation: Hit_ID=Q7X9L6; Match level="QueryCoverage=96%, HitCoverage=97%, E-value=7e-28, Identity=81%"; Hit description=40S ribosomal protein (Fragment)
KFKDGYMISSGHPVNLYIDSAVRHVLLRQGVLGIKVKIMLDWDPKGKQGPIMPLPDLVTIHXPNEEDELMRPLAPEIPVA

SEQ ID NO: 90996 - protein, 232 aa, Setaria italica
  Transcript Sequence Number=SeqID_25022
  Gene Ontology: Mol. function=structural constituent of ribosome; Cellular component=small ribosomal subunit; Biological process =translation
  Homolog annotation: Hit_ID=Q2PYZ0; Match level="QueryCoverage=95%, HitCoverage=92%, E-value=1e-107, Identity=88%"; Hit description=40S ribosomal protein-like protein
  Pfam annotation: Domain name=KH_2; Domain location=47-104; Score =40.0; E_value=9.3e-09; Accession=PF07650.9; Description=KH domain
  Pfam annotation: Domain name=Ribosomal_S3_C; Domain location=106-190; Score=109.3; E_value=1.3e-29; Accession=PF00189.12; Description =Ribosomal protein S3, C-terminal domain
  Pfam module annotation: Pfam domain module=KH_2::Ribosomal_S3_C; Domain location=47-104::106-190
MATTHAISKKRKFVADGVFFAELNEMLTRELAEDGYSGVEVRVTPMRTEIIIRATRTQNVLGEKGRRIRELTSVVQKRFNFPEGGVELYAEKVNNRGLCAIAQAESLRYKLLGGLAVRRACYGVLRFVMESGAKGCEVIVSGKLRAQRAKSMKFKDGYMISSGHPVNLYIDSAVRHVLLRQGVLGIKVKIMLDWDPKGKQGPIMPLPDLVTIHPPKEEDELMRPLAPEIPVA

SEQ ID NO: 90997 - protein, 114 aa, Setaria italica
  Transcript Sequence Number=SeqID_25023
  Gene Ontology: Mol. function=inositol-1,3,4-trisphosphate 5/6-kinase activity; Cellular component=intracellular; Biological process =inositol trisphosphate metabolic process
  Homolog annotation: Hit_ID=B6TYJ7; Match level="QueryCoverage=77%, HitCoverage=17%, E-value=6e-38, Identity=87%"; Hit description =Inositol 1, 3, 4-trisphosphate 5/6-kinase family protein
IQPSKIQSLALLFLTQLNHGFCCVQALVFQIEEFSNLSVPLPAVLQEYVDHGSKIFKFYVIGDKVFHAVRNSMPNASFLKPSSGGEPLTFNSLKTLPVATKEQQLQTRVQDSKS

SEQ ID NO: 90998 - protein, 315 aa, Setaria italica
  Transcript Sequence Number=SeqID_25024
  Gene Ontology: Mol. function=inositol-1,3,4-trisphosphate 5/6-kinase activity; Cellular component=intracellular; Biological process =inositol trisphosphate metabolic process
  Homolog annotation: Hit_ID=B6TYJ7; Match level="QueryCoverage=100%, HitCoverage=62%, E-value=1e-158, Identity=86%"; Hit description =Inositol 1, 3, 4-trisphosphate 5/6-kinase family protein
  Pfam annotation: Domain name=Ins134_P3_kin; Domain location=1-300; Score=4.8; E_value=2.7e-11; Accession=PF05770.3; Description =Inositol 1, 3, 4-trisphosphate 56-kinase
YPSKDGLIFVPLSFELPLSSQLQEVDMVLHKITDEIVKIDPNCSIDFPKGISFSAGMSEIIRFVEEHPDFCIIDPFRNIYPLLDRLQIQNILVQLQELGTEGKPKLRAPYSLKVDNFHDGELDKHLAEANSSFPFIVKPQVACGVADAHNMALVFQIEEFSNLSVPLPAVLQEYVDHGSKIFKFYVIGDKVFHAVRNSMPNASFLKPSSGGEPLTFNSLKTLPVATKEQQLQTRVQDSKSVDTDLVEEAAKFLKESLGLTIFGFDVVVQEGTGDHVIVDLNYLPSFKEVPDSEAVPAFWDAIRQTYKSKRGKAQT

SEQ ID NO: 90999 - protein, 201 aa, Setaria italica
  Transcript Sequence Number=SeqID_25025
  Gene Ontology: Mol. function=inositol-1,3,4-trisphosphate 5/6-kinase activity; Cellular component=intracellular; Biological process =inositol trisphosphate metabolic process
  Homolog annotation: Hit_ID=B6TYJ7; Match level="QueryCoverage=90%, HitCoverage=36%, E-value=5e-75, Identity=76%"; Hit description =Inositol 1, 3, 4-trisphosphate 5/6-kinase family protein
NWFTSSHSFGYIPLLAKSGDCSPNELMLEWGRASSCFYVTSRVDRGLISELQNHHWRVVSVGDECSIEVPGVLNVGRLQELLLTLATLIKREIGASSVLVIGYVMKQSREEDFARRGAFPIYPSKDGLIFVPLSFELPLSSQLQEVDMVLHKITDEIVKIDPNCSIDFPKGISFSAGMSEIIRYITRPYLDLKEVISWACM

SEQ ID NO: 91000 - protein, 52 aa, Setaria italica
  Transcript Sequence Number=SeqID_25026
ERRNPNPNLGARAGQSGSARLQLRHGERLCRSLRHGRIFAEATAAWDQQLAD

SEQ ID NO: 91001 - protein, 150 aa, Setaria italica
  Transcript Sequence Number=SeqID_25027
  Homolog annotation: Hit_ID=B6TP81; Match level="QueryCoverage=90%, HitCoverage=31%, E-value=5e-60, Identity=82%"; Hit description=Ring canal kelch
RSAEVFDPAKNRWSFVAEMAAAMVPFLSAVHGGRWYVKGLGAQQEVLSQAYSPETDSWSVVLDGRVTGWRSPSACLGGRIYAADCKDGCRLRTYDDAADAWTTCVDSKQHRGSSQAAEAAAIVVLHGRLCVVRNDMSVSAVDVAAGAGNL

SEQ ID NO: 91002 - protein, 499 aa, Setaria italica
  Transcript Sequence Number=SeqID_25028
  Gene Ontology: Mol. function=hydrolase activity, hydrolyzing O -glycosyl compounds; Cellular component=extracellular region; Biological process=carbohydrate metabolic process
  Homolog annotation: Hit_ID=B6TTA1; Match level="QueryCoverage=94%, HitCoverage=87%, E-value=0.0, Identity=89%"; Hit description =Cellulase containing protein
  Pfam annotation: Domain name=Cellulase; Domain location=194-485; Score=14.3; E_value=3.1e-07; Accession=PF00150.10; Description =Cellulase (glycosyl hydrolase family
  Pfam annotation: Domain name=Fascin; Domain location=63-177; Score= -4.3; E_value=0.013; Accession=PF06268.5; Description=Fascin protein
  Pfam module annotation: Pfam domain module=Cellulase::Fascin; Domain location=194-485::63-177
PPSPSPSQVVPAPVPPYPALPVRAVCLGGWLVTEGWILPPLFDGIPNKDLLDGTQVQFKSALRKTYITADQGGGGAVLANRTQASDWETFQLWRINETTFNFRTSGGQFVGIGASDGIIVATATAPALPETFQIVRCPFDKNRVRIKAANGYFVQGIATGEVIADYGEPTRWSDWDASVFLMTKVGQQLQGEYQLCNGYGTDKAAPVLRDHWSTYIVEDDFKFIASSGLTAVRIPVGWWIASDPNPPAPYVGGSLQALDNAFKWAEKYKLGVIIDLHAAPGSQNPWEHSSSRDGTQEWGTTDANIAQTVQVIDFLASRYATSPSLFAVELMNEPLAPRATLDSLTRYYRDGYNAVRKHSPTAYVVMSNRLGISSANSTELLPFAGGFQGAVIDVHYYTMFNKMFDNFTVQQNIDFVRTNFSGELAAVTTQNGPLTFVGEWVAEWKVPNATKEDYQKYATAQMNAYGQATFGWSYWTVKNANNHWDLEWMIKNGYINLKG

SEQ ID NO: 91003 - protein, 108 aa, Setaria italica
  misc_feature (6)..(6): Xaa can be any naturally occurring amino acid
  misc_feature (18)..(18): Xaa can be any naturally occurring amino acid
  Transcript Sequence Number=SeqID_25029
  Homolog annotation: Hit_ID=B3V945; Match level="QueryCoverage=92%, HitCoverage=24%, E-value=6e-21, Identity=46%"; Hit description=PAE
  Pfam annotation: Domain name=PAE; Domain location=1-105; Score= -207.8; E_value=0.007; Accession=PF03283.5; Description =Pectinacetylesterase
ECFFPXAELIKSISTPTXIRNSGYDSYQVGNVVAPGGSDPGQSWSRCKADIRNCTSTQIEAMNEFRKEFVEALKVAQCKSNWGLFIDSCFNHCQTPFRITWHSQISLR

SEQ ID NO: 91004 - protein, 138 aa, Setaria italica
  Transcript Sequence Number=SeqID_25030
RTALFLCGITKCVCKPWDLKRVSINSLVDDSSGPAEKGEIDSLHEYLRAAMLYVRQADHGSLQPSDGGDGACKVDEVWKPYNLCVDVAPPYPGRLSCLRHLVRNQDEAHRLVQSGLSATFDRLYTKESLKLHDISPLN

SEQ ID NO: 91005 - protein, 98 aa, Setaria italica
  Transcript Sequence Number=SeqID_25031
  Gene Ontology: Mol. function=protein serine/threonine kinase activity; Biological process=protein amino acid phosphorylation
  Homolog annotation: Hit_ID=B9RSY9; Match level="QueryCoverage=98%, HitCoverage=7%, E-value=2e-43, Identity=81%"; Hit description=ATP binding protein, putative
ASDFWALGCVLYECYTGRPPFVGREFTQLVKSIISDPTPPLPDNPSRSLQNLIDCLLMKDPAERLQWSELCEHNFWRTSIAMIPLPPQPAFDNMIELS

SEQ ID NO: 91006 - protein, 28 aa, Setaria italica
  Transcript Sequence Number=SeqID_25032
ASLALVTTCLSGGVILSLRKASKEEGDK

SEQ ID NO: 91007 - protein, 51 aa, Setaria italica
  Transcript Sequence Number=SeqID_25033
LTTDPKPFGSELNSWNFQIRIRHQCHALIASAILSRQAELLPSQLSSGGYH

SEQ ID NO: 91008 - protein, 65 aa, Setaria italica
  Transcript Sequence Number=SeqID_25034
SGQMLLRTGLPTECTFVITSPNFVLNHHHAETPTSPHMKHWIANTYNKHFSLVSANSRCRFYTIL

SEQ ID NO: 91009 - protein, 61 aa, Setaria italica
  Transcript Sequence Number=SeqID_25035
  Gene Ontology: Cellular component=integral to membrane
  Homolog annotation: Hit_ID=B6TVF3; Match level="QueryCoverage=85%, HitCoverage=13%, E-value=4e-17, Identity=90%"; Hit description =Protein alx
  Pfam annotation: Domain name=TerC; Domain location=1-61; Score= -114.2; E_value=0.063; Accession=PF03741.8; Description=Integral membrane protein TerC family
MQATPLLLTLAVIELSDIAFAIDSIPAVFGVTRDPLIILSSNIFAISGKNSVCFFFLVYNY

SEQ ID NO: 91010 - protein, 322 aa, Setaria italica
  misc_feature (8)..(8): Xaa can be any naturally occurring amino acid
  misc_feature (18)..(18): Xaa can be any naturally occurring amino acid
  Transcript Sequence Number=SeqID_25036
  Gene Ontology: Cellular component=integral to membrane
  Homolog annotation: Hit_ID=B6TVF3; Match level="QueryCoverage=95%, HitCoverage=80%, E-value=1e-139, Identity=83%"; Hit description =Protein alx
  Pfam annotation: Domain name=TerC; Domain location=82-286; Score =300.8; E_value=2.8e-87; Accession=PF03741.8; Description=Integral membrane protein TerC family
TRRRRARXAEQEEGVSLXSEKEPVNSTPPRAQTNKGTEPVLESSMTGKGSAIRRVTLVILAAVLFGISIALRDGSEKASEYFAGYLLEQSLSVDNLFVFVLVFKYFKVPKEYQNRVLSYGIAGAVVFRAAMIVLGIATIEKFEAVNLLLALILLFTSYKLFAEEEEESDLSDNFIVKTCQKFIPVTDYYDGDRFFTIQDGLGKATPLLLTLAVIELSDIAFAIDSIPAVFGVTRDPLIILSSNIFAISGLRSLYVLISESMAELEYLQPSIGIVLGFIGTKMVFDFFGYHIPTEASLALVTTCLSGGVILSLRKASKEEGDK

SEQ ID NO: 91011 - protein, 125 aa, Setaria italica
  Transcript Sequence Number=SeqID_25037
  Gene Ontology: Mol. function=nucleotide binding; Biological process =defense response
  Homolog annotation: Hit_ID=Q01JX4; Match level="QueryCoverage=77%, HitCoverage=7%, E-value=5e-22, Identity=58%"; Hit description =B0809H07.6 protein
CCSCNSVMDLNSSLRVLKFEQCHVLKVFPLFESWKKLKIERKSWLPCVKELTICECPHLMAPNPLPPSSNVCKLHIARVSTLPTMEGSSSEKLVIGVQTWREFDKNGWLTDLDDRNWRGIDKMIG

SEQ ID NO: 91012 - protein, 188 aa, Setaria italica
  Transcript Sequence Number=SeqID_25038
  Gene Ontology: Mol. function=pseudouridine synthase activity; Biological process=tRNA pseudouridine synthesis
  Homolog annotation: Hit_ID=B6TRU2; Match level="QueryCoverage=82%, HitCoverage=31%, E-value=4e-52, Identity=74%"; Hit description =Pseudouridylate synthase/ transporter
  Subcellular localization annotation: CTP_CleavageSite=7; ConfidenceScore=5.17e-01
MPRPGAMAAAAAAALLPSSSSPLLRLPRRFLSLTATPYPLYYDLIVHRPADPKPPRSSSDAGGDRQPQSAPDEQTLDRAKRRYLRKRRSRLLPDPDAGAKPSSSSSSEFVELRPEVVDFPRLHAREEALYFHDTFAMPWEKDKHYRMLYRLEKKYFPHQSLDNAFVPADAGPTSDADRGLVFFDDEEK

SEQ ID NO: 91013 - protein, 72 aa, Setaria italica
  misc_feature (9)..(9): Xaa can be any naturally occurring amino acid
  misc_feature (42)..(42): Xaa can be any naturally occurring amino acid
  Transcript Sequence Number=SeqID_25039
  Gene Ontology: Mol. function=ATPase activity, coupled to transmembrane movement of substances; Cellular component=integral to membrane; Biological process=transport
  Homolog annotation: Hit_ID=C3SAF3; Match level="QueryCoverage=97%, HitCoverage=5%, E-value=3e-14, Identity=61%"; Hit description=MDR -like ABC transporter
LSTANIIAXGATNHMSVIQDAIGEKVLIFPLEYPLQLCKIHXQTYLMMGHFMSNFSTFVVAIIVAFACCWGG

SEQ ID NO: 91014 - protein, 61 aa, Setaria italica
  Transcript Sequence Number=SeqID_25040
  Subcellular localization annotation: CTP_CleavageSite=48; ConfidenceScore=5.07e-01
LLLPIGSPQLTKGIRRATVLSALAGFLFAPVADSLKIQHFRRRGKSVSPSSRKPTPAMGGL

SEQ ID NO: 91015 - protein, 99 aa, Setaria italica
  Transcript Sequence Number=SeqID_25041
  Gene Ontology: Mol. function=phosphoribosylanthranilate isomerase activity; Biological process=aromatic amino acid family biosynthetic process
  Homolog annotation: Hit_ID=B4FZQ3; Match level="QueryCoverage=95%, HitCoverage=30%, E-value=5e-42, Identity=83%"; Hit description=N-(5'- phosphoribosyl)anthranilate isomerase
IQIAPPSEEYVVDWFLVDSARGGSGKGFNWEKFRMPSAESKNGWLLAGGLHADNVCQAASALNPNGLDVSSGICYPDGLRKDPNRIHSFMSSVKRLSVR

SEQ ID NO: 91016 - protein, 38 aa, Setaria italica
  Transcript Sequence Number=SeqID_25042
  Gene Ontology: Mol. function=hydrolase activity, acting on ester bonds; Biological process=lipid metabolic process
LSWDGLHMTEAVYRIMARGILDGPFAMPPIMSRCKRGI

SEQ ID NO: 91017 - protein, 315 aa, Setaria italica
  Transcript Sequence Number=SeqID_25043
  Gene Ontology: Mol. function=transferase activity; Cellular component= membrane
  Homolog annotation: Hit_ID=B6SRZ8; Match level="QueryCoverage=99%, HitCoverage=68%, E-value=1e-154, Identity=86%"; Hit description =Exostosin-like
  Pfam annotation: Domain name=Exostosin; Domain location=1-244; Score =202.8; E_value=9.3e-58; Accession=PF03016.7; Description=Exostosin family
ADLFYVPFFSSLSLVVNPIRPPAAANASGVAAAYSDEAMQEELLAWLELQPYWQQHRGRDHIFICQDPNALYKVIDRISNAVLLVSDFGRLRSDQASLVKDVILPYSHRINSFKGDVGVDGRPSLLFFMGNRYRKEGGKVRDALFQILEKEEDVTIKHGAQSRESRRAATRGMHSSKFCLHPAGDTPSACRLFDALVSLCIPVIVSDHIELPFEDVIDYSNIAIFVETSKAVQPGYLTSMLRRVSSERILEYQREIKKVKQFFEYEDPNGPVNEIWRQVSLKAPLIKLLTNRNKRLFERGTNGTDCSCMCSTTPY

SEQ ID NO: 91018 - protein, 116 aa, Setaria italica
  misc_feature (11)..(11): Xaa can be any naturally occurring amino acid
  Transcript Sequence Number=SeqID_25044
  Gene Ontology: Mol. function=ATPase activity, coupled to transmembrane movement of substances; Cellular component=integral to membrane; Biological process=transport
  Homolog annotation: Hit_ID=Q6YUU5; Match level="QueryCoverage=100%, HitCoverage=60%, E-value=9e-46, Identity=69%"; Hit description =Putative multidrug resistance protein
  Pfam annotation: Domain name=ABC_tran; Domain location=1-116; Score =30.3; E_value=2e-08; Accession=PF00005.19; Description=ABC transporter
IRENIVYGTEXASEEEIENAARSANAHEFISSLKDGYDTWCGERGVQLSGGQKQRVAIARAIMKNPAILLLDEATSALDRHSERVVQEALDRLLVGRTSIVVAHRLSTIQNCDVIT

SEQ ID NO: 91019 - protein, 66 aa, Setaria italica
  Transcript Sequence Number=SeqID_25045
  Gene Ontology: Mol. function=transferase activity, transferring phosphorus-containing groups; Cellular component=membrane; Biological process=two-component signal transduction system (phosphorelay)
  Homolog annotation: Hit_ID=Q67WC2; Match level="QueryCoverage=96%, HitCoverage=6%, E-value=5e-26, Identity=82%"; Hit description =Putative histidine kinase 1
LGHGIDIVNNGMQAIRAVQQHQYDLILMDVHMPEMDGLQATKHIRSFENTGYWDASVKPEDDQMNS

SEQ ID NO: 91020 - protein, 55 aa, Setaria italica
  Transcript Sequence Number=SeqID_25046
MGKYVELLDMGVRIAARFHSHCPQTARLYYHPPAGAPTAAGDGRKGESAAAAVMA

SEQ ID NO: 91021 - protein, 50 aa, Setaria italica
  Transcript Sequence Number=SeqID_25047
SYMQYFSETLFMNTYCTLTESYILLHMYNNYTMTTKESPFQALDKEVPSH

SEQ ID NO: 91022 - protein, 184 aa, Setaria italica
  Transcript Sequence Number=SeqID_25048
  Gene Ontology: Mol. function=metal ion binding; Cellular component =intrinsic to membrane; Biological process=innate immune response
  Homolog annotation: Hit_ID=B9SJF7; Match level="QueryCoverage=95%, HitCoverage=38%, E-value=6e-61, Identity=50%"; Hit description=Ran GTPase binding protein, putative
  Pfam annotation: Domain name=RCC1; Domain location=108-157; Score =21.0; E_value=0.0044; Accession=PF00415.10; Description=Regulator of chromosome condensation (RCC1)
  Pfam annotation: Domain name=RCC1; Domain location=47-105; Score=4.7; E_value=0.25; Accession=PF00415.10; Description=Regulator of chromosome condensation (RCC1)
  Pfam module annotation: Pfam domain module=RCC1::RCC1; Domain location=108-157::47-105
NSIVVTWRSDATNMHTKGASSDAIRVSTSSAPSTSSHGSAQDDYDSSGDVYVWGEVICDNTVRVGSDTVIRSTGKTDVLLPKPLESKLVLDVYHVDCGVKHAALVTKNGEVFTWGEESGGRLGHGSREDSVHPRLVESLAISNVDIVACGEFHTCAVTTAGELYTWGDGTHNIGLLGNGTDVSH

SEQ ID NO: 91023 - protein, 119 aa, Setaria italica
  Transcript Sequence Number=SeqID_25049
  Gene Ontology: Mol. function=substrate-specific transmembrane transporter activity; Cellular component=integral to membrane; Biological process=transmembrane transport
  Homolog annotation: Hit_ID=Q2R4G0; Match level="QueryCoverage=77%, HitCoverage=12%, E-value=1e-30, Identity=73%"; Hit description =Hexose transporter, putative, expressed
SSWGSGPIPPILCAEIFPTRVRGLCIAICSLAFWLADIAVTYSLPVMLNCVGLAGVFGFYAVVCCLALAFVALRVPETKGLPLEVITEFFNVGARGLAPTHLAEDEDGDEDDEDRHRRH

SEQ ID NO: 91024 - protein, 84 aa, Setaria italica
  Transcript Sequence Number=SeqID_25050
LFWFLYWYAVIENLLVVTILGGHKIAHAIFSSYTIWFLMQVVLLNSLVDVGTDWFEYWRLDGLVIQQLFRCVKHLLEQMIDLSF

SEQ ID NO: 91025 - protein, 96 aa, Setaria italica
  misc_feature (16)..(16): Xaa can be any naturally occurring amino acid
  Transcript Sequence Number=SeqID_25051
  Gene Ontology: Mol. function=homocysteine S-methyltransferase activity; Biological process=methionine biosynthetic process
  Homolog annotation: Hit_ID=Q9FUN0; Match level="QueryCoverage=98%, HitCoverage=29%, E-value=8e-46, Identity=92%"; Hit description =Homocysteine S-methyltransferase 1
LLLGVNCTPPQFIEGXIICEFRKQTKKAIAVYPNSGEVWDGIAKRWLPAECLGHKSFDALAKRWHEAGASLIGGCCRTTPSTIRAVSKILKGRAGH

SEQ ID NO: 91026 - protein, 165 aa, Setaria italica
  Transcript Sequence Number=SeqID_25052
  Gene Ontology: Mol. function=electron carrier activity; Biological process=oxidation reduction
  Homolog annotation: Hit_ID=Q7XP35; Match level="QueryCoverage=88%, HitCoverage=29%, E-value=4e-30, Identity=51%"; Hit description =B1340F09.13 protein
FVLRVPADDADDGDRRGRPFTDAEMTPIVWEFILAGTETVACSVEWVLAHLVARPEVQEKVRRQVAGQEEHHLRTTPPYLRAVILECLRMHPALPSIMREVGTEAAAAAAVGGATAAADGDATMHFKLNASDIGRSREAWKDPDEFRPERFLAGGEGEGVALVPG

SEQ ID NO: 91027 - protein, 97 aa, Setaria italica
  Transcript Sequence Number=SeqID_25053
  Gene Ontology: Mol. function=electron carrier activity; Cellular component=extracellular region; Biological process=response to oxidative stress
  Homolog annotation: Hit_ID=Q41577; Match level="QueryCoverage=82%, HitCoverage=25%, E-value=2e-31, Identity=77%"; Hit description=Pox1 protein
  Pfam annotation: Domain name=peroxidase; Domain location=31-97; Score= -96.7; E_value=0.019; Accession=PF00141.15; Description=Peroxidase
  Subcellular localization annotation: CTP_CleavageSite=32; ConfidenceScore=5.43e-01
LLVLLALASSAAAQLSSTFYDTSCPNALSTIKSAVTSAVNNEPRMGASLLRMHFHDCFVDGCDASVLLNDTSTFTGEQGAIPNRNSLRGFTVIDNIK

SEQ ID NO: 91028 - protein, 126 aa, Setaria italica
  Transcript Sequence Number=SeqID_25054
YGSHKFVTFYEQSVHVLLELNSRCFASCRTYFMHLFTHIQLMKLVSLFHYNNIDDVCYRFLAFVKYSFFFLRSKELKQTMGFTKKEEANYGLIPWCLFGCILICLVCICCKEWMFGLVLYLLLFFN

SEQ ID NO: 91029 - protein, 174 aa, Setaria italica
  misc_feature (107)..(107): Xaa can be any naturally occurring amino acid
  Transcript Sequence Number=SeqID_25055
  Gene Ontology: Mol. function=acetyl-CoA carboxylase activity; Biological process=fatty acid biosynthetic process
  Homolog annotation: Hit_ID=Q5CCG4; Match level="QueryCoverage=94%, HitCoverage=22%, E-value=2e-63, Identity=71%"; Hit description =Acetyl-CoA carboxylase (Fragment)
LKLLKFFVIVLTIITSRFATRFAELHDTSARMAAKGVIGKVVDWEESRAFFYRRLRRRVAEDALAKEAKEAAGEQLSHKSALECIKKWYLASKGTEGDSEKWNDDEXFFAWKDDSKNYENYLEELKAERVSKWFSHLAESSDVKALPNGLSLLLNKMNPSKREQVIDGLRQLLG

SEQ ID NO: 91030 - protein, 1606 aa, Setaria italica
  Transcript Sequence Number=SeqID_25056
  Gene Ontology: Mol. function=acetyl-CoA carboxylase activity; Cellular component=cytoplasm; Biological process=fatty acid biosynthetic process
  Homolog annotation: Hit_ID=Q8S6N5; Match level="QueryCoverage=99%, HitCoverage=70%, E-value=0.0, Identity=91%"; Hit description =Putative acetyl-CoA carboxylase
  Pfam annotation: Domain name=ACC_central; Domain location=746-1494; Score=1351.2; E_value=0; Accession=PF08326.4; Description=Acetyl-CoA carboxylase, central regio
  Pfam annotation: Domain name=ATP-grasp; Domain location=164-360; Score=-84.7; E_value=0.082; Accession=PF02222.14; Description=ATP -grasp domain
  Pfam annotation: Domain name=ATP-grasp_3; Domain location=203-362; Score=-44.3; E_value=0.016; Accession=PF02655.6; Description=ATP -grasp domain
  Pfam annotation: Domain name=Biotin_carb_C; Domain location=434-541; Score=160.4; E_value=5.5e-45; Accession=PF02785.11; Description =Biotin carboxylase C-terminal domain
  Pfam annotation: Domain name=Biotin_lipoyl; Domain location=679-745; Score=35.9; E_value=1.6e-07; Accession=PF00364.14; Description =Biotin-requiring enzyme
  Pfam annotation: Domain name=CPSase_L_D2; Domain location=164-395; Score=157.3; E_value=4.6e-44; Accession=PF02786.9; Description =Carbamoyl-phosphate synthase L chain, ATP binding domain
  Pfam annotation: Domain name=CPSase_L_chain; Domain location=39-162; Score=168.7; E_value=1.7e-47; Accession=PF00289.14; Description =Carbamoyl-phosphate synthase L chain, N-terminal domain
  Pfam annotation: Domain name=Dala_Dala_lig_C; Domain location=164 -370; Score=-105.1; E_value=0.0096; Accession=PF07478.5; Description =D-ala D-ala ligase C-terminus
  Pfam module annotation: Pfam domain module=ACC_central::ATP -grasp::ATP-grasp_3::Biotin_carb_C::Biotin_lipoyl::CPSase_L _D2::CPSase_L_chain::Dala_Dala_lig_C; Domain location=746-1494::164 -360::203-362::434-541::679-745::...
  Pfam module annotation: Domain location=164-395::39-162::164-370
MMAEPYQMNGIQNGMPNLRHPSSPSEVDEFCKALGGDSPIHSVLVANNGMAAVKFMRSIRTWALETFGTEKAILLVAMATPEDLKINAEHIRIADQFIEVPGGTNNNNYANVQLIVEIAERTRVSAVWPGWGHASENPELPDALNEKGIIFLGPPSAAMAALGDKIGSSLIAQAAGVPTLPWSGSHVKVPPESCHSIPEEIYKDACVSTTEEAVASCQVVGYPAMIKASWGGGGKGIRKVHNDDEVRALFKQVQGEVPGSPIFIMKVASQSRHLEVQLLCDKHGNVAALHSRDCSVQRRHQKIIEEGPITVAAPETVKELEQAARRLAKCVQYVGAATVEYLYSMETGEYYFLELNPRLQVEHPVTEWIAEINLLAAQVAVGMGIPLYNIPEIRRFYGMDHGGGYHYWRKISAAATKFDLDKAESVRPKGHCVAVRVTSEDPDDGFKPTSGRVEELNFKSKPNVWAYFSVKSGGAIHEFSDSQFGHVFAFGESRSLAIANMVLGLKEIQIRGEIRTNVDYTVDLLNAAEYRENKIHTGWLDSRIAMRVRAERPPWFLSVVGGALYEASSRSSSVVTDYVGYLSKGQIPPKHISLVNLTVTLNIEGSKYTIETVRGGPRSYKLRMNGSEIEAEIHSLRDGGLLMQLDGNSHVIYAETEAAGTRLLINGRTCLLQKEHDPSKLLADTPCKLLRFLVADGSHVDADTPYAEVEVMKMCMPLLLPASGVIHFVMPEGQAMQANDLIARLDLDDPSSVKRAEPFHGSFPKLGPPTAISGKVHQKFAASVNSAHMILAGYEHNINEVVQDLLNCLDSPELPFLQWQELMSVLATRLPKDLRNELDGKYKEYELNPDFRKSKDFPAKLLRGVIEANLAYCSEKDRVTNERLVEPLMSLVKSYEGGRESHARVVVKSLFEEYLSVEELFNDDLQSDVIERLRLQHAKDLEKVVHIVFSHQGVKNKNKLILRLMEALVYPNPSAYRDQLIRFSALNHTSYSELALKASQLLEHTKLSELRTSIARSLSELEMFTEEGERVSTPRRKMAINERMEDLVCAPLAVEDALVALFDHSDPTLQRRVVETYIRRLYQPYLVSGSIRMQWHRAGLIALWEFSDEHFKQRNGQDVLLQQVENPIDKRWGVMVVIKSLQFLATAIDAALKETSQYRAGVGSVSNGNHVNSNQSNMLHIALVGINNQMSTLQDSGDEDQAQERINKLSKILKDNTITSHLNGAGVKVVSCIIQRDEGRPPMRHSFQWSVDKLYYEEDPMLRHVEPPLSTFLELDKVNLDGYTEVKYTPSRDRQWHIYTLIKNKKDQRLNDQRMFLRTIVRQPSSTNGFLSGNIDNEVGRTHASSSFTSNSILRSLMGALEEIELHAHSENVRSGHSHMYLCLLREQQLHELIPFSRMADEIDQDEATACTLLKHMALNLYEHVGVRMHRLSVCQWELKLWLVCDGQASGAWRVVVTNVTGHTCTVDIYREVEDPNTHQLVYHSATATAGPLHGVELNEPYKPLDAIDLKRYAARKNETTYCYDFPLAFETALKRSWKSSNHGVTEANEHNQLYAEVKELIFADSVGEWGTPLVSVERPPGINDIGIVAWNMKLSTPEYQEITPK

SEQ ID NO: 91031 - protein, 743 aa, Setaria italica
  Transcript Sequence Number=SeqID_25057
  Gene Ontology: Mol. function=acetyl-CoA carboxylase activity; Cellular component=vacuolar membrane; Biological process=fatty acid biosynthetic process
  Homolog annotation: Hit_ID=Q8S6N5; Match level="QueryCoverage=100%, HitCoverage=32%, E-value=0.0, Identity=87%"; Hit description =Putative acetyl-CoA carboxylase
  Pfam annotation: Domain name=Carboxyl_trans; Domain location=70-628; Score=921.1; E_value=5.4e-274; Accession=PF01039.14; Description =Carboxyl transferase domain
NLPLGQFETALKRSWKSSNHGVTEANEHNQLYAEVKELIFADSVGEWGTPLVSVERPPGINDIGIVAWNMKLSTPEFPSGREIIVVANDVTFKAGSFGPREDAFFDAVTNLACERKLPLIYLAATAGARLGVAEEIKACFHVGWSDDESPERGFHYIYLTEQDYSRLSSSVIAHELKLENGETRWVVDTIVGKEDGLGCENLHGSGAIASAYSKAYKETFTLTFVTGRAVGIGAYLARLGMRCIQRLDQPIILTGFSALNKLLGREVYSSHMQLGGPKIMATNGVVHQTVSDDLEGVSAILKWLSYVPPYVGGPLPIMKPLDPPERPVTYFPENACDARAAICGIQDSEGKWLGGMFDKESFVETLEGWAKTVITGRAKLGGIPVGVIAVENQTVMQVIPADPGQLDSAERVVPQAGQVWFPDSATKTAQALLDFNREELPLFILANWRGFSGGQRDLFEGILQAGSTIVENLRTYKQPAFVYIPMGGELRGGAWVVVDSKINPDHIEMYAERTAKGNVLEPEGLVEIKFRPKELEDCMLRLDPELIGLNARLKEMKKQNASNSEMETIRRSMTVRMKQLMPTYTQVATRFAELHDTSARMAAKGVIGKVVDWEESRAFFYRRLRRRVAEDALAKEAKEAAGEQLSHKSALECIKKWYLASKGTEGDSEKWNDDESFFAWKDDSKNYENYLEELKAERVSKWFSHLAESSDVKALPNGLSLLLNKMNPSKREQVIDGLRQLLG

SEQ ID NO: 91032 - protein, 83 aa, Setaria italica
  Transcript Sequence Number=SeqID_25058
  Gene Ontology: Mol. function=ATPase activity, coupled to transmembrane movement of substances; Cellular component=integral to membrane; Biological process=transport
  Homolog annotation: Hit_ID=B4ERW4; Match level="QueryCoverage=98%, HitCoverage=12%, E-value=4e-29, Identity=78%"; Hit description=ABC _transporter (Fragment)
VVYQKGLALSSQSRQSRTSGEMINIISVDADRVGIFSWYMHDLWLVPLQVGMALFILYSTLGLASLAALGATVVVMLANVPPG

SEQ ID NO: 91033 - protein, 52 aa, Setaria italica
  Transcript Sequence Number=SeqID_25059
TLIHDIMTKPIMTSMIPALTVQGGIPLDCLARRELGRPSGASNHTIDINLKS

SEQ ID NO: 91034 - protein, 81 aa, Setaria italica
  misc_feature (78)..(78): Xaa can be any naturally occurring amino acid
  Transcript Sequence Number=SeqID_25060
  Homolog annotation: Hit_ID=B6TV36; Match level="QueryCoverage=70%, HitCoverage=15%, E-value=1e-25, Identity=91%"; Hit description=Root cap protein 2
MASVRALLACAAAATVFLVAAVGAQPMDPNNPIMSDPNVIPVYMSPGSPPTYVSCYNNTHGEQGSEPTCSILARQCPXGCR

SEQ ID NO: 91035 - protein, 158 aa, Setaria italica
  Transcript Sequence Number=SeqID_25061
PLPPPPLPPPSRRRLLLPRLRWIELRRQRSNRTRCFGIFWDGNGFAAPFGAFLAQIGSKQQTLWGKISRQASTKGRLNPDWISPTDWSKKRSTPPPPPPPRDEEIRPDQKSKKPGHSPTGRLITNTGVKNEQGEAVRKTGGANRCTAQYTASGCTALS

SEQ ID NO: 91036 - protein, 81 aa, Setaria italica
  Transcript Sequence Number=SeqID_25062
  Subcellular localization annotation: CTP_CleavageSite=47; ConfidenceScore=5.29e-01
MIKGMTCFTTVNKLSFFYSKTRVHVSFRQNKSTNQSTYCHRYISIVVRMVIKCAIFLINKQEIYLYDTLFCFLLHVTELLV

SEQ ID NO: 91037 - protein, 112 aa, Setaria italica
  misc_feature (51)..(51): Xaa can be any naturally occurring amino acid
  misc_feature (97)..(97): Xaa can be any naturally occurring amino acid
  misc_feature (101)..(101): Xaa can be any naturally occurring amino acid
  Transcript Sequence Number=SeqID_25063
  Homolog annotation: Hit_ID=Q67UH6; Match level="QueryCoverage=95%, HitCoverage=23%, E-value=2e-15, Identity=47%"; Hit description =Mitochondrial transcription termination factor-like
RKVSKAKALSHLKSPSKPDAVLAFLSGLGLSAHDIAAAVARYPPLLVCEVXRTLAPRFAGLRDFGLSPSQIARFVRLDPQCSLRPITISKLQYYFSXFGSXDNVLRALNRGL

SEQ ID NO: 91038 - protein, 65 aa, Setaria italica
  Transcript Sequence Number=SeqID_25064
WYFCIEENKHISQTLNNLQNLERNRKVTAYCSSNMPLLFETSTKKHEDVIIRWNHGFLSLREKVL

SEQ ID NO: 91039 - protein, 88 aa, Setaria italica
  Transcript Sequence Number=SeqID_25065
  Subcellular localization annotation: CTP_CleavageSite=56; ConfidenceScore=5.14e-01
RGRTPPELTRRQVPLSLFLTSLTGAASHVQRPLANAQRPLAAPPRPTPWPPLKTSRATLKGSHATARALVFAPRTRLIGAFDFVPCFR

SEQ ID NO: 91040 - protein, 94 aa, Setaria italica
  Transcript Sequence Number=SeqID_25066
  Gene Ontology: Mol. function=RNA binding; Biological process =regulation of transcription, DNA-dependent
  Homolog annotation: Hit_ID=Q9LK54; Match level="QueryCoverage=100%, HitCoverage=17%, E-value=3e-35, Identity=74%"; Hit description =Similarity to SUN and FMU proteins
  Pfam annotation: Domain name=NusB; Domain location=1-78; Score=-18.3; E_value=0.047; Accession=PF01029.10; Description=NusB family
WKRYLDYLIMSLCSEEKVFREMEPLLLQILRIGFFEILKLDVPAYAAVDENVSLAKVALRPGAGNMVNAILRKLVVLKETNSLPLPKIEGDDRA

SEQ ID NO: 91041 - protein, 143 aa, Setaria italica
  Transcript Sequence Number=SeqID_25067
  Gene Ontology: Mol. function=nucleoside-triphosphatase activity; Cellular component=membrane; Biological process=transport
  Homolog annotation: Hit_ID=Q7XML5; Match level="QueryCoverage=100%, HitCoverage=14%, E-value=8e-62, Identity=76%"; Hit description =OSJNBa0040D17.13 protein
RVNVGLEMVMEPSLLILDEPTSGLDSSSSQLLLRALRHEALEGVNVCAVVHQPSYTLYNMFDDLILLAKGGLMVYNGPVKTVEDYFTTLGIHVPDRVNPPDHYIDILEGIVKPDSGIKAKHLPVHWMLYNGYEVPSDMQDDVK

SEQ ID NO: 91042 - protein, 85 aa, Setaria italica
  Transcript Sequence Number=SeqID_25068
  Gene Ontology: Mol. function=catalytic activity; Cellular component =chloroplast; Biological process=metabolic process
  Homolog annotation: Hit_ID=A7YF23; Match level="QueryCoverage=100%, HitCoverage=20%, E-value=1e-20, Identity=55%"; Hit description =Astaxanthin synthase KC17 (Fragment)
ILRDKNNVLKLVEAIDPIVRTIDGIVGESVSMRVDLQYSNGQNILGLFTHRKLSISVGYAAAAFVLAILEGNTQPGVWFPEEPEG

SEQ ID NO: 91043 - protein, 135 aa, Setaria italica
  Transcript Sequence Number=SeqID_25069
  Gene Ontology: Mol. function=electron carrier activity
  Homolog annotation: Hit_ID=B6TGN9; Match level="QueryCoverage=81%, HitCoverage=44%, E-value=4e-27, Identity=59%"; Hit description =Uclacyanin-2
  Pfam annotation: Domain name=Cu_bind_like; Domain location=75-134; Score=-1.2; E_value=0.0001; Accession=PF02298.9; Description =Plastocyanin-like domain
RALVPAAAMAALVAVSAVMEAAAAATTYTVGAPDGLWDMQTDYAQWVKTRTFHPGDKISELLFFFFPSFWSWCTWIFCMYCLIISSGTTYVAVFTYSPELHDVVEVTKAGYDACSSANNISAFRSGNDVVALADV

SEQ ID NO: 91044 - protein, 97 aa, Setaria italica
  Transcript Sequence Number=SeqID_25070
  Gene Ontology: Mol. function=electron carrier activity
  Homolog annotation: Hit_ID=B6TGN9; Match level="QueryCoverage=71%, HitCoverage=40%, E-value=6e-31, Identity=89%"; Hit description =Uclacyanin-2
  Pfam annotation: Domain name=Cu_bind_like; Domain location=40-97; Score=29.3; E_value=5.9e-08; Accession=PF02298.9; Description =Plastocyanin-like domain
MGTRALVPAAAMAALVAVSAVMEAAAAATTYTVGAPDGLWDMQTDYAQWVKTRTFHPGDKIMFTYSPELHDVVEVTKAGYDACSSANNISAFRSGND

SEQ ID NO: 91045 - protein, 66 aa, Setaria italica
  misc_feature (7)..(7): Xaa can be any naturally occurring amino acid
  Transcript Sequence Number=SeqID_25071
  Subcellular localization annotation: CTP_CleavageSite=39; ConfidenceScore=5.19e-01
CGLTGHXDSGMKIRIDVVSAAAPGPAAAAAGPSSSSASRAAAASSAGIAAACLLLQHAVVIARLLW

SEQ ID NO: 91046 - protein, 172 aa, Setaria italica
  Transcript Sequence Number=SeqID_25072
  Gene Ontology: Mol. function=serine-type endopeptidase activity; Biological process=proteolysis
  Homolog annotation: Hit_ID=Q5N8I9; Match level="QueryCoverage=100%, HitCoverage=17%, E-value=3e-62, Identity=69%"; Hit description=P69E protein-like
  Pfam annotation: Domain name=PA; Domain location=42-146; Score=73.7; E_value=6.9e-19; Accession=PF02225.14; Description=PA domain
GTVTNVAPWMFTVGASTMDRDFPAYVRFGDNLAIKGQSLGASTLPLGQAYPIISGETANAAYQPTSNSSLCLAGSLDPAKVTGKIVVCVRGVNGRVEKGLVVKQAGGLGMVLCNDAGSGDSVLADPHLVAAAHCSYSQCVQLFKYLHSTNNPSGYINATDASFGVKPAPAVA

SEQ ID NO: 91047 - protein, 77 aa, Setaria italica
  Transcript Sequence Number=SeqID_25073
  Gene Ontology: Mol. function=fructose-bisphosphate aldolase activity; Cellular component=plasma membrane; Biological process=response to stress
  Homolog annotation: Hit_ID=Q9LF98; Match level="QueryCoverage=90%, HitCoverage=19%, E-value=7e-29, Identity=88%"; Hit description =Fructose-bisphosphate aldolase
LNICACYFTDELIKNAAYIGTPGKGILAADESTGTIGKRLSSINVENIEENRRALRELLFCCPGALPCLSGVILFEE

SEQ ID NO: 91048 - protein, 145 aa, Setaria italica
  misc_feature (69)..(69): Xaa can be any naturally occurring amino acid
  Transcript Sequence Number=SeqID_25074
  Gene Ontology: Mol. function=fructose-bisphosphate aldolase activity; Cellular component=cytoplasm; Biological process=response to stress
  Homolog annotation: Hit_ID=P17784; Match level="QueryCoverage=97%, HitCoverage=39%, E-value=8e-57, Identity=79%"; Hit description =Fructose-bisphosphate aldolase cytoplasmic isozyme
  Pfam annotation: Domain name=Glycolytic; Domain location=1-145; Score= -7.5; E_value=7.8e-13; Accession=PF00274.11; Description=Fructose -bisphosphate aldolase class-I
LVGLQEGTLKEDMVTPGSDSKKVTPEVIAEYTVRTLQRTVPAAVPAIVFLSGGQSEEEATLNLETTNRXKLNTKKPWSLSFSFGRALQASTLKAWAGKEENVEKARAAFLARCKANSEATLGTYKGDAAAGEGVSESLHVKDYKY

SEQ ID NO: 91049 - protein, 196 aa, Setaria italica
  misc_feature (66)..(66): Xaa can be any naturally occurring amino acid
  misc_feature (101)..(101): Xaa can be any naturally occurring amino acid
  Transcript Sequence Number=SeqID_25075
  Gene Ontology: Mol. function=fructose-bisphosphate aldolase activity; Cellular component=cytoplasm; Biological process=response to stress
  Homolog annotation: Hit_ID=P17784; Match level="QueryCoverage=90%, HitCoverage=49%, E-value=1e-90, Identity=92%"; Hit description =Fructose-bisphosphate aldolase cytoplasmic isozyme
  Pfam annotation: Domain name=Glycolytic; Domain location=11-196; Score=149.3; E_value=1.2e-41; Accession=PF00274.11; Description =Fructose-bisphosphate aldolase class-I
MSAYCGKYKDELIKNAAYIGTPGKGILAADESTGTIGKRLSSINVENIEENRRALRELLFCCPGAXLPCLSGVILFEETLYQKTKDGKPFVDVLKEGGVLXPGIKVDKGTIEVAGTDKETTTQGHDDLGKRCAKYYEAGARFAKWRAVLKIGPNEPSQLAIDLNAQGLARYAIICKDHLRDISTALNVMRAIDEDL

SEQ ID NO: 91050 - protein, 360 aa, Setaria italica
  misc_feature (102)..(102): Xaa can be any naturally occurring amino acid
  misc_feature (230)..(230): Xaa can be any naturally occurring amino acid
  misc_feature (322)..(322): Xaa can be any naturally occurring amino acid
  Transcript Sequence Number=SeqID_25076
  Gene Ontology: Mol. function=fructose-bisphosphate aldolase activity; Cellular component=cytoplasm; Biological process=response to stress
  Homolog annotation: Hit_ID=P17784; Match level="QueryCoverage=100%, HitCoverage=100%, E-value=0.0, Identity=92%"; Hit description =Fructose-bisphosphate aldolase cytoplasmic isozyme
  Pfam annotation: Domain name=Glycolytic; Domain location=11-360; Score=834.7; E_value=5.5e-248; Accession=PF00274.11; Description =Fructose-bisphosphate aldolase class-I
MSAYCGKYKDELIKNAAYIGTPGKGILAADESTGTIGKRLSSINVENIEENRRALRELLFCAPGALQYLSGVILFEETLYQKTKDGKPFVDVLNEGGVLPGXIKVDKGTIEVAGTNKETTTQGHDDLGKRCAKYYEAGARFAKWRAVLNIGPNEPSQLAIDLNAQGLARYAIICQENGLVPIVEPEILVDGSHDIERCAYITEVVLAACYKALNEHHVLLEGTLLKPNMXSTPGSDAKKVAPEVIAEYTVRSLQRTVPAAVPAIVFLSGGQSEEEATLNLNAMNKLNTKKPWSLSFSFGRALQASTLKAWGGKVENVEKARXAFLTRCKANSEATLGTYKGDAAAGEGVSESLHVKDYKY

SEQ ID NO: 91051 - protein, 315 aa, Setaria italica
  misc_feature (81)..(81): Xaa can be any naturally occurring amino acid
  misc_feature (132)..(132): Xaa can be any naturally occurring amino acid
  misc_feature (283)..(283): Xaa can be any naturally occurring amino acid
  Transcript Sequence Number=SeqID_25077
RPLAPVAMKNTDLSSNQARLPSEKIGFEASNNGECSRPNSPFEHDGRPIKRLKLNQQHSYNQDHSDSVTLAHSGGSSRKTXLQSSEMGDHFANGITMNTNVDETEVRVTTELSGQMHNGGATKNLPHHKGQXVAGNHPMIELNGRLAAATLTNTQIISKDTSALMPAASAQAGQQVLPVGPSAVLDRRPHLKPGEENAHQMNCSNQIGAECRSTRLFSLLEMEELQEKELEDAQEHRRKCEVEEMEALRAYRKAQRALLEANERCTILRRKREICSAQVHGLXAENSSLVIRNTEDGLAMPSLLNSQIHANSQMP

SEQ ID NO: 91052 - protein, 202 aa, Setaria italica
  Transcript Sequence Number=SeqID_25078
YLKNDHLNVAKFEPDLGLDPVLDLVLVGSEWQFKIQSRASMWQDNLVVTSTRSVDQDVLSPSEAAKVFESQLAESLLEGDGQLAFKKLATATLETLMPRIEGKGEFGQARWRLVYAPQIPSLLSVDPTVDPLKSLANNISFATEVEVQLGKRLQASVVRQMKDSEMAMQWTLIYQLTSRLRVLFQSTPSNRLLFEYSATSQD

SEQ ID NO: 91053 - protein, 693 aa, Setaria italica
  Transcript Sequence Number=SeqID_25079
  Homolog annotation: Hit_ID=Q2JHB3; Match level="QueryCoverage=45%, HitCoverage=17%, E-value=5e-18, Identity=26%"; Hit description =Conserved domain protein
  Pfam annotation: Domain name=DUF490; Domain location=419-692; Score= -98.5; E_value=0.051; Accession=PF04357.5; Description=Family of unknown function (DUF490)
MGLEVPGAEVAEMLPLARLLSRSTDPVIRSRSKELFMQCLQSVGFNAESLRDQLKALEMYHDWLDDDTMEDITLPGLAELTGYWRGSLDASGGGNGDTMADFDFSGEDWEWGTYKTQRVLASGSFSNNDGLRLDKLFIQKDNATLHADGSILGPLTNLHFAVLNFPVGLIPALVQAIESSTTDSIHFLRQWLTPIKGILHMEGDLKGTLAKPECDVRIRLLDGTIGGIDLGRAEVLASVTPTSRFVFDANFEPTIQNGHVNIQGSIPVTYVDSSSTEESLEEEDGKQGIIRIPVWAKDRGTPNEISETRIVRDKTEEGWEFQLAESLKGLSWNMLEPGEVRVNADIKDGGMMLITALSPYANWLQGYADVLLQVKGTVDQPVVDGSATFNRAIVDSPFLRTPLTNFAGTIHVISNRLCISSMESRVGRKGRLSMKGTLPLKNSEPSANDKIDLKCEVLDIRAKNILSGQVDSQLQVTGSILRPDVSGMIRLSHGEAYLPHDKGNGAAATRLASNKSSYLVSGFEQSTTSQDVSRILGSLSTSPDREQSDTERTLEHGSFKPNIDARLNDLKLTLGPELRIVYPLILNFAVSGDLELSGMVHPKYIRPKGILTFENGEVNLVATQVRLKNDHLNVAKFEPDLGLDPVLDLVLVGSEWQFKIQSRASMWQDNLVVTSTRSVDQDVLSPSEVSLLQ

SEQ ID NO: 91054 - protein, 99 aa, Setaria italica
  Transcript Sequence Number=SeqID_25080
  Gene Ontology: Mol. function=protein kinase activity; Biological process=protein amino acid phosphorylation
  Homolog annotation: Hit_ID=P93520; Match level="QueryCoverage=86%, HitCoverage=14%, E-value=8e-25, Identity=74%"; Hit description =Calcium/calmodulin-dependent protein kinase homolog|CaM kinase homolog|MCK1 protein
  Subcellular localization annotation: CTP_CleavageSite=75; ConfidenceScore=5.70e-01
PPQQAQATAPGTPRRRKSGSTTPVHQTPGVAWPSPYPAGGASPLPAGVSPSPARSTPRRFFKRPFPPPSPAKHIKATLAKRLGGGKPKEGTIPEEGGVR

SEQ ID NO: 91055 - protein, 152 aa, Setaria italica
  Transcript Sequence Number=SeqID_25081
  Gene Ontology: Mol. function=protein dimerization activity; Cellular component=endoplasmic reticulum lumen; Biological process=proteolysis
  Homolog annotation: Hit_ID=B6TU60; Match level="QueryCoverage=97%, HitCoverage=29%, E-value=4e-78, Identity=94%"; Hit description=IAA -amino acid hydrolase ILR1-like 3
  Pfam annotation: Domain name=Peptidase_M20; Domain location=4-139; Score=61.2; E_value=3.9e-15; Accession=PF01546.20; Description =Peptidase family M20M25M40
VWLVWEHKSKVDGVMHACGHDVHTAMLLGAAKLLSQRKDQLKGTVRLLFQPAEEGGAGASHMIKEGALDGVEAIFAMHVDYRIPTGVIAAHPGPTQAAVCFYEAKIEGKTGMAETPHLNVDPIVAASFAILSLQQLISREDDPLHSQVVSVT

SEQ ID NO: 91056 - protein, 171 aa, Setaria italica
  Transcript Sequence Number=SeqID_25082
  Gene Ontology: Mol. function=protein dimerization activity; Cellular component=endoplasmic reticulum lumen; Biological process=proteolysis
  Homolog annotation: Hit_ID=B6TU60; Match level="QueryCoverage=91%, HitCoverage=31%, E-value=3e-76, Identity=88%"; Hit description=IAA -amino acid hydrolase ILR1-like 3
  Pfam annotation: Domain name=Peptidase_M20; Domain location=1-118; Score=-30.2; E_value=0.066; Accession=PF01546.20; Description =Peptidase family M20M25M40
LIDIDLWYKDLSTSEVVTKLKGTVRLLFQPAEEGGAGASHMIKEGALDGVEAIFAMHVDYRIPTGVIAAHPGPTQAAVCFYEAKIEGKTGMAETPHLNVDPIVAASFAILSLQQLISREDDPLHSQVVSVTYVKAGKALDATPAIVEFGGTLRSITTEGLYRLQKRVKEVG

SEQ ID NO: 91057 - protein, 398 aa, Setaria italica
  misc_feature (159)..(159): Xaa can be any naturally occurring amino acid
  Transcript Sequence Number=SeqID_25083
  Gene Ontology: Mol. function=protein dimerization activity; Biological process=proteolysis
  Homolog annotation: Hit_ID=B6TU60; Match level="QueryCoverage=95%, HitCoverage=74%, E-value=1e-176, Identity=81%"; Hit description=IAA -amino acid hydrolase ILR1-like 3
  Pfam annotation: Domain name=M20_dimer; Domain location=170-276; Score=12.6; E_value=0.016; Accession=PF07687.6; Description =Peptidase dimerisation domain
  Pfam annotation: Domain name=Peptidase_M20; Domain location=55-381; Score=220.4; E_value=4.6e-63; Accession=PF01546.20; Description =Peptidase family M20M25M40
  Pfam module annotation: Pfam domain module=M20_dimer::Peptidase_M20; Domain location=170-276::55-381
GPVGAHHAHPELAFREHRTSALVREELERLGISSRAVAGTGVVADVGSGALPIVALRADMDALPLQELVEWEHKSKVDGVMHACGHDVHTAMLLGAAKLLSQRKDQLKGTVRLLFQPAEEGGAGASHMIKEGALDGVEAIFAMHVDYRIPTGVIAAIGXTTGVIAAHPGPTQAAVCFYEAKIEGKTGMAETPHLNVDPIVAASFAILSLQQLISREDDPLHSQVVSVTYVKAGKALDATPAIVEFGGTLRSITTEGLYRLQKRVKEVVEGQAVVHRCKGTVDMKGEEYPMYPAVVNDWKLHHHVEDVGRRLLGPDKVNPGEKIMAGEDFAFYQQLAPGVMFGIGIRNEKVGSVHSAHNPHFFVDEDVIPIGAALHTAIAELYLSEAYALNGGGDLRSH

SEQ ID NO: 91058 - protein, 125 aa, Setaria italica
  Transcript Sequence Number=SeqID_25084
  Homolog annotation: Hit_ID=Q9M897; Match level="QueryCoverage=95%, HitCoverage=55%, E-value=3e-16, Identity=37%"; Hit description =F16B3.6 protein
  Pfam annotation: Domain name=DUF679; Domain location=1-120; Score =144.8; E_value=2.6e-40; Accession=PF05078.4; Description=Protein of unknown function (DUF679)
GLCAAACFFLCFTDSFLDARGTVRYAVATYSGLWVIDGTPPPPPEEAAGKRLKFIDFFHAFLSFIVFMSVAMFDRNVGACFNPVMSYDKQQVLTAVPLAGGLVGTLLFAAFPSTRHGLGFPIPAA

SEQ ID NO: 91059 - protein, 95 aa, Setaria italica
  Transcript Sequence Number=SeqID_25085
  Homolog annotation: Hit_ID=B6TFK4; Match level="QueryCoverage=30%, HitCoverage=5%, E-value=2e-09, Identity=100%"; Hit description=Auxin transporter-like protein 3
  Subcellular localization annotation: CTP_CleavageSite=50; ConfidenceScore=5.30e-01
GFGFGGWASITNFVQQVNTFGLFAKCYQCPPHLTAPPAAPFAPPPMAPAPAMLPATVFNATGFFPPVPSPAPAPSPMMNFFLRHHHHRHHGRHGL

SEQ ID NO: 91060 - protein, 137 aa, Setaria italica
  misc_feature (120)..(120): Xaa can be any naturally occurring amino acid
  Transcript Sequence Number=SeqID_25086
  Gene Ontology: Mol. function=binding
  Homolog annotation: Hit_ID=Q2R9P0; Match level="QueryCoverage=98%, HitCoverage=6%, E-value=1e-55, Identity=80%"; Hit description =Armadillo/beta-catenin-like repeat family protein, expressed
KNKMSCLTEGDVRPLIEMAKTSSIVVAETAFAALANLLSDAQIAKEALDDNIVLALTRVLKEGSLEGKISASRSLRQLLNQFPLSEVLPDYSQCCFIIHALLVCLSGISLDNVTSLEPLXVLALMARTKEGAHFSPC

SEQ ID NO: 91061 - protein, 59 aa, Setaria italica
  Transcript Sequence Number=SeqID_25087
  Gene Ontology: Mol. function=hydrolase activity, hydrolyzing O -glycosyl compounds; Cellular component=extracellular region; Biological process=cell wall organization and biogenesis
  Homolog annotation: Hit_ID=B6U0P7; Match level="QueryCoverage=100%, HitCoverage=12%, E-value=2e-20, Identity=77%"; Hit description =Endoglucanase 1
MARLRCLFVLALLVVQLPGDAMAGRGHHGPAAHDYRDALAKSILFFEGQRSGKLPPSQR

SEQ ID NO: 91062 - protein, 75 aa, Setaria italica
  Transcript Sequence Number=SeqID_25088
  Pfam annotation: Domain name=Cu_bind_like; Domain location=2-65; Score=-5.5; E_value=0.00028; Accession=PF02298.9; Description =Plastocyanin-like domain
MARYAVFKYAPPHTVAQLSSEAAYKACNLGSKVFLDSSGGTGFTFDEPGTWYFARVTGSHCARGQKVAITVTGSS

SEQ ID NO: 91063 - protein, 73 aa, Setaria italica
  Transcript Sequence Number=SeqID_25089
  Gene Ontology: Mol. function=ligase activity; Biological process =response to auxin stimulus
  Homolog annotation: Hit_ID=Q0D4Z6; Match level="QueryCoverage=83%, HitCoverage=10%, E-value=3e-24, Identity=85%"; Hit description =Probable indole-3-acetic acid-amido synthetase GH3.8
VVGRRRGESVDDDGDVLGRCCLEMEEAMNSVYRQSRVADGSIGPLEIRVVRSGTFEELADYAVSHGASIGQYK

SEQ ID NO: 91064 - protein, 86 aa, Setaria italica
  Transcript Sequence Number=SeqID_25090
DVHALFAAEDAVLQDLEQEPRRGLEQYHLPPPLFLLPTKLPPPVPLDPTGFPRESNGPEDSRSAQRQSMSMPFSAVWREAVRSAPP

SEQ ID NO: 91065 - protein, 94 aa, Setaria italica
  Transcript Sequence Number=SeqID_25091
QDHTLQAERFVMQSKLNSSNKKFGISDLLAQEYGPYVWLVDARHKESTKSQPNHHKNKYGPYVWLVDARHKESTKSRPNQHKNKKSPNEILGTK

SEQ ID NO: 91066 - protein, 224 aa, Setaria italica
  Transcript Sequence Number=SeqID_25092
  Gene Ontology: Mol. function=calcium ion binding; Biological process =protein amino acid phosphorylation
  Homolog annotation: Hit_ID=B4FE15; Match level="QueryCoverage=96%, HitCoverage=94%, E-value=2e-91, Identity=75%"; Hit description =Calcium ion binding protein
  Pfam annotation: Domain name=efhand; Domain location=147-175; Score =27.9; E_value=4.1e-05; Accession=PF00036.24; Description=EF hand
  Pfam annotation: Domain name=efhand; Domain location=185-213; Score =21.1; E_value=0.0045; Accession=PF00036.24; Description=EF hand
  Pfam annotation: Domain name=efhand; Domain location=57-85; Score =33.9; E_value=6.3e-07; Accession=PF00036.24; Description=EF hand
  Pfam annotation: Domain name=efhand; Domain location=93-121; Score =5.8; E_value=5; Accession=PF00036.24; Description=EF hand
  Pfam module annotation: Pfam domain module=efhand::efhand::efhand::efh and; Domain location=147-175::185-213::57-85::93-121
MGAVLGRQDTQKRSFHGSKLEAKMVDAMQQRASHGTSLKSFDGIVMKFPRIDESFRKCKTIFEQFDEDSNGEIDKEELKHCFQKLEISFTEEEISDLFEACDINEDMGMKFNEFIVFLCLVYLLNEPAVSEAKIKMGLGNLEATFETLVDAFVFLDKNKDGYVSKDEMIQAITETTTGERSSGRIAMKRFEEMDWDKNGMVTFKEFLFAFTRWVGIDENEDDDE

SEQ ID NO: 91067 - protein, 73 aa, Setaria italica
  Transcript Sequence Number=SeqID_25093
PLQLITHCTISGRMVLTRWTQFPCGLHEVCSLDRTGQCLFRNMDWKYTWHYANQTDTETLNIAASCQLKMQEA

SEQ ID NO: 91068 - protein, 97 aa, Setaria italica
  Transcript Sequence Number=SeqID_25094
LVLGIWIKVFDHHPQLDIIWEWNRRRAYRIEFHPRSSLTSFICRSTSSGHWRRSGAFVVCAESIRRSEGARQFQGEGAKVLGTFAVKDPRRVQGSSE

SEQ ID NO: 91069 - protein, 57 aa, Setaria italica
  misc_feature (23)..(23): Xaa can be any naturally occurring amino acid
  misc_feature (42)..(42): Xaa can be any naturally occurring amino acid
  Transcript Sequence Number=SeqID_25095
  Gene Ontology: Mol. function=secondary active sulfate transmembrane transporter activity; Cellular component=integral to membrane; Biological process=sulfate transport
  Homolog annotation: Hit_ID=A5CVC7; Match level="QueryCoverage=87%, HitCoverage=9%, E-value=3e-17, Identity=86%"; Hit description =Sulfate transporter (Fragment)
MIKGFGHAAVTYVDSSAVQALKXLHQEYKARHIQIAIANPNXQVHLLLSRSGIIDLI

SEQ ID NO: 91070 - protein, 84 aa, Setaria italica
  Transcript Sequence Number=SeqID_25096
LAVHSGNFFRSLNYGGERGRRRRSARKNARIDRPEQLAGRRGWNWMVGHTTAHTGILGAFCDDEDIHSVREIDWLICKSTDIYV

SEQ ID NO: 91071 - protein, 87 aa, Setaria italica
  Transcript Sequence Number=SeqID_25097
GRGRGGGRGRACVPSSHDKDDWTRRTMCYSGAAGRTRPSSAFYARRWARVCTATTGCYGAVMHGGRASQVDGSSKNLEDVKLQRFLQ

SEQ ID NO: 91072 - protein, 73 aa, Setaria italica
  Transcript Sequence Number=SeqID_25098
VRWPSVRALITRQGRLDPTDHVLQWSRGPDQAQLSFLRGPTGCYGAVMHGGRASQVDGSSKNLEDVKLQRFLQ

SEQ ID NO: 91073 - protein, 60 aa, Setaria italica
  Transcript Sequence Number=SeqID_25099
SAELESVAEELVGGGEEGRKAREKAMEMKAACRNVVEKGGTSYAATQRVVQDMIESYAPK

SEQ ID NO: 91074 - protein, 81 aa, Setaria italica
  Transcript Sequence Number=SeqID_25100
  Gene Ontology: Mol. function=cation transmembrane transporter activity; Cellular component=integral to membrane; Biological process=calcium ion transport
  Homolog annotation: Hit_ID=B6UEI1; Match level="QueryCoverage=100%, HitCoverage=18%, E-value=2e-39, Identity=96%"; Hit description =Vacuolar cation/proton exchanger 2
STQISMFVIPFCVVIGWIMGQEMDLNFQLFETATLFITVLVVAFMLQEGTSNYFKGLMLILCYLIVAASFFVHVDPDANEN

SEQ ID NO: 91075 - protein, 193 aa, Setaria italica
  Transcript Sequence Number=SeqID_25101
  Gene Ontology: Mol. function=metal ion binding; Cellular component =cytoplasm; Biological process=ubiquitin-dependent protein catabolic process
  Homolog annotation: Hit_ID=B6T6I9; Match level="QueryCoverage=97%, HitCoverage=90%, E-value=1e-69, Identity=70%"; Hit description =Protein binding protein
  Pfam annotation: Domain name=zf-C3HC4; Domain location=143-183; Score= 40.0; E_value=9.4e-09; Accession=PF00097.17; Description=Zinc finger, C3HC4 type (RING finger)
GGAAVCCFCLPWPFVYHGVDSGSAARHRGDTRVAPDRGRIPLAACTSAGQVDSMDTFRAPPRPLPYDDPRFSPPMVQHPIVSGHDKSSTHFQKPGQLTERKNTDIGSTCTSQKVDGSSVKHHLGGSRIDGIQVSDSSDNEDDCPICLEEYGYENPKIALQCNHNFHLSCIYEWMERSQACPVCAKVMLFNDDE

SEQ ID NO: 91076 - protein, 91 aa, Setaria italica
  Transcript Sequence Number=SeqID_25102
  Gene Ontology: Mol. function=transferase activity
  Homolog annotation: Hit_ID=Q8H9E7; Match level="QueryCoverage=89%, HitCoverage=37%, E-value=3e-17, Identity=48%"; Hit description =Glutathione S-transferase
AELLGHLRRLEAVLGNKAFFGGDEFGFLDVAFVPFSAMFYGYEQHGGVDMEAECPALLRWVRRCAERESVRDVLPSGLDMYEIHREFYQIE

SEQ ID NO: 91077 - protein, 88 aa, Setaria italica
  Transcript Sequence Number=SeqID_25103
KKKRNWEDNQQFSITGTSQQEIKASVQKHWPQAFNCQGTQITEIAIVQDWNIKKDRDWHIFPVQVQAEGGCNLIPFHRKRRVAIYGLA

SEQ ID NO: 91078 - protein, 614 aa, Setaria italica
  misc_feature (411)..(411): Xaa can be any naturally occurring amino acid
  misc_feature (414)..(414): Xaa can be any naturally occurring amino acid
  Transcript Sequence Number=SeqID_25104
  Gene Ontology: Mol. function=protein serine/threonine kinase activity; Biological process=protein amino acid phosphorylation
  Homolog annotation: Hit_ID=Q6K2G4; Match level="QueryCoverage=100%, HitCoverage=65%, E-value=1e-119, Identity=37%"; Hit description =Putative leucine rich repeat containing protein kinase
  Pfam annotation: Domain name=LRR_1; Domain location=103-125; Score =13.1; E_value=0.96; Accession=PF00560.25; Description=Leucine Rich Repeat
  Pfam annotation: Domain name=LRR_1; Domain location=127-149; Score =14.3; E_value=0.5; Accession=PF00560.25; Description=Leucine Rich Repeat
  Pfam annotation: Domain name=LRR_1; Domain location=151-173; Score =18.3; E_value=0.032; Accession=PF00560.25; Description=Leucine Rich Repeat
  Pfam annotation: Domain name=LRR_1; Domain location=175-196; Score =8.8; E_value=6.3; Accession=PF00560.25; Description=Leucine Rich Repeat
  Pfam annotation: Domain name=LRR_1; Domain location=201-223; Score =11.0; E_value=2.4; Accession=PF00560.25; Description=Leucine Rich Repeat
  Pfam annotation: Domain name=LRR_1; Domain location=226-248; Score =7.2; E_value=13; Accession=PF00560.25; Description=Leucine Rich Repeat
  Pfam annotation: Domain name=LRR_1; Domain location=250-272; Score =8.4; E_value=7.4; Accession=PF00560.25; Description=Leucine Rich Repeat
  Pfam annotation: Domain name=LRR_1; Domain location=274-296; Score =20.2; E_value=0.0084; Accession=PF00560.25; Description=Leucine Rich Repeat
  Pfam annotation: Domain name=LRR_1; Domain location=298-320; Score =17.2; E_value=0.068; Accession=PF00560.25; Description=Leucine Rich Repeat
  Pfam annotation: Domain name=LRR_1; Domain location=31-53; Score=6.8; E_value=16; Accession=PF00560.25; Description=Leucine Rich Repeat
  Pfam annotation: Domain name=LRR_1; Domain location=322-344; Score =8.4; E_value=7.5; Accession=PF00560.25; Description=Leucine Rich Repeat
  Pfam annotation: Domain name=LRR_1; Domain location=346-368; Score =18.2; E_value=0.035; Accession=PF00560.25; Description=Leucine Rich Repeat
  Pfam annotation: Domain name=LRR_1; Domain location=370-392; Score =9.8; E_value=4; Accession=PF00560.25; Description=Leucine Rich Repeat
  Pfam annotation: Domain name=LRR_1; Domain location=394-415; Score =6.1; E_value=20; Accession=PF00560.25; Description=Leucine Rich Repeat
  Pfam annotation: Domain name=LRR_1; Domain location=440-462; Score =16.7; E_value=0.097; Accession=PF00560.25; Description=Leucine Rich Repeat
  Pfam annotation: Domain name=LRR_1; Domain location=464-484; Score =3.9; E_value=54; Accession=PF00560.25; Description=Leucine Rich Repeat
  Pfam annotation: Domain name=LRR_1; Domain location=487-510; Score =3.2; E_value=75; Accession=PF00560.25; Description=Leucine Rich Repeat
  Pfam annotation: Domain name=LRR_1; Domain location=55-77; Score =11.1; E_value=2.3; Accession=PF00560.25; Description=Leucine Rich Repeat
  Pfam annotation: Domain name=LRR_1; Domain location=6-29; Score=6.5; E_value=17; Accession=PF00560.25; Description=Leucine Rich Repeat
  Pfam annotation: Domain name=LRR_1; Domain location=79-101; Score =12.0; E_value=1.5; Accession=PF00560.25; Description=Leucine Rich Repeat
  Pfam module annotation: Pfam domain module=LRR_1::LRR_1::LRR_1::LRR _1::LRR_1::LRR_1::LRR_1::LRR_1::LRR_1::LRR_1::LRR_1::LRR_1::LRR _1::LRR_1::LRR_1::LRR_1::LRR_1::LRR_1::LRR_1::LRR_1; Domain location =103-125::127-149::...
  Pfam module annotation: Domain location=151-173::175-196::201 -223::226-248::250-272::274-296::298-320::31-53::322-344::346 -368::370-392::394-415::440-462::464-484::487-510::55-77::6-29::79-101
LFNMSQLQALAVGWNNLSGPIPGNESFHLPMLQVLSLPENQVNGPIPLGLSACQNLEALSLAVNNFTGTVPSWLATLPNLTKIYLSTNDLTGKIPTELSNQTTLLGLDVSENNLEGEIPPELGNLRNLRFLGLANNQIAGVIPESIGNLSNLEIIDLFGNRLTGPVPVSFQNLLNLRRIWFNGNQLSGNLNFLAALSKCRSLDTINIANNTFTGMLPPYMGNLSTVLQYFIADYNMITGSIPSTLANLSNMLVISLSRNNLSGKIPTTISAMKNLQELNLSSNSLSGTIPAEISRLTSLVYLNLGGNKLSGSIPSSVSSLSQLQVLALSQNSLSSTIRTTLWHLQKLVELDLSSNSLSGSLPADVGKLTAVANMDLSSNQLSGEIPTSIGNLQKLTNLNLSSNLFQGFSSXIEXIRSSPAYSRKKNFQGSLPDSIGKLLSIEELDLSSNMLSGSIPETMTNLSHLANLNLSFNSLDGQIPERGVFSNITLLSLMGNDALCGLPRLGIAPCQNNHDQSRLKPKLLKVILPAILAFFVLAACLYMLVRVKVNIGRKMTVPSDTDLHKYQLISYHELVRATSNFTDDNLLGAGSFGKVFKGELDDGSVIAIKVLNMQ

SEQ ID NO: 91079 - protein, 99 aa, Setaria italica
  Transcript Sequence Number=SeqID_25105
SILNTYLASIIELALLCSRAAPEERIPMNDVVVKLNKMSCTGVHTAGAGGPATYAELLSVRSKRCLHQTLATKDGNVALLSMFWLGHWPYINCCTREIN

SEQ ID NO: 91080 - protein, 337 aa, Setaria italica
  misc_feature (193)..(193): Xaa can be any naturally occurring amino acid
  Transcript Sequence Number=SeqID_25106
  Gene Ontology: Mol. function=protein serine/threonine kinase activity; Biological process=protein amino acid phosphorylation
  Homolog annotation: Hit_ID=Q53QB4; Match level="QueryCoverage=94%, HitCoverage=35%, E-value=1e-109, Identity=59%"; Hit description =Leucine Rich Repeat family protein
  Pfam annotation: Domain name=Pkinase; Domain location=27-312; Score =116.9; E_value=6.5e-32; Accession=PF00069.17; Description=Protein kinase domain
  Pfam annotation: Domain name=Pkinase_Tyr; Domain location=27-312; Score=86.5; E_value=9.7e-23; Accession=PF07714.9; Description =Protein tyrosine kinase
  Pfam module annotation: Pfam domain module=Pkinase::Pkinase_Tyr; Domain location=27-312::27-312
MTVPSDTDLHKYQLISYHELVRATSNFTDDNLLGAGSFGKVFKGELDDGSVIAIKVLNMQHDLASKSFDTECRALRMARHRNLVKIISTCSNLDFRALILEYKPYGSLDDWLYSNDGRQLSFLQRVGIMLDVAMAMEYLHHQHFEAVLHCDLKPSNILLDKDMIANVSDFGISKLLVGDENSITLTSMPGTVXYMAPEFGSTGKASRASDVYSYGIVLLEVFTRKKPTDAMFIGELSLRQWVSQAFPHELSNVVDSNIVLDELNNGIEDANSLPENFSILNTYLASIIELALLCSRAAPEERIPMNDVVVKLNKMSDYIRSFKSDYSSQFPTSTTSG

SEQ ID NO: 91081 - protein, 74 aa, Setaria italica
  Transcript Sequence Number=SeqID_25107
FLACFSSFILFQGEGIVPRKSDYQNVIVFQVIIIFCLHPCHLRLFMCGWLTGRGMSARTKRSLSSFPFAPLKIT

SEQ ID NO: 91082 - protein, 78 aa, Setaria italica
  Transcript Sequence Number=SeqID_25108
ESLLLTSEPSNVLHLHVIFNGAKGKLDNDLFVRALIPLPVSQPHMNNRRWHGCRQNIIITLVYLSKPFFPWPATSRWW

SEQ ID NO: 91083 - protein, 108 aa, Setaria italica
  Transcript Sequence Number=SeqID_25109
KPSFNLANDKSGYVRLEYIKCGQAREADGRMPGHAGSRSHIQLATIYVVEHLSQVISTQVIWLQIHTETSLLLTLNPCVPFEAFLSLASNIKMVVSTNLFTRDLPIHK

SEQ ID NO: 91084 - protein, 83 aa, Setaria italica
  Transcript Sequence Number=SeqID_25110
QACIWKPSFNLANDKSGYVRLEYIKCGQAREADGRMPGHAGSRSHIQLATIYVVEHLSQVISTQVIWLQIHTETSLLLTLNPG

SEQ ID NO: 91085 - protein, 96 aa, Setaria italica
  Transcript Sequence Number=SeqID_25111
LPRELAPRVNSSPAGQVAAGALPCMVAVPPPYVTGRPAHTVAPARSAHPYGGIVDREQAGFKETSTARMQPDHSLTNWPVHYQNAYRICHMDFSNQ

SEQ ID NO: 91086 - protein, 768 aa, Setaria italica
  misc_feature (429)..(429): Xaa can be any naturally occurring amino acid
  Transcript Sequence Number=SeqID_25112
  Gene Ontology: Mol. function=structural molecule activity; Cellular component=nuclear pore; Biological process=nucleocytoplasmic transport
  Homolog annotation: Hit_ID=Q2UY13; Match level="QueryCoverage=97%, HitCoverage=57%, E-value=0.0, Identity=51%"; Hit description =Nucleoporin
  Pfam annotation: Domain name=Nup133; Domain location=110-621; Score= -86.8; E_value=5e-06; Accession=PF04044.6; Description=Nup133 nucleoporin
SRKLVEPQERSLSRKGSCNEAVAEEKRRTQVFSASVAPRRVSSEAWSAGERQRPPLTGIAQQAVVDEESEMLLSRLFHDFIISGAVNEALQKLRDAGAFDKEGEMNIFVRMSKSIVNTLAKHWTTTREAEFLASTIVSSLVEKQQKHEKFLQFLVLSKCHEELTSKQRAAMLTIMEHGEKLSGMIQLRELHNALIQQRSSTHLSPQLKTQATGALWNLIQLVGEKARRNTVLLMDRDNAEVFYSRVSDIEDLFYCLSHQLQYIISREEHPSVQMQRALELANACSTLVHAALHYRKEHKEWYPSPEGLITWNSHLVVRSGIWSLASFVMELLGEFGAADMTMKSNLWSQLEGLTDILLEAYIGLLTAKFERGDEHGVLVQEYCERRDELLRSLYNLAKQIVEAKYQESRDGKDNLDLKESIFREVISPXILATAKRHEGYQTLWQICSDLNDSVLLRSLMHDSVGPHGGFSFFVFKELVNSRQYSKLLRLGEEFQEELASFLKDRNDLLWLHEICLNQFSSASETLHTYALRGSPDEDASVTTSRKPLSFAERRRLLYLSKIAATAGKDIDYEAKVARIEADMWILKLQEEIVQHDPEYAQVKYTTTLLDPSELIEMCLKRDQELSLKAFEVFASTSSSFRSSNRGLLEACWTNATNQDDWLKLSQASTSEGWSDEVIQESLQGTVLFKASRLCYSPDSVVYDGTFEDVLPVKKEDVHLRGLESKCLSVEEVLMQHKDFPDAGKLMMTAVIMGKEVSYTAAEPVEMES

SEQ ID NO: 91087 - protein, 68 aa, Setaria italica
  Transcript Sequence Number=SeqID_25113
  Subcellular localization annotation: CTP_CleavageSite=63; ConfidenceScore=5.53e-01
STPPSPPPPAAGSARLGFASPNPLLALALAAGIPAVPAARGAFRNRDGRLGSRRSRRCAPPPLAAARG
